United States Patent Application Publication US 2011/0183924 A1 - sequence listing, part 56

SEQ ID NO: 174816 - DNA, 366 bp, Homo sapiens
gaagcagacatttccgcgagggtttgtaaatatcttcattgcttttgtctaattgcaaaaataatctgtcaccatgctcttttcaaaaatttccccaaataccgaaacatgtaatataagaagtgaagccttttctgccatcccagcccccgtagacacttcagaggctctttttctgtatgtgtttccatacctacggcactttggttagcagcgtgcatgcctacagaggtgaggattccgagctgtttagaagtgtggccacagagctgtggccacagctgggcttgagtcccatagggctgtttacctgctcagcctccccttctgtaaagtgtgggtgatagtagggcttgatcctgtggg

SEQ ID NO: 174817 - DNA, 487 bp, Homo sapiens
ggtcaagtaaagattacaaggctggaattccagcgaagctattttggcaaatactgacctacatgattgaaggggtccagaatatgccaccccaaaatatgccactttgacatacggcttattttgggctgcaagcgattgaaaatgagcagatgcaggatgaatcctctgctctctttttctacctgaaaccagggcgtaacattccctttgtggaaggtgttcctcgactcccatagcaggaagtgtagagcaactcttaccatcaaagatggacagtcagcattgagatgagtctgcataaacaaactttttttttttaaagtttgttccattaatctcccccatgtatttgctagtcactttcccacaatttatcatccctttcctttgttaaaatgatatatacgtccctgagcctaatcactttgcatttcactacttttctgtgaactcctatgcacgtaaaaatataaatacatttgta

SEQ ID NO: 174818 - DNA, 250 bp, Homo sapiens
ttcacttacagttttatctttgaggagctccaaagacctttttagttcttacaacaggaaaatcagggtttcgtgactagagtctaccaactaggataacaggacactgtggccgcagcgatggagccgggcgtcctaatccagctggaaacataggctctaggatggaggagaggctgtccacatggccctgcccctcctcatcccctacagccatggggatgtggccacagattgtcctggaggccat

SEQ ID NO: 174819 - DNA, 676 bp, Homo sapiens
ggcccgtcttagcctgccaaagtgctgggattacaggcatgagccaccgcacccggccgatagtgttagattttaacccatacggtaaaataaatatccatgagtccatactgacataaataattgaattaacaagccaggagaacggatagctcttttttgtagaagaactccagttacttaatgtataagaaaggaggtaactagaatatcaccaggaggcaaacagcacagtaattgttatagacaagatccactgatggatgtcagaattaatgggtaaaagtttgaggaaaaacacgatatttacgtagtcaacaggatatttgcgtagtctcaaagtatcttccccaatatatctattaattacaaaacaaaatgaaaagagtgtctttaccgtggaagccatgagaagcacattgtgtacagtatgaaaacgggaagaaggcagagcaccaccttcagcctcagctgggaaaatgcaggttgattgtcacaaaaaatactacaaaaagccttcgctgctctgcctgtgtctgtgaatgaccacgaaggtgctacgtgtgtttgattttggggttacaaataaattttagcaagtaggcacgtttacaaaaatggaataaataaatagtaatgatggactgaacttattatctcgccctttatagaaaag

SEQ ID NO: 174820 - DNA, 226 bp, Homo sapiens
acattatgtaaattatgtatgtacttttatgagaatcagtttttaaagatcacagtattcacacttccaattaaacagagtgactcactactgaatttatgaagaaacttgggtagtggtgagttgctttgtttacttgggataaatgtgaatgtactaataaccagaggtaaatcacaagaaattttccatatggtatggatatcaccattattaggtgaattaa

SEQ ID NO: 174821 - DNA, 371 bp, Homo sapiens
caaaatatttgccacttcttcaaagaaaaggtgataacataagtgcttaacaagtcactggtcaaaaataacactggccacccatcatggtccaaaagccagtgtccctgaagtgtgggaaaacacagtttcattatgagaaatagccctcatcactacttcatttattaagttattaaaccatttattcaactcaattgctacagggtatctacagccaaaggtaataaaacaaatatattaagcacacatttctcacagtattgaataaagatgtaacaattttaaatgtctatgaaaacctgtaggctggacgtggtggctcatgcctgtaattccagcactttgggaggtgggtggatcacccgcgg

SEQ ID NO: 174822 - DNA, 482 bp, Homo sapiens
gtgcaccttgggacaagtgtgtgcccttgacattacaagagcagtggtggggaaagctagctccctggcccccaggctgagaggaaaagaatcccggattaagccagaggctgagttctctgaaggtctggggcactgacaggggctactgggcagagggccagcttagaggagggtgtggtctgaaggtgtgggtagggcaaggcctgactccactcagtgatgggtccccagtgattttaagtgatttaagatgggtccccacttattcccaggaagccacccaagctcagaactgatctgggaactagggagtttctctttgtaaatttccttcacaattcccagctgcagcagctgaacctttgaagctaggcttgatatttgatttttgggaaacatcaaagatcactcccattcaagtgcaacaaaccagatagatggtcagtagtcacagaaagccttagctcatgttaaccaca

SEQ ID NO: 174823 - DNA, 391 bp, Homo sapiens
tgcattttctcccctcagcacagtctcatttgggaagaggaaagggaaacttgcacgcatgggccggtcagggcactgagaggcctttctgctctggcactgcctgccaggcgtgcacctcagggggcccgtccgctctagcaggcaaatggggcgtgttctctgtagtcagaggggctgtgagaagacaggaaagcgagcttagtgggtatcaggcaagggggtgaaattgggttgtgagatgagaaagcagcgtcattgcccttcctggtaccttcttggccatgctgaccttcctcccgccctacccccggcaacccctagtccactctccctttgtataattgtgtcatttcaagaatgtcacgtaaatggaacgatacagtgtgca

SEQ ID NO: 174824 - DNA, 543 bp, Homo sapiens
agaggaatctagggggatgcgtggactgcagggaacaggttgcacctgagcggcatcctgagttgcgatgggttttggagggagggactgtgagttgagaagacacaggcgagcatcctcggctgcaagtgcagcacacccagggcagccctgggcttcagagagcgcacactgcctctgaggcgctgcccgtgctgtggtcctccggaagcacagatggagctagaaaaaagagctctaggtagccaggcgcagtggctcatgcctgtcttcccagcactttgggaggccgaggtgggagaatcgcttgaggccaggagttttgagaccagtttgggcaacatagcgtgaccccatctctataaaaaagccaggtgcagccaggcgcactgacccactcctgtaatcccagcactttgggaagctgaggctcgtttctcctcactgctttcctgtcttgagcacaggagttcgagaccagcctgggcaacacagtgagatcctgtctctatttaaaaatatacatatatatatttttaaaaa

SEQ ID NO: 174825 - DNA, 476 bp, Homo sapiens
atcactagacatcgtactacacgacacgttctacgttgtagcccacttccactatgttctatcaatagggctgaatttctggctcatagatggctccttctcactgtgtccttatatggtggaaagggtgaggatgtcccccgaccaatgttttaggagggcacttattccattcatgagcactccaccctcaagtcctcctcaccttccaaaggccccacctcctaatacgatcaccttgggggttaggatttcaacataagaattttgaaggggacgtagacactcagaccatagctcaaagcaatagtgactagcatgggttagcatcataaacataaaaaaacaagagagtgcagcaaacatctttccttaacttaggttcttccagatgccagtgggaaaagggtacagataacatccagcttcttgggattccttttaaaggaaatgtggaaatatggaagaaaaaaagc

SEQ ID NO: 174826 - DNA, 298 bp, Homo sapiens
agggaccacatagttctcacctgattctcttggaatcctgggctgtgtacctggaggtcacagtgtgaagaatcccaggctcatggagaggacattgctgtgctgtggctgcagcctcagctgaagtgtccctgacaaggaacattaactgctagacctgtgagcgcctcccagtgattctagccctcagaggccaagtcgcctccagccaccaaatcttcctgaggcctcagacgtcacagagcagtcaggtcatccctgccatgcccctcttcaatctcaacccatatagttcaca

SEQ ID NO: 174827 - DNA, 128 bp, Homo sapiens
ctgctttaagcatagagaacattaaggtttaagtgaggactgcatttgctctgaagaattgaatggcagaggagttggggtgtttttatgttagtccctttaaaaatgataagtgattgttccccgct

SEQ ID NO: 174828 - DNA, 387 bp, Homo sapiens
attattctagaacacagatatgattatattactttgttacttttatcctccatagcatcttcatagcaattctttatattaagtggtagtatttctgttttatagaggaggtaattgtcttcctgtggcagatagcctcaaggtgaaatgaacactttccttactcgttttaggctcagtaattacccttctaaagccctagacctgggaaagggacagtccagtgccttgggtccctatggacactgtaggtcttggttgttgacagttgcatgtgatgaggatgttcctctaggcaaaataatgataaaaaccacaatttatcgtgtttacatgtgctcaggcagaacatatattatttcatttaatttttccaacattcttgga

SEQ ID NO: 174829 - DNA, 256 bp, Homo sapiens
gcagctcggtaccggcactctagtccacaggtgggcttcacagaggggcttgcaaaagggtcagcttctggggtatgattctctggcccaggcagctgtatgcaggcaaggtgggaattttagtttctctgtctagaaggctgtggacaggttatagataggtcaaggctccaaagtcacagggagatcactttctgggcttatgactgaggtaggctctaccagatgttctcatacccaaggctgactagagtgg

SEQ ID NO: 174830 - DNA, 615 bp, Homo sapiens
gagttgataaaggtgaagatactatttgcagcagagagtagcaacactggatatcactatgaatgtagactgttcttcccaaaattcatttaaacgtgagattatgctattgattaataaactgcatgaatctgtgctgtccaatatacttgcgattagccacatgcagctactgagcacttgaaatgtggttagtccaaattgagagttgcatataggatacataccagattttgaaggcttagtgtagaaaaaagaatgaaatatatctcattaataattttatatttattatttttattattttttttgaggtggagtctcgctgttgcccaggctggagtgcagtggcacaatcttggctcactgcaacctctacctcctgggttcaggcaattttaatgcctcagcctcccagactgaggagtagctgggacaacaggcacgcaaaaccatgactggctaatattttttttgcatttttagcagagacagggttttaccgtgttggtcagactggtctcgaactcctgacctcaagtgatccacctgccttggcctcccaaagtgttgggattacaggcatgagctacctagtctggcctagtaatttta

SEQ ID NO: 174831 - DNA, 503 bp, Homo sapiens
aacgaatggattatctcatgtcctttgcttttatatgtgagcgaagatgaatgttctcttctgttttccatggcattgctgtgatggactatcatgtaacagaacatgctcgcttataaacagtgcttgtctccagtagagtgtggacgtttgctgccacatggattacctacttgtcgacgatcaagacttctgccacgaggataacaagcatttttttgtttcctcttagctctgacttctggcttaagaataacgcacattgtttgcctgtgtttgtggactttgtataaatccacttgctgctgtgataatgtcttgctgaatgccagcattataattttaaaggataaattaatctgtgggttttaaacgttttagttcagacctgttttgttttcacttaaggctctgtgagaaagagaatcaacctagctcctatgttatttcaactggaaaatcgtctctaaatcacaataaattatctttgttttaaaaatgtg

SEQ ID NO: 174832 - DNA, 452 bp, Homo sapiens
  misc_feature (266)..(266): n is a, c, g, or t
agttctgccacagtgggttcttctaaagccagctcccaggacaggggccattctttccttatgaatgaccaagaccatactggctatttcaaccgactagcgttttcttcctatttataatcaatagcatcattttcagcatcctggttcttcttttttatgtaaaataaaataaatagcgtccctcaaatcacactttttttaaaatcacaccttctttaaatctcatacaccatctatatgcaggactcagagatcatcccccnttagccccaggcagcttgactgtcatttggataaagctaggaaagaatgaaggatgtaattgggtgttagtaggtatgagagctctgaaggagaggtgcctgcaaagttccaggcaaagtcagcctccaggtaggcagccagagtccagggaacacatatttgctgaaggtttgtagaagtccatg

SEQ ID NO: 174833 - DNA, 176 bp, Homo sapiens
aagcatcatattaacttcggggatagagagagagacgagcaatcaaacactgtcatccttcagccattttggatgaatctctgagtcttggcaaaaatcttggagtgccgagcgtgcaacagagaaattagtcataaacagatgcaaacctcccgagcagagacatatttaactag

SEQ ID NO: 174834 - DNA, 823 bp, Homo sapiens
caggcacctgccaccaaacccggctaatttttttgtattttttagtagagatggggtttcactgtgttagccaggatggtctcgatctcctgacctcgtgatccgcccgccttggcctcccaaagtgctgggattacaggcttgagctaccgcactctatggttcttttacacaaaatatttggcacaaagtcagttataagacataagaaggagcaagcaaatgtcgctcttggccaagagaggaaatagtcaatagaagtagacacagagatggcccaattttggaattattaggcagggtttaaaattattatgctaagtacattccaggacttattggaaaaaatagataacatgcaggaatagatgggaaatttgagcaaagagatgggaactgtttttttttttaaataggggaaaggaaatatgtctcgggagtctggaaagtcaaagagatcagtaggcaaagaaaaacactgttgaatagagctgtgatttctgaacccagagcagtatctgcttactctctgccatgcttttttttatgccttattgtgtatgtgtggttcatagttgttaattataggcaaacaaataaaaagcaaagccaaaaaaaaacaaggaaaaatacaaggcctgcagtcactggctggagcaatcagtgacccaagaagctaggctcatagctaaatcctggatttacttccttttccttttctctagaaacaagtcttgtgatataggtacatttgtgatttggtacaatccatgcatcaggggatgttctctttgtcttttgtccttagctttgtttggagagg

SEQ ID NO: 174835 - DNA, 581 bp, Homo sapiens
tttttctgaatgaataattgattataaggtagtgaagagggaggttatatctgaggtccagttgacatgagggaaaggtcttaagacctttaagacatttaagaggaaaaatgagcccaaaatgcatgtgtttggaaggcccacagctgggcacagccatgcatgttcctcacgtccaccataggtttatgctgcctgaccccttgggtctttgctcatttcccttagtttccctagtccattccccatggggagctgggacccttctggatgacctcttctctgaggcgcccatctcgtgctcccagggagcactcccatctcctccctcccaggggaagtacacattgccttatctccatgtgtcttaggatccttcttgtccttacactggtgtcttcaaacgacatgtcctaaaagtaaatgtgggtaagttgaatgacctgagcatccattcctcagctattcaaaaagtaggggtagtgccacctatcttggcagtgtgttgagggtgcccagcacgtaccttgccatccctcgttctgtaggctctcacttccagttcctcagatgaggtacag

SEQ ID NO: 174836 - DNA, 332 bp, Homo sapiens
ctctccagtgtgggtagtcctcactcaatctattgaaggcctgaatagaacaaaaggctgaataagggagaagttcctccttctgcctttgagcaaggacattggtcttctattttcggactcagacttggactcagcaaatggtggactgagccaccattggctctcctagttctttaagcctttggacttggactggaactataccattagttctcctgggtttccagcctacagatcttgggacttctcagcctcaataatgtaaaccatttacttagaatcaatttctttcttttctttctttctttctctctcttttttctttcttt

SEQ ID NO: 174837 - DNA, 287 bp, Homo sapiens
tttgtattaataatgaaaatgaatactttcagtggttaaagtagttgcaagtgaataatactaatcaacagtctgttatatgacatcaaaatgatgaaaatataggcaatatataggtgtttgggaattgaacctgtgtatggatttccaaatggtaaattccaacaatttaataaaaattctctttgttaatttctactttttgtcttaaaattgtctacctaaatataaagttattatctaaatacagatacctaatgtagccaagatgatcaatctaaaatgat

SEQ ID NO: 174838 - DNA, 443 bp, Homo sapiens
cccaacctcgacacagatacacctgcattccccgctgccaccagcagctgtcatctcaggtcctggcattcctgggccaactaagactgccagcttcccagatcacctcatctcacccacatctgcacaacactgtacaacattcctttctccagctcccactcctcaagtgttccactgggacacaaatcatacattacaaagaacaacatgtgtgcagctacaggagcactaaaagtgtggcaaagtccccattaagctactcctcttcctagctcacacttccatttctcagttttgagacccaattccatgggaactgcagatgtaccaggtaacccaagtgtgtcctcgcaggccccccacaccacctcctcagagcagctctctccaccccaacccagccccaaccaggtgccgatgaatagcgagggtaccgagct

SEQ ID NO: 174839 - DNA, 200 bp, Homo sapiens
tatgacggtttaaagaatagaagaaaatgtgttgtagtttttgggaggaaagagatccaaaggaatgttctcatagcactgaagagactttgtaggcatcagaggaaaagctcttcctttaaggtggaagaaaagaaagagggttgataaaaacgtagtagaaatgtgaaatggtaaaatggttgattggacaagtggag

SEQ ID NO: 174840 - DNA, 300 bp, Homo sapiens
gtggtggcacgtgccagtaatcccagctacttgggaagctgaggcaggagaatcgcttgaactcgggaggtggaggttgcagtgagccgagatcacgccattgcactccagcctgggtgacagagtgagactccccgtctcaaaaaaaaaaaacaaaaaaaaacaaaaacttaaaatcaatctgtttctaattcctccagacttaacacagtattagccatttgtgccatggtttgatttctcaaagaatcagattttagagccaaaggactctagaagctcacacggctaaagttataa

SEQ ID NO: 174841 - DNA, 480 bp, Homo sapiens
tcagtaacagtgtgcagctgagggatccaggctggtgggaagctctgctccatgtcttctcccagacacccatattcagtggctcttactcccatacatgctcaacatatggcctctatacctggttccatgggaactacaaagatgttattttccaagcaactttaaggaggcgaggaagtgccggcaagtctgatctttaaaatggtgactaaatagtagtgtggctatagaatttattgtctaaacccgagcaactttgaggggaaaaggggagtgctaaacatacttatatactttttgaaatatttattattagctaataatttatttttattgtatcggtagctctaaattgttctaaagcaaattataaaatagttttaaaaatagcttatatttgtatgcctacttccacagaaaggaaactgttggctgtgttgtgtgcatccagagaggattaagaataagattggttat

SEQ ID NO: 174842 - DNA, 360 bp, Homo sapiens
ctgatgacctccaaatccacttgtaactatggagcatccgcatctcttgaaattctgtttttctttggcttttggggacacctctcttccttggttcttgttctgtatttctggctgattatcttttaatcttcacctcctttggctgccctttgaaatgggtattcctggaagtccttagtttcctcctttactcactctattcacagttttggggcattgataaccaaaatcatgacttcagtttccatgtagacatggatttgaaaacggtgggattagctctccaaagtgcatatgaggtccttatctgtcatctgattttcagacacacgtattaaactgcctgctagactttca

SEQ ID NO: 174843 - DNA, 596 bp, Homo sapiens
cgggctggaccaggcttagggctgggctctggtccgcaccccacactggccccgtgtgtcctgtgaccgttctgcctacggggcaggcctgagccaccacaggatggcagggtctccagggtgcagggcccgcaatgcttcaaccctcccacgaccccagcaccttcagagaaaacggaccctcgtgccgagtgaagtggttcaggcgaacgttatcaccacacgggggactcggcggcttctgccccaggcctcaaaggagaggggatccagaattctctgtctcaccccctcagcccctgcccttgaagcttctgtccccaaggctgtggggaggaaccagggaagggctggcgcgtctgctgtgcgatcccaggtgctcgtgcctcgctgagctcagcccctgtggcctcagagctgcaggcccctcccgggtgtcagagcactgactggaaaggccccccacatccctgccctctgctgctccccatcgtcgcgggggagaagctggaactgcacccgggcgaccgggatagggggggagcaggccgagggtgccagaaagggggggaacacaggggggagagaggggcgga

SEQ ID NO: 174844 - DNA, 196 bp, Homo sapiens
tcatgagttctaaggtagggtgagaaaaataaccgagagttgagcagtgacggaggaagctgcaaagaaaacgactgctcagggagaggctggccaggggcctgtggctcaggggactgagaagaggagctctctaggcatctgaattgaggttgcccacaattggttgcaagatcgtggctggccttgatggaag

SEQ ID NO: 174845 - DNA, 504 bp, Homo sapiens
tctagattagcaggatccctgtttttctcccgcttgcgagcttttgggagtgtgctgaatctcagactgcaatagataaacccaagagggacaggcaccagtagcctgagcttgctttctcccctggctcatgggaatcaagcagtagaaatttttagtgagtgttgttttccatagtatgcttactagttgtgtcttcctgttttgttcttggtgatttgaagaaacctgtttacaaggtaagggactgaaacaaataggtgacaggaaaaagagcagcaggggtacgagctggaggagtaagtggcttggcttgctctctttcagaatggagggctgtatggaaaggaggggtagtgttcttgaagagtgttggggtttaaatctagggggaccgtgtcttggcattgattgaaactcctggcttaacatcaccccgaaactgttagttggactgaacatgacatttggcagtgcagttaaaaacacttcctgcttatctct

SEQ ID NO: 174846 - DNA, 243 bp, Homo sapiens
gctggtaggcatgtgagaagtgaaccacagttcgttgagttaacgttcttaccggcaatcactaattgctttatgtgtctcatgttggcataatcttgctctagttcaccacctgagtccttctggactttttactggctagttcaaattatgcaacagttgataccaacgacatgattgaaaaataggaattgattacaacacagatacttagaactaaaccctagcaactttcaaactcat

SEQ ID NO: 174847 - DNA, 877 bp, Homo sapiens
gtcgtcgtcccccgatccccgacccggaccccatccccagggcctcgaccaccgacctgggaccccttttcccgagcctcgtcccccgatacccgacccggaaccccttccccagggcctagaccaccaacccgggaccccttttcccgggcctcgaccctcgatccccgacccggaaccccttccccagggcctctaccaccgacccgggaccccttctcccgggcctcgacccccgaccaccgaccgggacccttcccaggcccccgacccccaacccgagatcctttaccccgggcctcgaccctcgacccgggacccctccccccaggcctcgatccccgacccccgattcgggaccccttccccggggcctccatccccaaatctcaacccggtatgccttccccggggcctcgacctctgacccccaaccatggacccgggacctagactcccgacccaggaccccttgcccagggcctggacccccgaccaccgacccaggaccctttcccccgcccctggcactcctcagcgtcaggcgccctttcccgccagctcggtaggggggactgtgcgatgcctgttcggcctttcgggacttggaatgtcgggtcagagggcaccagaaaaagtgacagttgcaccccctgccccaaacagcatcactgcaaatcagaaggactcagacagaaagcgctccctgagtgccaggccctggtcacagcagctctttgcgtccattctccatgtggggaagcagagataccctgttccagttgaaggtatgtaccgaatggccgttcaccccagccctgttctggtgaggacagatagtataagccacgctcactcagagccacagaaacagtcg

SEQ ID NO: 174848 - DNA, 695 bp, Homo sapiens
tttcctccctcactcctggcttccattgccttcccccaggccccagccctggttccagaatccctctgaccactcctcttgtgctcaggagggcagaataactgcagcctttccctgtgccctgccaggctggtcccgggccccctctcagcccactcatccagggatgcagctctggccttggcccacccccatcagagggcctgtggccctgatcaccgcactccccactctgtgaccagacgttctctcctgagcatcgctgaccctgcagctgtccaaatagagcaagaagtgaatgttctctttggggcacagctggactggcagccctgcagggtcaggtgagctgccagtcctgggtgtgttctcgggggtgggggtgggaggatcacgtcctgggctgagatcccttcagctcctctgggtctcctctcaggtgccagaatctttctgggagctgagcctggctgggcagagggcgaggagcccaggattcccctttccgtgactttggaggaacgaggttcctgagggctggcacagccactccctgccccttagaggctccgggctgcctggtgatagctcccagggacctgcaagctgacaaacaaagtctatacgagccagagctggggtgggaggaacccagtgggcctgggggaggtaaagcagcagcagctgctgtagct

SEQ ID NO: 174849 - DNA, 322 bp, Homo sapiens
ggctaatttttgtatttttagtagatacctggtttcatcatgttggccagactggtctcaaactcctgacctcaagtgatccacctgcctccgcctcccaaagtgctgggattataggcataagccattgcgcctggccttgttctactgtttaatgccttctcactactccacttgactagtctaaaaaataaaaaaatagggccaggcgcgttggctcatccctgtaatcccagcactttggaggcctaggcgggaggattgcttgagcccaggaattcgagaccagttggggtaacatagcaaaaccttgtagctacat

SEQ ID NO: 174850 - DNA, 148 bp, Homo sapiens
atccccaaagaatagattcttgtcaaacttagccacattatcattattccacctaaaaattaataataccccctaaacattaccaagattcaactggtgttcagatttcccaaaacactttcaaattctttgcttttccacttactga

SEQ ID NO: 174851 - DNA, 486 bp, Homo sapiens
ggttgcactgagccgagatcatgccactgaactccagcctgggcaacagagtgagactcttaaaaaagaaaaaagaaataatgttctaacattctaaccttgtgccactttcttgatgctccccaccgcaccaaatattggtatttatcttacaggattcacctgtgatagcactcttcttggagcaggctgagagtagctatcattctctctacttacaaaatttgaaaagtataggggttattttacttgacctcaagggatccagaaagagatgcccactctccttccagagagagaaatagggatcaattcgaacaatgctggccaggcatggtggctcatgcatgtaatcccagaactttgggaggccaaggtgggaggattgcttgaggccaggagtttgagaccagcctggcaaaaacctatctctattaaaaaatacaaaaattagctgggcatagtggtgcatgcctgtactcccag

SEQ ID NO: 174852 - DNA, 449 bp, Homo sapiens
cgcctggatagctcatttacgaagactgaaaagagcccccgattatgcctcatatgactgcgatttcactttatgatctccatttcattggtcgttttttatttgcttttcagtacttggcaactcctatgtcgcactcttcttggagcaggctgagagtagctatcattctctctacttacaaaatttgaaaagtataggggttattttacttgacctcaagggatccagaaagagatgcccactctccttccagagagagaaatagggatcaattcgaacaatgctggccaggcatggtggctcatgcatgtaatcccagaactttgggaggccaaggtgggaggattgcttgaggccaggagtttgagaccagcctggcaaaaacctatctctattaaaaaatacaaaaattagctgggcatagtggtgcatgcctgtactcccag

SEQ ID NO: 174853 - DNA, 224 bp, Homo sapiens
ctgtgggcctatgatgcctgaatgaagtagaacaaagaaggtgagccctagggagtgtcctggttttctggctgaagcaatttccagactctggtaggggaagccaagtagtgcttagaggtctccgtgagttaaggagacaaaacttggaatttggggaggttaatttttacataacttaaatttgtggggcagagtaatggaagaaagacgtggatagacaa

SEQ ID NO: 174854 - DNA, 240 bp, Homo sapiens
cagcacttccacccctaggaatctacccaagggaaatgaaagcatgagtggaaacaacccaatatgtccatcagctagtagtggaatactactcagcaaggaaaaacaacttggatgaatctcagaaacagtatactgaaggaaagaaggtagacaaagcactatacatgtatgatttcatattatgaatgtacagaaaaggcaaatctataccagcaaatagcaggtcagtggttgtgg

SEQ ID NO: 174855 - DNA, 402 bp, Homo sapiens
attttttttggagacaatattagaggaaaaaacagaaactagaactgctgaccagtattattaattgaagagatactccttttaacttaaaacaattatagaaacctttattaatagggacttttttaaatgttttgatttcaggctggggtaatcctagtacttcaggggaccaaggcaggaggattgcttgagtccaggagttcaagaccaacctgggcactgcagtgagaccttgtctctacaaaaaattagccgggcatagtgaggtgcacctgcagtcccagcaactcaggaagttgtggtgggaggattgtttgagcctgggaagcagaggttgcagtgagccgaggtggtgccactgcgttccatcctgggtgacagagtgagaccctgtctcgg

SEQ ID NO: 174856 - DNA, 345 bp, Homo sapiens
gcccattccatgtgcatgtgaactctttatgatcctctttttgatcagaatagaaagaacatattcaccaaattaggagctgcatacgatgtatctgaggccatgttaatctgccgtagcaaagaggccagaacaggcacaggagctgcaattagggatagtagtgggttggctttggggtagtctactgttatcctcccagaatctgggttcttccggcacaagactggtgacttcaatgaagaagtgatgggcatctccccgctacccactcactcattctctagattagggctggcaagctatgagctgacctgttttataaataaaagttttttggaacac

SEQ ID NO: 174857 - DNA, 650 bp, Homo sapiens
aggaaggaaggaaggaaggaaggaaaatagtgaaaacatggaacagacacccagaagggaaagggtttggaggaggtcgaggtgccagaggcaagcattcatttgtgtaagattcattcattcattcattcattcattcatcgtcattcaaacattgtgttgaatgtccactgtatgctgtgccctgcgtggaatgctaatgatggatctaccctctagcaaaaggtaagtcctaccctagttcattcgtacaaatagaggtgcacacaatgtatcatgggagcacttattcctcaacaggcagatggatcagaaaaggattcctagaagaggcgacagctgagctgaggcttaaaggataacacagttaaccaggccacaggtggtgagtgtcaggccaggaaacagcacgagcaagggcatgggatacggcgcatgggagcaggagcacttttgagctgttggaggtaaaatgcaagttaggaagcactgagagatgagcctggcttagaggtggcagcgagggccttggtggtcattgtcagagttggagttttgtcttgtgagtgatgcggagccactgaagggtcttcaggggactgtgagagaccatacatcaccaggtcttcctctttcttctgccaaactct

SEQ ID NO: 174858 - DNA, 291 bp, Homo sapiens
ggatgagtgaagcgctctgatcagaggaaagagcaattaattcttttatttttttttaaacttttcatttagccctgcctaagcaaggccttaaaaagtttggttatgaactcacaactgtccctctccatgggaatctttagtaaaaggtgaaagatgtagtcgttctgacaagaaaccagagcttgagagcaattaattctgagagctggatttggggaaggttgtgcagagaaaagcggaaagcagtcgttttcagaccagagccatgattgtcttggagttgactgg

SEQ ID NO: 174859 - DNA, 393 bp, Homo sapiens
tccctcattcaatcatcacacccttcaattctactttccaaatacaatagtctcccccatctgtggttttgatttatgtggtttatatacaataagatattttgagagagaaagagactacattcatataactttttactataatacagtactataattgttctattttattattgttaaaataaaaattaaactttatcacaggtacatacatataggaaaaaacatagcacatataggaaaaaacagtgtatatagggttcagtactatctgcagttactgggggggggggggtcttgtaatgtatcccccccaaccactgatacaatgggattactgtatctaatttgtcagtgcctctctattcctcctgctttgactctaatttaggc

SEQ ID NO: 174860 - DNA, 723 bp, Homo sapiens
gaggggttgcgtgtggaggctgggaaggtgggaagcggttgacctggggtcggatccgggagccccgtggaatagaggattctctctggagccgcatggaattactgaagggctgctgattctagggccagggcagaaacagtgtggggagtgtaggtgaggagggagagatgtcttttcgctgtatccctccggaattctggcttttaaatctccaaggagttgagtgttctgatgctttcttgctgttctttcctgctacaagtggaaggagcctgggtaactatgaaacacttcttccttccctaaccaggtgcacggtaggaccaataacctgaagtgtgggcatcatctttgggaggctcctcagtgggtttctcagtaagcaagaggattaaaaaagatctaaaagaaattttactactggtaatttggaatcttcatctcagatgctttggacctgggaaatttctgcagtgggtggggagtttgttctctaatatttcacttggcagtgttttaatgcccaaagcatatttatacactaaatggatgcttccacagcatcattgaggttattaaaggctggcagctgctggatcacaaaatcctaccagccagcccacacaatgaccaacatctgctagcggatggcccaagactgactgacaggagagctcatttggatgaatggccgttttaggggccctcccgattaaatgg

SEQ ID NO: 174861 - DNA, 147 bp, Homo sapiens
atcgaacctatcacccttcatcgtaaaccctatttgtgatttcaacatttttgtgggattaccttaagagccatgacactgtaacactttgtaattttgtaaaagtcctgattgtcaatatatgcccagtgagggttggtaaagaat

SEQ ID NO: 174862 - DNA, 120 bp, Homo sapiens
caagactatgcaatatactttacacttacaaggttccttacagcttacaaagcatgaagccagatctccccttagaatgtcctgggcacagcagttctctgttctgtcacaaagctcatg

SEQ ID NO: 174863 - DNA, 116 bp, Homo sapiens
ctataaaatttcaagacaccaacaaactaataaccaacaaagcgatggcgagtgaaggtagaattctgcatcatattattaaacagtttatgaagacctaggaacagagacgatta

SEQ ID NO: 174864 - DNA, 386 bp, Homo sapiens
gacagccttcggagatcacctagcaaccagctcggaggaaaggagcctgcgtaggttttggctccaggaagagggatcccagaggatgccgggaactcggggtgggccgcagggcggtcagagaggctctcagagaggctttggggtctgtcgggagaatttaggagtggggaagaccgggcagctatttattcccagtggtctgcacttcggctgttgcctcagaggaggcagtagagcatgctggttaggactgtgctttggagcccacctgacttttaacagtgtgacattgaacaaattaattacctggacttcatgggtacaatacttgtaactactacttggagatgttagaatattaaaaagtacgttggtcttgattt

SEQ ID NO: 174865 - DNA, 381 bp, Homo sapiens
ttaagcttatcatttccttcaaactctgccacatagtttgaagcagccaagtcaacactggttcttatattcctcatgtacttccaaatggtctgtggtagcagccacgaagccccaaagcactgcctaaaaggcacttcattccttgtgaccacagggtattgtctaaataacctgcgccactgcataccatgaacaatgagaaccacatcctctaaagctgagcagaatctcgctgttttcaaacccaagcaggccagataactccatcccagagtctcattttcttaagggtgtgttacctggaactactggcatcaattaataggacagccagagaggatgtggttagaatatgttcccagtgctgagcacaaactt

SEQ ID NO: 174866 - DNA, 358 bp, Homo sapiens
tatggagatcattgagggcaatcagtctgaaaaagtgatcaagaatgcagtctgatttacaatagctaccaaaacatacctaggaacaaattgaaccaatgaggtaaaagatctataagaggaaaactataacacattgataaaagaaattgaagtgaacacacacagaaaattgaaggacattcccatgggttggaaaaattacatggttaaaatgtctatactacccgaagctatccatagattcaatgtaatccctgtcaaaataccaatgacattcttcacataaatagaaaaaaagtcctaaaattcacatgaaaccatgaaaaccctgaaatgactaaagcatccctgagca

SEQ ID NO: 174867 - DNA, 458 bp, Homo sapiens
ccttccttccttaattcctgtccagctttctcttggcaaactacagcccacaggccaaatccagcccaccaaccaagaatgtttgtacacttttaaatggttgaaaaaaatcagaagaatgtttcacgatgtgaaatttatacaaaattcaaactgcagtgtccataaataaaatgttactggatcacagccttgcccatgtatttatgagcagttgggacagagaccattgaaaatatttacttcctggccctttgcagaaaaagcctgtcttacatgacaaaatatggcaactagcagactgtgtcgggtagtatcatcagtgaaaagaagtacctcgtacgctcgagccaaacatcagcctcttgaagagttacaatgggctttttatgtcgtcaacctgcagaacacaggaagagttagggagaagcctagacccaggtcagaatgcagttgga

SEQ ID NO: 174868 - DNA, 766 bp, Homo sapiens
tagagatgaagaagtcattaccgacccggctggccccaagcctacaccagctacccgttgccccgggagccagaggctgctgctgtggccagcatggacagcactaaaccaaagccgcctctgttctccactgctggcaggaccaagctgagaccaggaccaaaactgtgggatgtgttggccacatacttccagccccacagcacacagcaggcatggagggcgggtacagggcccagcaggacagaaaatctgctggagcagattcctgggaacagcgtgtccctcctcttcagaggtctcctcttcttttctgaagctttacagatagattatagaaaatgaccagcatgcatgatgaggaaactgagactccaagaggccaactcacttgcctcagatgccctggccaggaggggacagcctcagcaggacagtccatgctagatgacccctggtctggcatgatttccattacgccagtgcattgcatagcagacaagctcaatcggaaatgctctcctagacccaggcttagggtctgaaaggtggttacagaccattacagaccacttttccacttttcaagttgaaaagagccattgctttgaaaatacttgtggattagattgaaatgccaacggcagagtatgaagaccaggccacaaaaggaaaggttcattcaccttgcgccctcttgtggagaagaaggcaaagaatactataatactacctcagaaaacgggaatttagttcatcctcttcc

SEQ ID NO: 174869 - DNA, 243 bp, Homo sapiens
tgtagcgcgagcacatacccacacacagccctcatttcctctaaacactctgactcaaatgaactgtccctatttggcaaaactctctaacctggaggctgtcttctgtcacctgacattctgtccccaaagtcagccaaactttattatacatctttagcaattgatcagaagaatgccctgccagctgtttccctctctctgagggcaactcccctggccctccctccttcggcctggttg

SEQ ID NO: 174870 - DNA, 353 bp, Homo sapiens
taatttttgtatttttagtagagatggggtttcactatattggccaggctggtcttgaactcctgacctcgtgatccacctgcctctgccccctaaagtgctgggattacaaggcatgagccaccgtgcgtggcctgttctaggtgttttgtaatttctatcaggttttctctttgatctgtcaattactgagaaacaagtttttatttttccaaataaataggagtttgctttactcgctgttttattatatttggttttctttctgttactggcttttaacttgctgcctcgaagtcaagaggctgtagtctgggctttgttgaactttttctttgacctagtcagtgtta

SEQ ID NO: 174871 - DNA, 393 bp, Homo sapiens
cagcccatgaatggtcttataagcatttttcatcatagccaaaaaagtggaaacaacctaaatgtccatcaattgaatgaataatcaaaatttggcccatctctacaatgaaatgtcatttggccacaaaaaggaataaaatactgatacatgctaccacatggatgaatcttgaaagcattaggccacattttaaaaactaggcccccaaagatcatatgttatatgatttcatttatatgaaatctccagaatttgcaaatccagaggcagaaagtagatttgtggttgccagaggctagggggaggagcaatggctaataggtatgggcttttttggaggagtgatgaaaatgttttggtggttgcacaactctgtgaaaatagtaaaaa

SEQ ID NO: 174872 - DNA, 209 bp, Homo sapiens
agatggaaggtgatgaactagctttgaaaagcacaaatcagaaactgaaattacttctgaagaattaggtagaggagaaactaaattggatttaggctgtatcttagtggctaatgtggttttattcaggaaatctcagtgtagttggtactcttcacttgttctctttacctagaaagaataggaagcttacagtgtatctttttaaa

SEQ ID NO: 174873 - DNA, 239 bp, Homo sapiens
aggtgagaggattgcttgaggccaggagttcaaggctgccgtgagctatgatcacaccactgtatgccagcctgggcgacagagtaagatctcatctcttaaacaagtaaacagatcaacttagaggaaaggaaacaagcccatcaggaaaagaataagctcatataacatccatatacttgtgagatgcaagtgagattggaagagctagagctagatggtcacaaacatactaggcc

SEQ ID NO: 174874 - DNA, 367 bp, Homo sapiens
tggaatttccaatatttgaccattacatggtaatttgctatggttcaacctaatgaaaataccagtacatagcttactaatcaataaacattaacttgtaaagggaaagcctttttaagcctgttgcaaaacacagaaatcctacaaatcaataaaaaacaatagaaaactgtacaaaggacctgtacatggctaataaacataggaaagatgtttaatcttacgaatactgtcatttggactggtaaataacaataagccagttctgacatgggtgtggtattcagtttcagccgctccagtcccaaccacacaggctcctaaattcacatttcttttttcaaaatgggtggagagggaggaggga

SEQ ID NO: 174875 - DNA, 490 bp, Homo sapiens
gctcaccgtgcggcagggaccccagggctctggtccctgcttgccactctccttgctgcatttccctccctcctctgcctgaggagtttttgctcagagcgtgttcattaaactggtgactaggctctgttggggagttccatgaggatgaccacctggccttccaggtgagaggcaagggccagagaggtcccctctggggcagggtcgcgcctgcctcactcctgccaacatgtctcagggcttctgtgtcagaatcacaggcagattcccagagcggcactcacccagtaaacccggtgggaagggcccaaggcacctgggcccatcagccttgctgccaccgggaagatcttgccaggacagtggcggaggatttgccggaccacactcggagtggcgggttagaccctcatggcctcctgcccatggtttactaaaacaaagctcagagccctactttggcaaataaagctgctgtaatgtctca

SEQ ID NO: 174876 - DNA, 648 bp, Homo sapiens
ttgggcgtcactgcaatcaaagacctggtggacgatgtggctcgccataaaatggataaggaaatcaacaataggacgtgtgaagtcattaaggatggcaggttcaaagttgctaagtggaaagaaattcaagttggagacgtcattcgtctgaaaaaaaatgattttgttccagctgacattctcctgctgtctagctctgagcctaacagcctctgctatgtggaaacagcagaactggacggagaaaccaatttaaaatttaagatgtcacttgaaatcacagaccagtacctccaaagagaagatacattggctacatttgatggttttattgaatgtgaagaacccaataaccgactagataagtttacaggaacactattttggagaaacacaagttttcctttggatgctgataaaattttgttacgtggctgtgtaattaggaacaccgatttctgccacggcttagtcatttttgcaggtgctgacactaaaataatgaagaatagtgggaaaaccagatttaaaagaactaaaattgattacttgatgaactacatggtttacacgatctttgttgttcttattctgctttctgctggtcttgccatcggccatgcttattgggaagcacaggtgggc

SEQ ID NO: 174877 - DNA, 158 bp, Homo sapiens
tgtctgaattttatcactttcgctataattttatctttctcagaatgtcataatacagtagtccccgttatctgtggtgatatgttctaagacccccagtggatgcctgaaaccagctatagtactgaaccatatatgtgtgtgtgtgtgtgtgtgtg

SEQ ID NO: 174878 - DNA, 589 bp, Homo sapiens
tcaccgctttggccaggctgctctggaactcttgacctcaggtgatccacacaactcagcctcccaaagtgctgggattacaggcgtgagccaccatgcccgactagatctgcctttttaacagattttcttgcatggttgggggattggtactcacatatctaccaatgctcatctgctttctacttttatcagaaacacacatttccatcacatttagtttggaattagggagtgagtctgggaaacaagaatagcaaagtgtaatactgcagtgctcaactctcatgtcaacatactcttgtgtcagacttagtcattagttacaagtcacagtcattagttacaagtcacaagccattagtcacaagtcacataaattcacaagtcattagttaaagtattagcttgagaaagatttactttttataaattgcagcggctcaagattatccctgtaatactcacgtgcactctgacattttcttcattgcaagggaaaaggagggaagtggatttagagttctgggaagtgagggtaagtcacacactatgtcacaggattcttgtgaggattaaatgagatgct

SEQ ID NO: 174879 - DNA, 203 bp, Homo sapiens
gcatcatgggcagggccatgctccggctatgggtccccgggcaggtaatcacctttctaagccttggttcctccttcaggaaaatggggccataccccaggctttctggggctgttggggaagacgacagactgttacactcaaagggtgaagcagataaagctttgcaaagccctgcgccctgctctgggttgagggctgag

SEQ ID NO: 174880 - DNA, 274 bp, Homo sapiens
atttgagatagcaaaaaatggaccattctgtcatttattcatttcagaaacacacacattgtctccattgtgcctcccacatgccaggcagcaaacgaaacggacagagatctgtcattccgggagactaaaatgtagggagtagatgctattgaaaaaaataacacaagtttataaagacaaaatgaagtttctcacaatggctttgtaaacacagcttggggaaaacagccggctatgtttttatgtttttttgccaaggaaggttttttgg

SEQ ID NO: 174881 - DNA, 271 bp, Homo sapiens
gaatcactatcaagaaagggctgatgtagctcctggcacttaattaagcttcccttgctaataagaatgagaagatactgagagccaaagatctactatcttttcttttcagtctatctgaaagtatgcctccccttcactctgaaatatactgaggtttggaaaataggttatatagttaccataaatttcaaaagacaatctgtcttttttctatttagatacggctaagaccgcaggcatggtggcatgcagccggtagtctcagcta

SEQ ID NO: 174882 - DNA, 326 bp, Homo sapiens
ccagcctgggtgacagaaggagatcagtctcaaaaaataataaatattagcaaagttctttatctgggaaatttcagtgtggaaggagttggagtctggagtcagagtctaggacaacaatcctttcaacaatgacaatacttttctcagcattttctccatgtggtctgaagttcagcctttattttgaatgtgaagccatcaaagcaagtattcggtgcaaatagatttaacttttcttgttttttttttttttggaaatggactctcgctctgtcagccccttcaggggggttcccgacctcgatttcgtatctcttggtcat

SEQ ID NO: 174883 - DNA, 269 bp, Homo sapiens
tatacgtatgtaacaaacctgcatgttctgcatatgtaccccagaacttaaagtataataaaaaaaaaattaaaaaaaaaagaaattgtcgtgagaccacttaaaactggacgatgacctttctttttttatattagagaatataatagaactaagaaatctcaatcaggtgtggcagctcacacctgtaatctcagcactttgggaggccaaggcaggaggatcacttgagccaggggttctagaccagccagggcaacatggtgaga

SEQ ID NO: 174884 - DNA, 203 bp, Homo sapiens
agaagttccagaggcatttgatttagctgcagaaattctccaccgtaggtttttgaggagggtacaagaaatggtcaaaacagtacttgaggatgagatcccagcagcaatatatgcaagggacaaaagtggggtaaggattggagtgaggaagaccagctggcggctgcagccagaggccctccctggtttcctttacagga

SEQ ID NO: 174885 - DNA, 534 bp, Homo sapiens
gtgaaattaaaactccatgccttttaatgcagttaaaaaacatcagagaggaaaatgttgccatttatcgattccaccctggtgactgagggaagatttcagacagaggaatataattaataaataataataatacattaataaaaactcaagctttttactgctatcttgttgcttagaagttatttcattttaggattctatagagtaacttttcctctttagttcttacgagacatataccaaactctgtgtaattttcaatgattattcatacgcagtgacgctaggaaagggtcttgcatgcaggtgttcagtaaacatctgattaattaataagcacatcaataagagggaagaacctcaaaaaggaaagagtgtcccagcataaacatgcgtggtcaatatgaaggcaagcccagtccgtcctgggagacgtttgcgatggtgacaaagggagggtggacagaaaaatggggaataagggcctggcacagtgactgtaatcccagcactttgggaggccgaggtggg

SEQ ID NO: 174886 - DNA, 551 bp, Homo sapiens
agctaattttttgtatttttagtagagacggagtttcgtcatgttgtccaggctggtctcgaactcctgacctcaggtgatccactcgtctcggcctcccaaaatgctgggattataggcgtgagccattgcatccaacccatccagtctttgcagtcagcttctgcctttgccaaaccttcctggagtggagaggggactataccccatgactgcccattgggcagatcctcctcctcctcgtccattaggcccctcatgagtagaggccacagtgaagtgcatccgtagtctatccatagcctgtgagttgttgtccctggaaagttccactcacttgaagaaaaaaaatagaaccttcttcaggctccacctctggaagtgggaagtccttaaccaaactaaacaccttcacaagtccttctgtaagcccaagggggaaaacaaaccaaaacacaaacactccgcagtggcctggactgcagtggcattcggctgaatgtctctgagggcactgtgaggacagggccctggttagacacgggggaccc

SEQ ID NO: 174887 - DNA, 744 bp, Homo sapiens
gcctgggagaatactattgctcactgcacaggttaatgcactgtgattgcctcccttttaatatacaggtggtgtcttcctggagtgaccagtttaccttctccccatacacctctcctgcctagttgttgcctagacctggtgcacactgcagtcctcgggactttctgttgccaccctcctgtattggacgtcttgtttctggatttcctatcctcttccttcttggtttatccctcattttttctgtagcacagcagttttctaattcaatacttttaggaggttgagtatggataattttggaaagtgtccccgggatgattccaatttatttaagcctgttttccagagagctgcgggtctcctaaggcctttctcatttctaacaagtctccctctctagaacactggttcccagtcgttgttttcatactagcaacattttaaaagcaggataggggtggctagtatgcaattgccaactttggatttttccaagcaggagtatatcaaaaagctacaatttattaccagtatttcgtaaaatctagagagttattagagaagtcaagatggtggttatctctggggagagagagaagatcccaggatcagcacagagggggcttctaggatattgttcctattttatttcttagttgggtaattgtttttagcctcagaatgttagagggtattatcctttaaactgtgtgtctgacatgcacacccacgtttata

SEQ ID NO: 174888 - DNA, 707 bp, Homo sapiens
gcctgggagaatactattgctcactgcacaggttaatgcactgtgattgcctcccttttaatatacaggtggtgtcttcctggagtgaccagtttaccttctccccatacacctctcctgcctagttgttgcctagacctggtgcacactgcagtcctcgggactttctgttgccaccctcctgtattggacgtcttgtttctggatttcctatcctcttccttcttggtttatccctcattttttctgtagcacagcagttttctaattcaatacttttaggaggttgagtatggataattttggaaagtgtccccgggatgattccaatttatttaagcctgttttccagagagctgcgggtctcctaaggcctttctcatttctaacaagtctccctctctagaacactggttcccagtcgttgttttcatactagcaacattttaaaagcaggataggggtggctagtatgcaattgccaactttggatttttccaagcaggagtatatcaaaaagctacaatttattaccagtatttcgtaaaagacagtttgacaccagaagagtgaaaaagaacatgggaatagtggacaaaaatagccatcagtttgaataagcgtatgaaaagtgttaattttatgaaaaattcactattttgttcatatttttcttattttggaggctaattgttaaaagcttttat

SEQ ID NO: 174889 - DNA, 274 bp, Homo sapiens
aggatgggccggaccgcgtttcaggtaatcaactcaggagcaactgaaggcttccgagggtaatggaccacgtaatgagtcaatttgtggttgccaggtgcatccctgctcagacctgggcggggcaggtgggtgtgggggcacggctttcggggctcatcctcccgcaccacctgtgggaagctacgttgcttctctacgtctcaattttctcctctttactataaaaatagcagctacctcatagaattgtcttgaatatcaaataaggaaa

SEQ ID NO: 174890 - DNA, 302 bp, Homo sapiens
gggaaggctgtaagggagataattgaattcctgaggcaggattataatagcgattattttttggatgactagaggaacaaaagcttgtgggttttagataaacagatgacaaaaagagcccatctgagagtccagacttgtcaatagagccctgagggcttagagtttactgaaaggacaaacatcttggagtgtttagagctcaggcttctgattcttaggtatgccttggggtctggtaccctcattctttaataattagggcacagcctacactcacagtacaggaagaacctccagag

SEQ ID NO: 174891 - DNA, 119 bp, Homo sapiens
tcatcgcacaagcagaccaggagaccgcaggtccctccagggccctgcagagaagctactacagtctcgggcagttcagagggcacagctccagctctcaggggcaagaagctggcaaa

SEQ ID NO: 174892 - DNA, 622 bp, Homo sapiens
aatgtgtgcatacagcagagaagggaagatagaaattcttataaatgatgatcattaatcaacaagcatacatgaggggggcttgcccaaatttgtgacagaaatctgccatgagctgaggagtgtaatcaagtcacccttttacactggagatccaaaaatgactgcgtaaataactacacaaatgattgagtaagtggcttggtcttagaatcagattacttggacttgaattctgccgctgccacttactagcttaatttaaccatttggaggagcctgttctcacaaaaataaaatatggataataatattaccaacatcacaggctcattgtggaggttaaattacattcatgtaaagtacttggtgtggtgcattgctcatgataagagcacagtgaatgttagagatcattattaataatctaaagtgatgctccacacaatttatcaggttgatggagaaatggtttttttggggggaaggagagatgagcagagggctttattgagcctcctttgcttctctaacaccaacaaaggggacattgagaagtatttatttccatttgtcaaataatagctgaaattagaacattctaaaatggctattggagaat

SEQ ID NO: 174893 - DNA, 515 bp, Homo sapiens
  misc_feature (12)..(12): n is a, c, g, or t
  misc_feature (20)..(20): n is a, c, g, or t
ctgtcgatctanaggatccnggctcccacttggttgcacaaccaacttgtgctaccaagtgaacagactatgagtaaaggcctcttcttccacttggcagctgctcatatcattgacaaacgagcatattagagcatgcatgctgggctgatcattctgataaaggcaacaagcttcacaactcactcaatgaggtcgtccgtgagaacttcactgattttacgaggacaggagctacttctttgctgaaatgcatcacggtttcaactgctgaggttttccgcaaccttttgcattgtttggaatgtgagcagcacggccgagacaaactttggggttcccactgcattgttaaacctcccccttcacttcaaggccaggtgagcaagggaaaggagcgcggcctgggcgtcccgcagggccccgctaaggaccgctcccgccttgagcgcagcacaggccctctctggccacaaggatggggtcgcccgcagacactggtgaccagcggaacg

SEQ ID NO: 174894 - DNA, 468 bp, Homo sapiens
aacttcaagaggtaggagttgattggcttcaacagcaaactctatggcactccctcagagaagcatttcctgtctaaacttacttagtaccacagtagctacttgtactactttattttcaaattgaattaggacacatgtccttatttagaaagaggattaatgagcaataaaaggctagaaattaagggaaaaattaactgcctaggcttaggtaattcaaagtaaatatatatcacagaaacaaagaagggacatggaaaatttaatccaactgcttcaattcgcagattaacaaaaacatgcattttagtcagtgaacaacttatatgccaggtatggaactgtgaatacatagtcctgacactgaaatatctcagaccagtagagaaggaacagacaaaatgaaagcataactacaattgtaataagtatgtcaaaggacaagtaaagccagataaatttttt

SEQ ID NO: 174895 - DNA, 465 bp, Homo sapiens
ctgataaccaggaaatgtctcttaaggttggctttggatcagggattttcagaccagacacataaacccgctttgtgggccttacgtggtagaggaggctggctgtggaacacgcgtatgtgctggcgataaccatgaaagtgttgtttgaaattgtgtgcacctctggcctctgaacagaaatgtttggagaaatccagtcccgtgggctggactgaagcaaacttctcccgaaagacaaaactgtggttgtcctaatgacctttctaagctatttttggagttagactcacacacgtaaatctggctaaattcagaactgttctttgacctggagaatgaaaaatgaaattgaaagatgtggtgttagatttgatttgtatgatgtggtatgacagaaaattcacattttaattttatgcaaactttagctgatctacatggttttcagtaataaaacctact

SEQ ID NO: 174896 - DNA, 6280 bp, Homo sapiens
gaattatctgggtccagagcaaaggtggcactctcagccctccctggagtccacgccggcaggtgaaggatcagagccccatgccccatccttggggccaggggctgggacccaggtcaccaggagcctccagttgaagtggggaggtgactggggtggtgcagtagtgagccatcccctcacacactgccagccttgcccactgtgtcctccctggccgcccggagctgtgtccgcctcctgcctggctgcctgtgctcggcccctccacaagcccaaaacagccctagggtactcagtgttttcagagccgcctagatgcaggactgtttgtgttttggttttaaatttttttaattaatttattttttatagagaccaggtctcaccatgttgcccaggctggtttcaaacccctgggctcaagtgacctgcccgccgcagcctcccaaagtgctgggattacaggtttgagctactgcacgccactggttttaaatttttaaacagaaaacaatatttacatttcctctgtctttttttttttttttttttttgagacggagtctcgctctgtcacccaggctggagtacagtggcgcgatctctgctcactgcaagctccgcctcctgggttcatgccattctcctgcctcagccttctcgtcttttaaaactgaacactgaggtgggttttgtggtggttggtgaacggacaggtttgggcctggatcccccacccgaccctagcacccacaggtggggtcgccaactctgctgatgtgcctcctccctcagcactgtggacctgctggactggagcagcctcatcgacagcaggaccaagctgtccaagcacctggtagtccccaatggacaggtaacacctccgctcctcagtgaggcccagctcagcagggcgctgcgctaagaagggaattcagcctgccacatgtttctcttgttgcctaccctgggaacttaacatgaccaagatcactgcacactatggccccacagaccccctatggtccagggggaaaagaagacaaacccactagtgtccacagagtgcttggtgggacagagacccacgcggagccttaaaacaccacaaggagagggggtctgggggccttccccaagtcatctgtcttgtgcatcaggtcaccccaaacttcagaggcctaaaacggcagcagccactctgcttctgcctcatggttctggggttgacagggctcagctgggcagtcctcgcttggggtctcctgggtagctgtactcacagagtggtggcgctgggacctgggggaggcgcccactcacatgtctgggagttggtgctggctgtggcttgggctttttcccaacatggcagctgggctctaagggccagtgtcccctgagacgtgagagccaggcagaagctgggtgaccttttcctgcctcacctcagaagtcacacggtgtcttttctggcaagttctgtttgttagaagcatgtcaccaggccagcctgtatactgcggggagaggaatgagactcatctgcctgtgggaggggggcccaggacctggctgactgcttgaaaccacaacctaaactggaattcgaagaaagaacagaagcaccttcagaaaacatcctgcagaggcagctttccatgacacatctagccccagtccactaagggcccagcctcaaactcagagcccccgacccagagcctcggggcgcagtgcgtacagtgtggctgtgcaccaaggccaccagctgttggagactttagcatggtgtagcaagggatagagtggtactgcttgtgcccagtgaggcaaggctgctggggccagcaaaggggtgagcgggaggccctgcgggatgggtccccacggcctctgagcaccagctccttgaaggcctcatcctggcggttgccctggtccctggctacgtgtcagcacgtgctgcacaactgccctgtctgcctgtagccaggggtcttcctcctgggccctcttcctgctctgggtggagcccttctgtttgacgattgggtggtcagtgttcacttcctcagtgtcacatgggagctgcagggggccctcccacaatggtggggcctctgtgagaactggggaggctgttagagtacacacttcggagtgcaggcctggactgagcctggggcccactgacatgggcactgagctccctcctggtacccccagggcccgcgtagggcagtgcactggctgcgttggaggttccggggctctgtgctgcttgtccaggtggccctccctcccggccctgcatgagagggttcccgtgggctgggaacactaagagaggtttagcctgggcctcagggtggcacttcctggcccttgctgtggcctgaccatgtgctgtacccccagacaggacagctggagcccctgctgtcccggtttgctgaggaggaggagctacagatgacgaggatgctacagcggatggatgtcctgcccaaggcgagctgtcccgctcgggcagagggctggggccttggggacccgggactcatgcagaagagggcacctgcctcacttgagcaatagttgctcccactctcccaccccctgcgcctctcagaaagccacagagatgggcgtgcggctgatggtggatgccgagcagacctacttccagccggccatcagtcgcctgacgctggagatgcagcggaagttcaatgtggagaagctgctcatcttcaacacataccagtgctacctcaaggatgcctatgacaatgtgaccctggacatggagctggctcaccgtgagggctggtgttttggggccaagccggtgcggggcgcatacctggcccaggagcgagcctgtgcagcagagatcggatatgaggaccccatcaaccccatgtacgaggccaccaacaccatgtaccacaggtgcctggactacgtgctggaggagctgaagcacaacgccaaggccaaggtgatggtggcctcccacaatgaggacacagtgcgcttcgcactgcgcaggtaggtgtgccccaccctgcaccgaaaccccaacctgagccgttgtctcctccagctggggagaggtggcagcagtgcagagctcagggtgggcagagtgacctgctgggtggtcgggcatttgtggggaaaggctggtgaaatgagctggagggtggcttcagtgggcaggcccaggcccgctggcattctggacatcggactgtgagagcacaatggctctttgcagttacgttggtttttaaaattaacttttttttttagatagaatctcgctgtcacctatgctggagtgcagtggcgtggtctcagctcactgcaacctccgcttcccaagttcaagcaattcttcatgcctcagcctcccaagtagctgggattacaggcatgtgccaccacgcctggctaatgttttgtatttttagcagagacagggtttcaccatgttggccaggctggtctcaaactcctggcctcaagtgatcctcccttcttggcctcccaaagtgctgggattacaagcatcagccactgtacccagccttttaaaaattaacatttgacttattaaacttcacaattaaaaaactaaatttcatcagggtattcggatggctcctgaaaggtacaaatgtagtgttggagcccagtccctcaggaggcctccacagcgctgcctcatttataagcagttcccttaacattttaactacatctggaatgtaacggtttgttttctctttaaacatttgtcccatggagcacaacttcggtagaattctaacaagtcaaatgcagaagttaggtgaagtcagttcttggatactcctgtactgtcaccctggtcttatctcatgccttagcccaagctatgcacacaatggggtcctaggtccccctcccctcccagattccgccttcccagggatgggaccccctagaaccctcggaggcctgggcagtggcctcgctggctctcgccttcctaggagctgagcaggagctccactctcagcagggcagggtgccccagatccatgacttgtggcacgaaggggctccccaagaagctgtgaagccacagggccaggcttggggccagggctgcagccaacaggacacatcctggtgctgctcgggagctgactcacggctctgaaatcattcagtgatgtccacattcagcctttgtttacgatgctgctactttttcatggcctgaaattgcagcacacccatttttgtgccctgatcctctgctaattgtcatagatgtgtcggtgatgggacagactcactttctccacacgcacaggcctggtggccagcactgcccagcactcgggagctggtgggggttcctctcagcttgtaatcaggactcccagcctctgggtggactctcaatgctggtggactcacagcctgactagacacatcaccatccaactccgaaaggacagcccgccctcagcagggcttcctctctccagcttagccccggcacctgtctgtccctactatcttgctgtggcagtggcttccccagtggacacagcttccccctcccgagtggcagccgggctctctcctcttggccccaagggccctgtgccgggctcccccagtaccatgctcacatccctgcctgagaggctggacccctgcaggcttcagctctgcccctgctgtgggtggctggggagctctggggagctggggtcccctcccatgggtaagtggttctagactatggcagctgctctgtcctgtgctgggcccagactgccacaccacccaccctcaaacaacccgagttggctttggccaaggaacaaaccagccccaaacttagaggctggaacagtggcatgttctgtaggccaggggtgggctggctcagctgatgcttctgctgctggctgtgcctgtgtccctcctgcgtctgtgatctggggccggtggggcctaatgagctcattcatggctggtgtagtaaaggagactacatcctgggtccagcgtcccacaggccagcccaggcttgggcacgtggtgggctcaggcttccagaaggcctggagagggcaagcctctgcttgtgtcacctttggtacctccctgttggccaaagtgcctcacgaggccaagcccagatgccaggtggagtgagccactgtcctgtgctgggaggagccgcagtcacatggcagaggctgtgcacaccagcaggggagggggcagccagcagtggcacccggctctcgggttcatgtcctggggttgaggaagacacaagatggaagccagggcgatgtggcagagatgggtgcctgctttagactgggtggtcccgacactggagcccagcccagggatggagggaaagggcctctggccgatgggtactctgggagccagggctggggcagatggagaacaggggaggtgaggccctcggggagggagtgggaagcacagcacaggcactgccagtcacccgggtgatgcgtgagcagcaggcggaactcgccccaggctgggggacccagtgctgtgcagaccagcgaagtcgggatacctggatatagtaagctggagatgaaacttgagaactgtcactgcgtggatatttcaaaccctgagaatctttgtaagaccctatacggggtggtgtgaagacaggacagagtggaggccccaccccagtatctgagcagtgctaatagatgtataatgcaagccacatctgtaatttaaagttttttggtagctacgttaaaagataaaatgaatttcaagaatacattttaattaacccaaaatatacaaaatattacttcaaattgtattcaagttgattttagaaaagcaatgcggcatcgtgcatttttctagaaagtctcctaaatcccgtgtgtatttgacatttgcaacacatctcgattcagagcagccgccttccgaggactcgggggctggtggcagctgtgtgggacacagcagctgtggggatggggcagagcagcagcccacagagggcgagggcaggggccggagaccagtcataccacagaaccctggaggggcttgaggaagggatggcaggagagctgaggagcttctctgccctgtggggcaggctgctgggtgggtcaaagccccagaagggctgcacctccaagaagggaggtagaggagaggtgggagagaggag

SEQ ID NO: 174897 - DNA, 551 bp, Homo sapiens
gagtgctaattctgctatcactgatgataaaacaataataatcttttctctcatgtctttaagtgtcttcattgattagtaatgctctgtttattaaaactgaccaaaggctgacttcctttgttaaaatcttttaggtgtgttggttttatctgtcaacttagatgcatattttttcttccttccttaagcagttcacaatcttcatacacatttcttgataatgctcactttatatacatttttgtcttgaaaactcttatctgctaacagtttataagtaaactgtggtcatgttcaaagagaagaggcatcagtttcctgcttttgatacctattcttacacgtgaaactaacactaatttaaaaaatccagaatagctgtaattcgcttccatgcatcttcttgttttatttgtataatgaactaattattctcttatgtatgtatatgtgtatatatattacataatgtgccgtatattggcacgtttctttctttcaaaagcctacacgagttgcaatttcacagagaaccctaagaacagagt

SEQ ID NO: 174898 - DNA, 281 bp, Homo sapiens
taagcatagaagtatttcttgattttaggaaaatatcccaaatagttaaacaaattattctagcatcattaaataatcctttgatttctcctatccaattgtgttttttttttttttagacggagtcttgctctgtcgcccaggctggagtgcagtggcgcgatcttggctcactgcaagctctgcctcccaggttcacgccattcttctgcctcagcctcccgagtagctgggactacaggtgcctgccaccatgcctggctaattttttgtctttttag

SEQ ID NO: 174899 - DNA, 896 bp, Homo sapiens
acacagaaaaccagccaaagcatatgtctaggtacgtggccggtattctggatcactgcgtgtcttggggagcttgggattccgcagcttggcggccgagagcctttgtttgcctttttgagacagggtttccctctctcgcccaggctggagcgcagtcatgcggttacgcctcactgcagcctcagcttcccaggatcaagcggccctcccacctcagcctcccgggtagctgggaccgcaggcgctcgccgctgcctgtggctaatttttaaacagttttttgaaatggggtctcgctttgttgctcaggttggtctcgaactcctggcatcaagcgttcctcacgtctcagcctcccatagtgttggaattacgtgcatgagccactgcaggcagtcggactaagggagtttaaacaaagaagccggagcctggccctcttcgggcttcggtggggcccagtaggcagccaaaactcacactgagacggcggctgctctccaggcgggtttgctcaggctgcccccgtgctccctgccctgggcttcagtcctggagaggacccggtttctcaacccgtgcatcgttggcactttgagcgacgggactgtcctgtgcgttgcacgatgttcagcagcagctttggcctctgctatccactaggggccagttccaccccctagcacctcagattaacaaccgaaaatgtcttctagactttgccgaaggactcctgggggcaaatacgcccccattgagactcactggcttagaacaaggcaagctccagcctgtttcaggctttcccagagactgccctacaccatctatggttgcatggctggcttctcatccttcaaccttccaccgaagtgttgacttcagagaaacat

SEQ ID NO: 174900 - DNA, 233 bp, Homo sapiens
acacctcaccatcccactgcacacatcccaggcactgacgtgccatctcagttattccttctttgcattacctgccttcttcactttctaaggttcctgacactcttttcctaatcttagtgtgaccacatgtcctggttttcccagtatggtcccagctggtttatacctttagtcctagagtgagtcctaggtagtcctttttaccatcagacatgtcttgggttggttga

SEQ ID NO: 174901 - DNA, 711 bp, Homo sapiens
tgctgggattaaaggtgtgagccacggtgcccagcccctatattctttcttttgatatcaatgtgtactaccaagtatatttgtttaagtacatacttgttcactgaaaattgctgaaacattgtagagataaatacatgatgagatttgtattgttatgctcaatatttaattattgctttttaaaagacaaatttataaataatgacaggcaaatcttttttgtttactaaactgtatcttttcaccagttcatgtatgttgattttaagcattactatgtgtcaagcactttcctaagtactttaaatattgattttttaatcctctcagcattctttgtactagatactctttactactgattccattttatagagcagactgagctattgagtgattaatttgcataggttggcctggctagtaaacttcagaacctggccttaatcccaggcattgcagttgcagagcctgcagccctaagcatgatatgatcctgttttttgtagggtaaagggatgctgttattatactctacatattaaaaacacttacacttgatgagtggccttggcaagtgacaacagcataagaggaaagagtgcaggctttacattcaaatagaactggaagtttaaacattttctatttgtaactatatgtcctgacaagtacattgccccttctgagcctcagattctttatctg

SEQ ID NO: 174902 - DNA, 447 bp, Homo sapiens
cacgatgtcagctcactgcaacctctgactcccgggttcaagtgattcttctgcatcagcctccggagtagctgggactacaggcgtgcgcaaccatggctggctaatttttgtatttttagtagagacggggtttcaccatattggtcaggtttgtctcaaactcctgaccttgtgatccgcctgccttggcctcccaaagtgctaggattacaggcgtgaaccactgcacctggccatggtcctttcttagaagcatttttgaacactaggaaggacattgagatgccctgtaacctttcagacaactacacataaaacatgctagatagttgataactcagtttgttaagcactgagtgttctctctgctccacacccagttctctagactctagggatacacagataaataagtatagctcttgttcttgtatgttatcagtg

SEQ ID NO: 174903 - DNA, 374 bp, Homo sapiens
gtgttctcatctttgaaatgaggatgacaccatctaccttgaagacttgtgaggattccatgaccatacatctaaagtgcttagcatggtacctagtgcatacatcaaggaactggtacatgttaactgtaccatcatcacccaccaccagcatccccttccctccttcataccttttaaacactaggaaccatgatcagctaggacttgtttgttacagacatttgtaggcagaaaatctggaagccacctgctaccctctcccacatgaggaacaaaggctgcagagaagccacctgtctctccccatctgcaaccttctgctccctgtgacctcccccgggcccttactcctgctcactgctttactctct

SEQ ID NO: 174904 - DNA, 277 bp, Homo sapiens
acagcttatctgatgggggaaaaaaaaaacccatgcaagatatattcctatatttgggcctttagtgataagttcatgataaaggaaaatacaaatactctctcctcctccatgcccacgaacagcccaagacttggaatcattcttcacagggttcactcactatccagtccaactctcaacctccctaggcctttagcagatccaagaaagatgcaatcctctcaagtttccagaacaatgagaataaaaagaaggctgactagagttgaaaaca

SEQ ID NO: 174905 - DNA, 201 bp, Homo sapiens
cttttgatgtatggtaaatttgtagcttactggtctgtacttttataatatgttgtatatgtttttcttgtagcatatttcaccttatattgaaaatgttcatctttcttagaagactgcttattgagagcagagaccatatgtgctatttaatcatttgtattttttagcacaatgataagcatggtatctattgggtaa

SEQ ID NO: 174906 - DNA, 385 bp, Homo sapiens
aatctaagatttctgtcatgagctagcagaggttctcaaactttgccttgctctcttccatcttcttcttctcctcctcgtgggcagcgctgcccacgaagtgtacctccaaatctacccacccagtagcatttcgggtgatatcaagaagaaacttcagggcaggccccttcccctttttatttaccactaactgaactcctctctctacacgaaagagatcatatggagttctgctcttatcagtttcctagagcttaaggaggcggttttgatgaagtctacctggatagaaaagtgttcatgaggtgagaatttgtttaagtatagtatggtcagtggccaggtgcagtggctcttgcctgtaatctcagcacttcgtgag

SEQ ID NO: 174907 - DNA, 386 bp, Homo sapiens
agaggatccccatgatgtgattgtcattagtgattgttcatgatgtgattgttcatgggcacaattcagtcccccattatctactgattagcaggatatctttagggctcagaaagcaggttttctgtctctaccgatggcttgttttctggctgaagaatgaaggtgttttgatacaaagttattattgttcaattgagaaagtctttgccctcctggcctgaagttccccactggagagaggaagctgataacaatctctggttctttcctagtacctataaagggctcatcctcacttacaatagagcactgtattttcaggacaatgtataattatttgggaagaagccaaaatgatgactagtgcgtaacaatagcatgca

SEQ ID NO: 174908 - DNA, 171 bp, Homo sapiens
ggagtgcagcggtgcaatctcagctcactgcaacctctgcctcctgggttcaagcaattcttgtgtctcagcctcccaagcagttgggatttacaagtcaattcttttttttttttaactaaaactacagaatctatttttcttggtctcatactcaggtttttatgtagg

SEQ ID NO: 174909 - DNA, 317 bp, Homo sapiens
aataaaactggtatacttaaaaaaaaatcagagattgttattttatcattgtacttgtttggcatggctaagatgtgttactggtcactaagggtgaggtttcacttccctaacctgttcttgaaggccttcaacagatcccacttcttgttccactctagtagccacacttctaaaaatgatctgtgcaacatatataatatgcaagctgtagaatgctggctgttaaaaatggggtccattttcaaatacaacatttttctaaaccatgcacaaaagaacagccctacagggacactcttccatactgtatacat

SEQ ID NO: 174910 - DNA, 127 bp, Homo sapiens
ggtctgttgggactgggtggaaagacttagttattaatgtgccacaggaaatgaaacaggattgtaagggtctgaaggcgctgggaacacataaacataaatgtggcctatttgattttgcctgggg

SEQ ID NO: 174911 - DNA, 535 bp, Homo sapiens
ttccctctgtctaaagcatcactctgaattgtcacaggcatggatcacagtccccataggctactgggctatgtatgttaaaataaattcaattagagaagtttagttctttagggtttcgtgggtttttttttttttttttttttgaaatggagtttcgctctgttgcccaggctggagtgcaatggcttgatcacagctccctgcttctgcaacctcctgtgctcaggtgatctgccctccctggtctccccaagtgctgagattacaaacttgagcaacaagattgaaactccatctcaaaagaaaaaatttattgattttgatatttatatacagctttaaaatttatttagctattgtttatttcccatattagtgttttaattaaacactgaatttcccagatagttagaaaatgatcctttggatggcaggtaaaaataagggggtacaaccaaggggaaataggtcgggggttaaactctaaataaacttttgcttataatagctttattgttggtcatgcctcttt

SEQ ID NO: 174912 - DNA, 161 bp, Homo sapiens
tatttatacgttttaaaaactatgtgctatatgaagacaaaatagtaagctgataagaattcatccagctttatccacccaaggatatcaccagtaattcaatcaatcagcacgaagtacaactaaatgaactctgaagaagtactgcaatgcataactat

SEQ ID NO: 174913 - DNA, 535 bp, Homo sapiens
cccagcagtttctggatagaagtgctctggaagaagtgcagtggtgccatctacattcccttgtcttagtgaatttcaggaaaggagtttttcactcacctaggaactatagtcagacaagaggggtgtgtgtgtgtgtgtgtgtgtgttatggtaggacacaagtctccacaaagcccgcaaagttggagtacaaattcttaaaatagtaatactcctgccttaattattacaagtttaaaatgtggtctattagcatgagctctaaagtactgatttttattcctaacaaatggaaatgcctcagtaagttcctttgtcaaataaccttaaaaatacaaactgaaaatattgttttgggaaaataaacccttgttaggctttgacttatcacacagaaagatgcctcttagtgtttaaaatgtcttagttcaccatgagtatgtttttaaaaatattcagtagtttaaaaataaaatgcaattattattctataaactatttagaaactccctgcccagagtgtttcttaaga

SEQ ID NO: 174914 - DNA, 790 bp, Homo sapiens
attcaccaagaattctgagcatagtgggagaggggttcagtgttggtgggcctaggtgatgagagatggtttcctcaggatcaatgaggaagccccagacctgggataagtacctcagatcagaaaccgtacaggatacaggaactcttatgctctgggttgaataccagctaaagatgacatcaaaagcagtccctgaactgtgcccaccatggggtcattcaggcggggtgtgtgccatccatccgaacccaggacagtaggcaggttctgcatctggacacagcttccatctcctctgctgtcaccagaaagcactgactacaagttgtgagcagagagtatgaaagagtcattttgaactataaggtgggttttcaggttctcgcttggtgctgcaattctgggtgcactcggaagacccttgtgcctcacttcctgcctctgtgactatagcgagcctgctggttactgccagctctgagtcccccttgccacacaccccctgggctctatggtgtgtgcctttgatgacagtcgggaagaagaaagtactcattcatcacagcaccccctgaaagactgccaggaacttctgaaataacaatggatagccccaggaatcacagctgcagctggtctctcgatctcactgcctggagttggggccttcagggccgctgtgggcagaccctcctggtcaggtgttgaagaaggacaagcagtggtgagaactcagtttgcagtcagtctgggctccttgtcctggacagaggtaacactaggagtg

SEQ ID NO: 174915 - DNA, 191 bp, Homo sapiens
gccaggagagctgagtctgtgtggactcagcacacccctaggccgtctggctcaaatcccccacacagatcaacgcccacttttctctgccccatcgtccacacagccacggccggtattactttgcacaaacttctgccgtgtttccagataaccattactcaaagctcaaaactaggaagtaaccctga

SEQ ID NO: 174916 - DNA, 189 bp, Homo sapiens
gtccccgagatctccttctgacctactttttcccttttgaaactatctttctttagttcctggtagagtcagcttgttcttcgaaggcaggcattgacttctctatagctatgaaagtcctagatgccatcttcttccagtacaatgctgtttcatctacatggaaaatctatagtttattgtagccac

SEQ ID NO: 174917 - DNA, 601 bp, Homo sapiens
ccacttcggcttcacaaagtgctgggattacaggcatgagccactgtgcctggccaattttttaaatgtttgtatccatcaatcattttttgatattgtagaatgataccgtgtactgctaaataaccatttaacattattagtttgaagccacttaaattatggatttgatgtacttgaagaaaaaaactacattggcatatggataatgattgagtccacaacagaatgaattaactgaaaaaaattttctttactattctaatatggtttagttattcagtaaaaaaaatttctagggtgcagaagattaacttgcattttcccagtaaaagtttgtcttatagttcagaatttaaaataataacaggtgatcctaatttctgtcttgcaagtggtcagactttgtttggtagtttatgtatttttcacttctagaaatgttattgataccaatgtaagcatactctgtttctgaaggaaaaattataggcgctcataaactatattcaaacaaattatgttttcatctttaaaataactctgaaaatttgagttccttcgtagacattagagcctgagtcactgttaatttgtatca

SEQ ID NO: 174918 - DNA, 275 bp, Homo sapiens
gttttgttttttagtatgataaaattatttttaacagcaggaaagcagtctatcaagaaacagccggccgggcacagtggctcatgcctgtaatcccagcactttgggaggccgaggcggtggatcacctgaggtcaggaattcgagaccagcctgaccaacatggagaaacccgtctctactaaaaatacaaagttagccaggtgtggtggcgcatgcctgtaatcccagctactcaggaggctgagacaggagaatcacttgaacctgggagg

SEQ ID NO: 174919 - DNA, 407 bp, Homo sapiens
ggagagggctgaagtacctggaagtggaatgctgctatgacaacaacaacaacaaaaatctaaagtgtgggagtagctttgggaccaagcagagctataggctggaagtcccctcagaagattatgaaggtctaatgggcctcaaagaggctgttaggaggagcctggtgggcctttgagcagatggtcaccggaaggagaactttttattagtggaaagtttaccaatactgctgcatgcaataatatggaaaacagaaaatgtacctagtgaattggatgatctagctaaggagatttccaggcagtgcggatggtgccacctgatttctagctggctgtagtaaaatgtgagaagagagagaaattaaagaactgctaaatatgaaagatgagatttcctggat

SEQ ID NO: 174920 - DNA, 276 bp, Homo sapiens
tcccgctgtgcggcccggttcctaacagggcacgaactggtaccatgggggttttgccattaattcaggggttgagaacccctgagttaaaagacagtgttcaggcagcaaaggagagtaagaaggtgcaggctgagaattaggaaaactggatggaatctgacagagaataagagaattttgaaggagaaattgattaactgtgactaatacagaaaagattgaacaatgactcaaagctctgtgaaggtatctagagttcattagaagatattt

SEQ ID NO: 174921 - DNA, 262 bp, Homo sapiens
tataggttggtgggagctttataatcaagggcctgggtagatgccatctgaatgaatgcacaaaataatcttagcatcactaaaggtgaggaaatccaacattatgtgctccgtaatgtaaaagtagtatgcatcatcatttataaaggatttcacctaaaaaaaaaacacctactgaaccagaatctaattttgccactagcaataaatacagagatggaggaacacatcagcaaaatccataatatgggacattttattg

SEQ ID NO: 174922 - DNA, 640 bp, Homo sapiens
cttgccagtgtaatgccactactataaacataggaggcattaaaaacactgtacattggctcacgcctgtaatcctagcactctgggagacttaacatatgcactaacaactatgaaacaaatagaaaaaaatgttaaggtgacataagaaagttgctgatagagaggcatgagatttcaaagaggggagtaatatatcagctggaaggatcagataaggatatgatggagtactggcttctctattcactggccgtgtgactagacaagtcatttagcttcactgaaactaagttttctatctctaagcgtgtagtaatcatccttctattcctgaatagttgtcgggaggctcaaactgagataatgtatgtgactatcctttgcaaattctaactttctacacacagtatcatagtaaatattgagtatttgaatgagtaagcatttactttagtgaacaccttttcctgagcagttctcttgcttaatgaggtcttttgattttgtaaatatgctacttttttatctgatatttttgtattgttccattttgcagatgatatctaattttattaaattattctgttcctgagaattggcatcctcttcatccacctggggatgaccaggaattttc

SEQ ID NO: 174923 - DNA, 646 bp, Homo sapiens
gcaggagaatcccttgaacccaacagggtggagcttgcagtgagctgagatcctgccactgcactccagcctgggtgacattgtaagactttgtctgaaaaaaaaaaaattattgagggaagagtaaacatcctattcatcttggtttgggatatttcacatgcaggcagcaggatgttgtaggaaaaaaacacactgaacttagaaccagaaggatcagataaggatatgatggagtactggcttctctattcactggccgtgtgactagacaagtcatttagcttcactgaaactaagttttctatctctaagcgtgtagtaatcatccttctattcctgaatagttgtcgggaggctcaaactgagataatgtatgtgactatcctttgcaaattctaactttctacacacagtatcatagtaaatattgagtatttgaatgagtaagcatttactttagtgaacaccttttcctgagcagttctcttgcttaatgaggtcttttgattttgtaaatatgctacttttttatctgatatttttgtattgttccattttgcagatgatatctaattttattaaattattctgttcctgagaattggcatcctcttcatccacctggggatgaccaggaattttc

SEQ ID NO: 174924 - DNA, 659 bp, Homo sapiens
agaccccaatataataaaagctggagacttctacactcactttcagctttggacaggtcatccagacaaaaaaatcaactgataaacatcacacttaatctgcactataggaacaatggacctaatacatcgttacagaacattttctccagtggctgcagaatacacccttttcttctcagcacatacattattctcagtgataacagcacatgttaggactcaaaataatttttaaaaaaattcaaaaagttgaagtaatatctatcgtttctgaccaaaatggaataaaactagaaaacaataacaagaggaactttgaaaactatacaaatgcatgcaaattaaacaatatcttcctgaatgaccagtgggcaaataaagaaattaagaagtaaactgaaaagtttcttgaaacaaatgaaaatgcaacataccaaaatctatggaatatagcaaaagcagtactaagaggaaaatttagagcaataagctacctcaaaaaaatttagaaaaactttaaataagcaacctgattatgtgtcctaaagaaccccaaagcaagagcaaaccacaaaattagtagaagaaaagaaataataaagataacaacagaaataaacttaagacaaaaatacaaaagatccatgaatcagagt

SEQ ID NO: 174925 - DNA, 503 bp, Homo sapiens
accgctgagtggaggaggctgacctttgaggaagcacgtgggatttttccccgcggaacagacgtgagccatgaacacgggagcaaaagtgtgctagagtaactcccgtcaaagagagacccttactagggcaagaagaccttgatcaaagcatacccagatgccgaggttctgaggaaggaaataagtgaccaccaggcatggtgctctgattattaagctagtttctcagctccaaactcaaccttcactgcttagccttgtcacggtgggaaggctgggagaggccaaaccacctttcccctttgccagggctccctgatcagttctgcctatgtgctactaagggaaacagtaaggctggaggagggaaaggggacaccacccttctctttgcgcactgcttatgccagcagcatccgagcaataccgcttgccctgtagtgcttcttgagtcggatttcagttcagtgtctgggttttttaacatttctataaccatt

SEQ ID NO: 174926 - DNA, 1036 bp, Homo sapiens
agtgagaaagaatccctggataagcaaagaaggataggtacggagatgtaatttgatacaggaggcaatggaaaacacgaaagaaggaagtgacatgttgaaagattattttggagagtatttagcagaggagtagtgagtaggaaggcagaggtgtgagcaaaactagggcagactttaaagctgtgaaacccatccatacacttgcataatttaaataattaatgaaccagtaaggtttactgattcctattatatgctcatatacgaaaggagtataaaacatggaccttgtccatatgaaaaggggaggaaaggatatcacagggaaggaagcataatgagtaatgtcccaaaggacagagtgagattagttttgtgagtaaaataaattatactgtctaataaatatctaatacttcctataatctgtgttcttacagaaataataatagagtttaagacaatctttcaggcttatcagttatgaaactaacaatgatgggtttactctcactaaatataaaatacctgaatcctacatcctttcataacaacagttatcaagttaaagtcaggtaaagtgtggttacatgtggaaactggttccagagctggtctccaggcgtcggtggtcaccctccaactttctgctgtgggacccaggattctcagtgaaattctgcctggagtaccagcagggcaccatgctggtgtcgaagctgtcatgggaattccttacattgacaaactcaccaagtagcagatatcctgtctccctagagctcttcctgtattaactcctttaatccttacagtcacctagtaccctctccaatatcatcgtcttttaaaggttaagtggtttaagcagaggagataagtaactggcttgaggtcacacacctcctgggagaatagagacagaatactgggccttggaatctaaaaacactactcctttactccttttctctcccattcctccaccccagcctgggtgcacctttggcagccagatgtcctgctggttgct

SEQ ID NO: 174927 - DNA, 368 bp, Homo sapiens
gtctaatacaaggcacgtcctatatgcccctgtccctggccatgggcctctgctacaccagagaaacaggagcctatgaatgtaggggccgagctggcatcctcctggccatctaatgccaaggcaggctcatacctgggatatcagcctggtgagcccagcctgtcttagagctaggcaattgtctggacattgcaatgttgtgggttgggggcagcaggatgcttggtatctccagctacagaatgttggaaggaggtctgatggggagcaaaataagctcataaaggctcaccgagggcccatcgttgtagcataagcagtgattcctggggataggaacagcagccagtccagctggcatggat

SEQ ID NO: 174928 - DNA, 431 bp, Homo sapiens
ggggtcatgctacaacccaacagaaaggagaagttagagaagtaacaaaaagaaggttttgagaggggacttgcagtgtttgaggtcagggaacaggagatgactcaggaatgcatctggaccaggtaaagtgaccagcccttacttttagttcaaaattggcatgtgacgtgtggagacggccccagccaccaacctacattcaccccctcatcacagaggggcaggctgaaacagaggacacaggttggccctggtcaaatgacaatggtttcctttagctccgtccagaaggggaaacaagatttctttgccaaagtagaaaccatgggattgccagttttattatctgggaaggatgaaatatgctttctgagcactgtagcactatcatgaacatccagctttcttctcactaaccttaaccgggc

SEQ ID NO: 174929 - DNA, 581 bp, Homo sapiens
cttgcgctctacgcccaagggagccgggctgcagagctggagaaacttccgcggctacgggtgcagttgccttcggttcccggttccgggccgacacccgcgcagggctgagacaggtgtctgcgctccccgcaatgggctgctccagcagcgccctcaacaaggccggcgacagcagcaggttccccagcggtgagacaggggaaaaggtggaaacagacatggagaatgagaaagtgagtgaaggggctgaaaccaaagaagaagaaacaggagaagtggtggacctttcagcagccacatagatagaagagtgaaccgacacagtgtgttatcatagaggagacaaaaatggtagtgaagcttgtggttatgtatcttatctttctacatttacatgttttctgtaaggagtgtggttatagagagactgttggaaccatgagaaggatgtttctgtgttcttgattatattgttctgcaaaactgctaagccatgaacagttttcttagctacttagaatggttatacatttaaaagtataaaaaccaaagccaataaaaatgatgtgattatttaa

SEQ ID NO: 174930 - DNA, 1535 bp, Homo sapiens
cttgcgctctacgcccaagggagccgggctgcagagctggagaaacttccgcggctacgggtgcagttgccttcggttcccggttccgggccgacacccgcgcagggctgagacaggtgtctgcgctccccgcaatgggctgctccagcagcgccctcaacaaggccggcgacagcagcaggttccccagcgtaacttcaaatgagcatttttcaactgcagaagaaagtgagtcctgctttgcccaaccaaagccacatgcactgggaagagaatctactgttgatggcaatgtacaaagggaaagccgtcctcccttacaaaagctcaaggtttcagcagagcctacagctaatggtgttaaacccctccaagaacagcccctggccaaggacgtagcccctggaagggatgccacagaccaatcagggtccacagaaaagactcagcctggagagggactggaggaatctgggccgcctcaaccaggtggcaaagaggatgccccagcagcagaaggaaagaagaaagatgcaggagcagggacagaggccgagtctctaaaaggaaatgctgaagctcagcctttaggaccagaagccaagggtcagcctttgcaggcagcagtagagaaggactctctcagagcagtggaggtcactgagaatccacaaactgctgcagagatgaagcctctaggaacaactgagaacgttctgactctgcaaatagctggagagctacaacctcagggcacagtgggaaaggatgagcaggccccgcttctagaaacaatttccaaagagaatgaatctccagaaatattggaaggaagtcagtttgtggaaacagctgaagagcagcaacttcaggcaacattgggaaaagaggagcagccccagcttctagaaagaattcccaaagagaatgtaacaccagaagtattggacagaagtcagcttgtggaaaagcctgttatgaatgatccattccataaaactcctgaaggtccaggaaacatggagcagattcaacctgaaggaatagttggaagcatggagcatccagcacgaaatgtagaggcaggagcatatgtggaaatgatcaggaacatccatactaatgaagaggaccaacgcattgaaggtgagacaggggaaaaggtggaaacagacatggagaatgagaaagtgagtgaaggggctgaaaccaaagaagaagaaacaggagaagtggtggacctttcagcagccacatagatagaagagtgaaccgacacagtgtgttatcatagaggagacaaaaatggtagtgaagcttgtggttatgtatcttatctttctacatttacatgttttctgtaaggagtgtggttatagagagactgttggaaccatgagaaggatgtttctgtgttcttgattatattgttctgcaaaactgctaagccatgaacagttttcttagctacttagaatggttatacatttaaaagtataaaaaccaaagccaataaaaatgatgtgattatttaa

SEQ ID NO: 174931 - DNA, 494 bp, Homo sapiens
gcttcatattttctatttgattcctctttgtcttcattgatattctctttgttgagacattgttctcatttcctttagttctttatccatggtttcctttagctctttgagcacatttaaaacagttgatttaaagcttttgcctagtaagtctactgtgtgttcttcctaagggacaatttctatttatttctctcctctaacccatgaatgggccatactttcttgtttcttttcatgcctcataatgttatgttaaaattttgacattttgaatattatgatgtgataactctggacatcagattttcctccccttctctagggtttgtagttactgcttgttgtaagttaaagttgttggtttatttagtgacttttctaaattatgtttgtaacgactgtactctttgttgttgtgtgatatttctgttcctttagcttagtagctggctacttgtttgatagagattttcttaaatgcctggggccga

SEQ ID NO: 174932 - DNA, 929 bp, Homo sapiens
ttaacttgatcagggctaagattgttcctcaatcagatgttttcaaaacaaaggtgtctagggggtgttatttctcttcacaaaattaatagctctgggaacaaaaaatttgtgtagaactgtagcacttacgaggataggaaactcataacactctggccatactaagagagatttgatgctcttatatgagcaaacagatttaataaacagcgattctaatagttttctaatgtggcagtgtttttatcaactaaaacattgattctcttcactttagtttgggaaggaaaaaagcattaagcttctgtacctaaaatatgttattaaatatgttgtttacttaacagaaaccagtgaggtatcttagtccagctttgttgtgtaaataaagaagttgaatattaatgaggataaatgacttgtcttggctcacacaacttatagatcctgattttggacccagatattcctgcaaaagtctctttggttttgttgttgttgttgttgtgtttttgacacagtcttgctctgtcgccaggctggagcaagtggcatgatcttggctcactgtaacctccgactccctgattctagtgattctcctgcctcagcctcctgagtagctgggattacaggcacgagccaccatgcccagttaatttttgtatttttagtagagacagggtttcaccatgttggccaggatggtcttgatctcctgacctcatgatccacccgccttggcctcccaaagtgctgggattacaggcgtgagccaccgtgcctggccaaggctctttgtttttgatcagaggttgttaatttgggttccctggtctccaacatttccctcacttcccccagtgtatatattcttttcaaataactggatttactggattaaggaatacaataaagttaagaat

SEQ ID NO: 174933 - DNA, 518 bp, Homo sapiens
taacgaaggcaggaattcaggtcaaatggttatctccgatgatgagattgaacagtattattgtgataattccaacttcattttggcctttcacttatgcattatatgataaattgatactgccgacatggggaagtcttgaaagtattgtagtaccatgttctccccacttataacctgaatcacagtactggtgaccacatttataaagtcacatgttatgttgatgcatgaaagttggtaaaacacaaaattgtttttctaaactatgttatagtgttttatcacattttgtttcttaggcctagatgtccacatttaagtaggtttcagtttgcttctcttcataatataataaatctccccccaaaagtgtttggatttccaatataattcatgctggaatgcttgacactttgagtgttaactgtttgagtctttaatcatctgtgtttgatattgtagagtttatgtaatcctcttagaaagaagctcttactatcacggaagtatgtagt

SEQ ID NO: 174934 - DNA, 462 bp, Homo sapiens
gtgtcaggacaggccctgtgaggaaagtgggtgccagatgccacacgtgagagacggggcgccctgctccaggtggtgggtgtgcagtgaggatggcctgccccacgcgcgcagagcgtcagaaagaggaaagaaaacgcagctggcagttacagacagattttctttagttaaaacctgagaggcacccccagccgattgcggtcaggagcactttatcttacagactgaatgttggttttaggatgagagggcttatcagaagctcggaatgtttatgtgtgtggagaagtttatggcagggttggaaggagggaaggttatcttggggcaggcatcttttcagcctggaggtgggttttctcgaagctggcatcttcccggctggagaagggttatcttggggctagcatgtctctggttggggaggagtttggaatgtttctggttggagatgttatt

SEQ ID NO: 174935 - DNA, 593 bp, Homo sapiens
gaaggattcccctttaggcataaggggcagtggatagcttattcaggggtgagcagactgttctgtgccagctggccctaatgagcagtcttcggggtgtcccatctcatccaaatgtatgacacagctggtctatacaacacacaccccactggaatgtatttgaattccttggaattgagctaacatggccctctggcaaactatgagtcttaaaaatgcagatttttgcagcaagtcatctttctgagtagctcagagctaaggtggctaatgaggatataggtctgaatcctctttgattttgttagcttcttacatcttggcagtgcaccagacacaccagagaactcagttgtgaaaatgggcattaaaagcgtaaatctatccccactgttggaaaaataactcaaaacatgtgctttagagttgtcagtatagggactttcaaaagatagtatgttactgtatctcaagccagaagagggacttgggaatgtctgccctggccataaccattgactcactccaagagataactgagctccagagacttatccaaggccacatagacaacagtggaacctagcaca

SEQ ID NO: 174936 - DNA, 321 bp, Homo sapiens
gggaatccttcagaagggaacctgcatttattgagcatcacctgtgtgtcgggtgccaggttaggagctctaggcaggtggttcccccagaatccttaggaagtgaacactgttatccccactgttggaaaaataactcaaaacatgtgctttagagttgtcagtatagggactttcaaaagatagtatgttactgtatctcaagccagaagagggacttgggaatgtctgccctggccataaccattgactcactccaagagataactgagctccagagacttatccaaggccacatagacaacagtggaacctagcaca

SEQ ID NO: 174937 - DNA, 454 bp, Homo sapiens
ggcacaaagcctggactggtggagggcacacccacctccctgctcctgctaggcctcctccctgcccttgtcccacagggggctgggggactgccttcatggggtggagatgcggaggaggctggaggggctcttggagctgcagaggggcgattttgttggaagggagataaacagaaacatcaaaaggagccctagtgtgtgtggagaggagcctgtggattaaattctcctccagctgagagaggcgatgagaaggctgatagcgcccaccgcgggtcccggagccagagcccagccactacaggctgcggagctggcagctgcccgcggggaggccgaggtgacagcttagctttatttatttcttgggaggggaaggacacatgaaatccctcctggctccctgccggtccctccccgtgtagctcctgcactttgctcctagggctgc

SEQ ID NO: 174938 - DNA, 280 bp, Homo sapiens
aaatagccgtgggaggagactctaggtgcagagaatgggagaagtaatggcccagggagtgttctcacaacagtgggcagtggagactggcaggagcatagaggtataaaggaaaccaggaaataactacggctggaaaaccaagtcaaagccccattgcagaatctttggtgccttgctaagtattcccaacaatagagggcattgaaggacttggaggaggagactggtttgactcctgctgtgacttgggaagttccccctaacagcagtgtgcaca

SEQ ID NO: 174939 - DNA, 165 bp, Homo sapiens
ttgtgattagactgaggaaattctgagacatgaaatgagtttagtgaattctgacgtcagcctgggatttagcagtagagctgcttttcaccatccagtgtgcctgtactccatcaaagatcctttataacttttctctaaattctcaaattagctttcctcaga

SEQ ID NO: 174940 - DNA, 123 bp, Homo sapiens
tgcaaagatgctctcaaggcagcccagtgagggaagcagataagtgtccagataatgatggcacctgacagaaaataaactgagtccggccgggcgtggtggatcacacctgtaatcccagca

SEQ ID NO: 174941 - DNA, 812 bp, Homo sapiens
tgtgaagagcacgctggctgagctggcgagaggggtgggggcgtcctggggctgcttctgctctgatgaaggcacccactgtcactgtcccggccctcgctgagtgttcccggacccgtgggcccgcgtctgtgccaggccttggggagctccagcctcggagcctcttcccgttctcagacctcagtgcgaggaggaaatcgggtggctagtggggcactacctgtctggaagtattttacacgaagtttaagccttgagatttcctggagcaggacctctgaagtcaccatcacaaatggcaggcccacacaaggactgatttacttctgactcacccatggccttcaggcttagagttggggccttgtcggattcctctctcttaccaactctgggctttgactctgttgtccctaatgccatgctgataaataattaataactggctcttcataaaaaaaaacagttttgatctgtagcacctgccaattcccatggtgtaaacactcctgccatggctgacttcaagttaccaacacaacatcactgagtgtgggattggaaaaagatgcccatggctggctcttaagagtcctctgagccttgctggttctccctcacctgccattgagggggctgatgggtgcaacagtcattcctgaggctgcaaagttctttaaagcagaagcagctgactcttgcttatgttttgcagtacttgctgggctctcaactcctccaaggttttggcctggtagtgcattctttgctacctgatttgctcttttctgctttaaagaagattggaa

SEQ ID NO: 174942 - DNA, 340 bp, Homo sapiens
ctctttttctaggagcagcactttttatttttgaaattatcctacaatgaattaccggcttttcttctgttctcatctttttccttccccaacatacacacactgtaaatatgtgccatgttcttaggcaatcccactttctcaacctttgttgagtgacccaagcaaggttaaattcgagttctccccaacgagttttcccagctgcaattgaagaagagatacagtccatctctgtggtggaaactccaggttgtgaaactcaagatcaatcagcaatagaacctctggagcagctgctgggtgatgagaagaagcaggcagaagaaatggacagaat

SEQ ID NO: 174943 - DNA, 493 bp, Homo sapiens
tctgttttcttgagttgatggttgtatgctgtcatcagtcctatgaagagtgaatgcctcaatgcaaagaatttaaagaaacatctgttctttcaacctgcgtcattcctgaatagaaccacctctgttaagatgttgtgaaaatagtgactgctacttttttaccactaagatccagtcactttacatacatgacctcattcagtcctcacacctgacctataaagcaggtggttagtacccacattgtatattagtagaaaccaagactcaggaaagtgaaacaaacttatcaaaggttgttcaactaataagcagaagaaagtgggatcagaatccaggtgttcctttacttcaagcctcaggtgcttcctcctctgcgataccacctgtttttcattgttttacagtgtgtcaaaagatatgctttatgctaccttgaatttatgggccaactatagagtctctttcccaaattctctgactcccttcc

SEQ ID NO: 174944 - DNA, 416 bp, Homo sapiens
ggttagacagggaacagcacacacacatccagatgtaattcaagtatcatctggggaaatacactaaagcctaatggggaaaccccattgaatggagcaagactttctctctgttaggggtaagacaatcctgagcaggacagacacacatgcttgggtgtggaattctgatatccctcactgtccctgctggaggattatagaattctggtgacatcctgccctgaggatccaggatatgttttggtaaatgtgggattccggtgagttcattctgggctaacacatgatgactgccctttcaagtgtcattccaggaagacatggttaaaagcaaaacacgactgaggcaggagcactggttgaccacaatgaacaattctctctggcaactgctgctacccaaccaaagatca

SEQ ID NO: 174945 - DNA, 317 bp, Homo sapiens
ggcaggagggagggataaagggagggaggaagggcagaagggaagaaagaaaccaggaggaatggtggcaggagaggagggggtttcaaggaggttgtcggccagtgtcgctcacatgcctggagctcaagccaccgcgccagctctgtagaggcaggagtaacgcctgtggccttggaggctgccccgcagtcctcttggttcaccactagtgtgtgtctctcatgcttcgagtgagtggtgtggaacggagcctagcgttgaatcaggacatggaggagcaagagccgctggggggatcctgtgcccgagaaacc

SEQ ID NO: 174946 - DNA, 673 bp, Homo sapiens
gagtaacagaatctcaaatcagaatggtagtaatgaaatattctttttactttcaaagcaatattctaatagacaagataccatatttttacctcatgtttttcctttagaatatacttatcctcaagttaaaattttatcccctttacataacaagattttagaaaatctaggccagtttgaactcccatgacgtgctttgagccatccatggctgtacattcccagattttagtgcaaagcctttcccaccaatttggaatgaactgatcattgtaaccagctttgtatgaaacacttgtttcggatcccagcgctgtagtgatgtcattttctttatacccaaagtaaatgctatgcagagtagcttattctggaatttggctgtacgattcttctcttggttaaaatcttccatagcagaggagccctgctaagtgaacagtctctcttacacattggtttttgtgcttctaactaacttttctaataatcttatttttccctgagaaagcaatccatcctatttaatgtggagtaggggttgtggttggaaatgaaaacaaatccagtatgttctagtctgatttttttttcttttttagcatcagtgtgttttcagtagaagtgattcaatcttaatgtggtttgggctcaagggtagagaacaata

SEQ ID NO: 174947 - DNA, 428 bp, Homo sapiens
ggagtttgagaccaacgtggccaacatggtgaaaccccatctctactaaaaatacaaaaaaaaaaaaaaaaaatagaaaaaaatcccgggtgtggtcgtgggcatgggcacctgtaatcccagctactcaggaggctgagacagaagaatcacttgagcccaggaggcagaggttgcagtgagcagagattgcgccattgcactccagcctgggcgacaaagcgagactccatctcaaaaaaaactaagtgccctcttggcaatctttcacatcctctcatggcatctgatccagaaggctcaaacctgatctgagtactagtgtgttcctcctactcacttctgtttctattaactaataagtgtagtaatgaaagccagtattagggacaaattttacatgactttcttctcaaacctggaccttt

SEQ ID NO: 174948 - DNA, 486 bp, Homo sapiens
ggagtttgagaccaacgtggccaacatggtgaaaccccatctctactaaaaatacaaaaaaaaaaaaaaaaaatagaaaaaaatcccgggtgtggtcgtgggcatgggcacctgtaatcccagctactcaggaggctgagacagaagaatcacttgagcccaggaggcagaggttgcagtgagcagagattgcgccattgcactccagcctgggcgacaaagcgagactccatctcaaaaaaaacaaaaaaattagcatttacggaattctgaaattttgggctattaaatttctacatcatctaagtgccctcttggcaatctttcacatcctctcatggcatctgatccagaaggctcaaacctgatctgagtactagtgtgttcctcctactcacttctgtttctattaactaataagtgtagtaatgaaagccagtattagggacaaattttacatgactttcttctcaaacctggaccttt

SEQ ID NO: 174949 - DNA, 416 bp, Homo sapiens
ggaaattgtgaaggatggaagactacaggatttgggttactggctttgtatcagttttttaaattgctgtcataagaaattaccacaaatttagcagcttaaaacaatacctatgtattatctcacagcgtgtctcatctagattccctgcttagaatctcagaaggttaaaatcaaggtgtcaatggggctccattcccttctggaagatttgtgaatgcatccgcttctaagtgcacacaggctgtgggttaaagtcaattctttgaggctgcagcactgaggttcccatttccttactagctgtcagccagggcgagtctttactcctagatgctacacacgtttcttctcaagcgttccatctggaccccttccagtgacagcaggttgaattcctctcatgctttgattct

SEQ ID NO: 174950 - DNA, 457 bp, Homo sapiens
acagtcttagacaaaaacatttgcagcctgctctttcaaagggcagaagaattgtattcttgcagacattatttgcttaaaattcttaatttcttatttttcatatggtctttctttctgcattgggagagaagatgctccctttatatatggttctctattcttactacaacttcactttcacaagcttatgagtgtcctcctccgtaaatcttctgctctattctttacactttccactctgctaaggaacagtatttatgatactattactcaatcattacatttaaactccacaaccattcacaaaatagttggaatacataaaccttagaaccacagtcatctatctgtcttttctttttttttttaaagacggggtcccgatctgtcaccaaggctggagtgcagtggcgttcctgcttcagcctgctgggtagctgggaccacaggcatg

SEQ ID NO: 174951 - DNA, 233 bp, Homo sapiens
atctgtgatgttctcaacgtcaccatggggccagggctctgacccactaacacagacctgattctgatctgggaactccaaagccaggcagagacaaatatgaatctgctagaccagcatgaaaaaaacaaaaatcacaaaaagaaagagagagacataagagcaaaaaaacttccatcagaatgtgcctgcaaattacagaacatgatgaaaatatcaacaatcaaaacata

SEQ ID NO: 174952 - DNA, 155 bp, Homo sapiens
tatgattcatgttgaatatttatggaagagaagtgtttctacaaatatgtaaaaatattggtgagtgaaagaaatggctcccagtatgacagaagaaaatatcctaaagagatccacagttatctgcagtttccccaaggttgtgtttacataaa

SEQ ID NO: 174953 - DNA, 225 bp, Homo sapiens
ccaaagtgctgggattactggtgtgagccactgcacctggccaaggacctagctgttttattggaggatctcaaatatcagtgtctgtagaatttctccagagatcttctattctctggctagaggacagggaagtataatgtgtctgtctaccaactttctagaaactgaacaagggaaaagggctaggaattttctctaactataaaaataaaggtatccaga

SEQ ID NO: 174954 - DNA, 351 bp, Homo sapiens
tgacgttgataacctggctgatgtagcatttgccaagttctccactgtaaagttattcttttccccattttcttactgaacattttggaaggaagtactatgtgcagccctcactaaaagaatgaggagttatgctccacctccctgagactagaatatctatgtaatttttttggaacttttctgccaggaagatttctctattttctccaagttatttatttatttaatcatatgtttatattagtgtagacttctgtatttttgttttatagtttgtgttattatccagtactgttttatttattttgttgctcagattctttcagctttggctattggtaattcttt

SEQ ID NO: 174955 - DNA, 133 bp, Homo sapiens
atggagaaaaggagaagagcttaggtcatagtgcatcagaactgatggcaacaggaagcgctctggttctgtggctttcaaacatttacagaagttaatccatttttcaatgtatggtaggcagaataatggg

SEQ ID NO: 174956 - DNA, 131 bp, Homo sapiens
tagatgaatatgtggttactgctcatcggcctaaccactttaatgtggaatacactgggctataccgtactctacatttacagtcctttcactatcctaaagaaacagtatgcctatcttctaaatctact

SEQ ID NO: 174957 - DNA, 431 bp, Homo sapiens
gagacaatatctcactctgtcacccagcctggagtgcagtggcgtgatctcgactcactacaacctgtgcctcccaggttcaagcgattctcttgcctcactcagcctcccgagtagctggattacaggcgtgcaccaccacatccagctaattttgtatttttagtagagacagggttttaccaagttggccaggctggtctcgaactcctgacctctagtgatctgcctgccttggcctcccaaagtcctgggattacaggcgtgagccaccacgccaggcctcctcaccttctctaagcctcagtttcctgctctttgatggaggccatcgtgtctcccccacccccatagtgagctgtgcgagtagaaagccccagcatggtacctgacaccgcagaggtgtgcagtggagctgaagcgggagtctt

SEQ ID NO: 174958 - DNA, 212 bp, Homo sapiens
tacacagcgtagggtacatacggtactcaacacatcttagtctgcttcctatctcatacccgtccttcctttaaaggagattcctttgacataatccaaaaggcatggttccataacgatcacatgaaagttttaagggaaatgtataggtttccatgatgaattaactgctgtgtcactactctgtgctgggtaagaaaaaggaaaacaat

SEQ ID NO: 174959 - DNA, 483 bp, Homo sapiens
ttgctacagaactaccagctcaagtttgagtggggaacaaccatgtatcttcctcagaatgtaaaaactatgccaaaaaaggaacaaaacggagttatgccagaacaactattctatggctgtgctgtcccatatggtagatactactcatgtgtagctattgagcacttgaagtatggcaaggcaaaatcaagatatgctataaatgctgggcacggtggctcacgcctgtaatcccaacactttgggaagccaaggtgggtggatcacctgaggtcaggagttcaagatcagcctggccgacatggtgaaaccccatctctactaaaaattagcagggtgtgtagtggcaggcgcctgtaatcccagctacttgggaggctgaggcaggagaatcccttgaacccgggaggcagaggttgcagtgagccgagatcacgccactgcactccagcctggatgacagagagagacactgtcttt

SEQ ID NO: 174960 - DNA, 478 bp, Homo sapiens
  misc_feature (19)..(19): n is a, c, g, or t
  misc_feature (21)..(21): n is a, c, g, or t
tgggtgactctacaggatntntgtggctacctgctggagggagtcactgtgcccgcccagaaacacccttctgcatggattactttgtgtgttgtgtctcccttacttgaaggatgcacaattaccatcttggccacaggacaacagcagcacctactctggggttgcagtttagatgctgaggtgtcctcggaagactgaggggctggggcaaatgtgaggatgttcccacatttctcctggaaatttcaactctaattgatctaaacttcctgtggcaatttgttttagtcaaaataagaggagaaggcctccctaaggtcagaaaagccctacagaccagaccctgcatcttcagccagtcctgaggcatctccatttttgtcatctgtgtgaactgcctcactccagctcccaggtcttccatgctctgcacatcaccaggacccagtttggccattatgggcagggactttgc

SEQ ID NO: 174961 - DNA, 297 bp, Homo sapiens
tgtaaagatcaattgttattgtcaatacttgagttgtgctttcagctagattctaagctctttgaaaagtagttcttttgtcttaaagctgtatacctactagctgaaaaaacgaggtttcaatagcttttgaataaatgaataattttaaacctagaaagttcttttttaagagatttaataaatttttcatacagttattaaggcccaatattttatttaactgtttaatatatttagaatttatttgggaccatggtgtaagatggagatctaacttccttttttttttttttt

SEQ ID NO: 174962 - DNA, 558 bp, Homo sapiens
ggtgattcaaatgttggctttcacagtggttggctgactgttcaacacaggaactagtgcaaaattggtaactaacaaatgcttggatggttaatcacagggtcagttggttgaagagagtccttacttttctttctttcttttttttttttttgagacagtctcgctctcgctctgtccccaggctggagtgcagtggcaccatctcagctcactgcaacctccactcactgcaacctctgcctcctgggttcaagtgattctcctgccacagcctcccgagtagctgggactagaggtgcatactaccacgcccagctaatttttgtatttttagtagagacaagtttggccaggatggtcttgaactcttgacctccagtgatctgtcggcctcaccctcccaaagtgctgagattacaagtgtgagccaccgtgctcagccgggtccttactttttgagctgagtccatctgccccatgcaatgtattcagagccaaaattccaacgcaccaccattccctggcaggatgtgagatcaacattctgcagctacc

SEQ ID NO: 174963 - DNA, 287 bp, Homo sapiens
tgaatcacaaggaggtgatgaactaatgaacatccagaactccaacaggagacaatgtcagaaggattaacaaatctgaccttgaccctgggcaacatagtgagaccctgtctttacaaacagttttttaaaacttagctggatgtggtggtgtgcgcttgtggttccagctattccggaggctaaagtgggaggttcgcttgagcccaggagttagaggatgcagtgagccatgatcacaccactgcactccagccctggcaacagagcgagaccctgtctcttta

SEQ ID NO: 174964 - DNA, 353 bp, Homo sapiens
ctgtttcctatagaatcgagcggagtacccatcgtcgattcactgcaacacagactgaatctgcagccaagctccgctctctcactactgggaaccctcaggggggatcccttagcctaaatcagcaccagtcactacccgcacacgatgttattactactgttttcttatgagtcagcccgtgtcactgattcctgacgagctggtgtggagagcagaaatgaatgattttttttttaactgcaatttccttctcaccaaccagtcagcaatcggagctctaacagtaaaccgattgctcagttactccacgtgggtgccacgcaagaggctgggagtattgctcagcgggg

SEQ ID NO: 174965 - DNA, 465 bp, Homo sapiens
tctccacctctattcctctgctgatgctggtccctccacctcacatgacctcttgacccacaggtatgctgtccaaccttcttagctcaccaaacacagcaactcttccatggactgtccctatctgcaacacccatgcccctcctatcagctcccatggcaccgctggtcctccttgaggtctttaaggcattcatccacttattgaaaccataaatactgggctattagtgatatttaaggtagtgttctaggtgccaaggacacaactaagtacagactacacattaacctctatcttcacggagctttcactttagtggaaggagaacaaaaacagacaaaatgagtgaatgaagatgggatcttagtaatggctaaggacagataaaatgctgggagggccagggctgccatcttccatggacactcagaggaggcatcactgagggggcactgtgcaag

SEQ ID NO: 174966 - DNA, 154 bp, Homo sapiens
atttttaccagatttttaatgttttcttttaatttgagttttaattctgaatattagtcttagccatttgaacttgaactgtaggatgctgctgtaaacatttctgcagtggagagatctcaaagtgtatttctgctatattctgagtagcaga

SEQ ID NO: 174967 - DNA, 190 bp, Homo sapiens
ccagccagtcaactgattatggagggactgggaggggtaccaggggctgtgactcccactgacgtatctgtccatgacccaacactgctgctcaattgacacttcagaaagtctgtgctttcctaagatgaagcaggcggcctcacagtctttgagcccttagatcatcatgcatctgtcttgtgacaca

SEQ ID NO: 174968 - DNA, 1511 bp, Homo sapiens
tgtttttgaatattctttagtcttttcaaaacaattttatttaattagttttaatagttaacatagttttgttcctctagactacccttcagtatttttcaaaccagtaaagtttgatattttaattaattcactcaaaaattagttgagtgcctgctgtgtcatatagtgctctgatagttagggatgtattttgaacaagatgcaggccctgccctcattaagagacgtcaaatagtaaacatgtaaacaaatggtttagataccaataagtactagtcaggtagcggatcatagtaatctggtaatggttaacctaaagaagaatgggcccatggtctggaaaagtctctctggagaagcaatatttgaattgggaactggtgaggaaggatgagggagaggttaccacacctagaatctgaagacaagagtcttgtaggcaaaggaatgtgaaacacctgagatgggaacagcttgacctgatccaggaaaagtacgatagctagacagggccagatacctagggctgcatagattttgttctaattctaatataaggccatgacagcattttaattgggaaataataagattataaagatcaccctaactattatatggagattgaactatagggagacacttggggaaggaggatggtcatttaaacttccataaacctgccttttaagaaatgtttgtagtaatatatgctgaattttatttaatcatatttgcttcaatatatatttcacttgtcccagatcagcaaaagtgagggttctttagaaaaattcaaatctatttaatatatttatcttatttgtgacctacattatgaaataaatattagtatcttttgatagcttaaatttaggcagtgcttagttacttataaataagtgataaattctatggctaatctctggcaggcttaagtgttctggctgttgtcctacatattacaacatttaatatatccaaatttagtaacctaatgaaatcataattaggaagctattgcctcagataatcctatcacatattcaaaagaaaatggtaaaatcccttttgtttggtgtgctttgtcgaatactttctaccattgctcttatcacagcaaacataatcttgtatttagtattttagcaacagcattttatctgaaactctttacttaaactctttactctgtatttaagattaaatccttaaatacagacattctgggttggtcctgtctatcagtttctgaaaataaaaagccatgtattcaagtaattgagcatcttctacaaacaaagagtttgtatttctactttgaatgtcagtttgtcatcatgaagcattggtggcattacattatcaattatttgaaactaagacagttcagtgttcatgcagatattaatagaatattttacatttcaactttattatcaccaacaggcaaatgtttgataaagagaacttgaaaatgcttcttttcctctggtccaacatacgct

SEQ ID NO: 174969 - DNA, 501 bp, Homo sapiens
aatgtcttccctgtgatgacatctcctcagtttcaggatggggcatcagtgccgtttttctctccactgcctggcaaatctttctctccaagtctttttcctcaatgaactgaaggctccttgagggaaggacttggtcacgttcatccaaacccctggatggtgtctgttatagagttgggccttaaatacttgctccattgaatttgaattgaacttaaaatattatggcagtcctggtaaagtggcttgcacctgcaatcccagcattttggaagtctaaggtgggtggatcacctgaggtcaggagttcaagaccagcctggccaacatggcaaaaccctgtctctactaaaaatacaaaaattaactgggcatggtggcagacgcctgtaatccaagttactcaggaagctgaggcaggagaatcacttgaacccaagaggtggaggttgcagtgagccgagatcgtgccattgcactctagcctgggcaacaaga

SEQ ID NO: 174970 - DNA, 342 bp, Homo sapiens
aaaaaagtccaatgaccaattttgtcaaattacatttaacaacagtgatttctaaactccctaataagtggcccttgtttctggagtccaaagacataaagaaaaatataaagcatggttcctaccctcaaggagtgatatggtttgtctgtgtccccacccaaatctcattttgaattgtagttttcataatccccacatgtcatgggagggatctggtgggaggtaattgaatcatagggatggttaccctcatgctattctcgtgatagtgagtgagttctcaagagatctgatggttttataaggggcttttccccttttgcttggcacttctccttg

SEQ ID NO: 174971 - DNA, 273 bp, Homo sapiens
cactctatctagtcacatatgcctaaacctgggaactgtcttaatattcttttatatacacctgttctgacctccccccaaaactagtaaatttctaagacctgtccttctgaatgtctcttacaattttccctgtgatctcagtttcttcctcccatccctcaaatgctttgtgtgtgtgtgtggtgggggaagagagtaaaattgaaatttgtggaaaacgtactagcctgtctgtctgtctttcgaggtgaagtctccctcttgtcccct

SEQ ID NO: 174972 - DNA, 301 bp, Homo sapiens
gaggcacatagcaatggtagcaatcataggaatggcaatgggtatggtactcatttggtggtggaggatgataagtctttctattaccttgcctcttttaaagtcacaaatatcaaatataaagaaaattatggcataagatcttcaagagagtttatagaaaggagtcatcagattgaaagaatgatgtctaggatatttcgacattcttctgtaggcggtcgatttatcaaatctcatgttatcaaattaagtccagatgaacaaggtgtggatattcttatagtgctcatatttcgat

SEQ ID NO: 174973 - DNA, 339 bp, Homo sapiens
acagtacccagtcttcctcaattctatttgttattttaaaacaatactcagttttcctcaattctttccaatatttttttaaattatggaaaaactgaagaagtttcaaagaaaaaccaagaggtaaagaataggatggaaaagaggtaattttgaagaatggtttgaaatcaaatgaagtgtgacatgactattaacactgaaatatccatggggaggcttttgaatggagaccctgaaaagctgatgtatctctcaatgcccacagatgactcaccaagaagagagggctaacaaaaccctcaaagtttgttgttttacagaagagagatttcttta

SEQ ID NO: 174974 - DNA, 604 bp, Homo sapiens
gacacagttgtccaaactactttaaaaaacaatagattcagttttatactcattcacttaaagggtagggtagatacttgtcaaatgtggttttgagggtttacactggaaagaaaaatctcatcaaaaatatgaagcaaggcctcccttctcttttcattctcatttggaagaaaggggagaacatcttattttagtcttttttaaagagcataacttattcaaaggctttgttacactctgcaggacactacccgtatttaagttaaaaaaaaggattcatgagtgagccagcaatcaacaagtatttactgaagcctcatataccagaaagttcaaagtgctagtttaaatggtcttcctaaggtatttaacaaagtcatgtcacaaaatacattgtagaagataaacatttatcagtgagtcatcacagaccacaagtgcccttacaacagagtggacgtatgtgcttcattttctgatatattagtaaatctgagaaatattgtccaggttgtataggatgtacagtattttcattgtctttaagtgccagcggactacagatggctctcagatccccttggatcacttctgtgtggtt

SEQ ID NO: 174975 - DNA, 963 bp, Homo sapiens
ctaaattatgcagtgccaaaagtgacaactcttatacctacaccatcccgtctacagcggcatgattttagctttatagctaaaaaacgctgccagaaaacctaataaaaggaagcaaaaatatttctgtttatatcaagctgccatttgagaaagattttaaaatatgttctttcctatgtgtaaatctgacagcagatgcataattaaaaccccagtggagagtttccatttaatcttttcaaagttaactgataaacatcctttaggatgtgaagtgatgggttaattctgtttggattgtttggaatatctctgagctggaatactgtcttcaagaatattgtttcgtgctaaaagaacacaagacagttatctttatctttaggagttcatacaatcacaggaagtgcagacaacatgccaaaggccacacatgcatctatgatgagtgatgcttgtcttagatgttttttaattggcagaatgaataaatggatacattcacattaaaacaaacttgatttcaacccccagggaatatgtcacatagcataaatgggagaaataataattacccaggatttcagttcagtgtaagcaatcggtatgaataatttagaccacaaagtggatttttatttcgcttgagctattcagattgactttctacacagcctgaacggctgctgaataatcacaggcaaaattttccactggtaccgcactgtgtagacacacgtgtatctacacgattgcaaactgcccagctgtggatacggggccctgttcaaaccaaatatcaggacaaacattctacttcattgtggtgttccatgtaaccttgagtacacacagccatacctgaacctttcattacgtcttccaccaggtgaaagcccattcctgctccttcttcccctcctctatacacatgtgctctcaagagtgtgtgtgtgcacg

SEQ ID NO: 174976 - DNA, 657 bp, Homo sapiens
cagccgaccccagcccaattctaaaacagggctgagagccacctctcagcagctgacccctacccaaggagggtggcatggaggggcttgcagagactcttcctaacatcctccccccccagctgtctccccaagtgcaatctgccctcccatccctgggccagccagcttccacagagcgccaggccaaacagaattcctggcctccttggaaggggctggagaaggccgggagcagtggctcacgcctgtaatcccagcactttgggaggctgaggcgggcagatcacaaagtcaagagattgagaccatcctggccaacatggtgaaaccccgtctctactaaaaatacaaaaattaggccgggtgcggtggctcacgcctgtaatcccagcactttgggaggccgaggcgggcagatcacgaggtcaggagatcaagaccatcctggctaacacggtgaaaccccgtctctactaaaaatacaaaaaattagctgggcgaggtggcgggtgcctgtagtcccagctacgtgggaggctgaggcaagagaatggcgtgaaccccggcggggcagagcctgcagagagctgagatcacaccactgtactccagcctgggcgacagcgagactccgtctcaaaaaaaaaaaaaaaa

SEQ ID NO: 174977 - DNA, 246 bp, Homo sapiens
cccttctctcaaacctgacctaagaaggcctggggaacagctgtgttgcccagaacagttcttccaaaattctgccccccaaacattgccccaaaaaatcctgaacagagccctggatggtggaactctggacagagagaaatggttgaagccgtccctttctcaaattatttcagttcagatgatccaagaacgtatccccacaggaaatccttgtcagataatagagaatgggaggaccacagg

SEQ ID NO: 174978 - DNA, 297 bp, Homo sapiens
cagagtaggtgtttctgctggacctaacagtgactacagctgagaaggtaccacgtgaaaggggcaaggaggacaggagggggggggatgaaggaaaagcaaggtaaacgttgggtggctatctaagtgggaaccaccgcccccatatgttgattgtcttctgagggtaagaacaatatgggagtgtgctgtgaaaaaatagggctgctcaaaaccctccttgagagaagggaccagaccttacttatcccccatcctcaaggcggctgctgaggaataaatgaactcactgggtaa

SEQ ID NO: 174979 - DNA, 263 bp, Homo sapiens
actgcatgatatacagaatggtgggaaggggaaaacatacccagagaggtcagctcagagcatagatgagtaagacttgcacttcccctggagtggttactatacatcagttatgggagcctacattatgggagcagctatttcatgagtgcttactatataccatgcacttggctaatgactttaaatgtactaacacatttaatcccttaaacattttatgaaatatgcattattttcttcattgagaagatgaagaataa

SEQ ID NO: 174980 - DNA, 248 bp, Homo sapiens
ccacctctcgcagatgggaacagggaagcgtggctggctgcctccggtggagttgcaactgtagtcccacacttgcttcttgtgctttaatgacgcagcttctactttttgggtctacgagcctttccagaggacattgaagggcgtttcggtgttgcccctagagcgaagctctgtcctctctcccctctgagttgaagaaatgtgaagacagtctgctgcttctcttttagcccagccagtcaata

SEQ ID NO: 174981 - DNA, 1056 bp, Homo sapiens
tagttaaaacagcattttggtatatttgtactgaggagacatctgggacatgaatcatgaatcttttggaaacagttgtaatcaccattattcatggaggaaggaggtcatagtgatttctgaattgccccacctgctggaccaaagagaccctaacaattttagagtacttaaactttattgggatgaaattagaaacatttaagcagaagccaatttctagcatatgaaaattagattttaatattcttaattcaacattaaagtttccatattttccacttatttaaaaaatctaaacaatgttctacttactcaacgtagagtgagaggtggttaaaatttggggaagaaattttatttccagtaagataatatgcttcagtgttatttttatttctccaacatgattgcttgtgtaatgacaattctacgtagttattatatcactaagcagagacttactaccgataattaaaaaatgttcaaaaccagattaataataatttattttgccaaataattcctaataagattctctggaaagtaaaataccatggaagttttataaatatgacttaacttatataaacccaataaagattgcgtttgcgatttaaaaatgtttagttggagtaccctttgtaaatgttcttatatgccccggggagcttggtgttccaatcttgcccataggataggctggtaactctttgggggaggacaatgtcagcaactccttttgccttgaatgctgaaggtagaactaaacacttgccatgcttacataaagctatattgagcagcaatggcacacagaactagatacaagcttatccctttgttttcattaagcttttagggctctagtataaatctccttaaaaaatacggatctatcttctgtttctttggtattccccacgtgcactgactattggatagaatacatagcaaactttaataaatgacaagctaaaagtatcttttacagatagctttggcacagaagtttatgggtgcaacctttttatgtaccttactttgtaaatttag

SEQ ID NO: 174982 - DNA, 406 bp, Homo sapiens
accgctgcccgaagtgagggagaaacagggagctgaatcctcccccaagctgttccaggccagaggactctgcagtaccttctcctacatctagtaacaaagaatggtgataaccatgcactggttcaaggttctggagttctccatgaaacttgggttaattttgctcagagtatccggagttagccactaggctgcgggtgaaatgggatggagtagaacaacagcaggcttcctggagccacttcgtgggcagcgttttatagtgaacttgtttttgtttttgtaagaaagcattataaaagtttgtgaaagaactgtgtaatcttaaaaaaatgagtttttagtgtttgagctttatattttttaggaaattatgcttcaggttttttctgaaagacttcta

SEQ ID NO: 174983 - DNA, 161 bp, Homo sapiens
atttgtttttttttcctctttccaaatgaatgaatttttacatcatggctgtaattataaaatagccatgttaatttgataccaaatccatctgctcaacattgtacataattctaaacaatgtcaatgttccagttaatcgcttttgctcttcactttaa

SEQ ID NO: 174984 - DNA, 180 bp, Homo sapiens
tcactttgtcacccagtctggagtacaatggcatataacttcgtactcctaggctcaagcgatcctcccccttctcagcctcccaagtagctgggacaaccaacacatgccaccatactgggctaaaatagcctatattgattacagaaagtgaatttatactttaaaagcttaaccaaa

SEQ ID NO: 174985 - DNA, 499 bp, Homo sapiens
agctcatccagagcttggacagaattagaaggatggccaggacacttgtcaccttcatgccacaatcatggctattgcacaactaaaacaaggacttctgtccttggtgctgaaatatcattgctctgccagactaaaggatttcttcttagctgtggaggtgtcctatgtacctgtctaccaaatcccagaagagagaataggacagatagaaattcaccctgataaaggaaaaaaacataaagcatcgtaatggacattatggagcccttactatgtgctaagccctccctgtatacaatctcatttgaatcatcacaccagctctgtgaattagctattatgatcaccatttcccctgtgagaaaccaaagtaccatatgattaaagttgcctaaggttagtagaagacacaagacttgggccaagtaatctgattccaggactcaaaatcttgccactgcatcccaatagaataatatttagctgtgactttgtg

SEQ ID NO: 174986 - DNA, 247 bp, Homo sapiens
tgttaaggagccactttcaggcagtgtgtctgcagacacttcatgcagagacaaggtggcaccctgaaggtggaggattcctgggaaggttcagcctcagcttctgtcactgccttgggacactcattcccatcctgtcctgatttccctgttactggcagactcttctgccttaagagcttgcagaccaacaatgacctcttggagactcaggcactctcctcggggtgataatgaggaaagctct

SEQ ID NO: 174987 - DNA, 610 bp, Homo sapiens
aggggattaagggggagagctatgggaggtggggatggtgcatctgtccgttcatcttatttcctccctgtgacactcttgataacactagatagtgtacaggaattttagaaagacccgtttagactttgagcctcctagacattcatacaatatttactacatgattatatgcatgaatggtaaagctatttttttgcctatcatttaaggcttttctaccagctggtttctgtgtctgtcctggatctgagtaccggttacatgaatttattcagtatttgaaaattcagcaagcagctaggcatggtggctcatgcctgtaatcctagcactttgggaggctgaggcgggcagattgcctgaggccaggagttcgagaccagcctgggcaaacaacgtggtgaaaccccatatctacaaaaagtacaaaaattagctggatgtggtggcacacacctgtattcccagctactcaggaagctgaggtgggaggatcacttgagcttggggaggtcgaggctgcagtaagctgtgatcgtgccactgcaatccagcctgggtgacagaatgagaccctgtctcaaaaaaaagaaaaagcaaatctagt

SEQ ID NO: 174988 - DNA, 450 bp, Homo sapiens
gggattgtaacatccccatgagcagctggacatgaaccccttgacctggaggtgggttcctgggaatggatgagcccaaagactcgtttttaaaatgctgggtctgcaatttggaggctggtttctgtccctgtaccacagttgccccattggaacgagaataagactactgatctccccaaaccatcataggaattccagcctggcacgtagtaagtgctctgtgaatgagggctgttcagggtggattgttactctgcctcctagacatcctgggccacctgactcaatgggtcgcttcatacgtcacagatattaaacctggcaaactggctcagcacaatggcttagccctgtaatcccagtgctttgggaggctgaagcagggggattgcttgagaccaggagttcaagaccagcgcgggcaacatagcaagaccctgtctgtac

SEQ ID NO: 174989 - DNA, 362 bp, Homo sapiens
gggcgaggggtgtcaagcgggagaggagccccacctcgcacctccttcacagtcccctgggcccccttggctgcgcagccccgcagggcccagccctaggggagggagctctcaaggagctgagagggcacagaaaacatgaggggggcaagagcgagagacggtacgagagaaaacacagaggggatggaaaacgtctaacagagtacgagatataaaataagaaagatattgagaataggatgaaagaaagggtatcgaccagaagatacaggcaaagggggacgaagaaaaaaggaagacacaagaggagagaagagagggagaaaaggaggggaaagaacagattaaaagagggaggc

SEQ ID NO: 174990 - DNA, 272 bp, Homo sapiens
ttctaaggaattaaacacaaggatgaacgaacctctcctgcccccggaaccttgtgtgctggtggacggctgcccatcacgtgtcacttgtcacttgtcacgttgtgccagtgctgggcaggtcattgtcaccacttgggaaaagtgttgacaaaattggtcgttagattccaccactgacaatgtgcgatggggagagaagttcctctgtgaagaactccaaaggctgagtgtggtttctgtcgtgggttggccttgagggtgccttgctt

SEQ ID NO: 174991 - DNA, 678 bp, Homo sapiens
gtctgcaaatctacactgcctcatccctccttctcagtgtatgaccttgccttgctaactccagagaaatttcagagataaaggtgaaaagtccttaatttcctaacagcaaacctacagatttagtatctaaacccaccttttcttccttttcctcacgtaaaggacatctttcctctaaagccaatccttcctcctctcccctaggatccatcccttcctgtttttcgaagggctaagtttctctcctattagctcctttcccagaagcatttgaacatgcccatcactccagatttacaaacacaatacctccgaaccccatataacatttctcctttgcttactaccctcttcccctcactttgacgatctcaagcaaaattctttccctagcttccatgtgcccctgctagtttcccacccctcatgactcctttccaacctctattcgtctcttgattgttgtcatcctacccctggggaatcagtgaccacttacatattcatgaatcccaagtctgtcctgaaacctctcctccttgtgtcattatcacagctcttaccaagggaaccagtcactggactacatatcatgattaactactctgaagcgtaccacatagatgaggaaactggattttgactatgtgcctaaactacatagctttcaagagg

SEQ ID NO: 174992 - DNA, 894 bp, Homo sapiens
  misc_feature (593)..(593): n is a, c, g, or t
  misc_feature (763)..(763): n is a, c, g, or t
aaacgcaaggaggtcataaaccctgcagtgtgtgcagggagctaaaagccatcaggcattacctgagtgcaaattccaaggtaagcaaatgaggaactaacgctaggcagaaaggtgaggccagctcacagagagccttccttctgtgccatggtaaggactccagggtttattgcatatgaggtgctctcaggaggaatgtgtgctaagcaggaggatgacacagtccgtttcactttcttaggtggagtacttggacgtgaatgggaaagatggatttcagagggtccagactagaggcaaggaaaagcagggaatgactgccacattagttcggtaagagctaatgaggtcttgatcactggccatgaggaacaggctctgcaagaatttagaagctagcatagtagaacgggatgacttctcctgcagggcaggatgagaggtaggggtgtgtgtgtgtgtgtgtgtgtgtgtgtgtatgattttctaattcctagtcatttttctattgattgttttgcaaaagccatttacatcttaaggatattgataatcttttgttatatttgatgcaaatatttttttccagnttataggttgccttttaattttgtgtttcaggtagataaaagttaaacgattttcttaggttagtttatcactgtggtttctgaacttgttatgtgtagatcttttccaccccaagagtacataaatattaatccatactttcttatggaacttgtatggtttcgttttntacaattttatttatttcttgctactttaagaaatttgtgtggtgaaatacatataatagaagttgactatctgaatcatttttaagtatacattcagtagtgttcagtatgtcgccattgttgtacaacc

SEQ ID NO: 174993 - DNA, 400 bp, Homo sapiens
ctggagactgttgattcctgggtcccttgaagaactaatgacttccatctctagggtgaggtgcaggctgggtgcttatgttttaaataagctctccagatggtactgctgattcaataggaaaagggcagttattatatattcctttctcctgcaccccaatcaagcccagtgtgatttcagagcacccatttgggtgaaagcagtcacttgatgcccagccgccttacagtccggctgaaatgccaggagtgctgttattggtatttgggactcgaataggggctaggatgactctgtgaaaaagagccataaaaacaagaatttcatagctaatttactgcttacctatacttgggcaggccattcaacataatattcttctgacttgagtttctct

SEQ ID NO: 174994 - DNA, 152 bp, Homo sapiens
tgaaaatactttttaatccaggtgcagataattaacaatgaaaagacatttcatcttctttcttacatccagggactttatcagacttaaattcactaggtgcatggaaagaacagtaactgaaaaggcaatttgaccataaactgtttgca

SEQ ID NO: 174995 - DNA, 714 bp, Homo sapiens
atcccattagccttatgactctgagatgatggaatcttaataaccctgttgaaatagggctttactaatactgatgaattactcttgccagcaagctttggatgcagtcccgttctacagatgggaaaaccacgacttgcaataggctgtaggagtcactctgagcatcctgatgaaactgctgaagcttgtgcccacgcatgatgctgctagagcttccagtttctcattacctagtgatattaagccccaggccagtggattccttagaactccaggcccacaaagttcactgaggaaaaaaaaagcttcactgccatgcaattctgggaaactacatcgttatccccatttgtgtttaggggacaggagtgcactggtacatcaaaggctctgtcattcagtgtcctaactcctgctgttaaaaaggctgtttaatccagtctgtcccaaatgtatttgattgtaaaaccctatcatttcctatatgttatggaccacttgaatatagactttcataaatactgtactaggctcattcttttgtgttgtctcatttctttcttccctgaaaggcactgctcttgactgcagttttgcagttgtttgatgcaaggtgtatttcctggttggtagaatttccacaagcaccccaccattttccatcagcaggaattaagatcttgctctgcaggtggcaagtggtacatattg

SEQ ID NO: 174996 - DNA, 383 bp, Homo sapiens
gattaaggtagaaaagtacagaaaacactaaattttcattgtgctgtttcaatgtggcagattctttaaaatacttcgacatgctacaataattaaaggttttaagaacattaagatacttaaaaaataaaagcccacaattgaataacaaaaatgaactttgttttattttttattggcattaatgtaggttgccgtggtgaaaatagtttgaaatacttcacagtaacagttttgtgcagccctagagatcaaaaacagcaaagtaaataagcaggactctcaacgactcatactcacagacatgtttaatgtaatcctagcacttcgggaggctgaggcgggaggattacttgagcctaggagtttgagaccagcctggg

SEQ ID NO: 174997 - DNA, 1267 bp, Homo sapiens
  misc_feature (1237)..(1237): n is a, c, g, or t
agcagcctggccagagtccatgccctcagcagctacgttgtgttgtccttaaggaggagcatgttttagaaaatcagttataaaatcaggtgattgatgaagtgcagggttaagttaagagaagagtgaactgccttcagaatccagtgctgttaccactcaagtggagatctcagataaatcacttattggagcttctgtacaatcatctgtaaaaccattacttcccacttggagagatttttgaggattaaatgagataatgcatgaaagccctctagcttgggcatcagtacacctgagttcccttcccttgctctgcacagcctgctcatcaccactgatggggaactctgtcctctgtagggcccctgcagacatgggccttgcctggatgctgctgctgtcggagcctaggagagttgtgcctggcatcgcagcacaggtactcacagctctcagaaggagactcctgtctgggaccctgccctcattcccacgtaggaaaaatcctttacatgagcatctcctggccttcattgttaggttgtagactacaatgaatgatattctgtgtttaattacattatgcacaacactctacagagtgggtggttttgaatcccaaccactaatttacgaagtggagcggctctgctggctctgtgaagtatgtgttgtggagccagaggtgatgctgttggatgtgggtggtgatttacgggagagcagcataagcagaggaaggcacagagacctgggttcaaatcccactgccagtgctatctgacgtgagacttcggacaagttatttaaccttaaggcttagtgtccttgcatgtaaaatacaaataatgctgacctcattgattccttgtgaggagcccatgggataatgtggggtaccatgcgtcagtatcatttccctttcccttgataatgattatattggacagctagtgtcataggaagctaatggttaggaattcagactcacacaagaatagattttgttttgcagtggaaacttagtgataactttggactaagacaatgtgaagacattttggcagacaatcatagagtagttatattcttgtgaggtctgcagaagtccctagtggggagagcagacagagccttggatgctcagacctagtttggctgtgaaactgaagctttagtccttttaagtctgtgtttcttctttgaccctttacaaccccggggggggaangtttagtacaattatccctttgaaagtttt

SEQ ID NO: 174998 - DNA, 1248 bp, Homo sapiens
agcagcctggccagagtccatgccctcagcagctacgttgtgttgtccttaaggaggagcatgttttagaaaatcagttataaaatcaggtgattgatgaagtgcagggttaagttaagagaagagtgaactgccttcagaatccagtgctgttaccactcaagtggagatctcagataaatcacttattggagcttctgtacaatcatctgtaaaaccattacttcccacttggagagatttttgaggattaaatgagataatgcatgaaagccctctagcttgggcatcagtacacctgagttcccttcccttgctctgcacagcctgctcatcaccactgatggggaactctgtcctctgtagggcccctgcagacatgggccttgcctggatgctgctgctgtcggagcctaggagagttgtgcctggcatcgcagcacaggtactcacagctctcagaaggagactcctgtctgggaccctgccctcattcccacgtaggaaaaatcctttacatgagcatctcctggccttcattgttaggttgtagactacaatgaatgatattctgtgtttaattacattatgcacaacactctacagagtgggtggttttgaatcccaaccactaatttacgaagtggagcggctctgctggctctgtgaagtatgtgttgtggagccagaggtgatgctgttggatgtgggtggtgatttacgggagagcagcataagcagaggaaggcacagagacctgggttcaaatcccactgccagtgctatctgacgtgagacttcggacaagttatttaaccttaaggcttagtgtccttgcatgtaaaatacaaataatgctgacctcattgattccttgtgaggagcccatgggataatgtggggtaccatgcgtcagtatcatttccctttcccttgataatgattatattggacagctagtgtcataggaagctaatggttaggaattcagactcacacaagaatagattttgttttgcagtggaaacttagtgataactttggactaagacaatgtgaagacattttggcagacaatcatagagtagttatattcttgtgaggtctgcagaagtccctagtggggagagcagacagagccttggatgctcagacctagtttggctgtgaaactgaagctttagtccttttaagtctgtgtttctgaccctggaggaaaaaagttatacataccttgaaagattttct

SEQ ID NO: 174999 - DNA, 283 bp, Homo sapiens
gcggccgcctactactactaaattcgcggccgcgtcgaatagattttgttttgcagtggaaacttagtgataactttggactaagacaatgtgaagacattttggcagacaatcatagagtagttatattcttgtgaggtctgcagaagtccctagtggggagagcagacagagccttggatgctcagacctagtttggctgtgaaactgaagctttagtccttttaagtctgtgtttctgaccctggaggaaaaaagttatacataccttgaaagattttct

SEQ ID NO: 175000 - DNA, 232 bp, Homo sapiens
gcagcaagtgccttctcagtgtaaaaactcgcactgaggagaaatgatgagggagccttttgacctaataaggtgagcattttaggatagattttctgactggagacaccagctcacgtgttccctggaattccgggattgattagtggcttcattggttcactgattgattcaactagtatgttttggatgtcttttccaggtactgtgctgggtgctggggattcactgg

SEQ ID NO: 175001 - DNA, 1150 bp, Homo sapiens
ccatgcgaacggactgatcaaggagtgagctggctggaaagagggattgatgtgccagtgtttgccgggagacgttggagagccccgggggagaggcttcatacttggccctggaggacttcacaggacagagatgggcagggagggggcacacccaggcgtggaggcaagtgcctgcttggtgggctctgaaaccagcgtccgctgtgcgttgtcctacgcacgggaaggaagtgcatccttgggcgggtgtagtagggggcaggctggctccagtgtgtgacaaatggccaaagtctgcagggctatgctaagaaatccacttcattctgcaggcagttgggagccaaggattgcttgtgagcagaggagggacacacactgtctgcaaggactgcagctgtggcagagtctgaacaatggtgtgtgtgagggcaaagctcagaagacagggacaacaggagatcagtccgttcgcatgttacccatgcgacctcatgggtgcccttacttctaccaggcagtcccagctcattccctaaacaattctctttcccagacaactgttcacacctttctcctccaacttctgtcttcactctcaaatgatgaccgtttccccttcttttacaatactataaaaagcaacccaaggagaactttcatgtcttcccacctcctgatcagtcagttcgcatgctgccggtgaccctctgccgtcccacctgccacaaaaggggaactgtctctgatcctgtctaaagccaacccctcttctgaacactgggttccatctgtctgacaccgctaaaggtttttctactctaattttctccactgctcccatatcactatttcctccctttcttcaggatctgtcattagcatacagacatgctctaatatttcccgtcttaaaataaaaatgtcctatcctcctgtcttccacttcctcatgtatctgctttgttgtatggtgagctcatcaagagttatctataccgattgtctctatttcctcattcctatctgagttttgacacactcagtgaaaccgccattgccaagccattgataacctccatgttaccaaatccaatgatcagctctcagttcttatcaactttacagcaacagttgagccagcaac

SEQ ID NO: 175002 - DNA, 238 bp, Homo sapiens
gaataacagagctctgctgactgatccgctgcacccatgcgacctcatgggtgcccttacttctaccaggcagtcccagctcattccctaaacaattctctttcccagacaactgttcacacctttctcctccaacttctgtcttcactctcaaatgatgaccgtttccccttcttttacaatactataaaaagcaacccaaggagaactttcatgtcttcccacctcctgatcagtc

SEQ ID NO: 175003 - DNA, 505 bp, Homo sapiens
  misc_feature (24)..(24): n is a, c, g, or t
  misc_feature (42)..(43): n is a, c, g, or t
  misc_feature (117)..(117): n is a, c, g, or t
cagtgagcacaagcgactactcgngaatgtcgtcaggctcgnngtgtacgcccagaagtcctgcacagttcctttgtggcagtaactgaggaaggcacgaggctgcagctgcactgncataggctttactgtcacatccgccccaggtcatgaaaatgttcactgcaatcatcccttcctgttcttcatcaggcacaatgaatccaacagcatcctcttcttcggcagattttcttctccttaagatgatcgttgccatggcattgctgcttttaacaaaaaacaactaccagtcattctcttgtgattaactcatctagccattgttcctcctttactctcctgtggcatttattttatacccctcttctgacagtttttacttacttgatttaatataaatatgagtaaatgtcttatcttcaccagatggtagaggcctcaagagcaggcgatgtatcctgcgttgtacctctagtattgtcatattctcaggctctcaatt

SEQ ID NO: 175004 - DNA, 131 bp, Homo sapiens
actattgataattgttgaagtggagtggtggatgtatggtaattcattatattaacctctctccttttgtgtgtgttttaaattttctagaagaaaaagtaaaagaaagacagagtggtgttggtttcatg

SEQ ID NO: 175005 - DNA, 290 bp, Homo sapiens
ctgtctccagtcagagccagggagacaggcttctccctgcaccatccgcactgccatagacacagcagccagcaacagcacttggaccattacggagttccaggcccagtctccaactgacctccctcctgctccagctgcccatgctaacaagagccagggcacaagacctcacttggaacaagtaccaggcagaagagagcattacctgccggtggggaaaatggggaagaggacagatgtccccataatttcaattgaaaatgaaactgtacagggccaaagttgta

SEQ ID NO: 175006 - DNA, 498 bp, Homo sapiens
gccagtctccggcagtcccttcacaaggcactcatctggaatacctccagtaccagagaaatcgcaggccccatggatgtccacatgtggagggcttcggtacggtgtccttccttagggcctggtgggaatctgcctcctgtggctttccagccattgattcgagttgcaccacagctaccttctattatccatctgcccttcagatactgcttctgtatcatacagcttaattctcaattattataattcctttcagacaaatgttttcttacaggaaatgcatattcttctgagccatgttctaccttccccatctctcaggctcagacagttagagaaatcagtctgtcccatttaaccaatgaacgaatgaatcagtcaaccaatcaatctccctctgtctttttcctatccccaacccaaacacgtctaataatataagggtaataataatcttaacagtcacatattttgaaagaaaattggggcaatata

SEQ ID NO: 175007 - DNA, 407 bp, Homo sapiens
tcattcaacatttactgaactctaattttcttttcttgaagagaggaaagtttaataggcaaacaaactattaatagcatctggtgtgccctgagtgcttgctatgtgccagggccaagtaggtctctattttgcggaagttaaaatatgatgtaatcgggtggtatgagcattaaaaaaaatgtaattgaggttacaaccaaggtgtatttgctttcaaatccagatctttttgactatgctaaatacaagcaaattcaaaaaggggaattagccggctgctgtggctcacaccagtaatcccagtgctttgggaggccgagggtggatagcttcgaggccaggaattccggaccagcccgggcaacaaaatgttaaataaaaaaattttaaaaaattaaataaaa

SEQ ID NO: 175008 - DNA, 585 bp, Homo sapiens
gaagagttacttttatatatggggtcctctcagctgtttgacagaagaaataataaagagcttcagatttcgttttagaatgacacgtcagctaatacacgtttaggcttatcttccaatttgcagtttttggcattaagcttttagaaactttaccagatttattttatgtttcttgaattctcttctccacatgaccaaggagtgaaattgcaagtttgtttgcataaaagaagcgcagacagccacgttccatcctgtttaccagtttaggccccggtgaatgcaagcagaggcaggtatttgtgacctttgaaagcagctctcactagcacctcttcaatgtatttctgaacctttggatgttcctggctgggcaaatggttgattaccatggaatcaagcagtaacaagccagtcttacctttgactttagtgataaggattaagtaataatctccctcccttttggttgagctgcgtgttccgagcccgagtctggttcttctgtgtgctgtgtgaagtgttgctgctgcaatcgtgttactcagtcacagtgacttcgggaggagatggtcctaagtc

SEQ ID NO: 175009 - DNA, 387 bp, Homo sapiens
tgagatcaagtgtgaatggaaagaaaatttgagttcatgagtgtagacagttctttaaggacaacatactcaacactcatgactgagaatgatgtaattttcgtccacagtcatggaaaagtgatagacaagaaatagtagtttccaaattttacataacaggtggagttttcaaattttatgtaacaattatatattttaaaggttataaaaattatacacatatggcatttaaaaatgccagaccaaggttttaaaggccccttgaacatttctagattacataagctgattatcattttgttcgtgcttatacataaagaccaagaaatactaaaagtctcaaggagaatatttcttgcttgataaaaatcagctaattctagg

SEQ ID NO: 175010 - DNA, 438 bp, Homo sapiens
ttttgtgtactgccaatgctgaaaacatagtagaaactcaatacatttggcaggcttagttgttaggtgctgaagttaaaaaggtgaaaaagggccaggcactcaccacctgtaatcccagcactttgcgaggctgaggtgggaagatcacttgaggccaggagcttgagaccagcctggccaacatgacaaaaccccatctctacttttatacaaaaattaggcgggcatggtggtgggtgcctgtaatcccagctacttgggaggctgaggcaggagaattcttgagcccaggaggcagaggttgcagtgagccaagatcgcgccactgcattccagcctgcgagacagagcgagactccatctcaaaaataaaacaaaataaataaaaatcagttaatgataaacactgtacagaaaaaatagaggatgtgatag

SEQ ID NO: 175011 - DNA, 661 bp, Homo sapiens
gacttagctatggatgtaagaactgcttttgagtagctgcctccattagccctggggttcctacttcctgagtaccatgacctctgggataactcagctttgtggaactgaggtgcaataggcagcataatgaccccctccccaaagatatctatgtgctaactaaccaaggaatgtggacagccccctgaagctggaaaaggcaaggaaagggattctcttcaagagtttccagaaggaatgcacccctcttcaccaatttggtacttctgatctccagaactcttaaataataaatttggccgcatgtagtggctcacacctgtaattcccagcactttgagaggccaaggaaggtggattgcttgagctcaggatttggagaccagcctgcacaaaatggtgaaaccctgtctctacaaaaaatatgaaaattaaccatgtgtggtagtatgtgcctgtagtctcagctaccagggaggctgaggtgggagtatcacctgggcccaggaggttgaggctgcagtgagttgttagtgtcccactgcattccagccaaggggacagagtgagaccccatctcaataataataataataaatttatgttgtttaagcctctaaatttgtggtaattgatacagcaaattacacagaatagg

SEQ ID NO: 175012 - DNA, 602 bp, Homo sapiens
gacttagctatggatgtaagaactgcttttgagtagctgcctccattagccctggggttcctacttcctgagtaccatgacctctgggataactcagctttgtggaactgaggtgcaataggcagcataatgaccccctccccaaagatatctatgtgctaactaaccaaggaatgtggacagccccctgaagctggaaaaggcaaggaaagggattctcttcaagagtttccagaaggaatgcacccctcttcaccaatttggtacttctgatctccagaactcttaaataataaatttggccgcatgtagtggctcacacctgtaattcccagcactttgagaggccaaggaaggtggattgcttgagctcaggatttggagaccagcctgcacaaaatggtgaaaccctgtctctacaaaatgaggtgggagtatcacctgggcccaggaggttgaggctgcagtgagttgttagtgtcccactgcattccagccaaggggacagagtgagaccccatctcaataataataataataaatttatgttgtttaagcctctaaatttgtggtaattgatacagcaaattacacagaatagg

SEQ ID NO: 175013 - DNA, 110 bp, Homo sapiens
aggaagaaaggaattaccaggcataaaggttgagggtggttgagggagaggagctttcaactaggggtgaatagtaaatatagacactgaagaaaagagtgcttgtgtgt

SEQ ID NO: 175014 - DNA, 677 bp, Homo sapiens
attggctttggatctcagacacttcactgtttctataagagaggagctggatttgaacatgttggccaaataaggagctgctgcccacccacacactggtcaggataaaaatctccacccagggccatgcacagtggctcacacctgtaatcctagcactttgggagggtgaggcaagacgattgcttgaggctaggggttcaaggccagcccaggcaacatagtcagaccccttctctattttacgtatttatttatttttggagatggagtcttgctctgttgcccaggctggaatgcagtggtgcaatctcggctcactgcaacctccgcctcccaggctcaagcaattctcctacctcagcctcctgagtagctaggattacaggcgcacaccaccacgccaggctaatttttgtatttttagtagagacagggtttcaccatgttggccaggctggtcttgaactcctgacctcaggtgatccgcccaccttggcctcccaaagtgctgggattacaggcatgaaccaccgcgcctggccatgaaattctttttatcctaagggccttccaaaatgaccctttgtctttcctttacactaacaagaagccctgccagaggacacctttttctttttttgacaggtgggaaatgaggtcagagcatgaatggt

SEQ ID NO: 175015 - DNA, 373 bp, Homo sapiens
taggatgtgcttagatatgagttgctgttgctgttatcctcacataggatgccctcagatatgagttgctgttgctgttatcctcatcatcaactggggtcaaatatgtgcatgccaacaggatatggcttcaacagcgcctgccacagccaacttcccctaaccacagtcctctgttgcaggaagcaactttgggctgttttcacaagaggatgaccaccaagtaaatcaagagtggcaacatgacagggcagtcgcttcactgaccaggtcaccaccatacccaagacgtggcctaatatgaatggctctccccagcaagcaatgcttactggaaaagtcaatccgactggtctcctccaggccctggacg

SEQ ID NO: 175016 - DNA, 376 bp, Homo sapiens
ggcctcccaaaatgctgggaatacaggcatgagccatggcgcctggcctgctgcacatattctgacaccatgtgtctggtgaacccagaccctgtaaagaatcttcactggtgattgtttgatataggtgaccttccccctccctctttttgcctgattttatttccctttctagattataccactaaatcagaaagcactgaatattttgtaagtttgtttgggtgagagcaagaataatcttttcttgatttttatttttatttttttaaaacctttaactcctgctgaggttgagacaaaccgtatctagcatactgttacctgaaacaaatgtggtaggagggaaggtgatacagtcctgccattgcagacc

SEQ ID NO: 175017 - DNA, 332 bp, Homo sapiens
ttttgatccttctggagagcttcaacaactgaaaccatggtgaaaatggaaagcacttaactttcgtaagaacacttgaatgtttcagtattacccgaaagcaaaattataagccttggaaagaaaacatttccatttggcattttcacttttgtgcttgtcaagagaaatagcctcaggcttcagaaaagcagaaagatctattaccaatatcatgaggcaagcactccggtgctcacttatgttggatcaatcttgttcacttctagaagcctttccaactatgttatgatgttctcctttctgcttctccatccagacggagcagtgtc

SEQ ID NO: 175018 - DNA, 929 bp, Homo sapiens
gcaaaacgaaagcacccggggcgcatcagttgcaatagcttccctgagcgcggccgtgggaggccaagatctgaggtcgcgaggcgacggtgggggcccgagctgcgcagaaactgggtgggggcggtccctggagggcgcccgggagctgctagaagttgtccggagcccctcaacccccttggaaaagcgaacgcggatgttaatataccaactccgcagggaacttttggcccgggtcttgagctgaaattccagactgaatgggaccgtgctgaaagttcgacgaggcaaaggagtatggcgcgggggcaagctttgacccccggcttcgtatcctcgggagaggccgggactccggctcgcccagcgagggtgcgcagaggcctcctgggattctaggcccacagaatttttgctccagtgaagttggataagcactccgcctccccgcaaaaaccagagttctcggcttataaacacttcaataaactctggtgacattctccgcgctcgctccttgccctcgcggcagtcactgcagggacaaaggcggcctgcgcagacttggaagaggcgcggcccgcgtgggcggctttaccggccaaagacgttttcagttaaggggaggcatcttcagagctgagggtaactccccacagccaccccgcaggtagggcagccaaccccaatctggtcagcttaaaagtgtcctcggtttcgccccctttcccagcgaaccaacactggcagattggcctgcgagccgctcgctctgttgctctagcacatttatgtagccaaacggtcgaagagccccatctttaagcccaataaacacttaactttattctatttaataacacattttgttgtggcaatatttgtggattttggcaggtattaaaatctggtgatcctaaatgagt

SEQ ID NO: 175019 - DNA, 519 bp, Homo sapiens
aaaagctcaacacaatatttaaacatgttttgcttgaaggtatcaaagaagaaaaatggaggcctagaacaaaggtcctcctggtatactgggtcactgttcctctcgagatattagccagttctgcaggaagctgctaaaacctaagcagcccttttgacaggctagtgggagtaatgggggcagagattagtgcccatggcccctaaggaggggacacctgatgaacataactcattttgagtcaagaccctgaagggctacaccataggagcaagggttaaccaggagtagacatactctcactgaggctgcagatcagctttgaatcatgtcagtccctaaaattagattgagggttcctaaattgctagtgcccctaggcatctggcagaattgtaaatccttcctggaagaaagtggtatcatgtaaggtcacaaattgtttctagtttgcaaatgcaatgtctggcttataatcaaaagcaactggaaacagatacacaaacaacatcaaga

SEQ ID NO: 175020 - DNA, 627 bp, Homo sapiens
ccacggatagagaaaatattggtcaacagacttggagctaatcattaccagtgtgtttgggcaagtcactttgcctttttaaagtatcttcatttataagagaattttgttgtattttgttttccttccttccttttgctataatattttctctcagaaatgtgactttcaatgaatgaggagcagtgagatgaaattttaaaagacaagactgggacaattctctcttcttaattgtgcttgcaagtttagtttagcaccctccattagagcagcttttgtctcttttattaactaatgcaacccagaagacccttgcacttagtagcagatccgttaatatttgtttagtagctaggtctaccaagctccaaaaaattgaataagccattttgttctaagggatgcgccactgttattaatgctgtactgccatcttctggtcacatgaataattacagttgcatccgtgaaaatgaaatccttcaggaacttgttccttttttgtttttatattgcagtaatagcatttagagaaaaaaaattgtgggaatatcttattgttgttataagcaaattttaaaggtgatctttttagagtaggaaacgtttacattttctgtgcaa

SEQ ID NO: 175021 - DNA, 589 bp, Homo sapiens
ccagggcaggggtgctgccacatgggctgacctgagccatctcctcagctcatctaccaaaagcactccaaggaaagcatcatgaccttcttcatccaggtggggaaaccaaggctctgaacagtagggtgagtttcccaaggtctcttggcccacagttggaggagccaaggtttgaatccaggtctggttggccacaaaccctgctccttcaacctcctggccatggctgggtagactccaggggcccacctgtcagccatgaacctctgttttgtgttcacactgggagctgagttgtgtggtccccactctctgtgatccttaatccagtcctggagggtaggcacacaggccttgccctcagagggggcagatgtcctgctggggactggaaacatctccagaccagaacaggacttagttccaagtggattaccacgagctcaggaagacaagtctgattcatagcccatcaaacctcactgaacaggctcatggtgccgagctccactatgttgctgggctcagccctctagcgccaaacgcttcctttagtaagatcctggtgtcagcaccacccctacca

SEQ ID NO: 175022 - DNA, 395 bp, Homo sapiens
aagaagtacggaattgaatgcaaagggaaaagaggttgagacagttggtggtagctggctacttgctttcagaatcagtttttttcatttcctaatggaacgtcagttattgacattaaaggaaaaagccagttggcatcctgctatgtaggagcagaaaactttttagtgggaagtggagctttactgaggccatttagagaattatgagtcatccccttgatctgatgtaagtgtcacaggccattccccaccctagtccttgcccatttctaattttatgttcataaccacccttttatcactctgttggacgagtttcttgaagcaacttgcttacctcttaccagtcctggaaagatgcaaaacatgattaaactgttcctttatctttt

SEQ ID NO: 175023 - DNA, 715 bp, Homo sapiens
tgcagatcaagagggggctgtgctctgtgtcacctccactctaaggcccagtgacggagcctgcaccgtttctaatgtttccggttactgtggcagaaggaaaaagcatatgacgaatcacacactggctcttcaaatgtctgcccagaagtgacacagtccccttgagctataagttcctggtcaaaacaaacaacatggccacacctaacttcgaagtgggcagagacatgcagtgacccatgtatctaaaaatactaaaaataatggtaaatagcactgataaatattttctgaaaaatataaatcaagagtggaattccttttaatttttcatttagttatagtttgggctgtgagatggttgtgttacacatgaaattcacataattagaaaactataggtgagtatgctttaaccccctgccccaacttcctcctctttctttgttcttgttttcttcccctcctctttcgcttatattttcctctgacctcaccctaaaaacacagtttaacctacaaggtaccagaataccaaaccaaaccaaccaaacaaaaacaacaacaaaaattgggtgccctctggaatgtttggctccaaaaaaaatattgaaatctatagcaccactgaaatgtctaatattaccaatgtggcattaataaatggacagtcgtgctcttttgtagcttttctctctggaaggaagatatt

SEQ ID NO: 175024 - DNA, 545 bp, Homo sapiens
tgtatcttcacctgaataatagttatgtgtgtgtttgcatagttaaaatgtattgagctgtggaaaaaaattgtggaagaaatgaaagaatgaactagtgacagaaattacccaaactaataaacgttggaaatgtggccacacgctcactgttgtttcaggtagcacaatgccagcttcaccatttagtaataatgaaatattcaagttacaatgacaatataagcacagatgcacacacagacacacacaccacagaatgtctttcccatttggctcatcgctccactgtgcctcttctgcacctgccaccagcccagaccatctaagaaggctccagccctgactttgtaagactgtttaacaagccactccactgtcaggatgccaaacctctgggagaatctttttgccattgtgggaatccaccctgcctgagtaagctgaaatccccaattctctgcaacccccaacatgatttaatcaactttctcttcagttccttgtcctctggcacttggttcaattcagagttcaacaaatac

SEQ ID NO: 175025 - DNA, 429 bp, Homo sapiens
aagactgtatctctaaaaaaataaaaaataaattagaaacaggcatataatatgtgcttgaataatatgtgttggctaaatgaatgagtgcctcactgttactggtaaaatcaactaagaatttctgaatgtcccttagattgttcttaaggagtagtatcatcaaattcttagactcccttcatatccacatgcttagatatagtcactgcattcacttgtagattttcccaaatgtattttcacaagagctcttttaatagtggcttagatagaacttctctataattcattctatttgttcaaagtatgaaagtaatacctgtgatgggatgacttgttatctggatatcactgccatactgttataagccagcctgccccccaaatcctttaattttccttgctttgcttagtgcaggtgaagca

SEQ ID NO: 175026 - DNA, 338 bp, Homo sapiens
gtgacttatcaagtcttaattgcttttgtgactttcaaggtcctttagaacatggcttcaccttagctatgtgaccttattctgctctaatagtagcaataataataataattactattgattgagtacccaagtgcctgactctgtgctaggtgctttccttatacaatttgctaacacaaatccttacttcaattagacctgtgtcctatggttcccatatatactttgctctcttctcaaatgcctatgctctattttctgtaccttctatgcctccgaatcctactattttgagagtgaggtcatttctcagctcctccaaaaaatccgcatac

SEQ ID NO: 175027 - DNA, 206 bp, Homo sapiens
ggctgcttcccggggccggcgtcgttttctcggtgtagcgaaacctctaaacccttcttgtttaaacaaagccgcaagagagaactttttagccagaagctgcaaaggaagctgggttttgccgcttttagctggtagtaaaagaggcaataaagaagcgagggtagcagagcaggcgagtgcctgggccgggagaagctgcagct

SEQ ID NO: 175028 - DNA, 426 bp, Homo sapiens
ctcccactgtttgttattggttacaaatgtgtagagaaatgaaaagagcagtaaaactaatgtatttagcacactgtgatttgaaacactagaaacattgggattaaagcattttgtctctttctaaagtcccgtcaatagtagtttaaacagcacttgccgccactgcctcttcctacaacttccgcttctgggcttctggccgagcatcttctccggggcctgttgagttgccacgctcctttctagttggatcggcttccaacactgtatcatttgcacatcccgtgttgcaaaatgcctcccagagttcctttcatttgcggttttttgctggcgtcacacccccgagtctgtcttcatccttctcgtcacaactgtttgctcattgtgaagattaatactgagtgtcaacttgattggatt

SEQ ID NO: 175029 - DNA, 162 bp, Homo sapiens
agacatggtggcatcatcatcatcatcaccatcacaccatcacttctccaccatctcctcaacaaatgacctttgaaacctgctatcttcccctcatttgtggtgattttctaggcgacagcaattcatctgggagaatactataactgatatcaatataag

SEQ ID NO: 175030 - DNA, 277 bp, Homo sapiens
cacttagagggttgttacttaggaaacactgcactcagttgccttcaagggttatatatctggggtaatggcagccagtcactcagttgtgtttaggtgaatgtcttagagctttactcatttgtttctttccttatagaccatttaagataaagagctctttagcagtcatcaggtaattgaaattctaagattatcaaatactagttgggttgtccactttaaggctgattttctttcacatgatataaagtatttttccagtctctcacttact

SEQ ID NO: 175031 - DNA, 224 bp, Homo sapiens
tatcagagacttgagcattcatggattttggtatctgaaggagggggtcctagaaccaatccccagataccaagggatgactacatagtgtggcagagttaaccacaggcacatggctgcgcaacagatctgaactttttcatcttgcaaaactgaaactatatctaagggacaacactcctatttcgcctcgcctcgccccagccctcctgcagccatcattc

SEQ ID NO: 175032 - DNA, 283 bp, Homo sapiens
gaggcaggagatgcgaggcgtcctacccgaatttagtacctccagcaaatctgtggcccagcgtggcccgatcaacaatggtagaccgagccatcaacctgttttcctaaaaatgaaaggtgatctggccctgactgaagacaaacgggaacaagcccaaaatgaacagagtgcctggaagtttacgcctggtaggtaaactctccagtcatattctcagtcaaggcttccctgacagtcccactactagaaagtcactggggggacagccaaggactcgttt

SEQ ID NO: 175033 - DNA, 445 bp, Homo sapiens
  misc_feature (122)..(122): n is a, c, g, or t
ggtgcctctcctgggcttgaaatgaggaactgaggaggcggtggtggcgagagtcagtctttcagagcacaggatggaacaagaactccagccactgactgtctcatgtatctgcaagggcncgaggaaattaatgacccaaggaggctatgatatggtccaaaaacttttcctggattttttccgtaggcggtgagccagaggccaactgcagaggaactgaacagaggaacattttgaaacctcggaatgaacaagaggaacaggaggagaagagagagatcaagaggaggctaacccgaaagctcagtcaaaggcccacggtggaagagcttcgggaaagaaagatcctcatccgcttcagtgactacgtggaggtggctgacgctcaggactatgaccgcaggcagataagccgtggacccgcctcaccgctgcagacaaa

SEQ ID NO: 175034 - DNA, 247 bp, Homo sapiens
ttaaaggtataaaattgttaccactaaacctagtttcagcaaaaggtggccaaatcttccatggaaaaggcagacagaggttatggggtggagggggggaatcatgataaggggaactgaagtagccaagggctgtggatagctttcatccctcactgtgctgaaggaagccctcctcctaaggccggcatctgactacagcatgcaatcctttacactcctgtagctgaccacaagcctatcatga

SEQ ID NO: 175035 - DNA, 297 bp, Homo sapiens
gcaactctctaggctctgtacttatagtaaactagtaatttaactaaatttcttagtgtagtagcaaataatttgggaaattctatgaattattttaaatgaaaatgacttatctacctaaagtagttgtcggcaaactctatgaagattcatcttggggagtttctttttttgactatcagaaaattgaagatttagctcctttcattaccatagtgagccaagtgaatatctctttgataagaagataaatcatcaataatttattttatcctctttttcaaaagtaactttcta

SEQ ID NO: 175036 - DNA, 178 bp, Homo sapiens
gccacagtctcacaacccctttctgccctcatttccctcctctgttcagcttagatactatggtctatatataatcattcccttgcagagtgccctcacttccccgtatgggcgttcggcgtgtgcatgcacacgccgaggccccacactgagcaagtcctaatggacgaagtggttg

SEQ ID NO: 175037 - DNA, 149 bp, Homo sapiens
gctgtgtctcggggaggagaggcagcttgtccccgcgtgcagattcttgcttgcgtatttcagaaggtggtgtttaagcgctgagtggaattctggggggtgtgcacgcacgtgctttttacctgtgtttccactcggcctattttttc

SEQ ID NO: 175038 - DNA, 211 bp, Homo sapiens
ttctcccattaaaaaaaaaaggtcctctgtcaccctcaccctctgtagtccctcttccgtgtcatgggcacatttctgagtatctccttgcagtctccattagcaccatcagcatctcgtcctgtctattctctgaaacagctctcacttgctaaaatccctaatctctactgtcacaaaatcagatgatcctcatcttacttaatgtctt

SEQ ID NO: 175039 - DNA, 756 bp, Homo sapiens
ccaataaaaagaaagtaatagttattgtaaagactcgatgtctgcaacaacctgcccatctcatactttctcagtttgctttaaatgctgaatatttaattaaagagaaactttcttgggcacacaattgaatcactgaaaagacagtgctgcagtgttttgctgttttactagttataaaattggccacagaccttgaaactaaatatcaaacattcctgtactgaaccaactgccgttagtaagctgttcttatattgaaccattgttcctggaaatttttgcattagaaatccttcctggccggccgcggtggctcatgtctgtaatcccagcactttgggaggctgaagctggcggatcatgaggtaaggagattgagaccatcctggctaacatggtgaaaccccttctctactaaaaatacaaaaaattagctgggtgtggtggcacacaactgtagtcccagctactcaggaggctgaggcaggagaatcacttgaacttaggaggtggaggttgcagtgagctgagatagcaccactgcactccagcctgggtgacagagggagactacttctaaaaaaaaaaaaaaaaaaaacaggaaaagaaaaagaaatcctcctacactagttcaacatgttgcttcagataggataagctgccatagaatacagattggttcaggtcctaaacaatattgggggaaactcatcattacttccatttcccatcatagagaacatagagtctatg

SEQ ID NO: 175040 - DNA, 476 bp, Homo sapiens
tcgttcagctgaaggcgtgggcaagtgactctgccctcagtttccctctgtgtaaaatgggggagtaacaggtttgcagtggagatttaatgagccagtgtgtaatgagcacctgctgcctggcaaagagaggttcagttgcaggtggtggtggtggtagtggtgattttatcattgccttcattagtgttactgttattggctatgaggtgttccttcagtagtctcccttgagcatctcttgcatacatagcactggaatttcctgggtctttgggagcagaattttgaagatctgggcacttccttagctataaggccttgcttaactgccccacctcagtttcctcatctgtgaaatgggtgtgctaatagtacctacttcctagagtcatgggaaccatgaatgagtgaattcacagtgtccagagtggcttggtcaggaggaagagaagaagtagccttggggccggaat

SEQ ID NO: 175041 - DNA, 2561 bp, Homo sapiens
ttgcatacggtaaggcgggacttccggcaccgctccgagatggtaattttggtggttctctacctcggcccacgccgcctgagttagaaacgctgcctccggcacagagcgggggtcgccccgctgcgcatcagccggtgggtcgctggcgctggtggcagccgtgcctgggttcccgccccgggtcgcccgccgctcccggccccgctccgctcacaatccgatggcggcggccgtgcttagggattcgacttcggttcccgtgactgcagaagctaaacttatgggctttacacagggctgtgtgacctttgaggacgtggccatttacttctcccaggaagaatgggggctccttgatgaggctcagaggctcctgtaccgcgatgtgatgctggagaactttgcacttataactgcgctggtttgttggcatgggatggaggatgaagagacacctgagcaaagtgtttctgtagaaggagtacctcaggtcaggactccagaggccagtccatccacccagaagattcaatcctgtgacatgtgtgtcccattcctgaccgacattttgcacctgaccgatttgcctgggcaggaactatacttgactggggcatgtgcggtctttcaccaggaccagaagcatcatagtgcagagaaacccttggaaagtgacatggacaaggcctcatttgtgcagtgctgcctgttccatgagtcaggaatgcctttcaccagcagtgaggttgggaaggacttcctagccccattgggcattcttcagccgcaagctattgctaactatgagaagccaaacaaaatcagcaaatgtgaggaggcctttcatgttggaataagtcattacaagtggagtcaatgcaggagagagtccagccacaaacacactttttttcaccctagagtctgcactggaaaaaggctttatgaatctagcaaatgtgggaaagcctgctgctgtgagtgctcccttgttcagctgcaaagagtccaccctggagaaaggccttatgagtgcagtgaatgtgggaaatcttttagccaaacctctcatctgaatgatcatcggagaatccacactggagaaaggccttatgtgtgtggtcagtgtgggaaatcatttagccaaagagccaccctcattaaacatcacagagttcacactggagaaaggccttacgagtgtggtgaatgtgggaaatcttttagccaaagttccaaccttattgaacattgcagaattcacactggagaaaggccttatgagtgtgatgaatgtggaaaagcctttgggtccaaatccactcttgttcgacaccagagaactcacacaggagaaaagccatatgagtgtggtgaatgtgggaaattattcagacaaagcttcagccttgttgtacaccagagaattcacactacagcaaggccttatgagtgtggccagtgtgggaaatcatttagcctaaagtgtggcctcattcagcaccagttaattcacagtggagctaggccctttgagtgtgatgagtgcggaaaatcctttagccaaagaaccaccctcaataaacaccacaaagttcacactgcagaaaggccttatgtatgtggggaatgtgggaaagcttttatgttcaaatctaaacttgttaggcaccagagaactcacactggagaaaggccttttgagtgcagtgaatgtgggaaattttttagacaaagctataccctcgttgaacaccagaaaattcacactggattaaggccttacgactgtggacagtgcgggaaatcctttatccaaaagtctagcctcattcaacaccaagtggttcacacaggagaaaggccatatgagtgtggcaaatgtgggaagtcctttacacaacactctggcctcattctccaccgaaaatctcacactgtggagaggcctcgtgacagcagcaaatgtggaaaaccctacagcccaagatctaacattgtttaactcttgaaactccaaacctgagaaaagccttagacctgcagggaatgtgccatgtctttcttcagtgttatggctatagagagcctttgtgaaggagccgtctgcctaaagttaaacctcatacttctagacctcccgatgggtcagactcccattagttccaggcatatgtgtcttgcaggagctcctttgcatgttctaaactgctggaggcctttgccagagttaaatcattagtcacccttgcatactaaggcgaggcagatacacctgtgttctcccaacccttggaggaaattccttgagcagtctgagcctttaaggggaattccttcccttttctgactgattacagcatacatctgaccagttttggccagaagggcccagcctgggttctgctggaagctgatgtggaaggcttcccttcatggaaattcttgttttcacacaacacttggtagtttttccagcctccaagtcaccacctagtaactggctgcctcacattgctctggtttgtgtggtaataaaggccttatttttaaatcta

SEQ ID NO: 175042 - DNA, 348 bp, Homo sapiens
tactactactaaattcgcggccgcgtcgagcagatacacctgtgttctcccaacccttggaggaaattccttgagcagtctgagcctttaaggggaattccttcccttttctgactgattacagcatacatctgaccagttttggccagaagggcccagcctgggttctgctggaagctgatgtggaaggcttcccttcatggaaattcttgttttcacacaacacttggtagtttttccagcctccaagtcaccacctagtaactggctgcctcacattgctctggtttgtgtggtaataaaggccttatttttaaatctaaaaaaaaagtcgacgcggccgcgaat

SEQ ID NO: 175043 - DNA, 1609 bp, Homo sapiens
ttgcatacggtaaggcgggacttccggcaccgctccgagatggtaattttggtggttctctacctcggcccacgccgcctgagttagaaacgctgcctccggcacagagcgggggtcgccccgctgcgcatcagccggtgggtcgctggcgctggtggcagccgtgcctgggttcccgccccgggtcgcccgccgctcccggccccgctccgctcacaatccgatggcggcggccgtgcttagggattcgacttcggttcccgtgactgcagaagctaaacttatgggctttacacagggctgtgtgacctttgaggacgtggccatttacttctcccaggaagaatgggggctccttgatgaggctcagaggctcctgtaccgcgatgtgatgctggagaactttgcacttataactgcgctggtttgttggcatgggatggaggatgaagagacacctgagcaaagtgtttctgtagaaggagtacctcaggtcaggactccagaggccagtccatccacccagaagattcaatcctgtgacatgtgtgtcccattcctgaccgacattttgcacctgaccgatttgcctgggcaggaactatacttgactggggcatgtgcggtctttcaccaggaccagaagcatcatagtgcagagaaacccttggaaagtgacatggacaaggcctcatttgtgcagtgctgcctgttccatgagtcaggaatgcctttcaccagcagtgaggttgggaaggacttcctagccccattgggcattcttcagccgcaagctattgctaactatgagaagccaaacaaaatcagcaaatgtgaggaggcctttcatgttggaataagtcattacaagtggagtcaatgcaggagagagtccagccacaaacacactttttttcaccctagagtctgcactggaaaaaggctttatgaatctagcaaatgtgggaaagcctgctgctgtgagtgctcccttgttcagctgcaaagagtccaccctggagaaaggccttatgagtgcagtgaatgtgggaaatcttttagccaaacctctcatctgaatgatcatcggagaatccacactggagaaaggccttatgtgtgtggtcagtgtgggaaatcatttagccaaagagccaccctcattaaacatcacagagttcacactggagaaaggccttacgagtgtggtgaatgtgggaaatcttttagccaaagttccaaccttattgaacattgcagaattcacactggagaaaggccttatgagtgtgatgaatgtggaaaagcctttgggtccaaatccactcttgttcgacaccagagaactcacacaggagaaaagccatatgagtgtggtgaatgtgggaaattattcagacaaagcttcagccttgttgtacaccagagaattcacactacagcaaggccttatgagtgtggccagtgtgggaaatcatttagcctaaagtgtggcctcattcagcaccagttaattcacagtggagctaggccctttgagtgtgatgagtgcggaaaatcctttagccaaagaaccaccctcaataaacaccacaaagttcacactgca

SEQ ID NO: 175044 - DNA, 107 bp, Homo sapiens
atatgaaggaataacttcaagagctttcgtacccccccaccaaaaacacccacaaaagttccatgaagaagaaaataaaatcctgcaagagacatttagattatata

SEQ ID NO: 175045 - DNA, 695 bp, Homo sapiens
atcggctcctgatccaggacaaggacccggccttttatctgtgtagcccagtgctctccatagcacctgtctcatcagaggtgagtgataaacacttgaggaatgaatcagtgcgttaatgacattcttcatagcagaaaatgtgtattaatcatttctgtgtcccttgactgtatttagccaaatgtttttttatatggaaactggataatattttttaagtaaacagataaatgaagaaatgaatgagtgattgaattaatagtgaaacttgctaaatatatgttgaatttaaacagattagtagatagaaaaagactttgggaaaaggataaaagctctatactaaatatagttccttaatggatattttattcttccccggtttccttattttgtcaatttttcctgacattattcactgtctcttgtgctagtactgttcattctcctaccttgtcactggaatttaatgtgagcgtctgtggtggaggaggaggccccaggtttgcaccgtacttagtacagggatgtaacattcagtcgtgaatatgtgttaaactgtttttcttgtacagggatggatttgcacaggtccattgccaagctcttgtcctgttcatttgtgagcaaagatgggtgtccggggacacatggcagactgtgcccattgacgggagtaagcgagctgaaca

SEQ ID NO: 175046 - DNA, 320 bp, Homo sapiens
aaggcattactgggaatcagggatttgtcagtgtttctggcaggtgtgatctcttggatgtcaattaagcaatcagcatcctctgatgcatattctgagctcagaggtgcaaattagagacccatgtgcctgtttgctagtagtgtttacaagtttttaaattagttatcaacattccataattgtaagaattcacataaaggtctggatagcctgcttttccttaaactgaaagatcaaacaatcttaggcccatatttctgcagagtaaccaggtttgagctatcctaaattggctttcttcagtgatttgtgctccc

SEQ ID NO: 175047 - DNA, 216 bp, Homo sapiens
atggcccaaggggtatgcagacgtcaccagtcaatcacaacactcactccttagccaagttcagacagaccttcaaatccttctcaagtcagtactccaacctcctgccctttaaagcgtgggcctttgaccaatggcattggcatcacttgggagcttataacaaatgcagaattacgcctgtaatcctagcactttgggaggccgagacgggtg

SEQ ID NO: 175048 - DNA, 379 bp, Homo sapiens
aaacttttgatttgttcaagagacagtaatgaggcctgtatggctaaaaattattaccactgaagaaagtagtatgagctatcattagagaggtaagcagagggtccagaccctgtggggctttggaagagtttgatcttgagtcaatggtactgggaagccactgcaggtttgtaaaagcaaggggtgatgtgaccagacttatttttaaacatgtatgctctgtgaaaaactgatgaaaacaggtcaacagtggtggcaggaacaccagttgagaggttgagtagttcaggaaagagataatgctggcatggactagggtaaaagagtagacgaggggaatggagtagtctgagatttacttaggaggaagtagcaa

SEQ ID NO: 175049 - DNA, 642 bp, Homo sapiens
cagggccctaaagtaccagtggcagtagtatccaagtaagtgagaagacagaaggtagagcaatatttttccaggctcatggtacagaggttgattacaatacctctgtactgtatcattaggctttgtgaatagcctgatcagtttgccaaggaatggaagtggagatcggaagttttcattaatttacttacttagggctcagacttacactattggttttattacccttgttatattatctttcatatctgtttctaggttgattacacattgaatcaagttgtacattcctaggccctcacagggaaagaaggagacagatctgtgtttgaatgtctgtctctgctacttagctgtataatcttaaggtagataacctaacccctctgaactctagtttccccatctgtatgatggattgataatgcctaccttatcaggtcattgtgaaaattaaagatatgtgaaaatactcaacatgttcttagcacatagattctttcacatttgcttcacttcttatttagtttttgttgtaggttatcctgtgtatttgaccttccaaacaaaggttgcttttgactttatgacttaaggttggaatatctcctactactcccctgtcctccttggaccaga

SEQ ID NO: 175050 - DNA, 610 bp, Homo sapiens
agaggaaccttgcctattgatcaggacactgggcctgggaagagaatgttccagtcacgaggacaggatggctgtcatttcacctgctatggcagatttacaaacaaatctagcctgtggcatgagtcgtttggaaagttttgcaataaatgtatcagtaacttcaccagtagacacatccatgtctgtctgtcctactttgcagccagtttttcttacttccctgttcccctttcattttacgatcagtttattcttttcagattgccagttactcttcccctgccccccatcctctgggtttcattagaaagaaaccattccccaactcaacagggcttgatttctgaactgtgctttagaattctgctggagaggctatctgctctcagttctgccattggtaggctttaaccacaaattccaaggcaatttcatttgcgtttttaggaaaaacgtatctccccaaccttgtaactgacactggaaattgaagtgccttcacttgctgctgtttaatggcaacctcatgacatgtgctcagttggctcgatttgtgagtggctcgatttctgagtgctgggatggcactgcatgagtagggatctct

SEQ ID NO: 175051 - DNA, 577 bp, Homo sapiens
ggatgcaaggatatttcaacatacacaaatcaatgaatgtgatacatcacatcaacatgatgaaggccaaaatccatatgactatctcaataaatgcagaagaagcatttgataaaattcaacaccttttcgtaataaaaactctcaacaaactaggcataaaaggatcatgccttaatataataaaggctctatgtgacaaaacccacagctaacatcatacagaatggtgaaaagttgaaagctttttctttaggaactgggaaaagacaagtatacacatgttcacccctcctactcaacatagtactattctatctatccaaggggggctgcacatcagccctgtctcctgtctgccatcttcctggcaagagctcataaagcaagttccaaaataatcttatatttagaaaaaccaaacactccaccagaacactcttagaactgataagccaattcagtagacttggcaggatacaaaattaatatgcagaaataagtagcatttctattcaccaacaatgaaatagctgaaaaagaaatgaagaagagaattccatttatgatagctaca

SEQ ID NO: 175052 - DNA, 678 bp, Homo sapiens
gatgtcatccaatgaattcacttgagtcctatgccttcaacatgaaagccactgttgaagatgagaaacttcaaggcaagattaacgatgaggacaaacagaagattctggacaagtgtaatgaaattatcaactggcttgataagaatcagactgctgagaaggaagaatttgaacatcaacagaaagagctgagctgttgtaactgggttacaacagctcaaaggtaagagctgccacttcaagatcagaggccaaatgaaaaactttctctttagcagaacactcaagatgagcagacaaacctagtcacagccaatctctaggaagtgacgcacaattgacttaggaaaacaaagcaaaaaatgctgttctcagggctaactcagaggatttacaccaaatactgcctggggtgtgttagatcaacaattaagatgaaaacaaaactttaaaacaaatggaagaagtttaaaggcacactctggcatgctcttggtattatttacaaaggagttttcctttcaatgttgtttataaggaaactccaggaagcctgattttagcatctatacaggccattatcatattaattttttgcattaaccaacactcccctcttttgaattttcacctcatcttaagttccttctctacgtattttaaaacctcttttgc

SEQ ID NO: 175053 - DNA, 502 bp, Homo sapiens
tattctactcatagataagcttcctgatggcaaggatcctgcctaattactgcattttccacaatggctaacccatggcaggtccccagtaaaggttaatctgatgaatgctgaatcactattttatagaactgaatcttatcttccctcttgatttgtaatttagatcatatagttcttgactatattgaggaggccaagtgtttgttgaatggcattttacaaaagctttccaggtatttcctggccttgtttacttccagcaataatcacaaaagtcattttcccccttacataatgtaatctttgttcttaaattgaaatattcttgcacaagatcattcttctgaccattttctgtgtaatgattactgtagctcactgccagctgagaccattgctcttacattttggctttcattaaatttgagagagacttttcattatgctgtcattatttgatgggcatgcctagatagtgccttctccacactgacacagt

SEQ ID NO: 175054 - DNA, 1174 bp, Homo sapiens
  misc_feature (1)..(2): n is a, c, g, or t
  misc_feature (4)..(4): n is a, c, g, or t
nncncggctccagctccgccgccagctccagcctttgctccccctcccaaagtcccctccccggagcggagcgcacctagggtccctcttccgtccccccagcccagctacccgttcagaccagcagcctcggggggcacccccccgccagcctgcctccctcccgctcagccctgccagggttccccagccatgaatctcttccgattcctgggagacctctcccacctcctcgccatcatcttgctactgctcaaaatctggaagtcccgctcgtgcgccggaatttcagggaagagccaggtcctgtttgctgtggtgttcactgcccgatatctggacctcttcaccaactacatctcactctacaacacgtgtatgaaggtggtctacatagcctgctccttcaccacggtctggttgatttatagcaagttcaaagctacttacgatgggaaccatgacacgttcagagtggagttcctggtcgttcccacagccattctggcgttcctggtcaatcatgacttcacccctctggagatcctctggaccttctccatctacctggagtcagtggccatcttgccgcagctgttcatggtgagcaagaccggcgaggcggagaccatcaccagccactacttgtttgtagttttttgccttttagacaagaaaaaaaaatctttccactctttagtttttgattctgatgactcgtttttcttctactctgtggccccaatttttataaagtgtttttgagtgtcctatgggccggggcagggtccaagatcttttcccttccccaggcccctcggctccctcccagatcccacccccagccccactggttgccaaacactaaatctgccgacacccatctgccccacctcctgccatggccatgaaccgcgacccccactaaatttctagattggggatagggagaaagggaggcccaggaaggtctcccctgattttttttcatagtaatttttttccccagagtttgaattttttggtcttctcctggttttttggcaaattaggggggcccggggctcaagtgcgggaagggggctggcccgaggatcccatggctctcacaccatgtttttgtacagaactgatggttgaatctttgttctcttgaaataaacagaagaaaatg

SEQ ID NO: 175055 - DNA, 1620 bp, Homo sapiens
ggaaggtcctccctaggcctcacctcaggtccagactgcgggaggaccctgaggggccaggggtagccatgaggcctagtctgggacggagcctcgggctggagtagcttcgggggcctgggctgccccctggctgtggtccgtgggaaagggccctgctcaggcggggcgggctggggaggcctccggggacagctgcactccagagctgcctccaggctggtcccgggcgccctgccttagtttattgcccatgcagcccacccccagcttcctctctccttctgtctgtctgtctgtctgtctgtctctctctctctctctgtctctctctctctctctttctctgtctctggaccacaggaatttcagggaagagccaggtcctgtttgctgtggtgttcactgcccgatatctggacctcttcaccaactacatctcactctacaacacgtgtatgaaggtggtctacatagcctgctccttcaccacggtctggttgatttatagcaagttcaaagctacttacgatgggaaccatgacacgttcagagtggagttcctggtcgttcccacagccattctggcgttcctggtcaatcatgacttcacccctctggagatcctctggaccttctccatctacctggagtcagtggccatcttgccgcagctgttcatggtgagcaagaccggcgaggcggagaccatcaccagccactacttgtttgcgctaggcgtttaccggaacgctctatctcttcaactggatctggcgctaccatttcgagggcttcttcgacctcatcgccattgtggcaggcctggtccagacagtcctctactgcgatttcttctacctctatattaccaaagtcctaaaggggaagaagttgagtttgcggcatagccccggtcctctccatctctctcctcggcagcagcgggaggcagaggaaggcggagaagatgaagagctttcccatccagggtgacttttttaagaaccactcttgtgctccccatcccgctcctgccgggtttcagggggacagtggaggatccaggtctggggagcctcaggactgggctgttggtagttttttgccttttagacaagaaaaaaaaatctttccactctttagtttttgattctgatgactcgtttttcttctactctgtggccccaatttttataaagtgtttttgagtgtcctatgggccggggcagggtccaagatcttttcccttccccaggcccctcggctccctcccagatcccacccccagccccactggttgccaaacactaaatctgccgacacccatctgccccacctcctgccatggccatgaaccgcgacccccactaaatttctagattggggatagggagaaagggaggcccaggaaggtctcccctgattttttttcatagtaatttttttccccagagtttgaattttttggtcttctcctggttttttggcaaattaggggggcccggggctcaagtgcgggaagggggctggcccgaggatcccatggctctcacaccatgtttttgtacagaactgatggttgaatctttgttctcttgaaataaacagaagaaaatg

SEQ ID NO: 175056 - DNA, 1540 bp, Homo sapiens
  misc_feature (1)..(2): n is a, c, g, or t
  misc_feature (4)..(4): n is a, c, g, or t
nncncggctccagctccgccgccagctccagcctttgctccccctcccaaagtcccctccccggagcggagcgcacctagggtccctcttccgtccccccagcccagctacccgttcagaccagcagcctcggggggcacccccccgccagcctgcctccctcccgctcagccctgccagggttccccagccatgaatctcttccgattcctgggagacctctcccacctcctcgccatcatcttgctactgctcaaaatctggaagtcccgctcgtgcgccggaatttcagggaagagccaggtcctgtttgctgtggtgttcactgcccgatatctggacctcttcaccaactacatctcactctacaacacgtgtatgaaggtggtctacatagcctgctccttcaccacggtctggttgatttatagcaagttcaaagctacttacgatgggaaccatgacacgttcagagtggagttcctggtcgttcccacagccattctggcgttcctggtcaatcatgacttcacccctctggagatcctctggaccttctccatctacctggagtcagtggccatcttgccgcagctgttcatggtgagcaagaccggcgaggcggagaccatcaccagccactacttgtttgcgctaggcgtttaccggaacgctctatctcttcaactggatctggcgctaccatttcgagggcttcttcgacctcatcgccattgtggcaggcctggtccagacagtcctctactgcgatttcttctacctctatattaccaaagtcctaaaggggaagaagttgagtttgcggcatagccccggtcctctccatctctctcctcggcagcagcgggaggcagaggaaggcggagaagatgaagagctttcccatccagggtgacttttttaagaaccactcttgtgctccccatcccgctcctgccgggtttcagggggacagtggaggatccaggtctggggagcctcaggactgggctgttggtagttttttgccttttagacaagaaaaaaaaatctttccactctttagtttttgattctgatgactcgtttttcttctactctgtggccccaatttttataaagtgtttttgagtgtcctatgggccggggcagggtccaagatcttttcccttccccaggcccctcggctccctcccagatcccacccccagccccactggttgccaaacactaaatctgccgacacccatctgccccacctcctgccatggccatgaaccgcgacccccactaaatttctagattggggatagggagaaagggaggcccaggaaggtctcccctgattttttttcatagtaatttttttccccagagtttgaattttttggtcttctcctggttttttggcaaattaggggggcccggggctcaagtgcgggaagggggctggcccgaggatcccatggctctcacaccatgtttttgtacagaactgatggttgaatctttgttctcttgaaataaacagaagaaaatg

SEQ ID NO: 175057 - DNA, 338 bp, Homo sapiens
aggtgctggctatgggattttgtgagggacctaaggaggtataggctgagcactgagtccactgtgcagagaaaggtcttatgtgttacaaacctgtctcgctccctccctgcctgccatctgactcactctgctcattcatcaaaacccagctccatggttacttcaaaggctccccaggacctcactctcatttagttactgtttgctatgacccctctgggattctacgcatgtctctgtcctagaccttactgtgggataactacagtggttaatttatctgcctagcatgattcaagtaaacgtattaaacaaatacaaatggagtacctgct

SEQ ID NO: 175058 - DNA, 346 bp, Homo sapiens
ttttatggattcaccacaataactttgggcctaataatgaaattttcgactgaaatccaaattcctaaaatcactactctgcttttcagtgtcttcatatttggtaagtccacatgcaggaaaatatttgacttgctttaccttatgaaaactaaaagtaaaattgtgaacactacagactctacacatagacatgctgatgtcaaatcacaggaaaaaaaatgtgtgttttctgttatttgaattttttgaaatgagtatcttcaacaattttataaatctttccctggacagctataatgtgaccaactttaagttgtgacatccctctattttttcaatcacc

SEQ ID NO: 175059 - DNA, 567 bp, Homo sapiens
aacaacatagtcattgttttttcctgtggtaatggtttccaagttggacttttttttcctctaacaagaggccagtacccagttgattagcttacagatatcaactcactgaaagtaatcttttgttccctcatttcacacagcacaaaggttcgttctgatgtttcttcttctttaaggaaatctttagccatagaagtgtcactttttttttttctgcaaaagaattccaagatgaacgggttgaatgaatcatgccagccagggtcacatcctgtcctcagggggcccagtgctcaatagtagattctgcgggagtggagaagcgtcagtggcagctccgctcacttggtgagtgagggatttggctgtgatgagcctcagctccgagctctcaaatgtcctccagccagcatctgcctgcttcccacaaaaggatagaagagaggcaaagtgcgtgtttcataaaacctgcctgcacttttataacccatcaaagaggccatttttaaacacaggtacaatttaaacatgatctttctttgcaaataaatatgttttgtttca

SEQ ID NO: 175060 - DNA, 386 bp, Homo sapiens
tgtttcctggggaaagcctagctgactacctagcaaaggctgtaggatggcaccattgtatagtcacttaagtcatgaggtccagttctcattttgtaggctcagaaatttgattctgttggtgtacatagaggtggctcatactagccaaacgcatgagagactgacttatatactagaatatccttttataatttccctgggaaaaaaataaactgtcaggtaggtctggtcagcacttcctctgcttttggggagagaaacaggtggagaagtcagaggtttctgattggggcggatgtgcagcatgttcactagtaccctttctctggagacaccagcagtctgggcctctcgggcctccctggcattccttgcataccatt

SEQ ID NO: 175061 - DNA, 500 bp, Homo sapiens
atccatgacatatatattctgtatagcactaagcacatggtgcatttggtaaatggaacaactgaaaatattttgaagagcttatagacttttagcctgatatttaaaacccataagaaaatggcacaaagaccagattgcttttactgcagtatctcaagtgaaactgaaagtaatgacgtttattttgtgtgtgtggtaaaaacacataaaaattaccatcttatgacctctgatgtggtctccacagggaggaaaaaaatgaccattttaaccatttttaagtatatagttcaatagtgtaagtatacagttcaatagtgttatgtatattcatattattgtaaaacagcaccagagctttttcatcttgcaaatctaaaactctgcactcattaaataataacttcctttccaactactgtagccccggaaactaccattttactttatgtttctatgaatttgatgtcacatattaaataccgcacataaataga

SEQ ID NO: 175062 - DNA, 290 bp, Homo sapiens
caaccttgcagttccactgccatgtgaaaagcagagataaaaagagtgctgggataatccaggttaaaagacttgaataaaaaagatgacagtaactcacaaacagaaaagcatgactcttcatcccaactcacttgaaaatcaacactttcacagaaggcctccaagactggatgggatctgtttcaggatacatttggtgacagatattctatgaccttttgtgtgagagagaagatgcccaagttactatcagtgggaaatgaacaggaagccagggatggtgtggt

SEQ ID NO: 175063 - DNA, 866 bp, Homo sapiens
ctgacattcttctcatcacataacacataccagcagagaataaaaaggaaaaagaaaaagacatgaatatttgaaaaggccttttgaatcttgcaggcataaagtagaagtatatatcattctctcagacccggagtccatgcagatacacattgaaagacatgctttgtaacatcatcctcagctgatatgtcaaaggaaaagaattcattctcaccttttcagagtgcctgtcattaggtacattaatatggatgaaccaccacaaaatcaaaaagcagtaagagtggtgagtttaaaggaagaaagaccttaaactatatttaagttgggcttaaatttgagaacgaaacttggggtttccataattacctttttttctctacttaccttagaagaaaaaacattactaattagactttctcttgaagtctatttgccagcatttcactaaacattcctcaagcttccctataaatgagggaatggaactgatgtggacaagttgaggaagatttgttttttctgtcataacatcccttatttgaatgcatcacatttgacagtagaacacagaagtatttgcttttccaattcattctataacacaaataatgttaattcacaatcagttaagtagcaacccaaatgcattttattaacaaaaattcttaccaaaaatgtcaataagcatagacatttctataacattgaatattcaaaataagtttctgttaattcatatcccattcctatatatgatctctacaacacctagttcaatatttaagtcataattgcactggattactgtgtatataatatcatcacttgggaaagaatttgtcattaatacactaacaacg

SEQ ID NO: 175064 - DNA, 334 bp, Homo sapiens
  misc_feature (315)..(315): n is a, c, g, or t
gctcaaaagggaggttcgtcaacagtggcttcagggttttagtttaattaaagccagtgtataacctgagatgaaagaataggtttagaggaataggtgactggtttagtattggatgtactgaatttgagatgactctgcaagtggagatatttgtcagataattggaaatttaagattgaagtttagaggaggagttgggacagagataaaaatttggaaatcctactttggcctcccaaaatgtggggattacaggtgtgagccaccacgcctggccggtgccctggttttatctaatgtatttgtgacatntgttccctcctctccattt

SEQ ID NO: 175065 - DNA, 543 bp, Homo sapiens
gataatagccatcctgacaggtgtaaggtgatatctcattgtggtttggatttgcatttctttgatggttagtgacatagtttggatatttgtccccactcaaatctcaggttgaattgtaatccccaatgctggaggtggggcctagtgggaggtgtttgggttataagggtggatccttcatggcttggtgctatcttcaaaatagtaaatgaggtctcacaggatctggttgtgtggctttgggaggctggggtggtggatctcttgagcccaggagtttgagaccagcctgggcaacatggtgaaacccaatctctacaaaaaatacaaaaattagctgggtgtggtggtgcatgcctgtgggcctagctactggagaggctgaggtgggaagattgcttgagccagggaagtcaaggctgcagtgagccgagatcgtgccactgcactccagcctgggtgacagacgtgagactccatctctgaaaaaactaaattaaattaaaaataaaaatactacatacccaaacttatgttgtg

SEQ ID NO: 175066 - DNA, 868 bp, Homo sapiens
tgctcaagaagctgtattccagaaattaattgatgtaagattaaattgtaggtccttcatattgatgcttggaaatacccgaggctctcatttataattattctagtaatatggtggaaggagttttggtgtgagagaaagagatctagattttcttccttgatcttccatttccttgctttgtgggcacaggtgaaaacatggccacaccgagcttgattttatatctgtaaatgaaaaagtttacagtagactaggggaacacatggaaatgtcctcagggctcagattgataactttattagtttgctaggcctaccataacaaaataccatagactcaatgggttatacaacagaaatttattttctcacagtttcagaggctggaagtccaaaatcaaagtgcctcttgttgtcccttggtctcaggtttggtttcttctgagacctctcttattggtttgcagatgactgcccccttgctgtctcttcatgtcctctctgcacatgtaccccctacgtctctctgtcctaatctccccttatgggagcaccagattaggacccactgtaatggcctcatttaaatgtaatcacctttttaaagccccatctccaaatacagtcacattctcaggtacttgcttagggttaggtcttcaacatatggattttggaggagcatagttcagtctatgacagttacctaaacatagttggcagcttagtctagtagagagaatactttgccctcatctttatctctgcaactatgactgaaactcaagtttgtcttgatatgtgatgctgactgttatgggtctcagagtgtctgaagcaagcttgacactcttaagtaacttcta

SEQ ID NO: 175067 - DNA, 338 bp, Homo sapiens
gacagcgagctactggaagcaaggggtttttttaaaaatttttttacgattaacaaaaatctcttcactttgagacttaaaatggagatctcccaaagaaaatattttgatgtgctttttaggcataccaacatcatctaaaattcagtattagccatttttaacagctggattatgtttcccttatctaggtgttagtaagcatgcttggttaagcactttctagaaagaggactcagggctgttcttgatcacttttaagatcgttccaaccctaagattttcagtcattcttaggaaacataaaatcatttccaaccctaagattttccctcaga

SEQ ID NO: 175068 - DNA, 289 bp, Homo sapiens
gctagcaatatactcccaaagttgcatatgttttgagtgaacttcctagaatcaatttttcccacaagttctattatttaggtgctgttttgttttgcattgtgaggattacaagttgcatatgtcttattatgaactaaacctcattttacgaacatgaacctctccaactctgtattaccttatagtttctgaaagttataatgtgttgaatggtttgcaaattgcaaaataacttacttcctcagagagattatttcatttctttgataccactagtgttgtattt

SEQ ID NO: 175069 - DNA, 730 bp, Homo sapiens
tgcggtggctcacacctgtaatctgagcactttgggaggccaaggcaagtggatgacttgaggtcaggagttcaagaccagcttggccgatatggtgaaaccctgtctctactaaaaatacaaaaattagctgggtgtagtggcaggtgcctgtaatccctgctacttgggaggctgaggcaggagaatcgcttgaacccgggaggtagaggttgcagtgagccgagattgtaccactgcactccagcctgggtgacagagcaagactttgtctcaaaacaaaacaaaacaaaaattagccaggcgtggtggcaggtacctgtaatcccgtgctcctgaacaaatgtgagtttgaaaacatggtttaaaaggcaaatgtataaaaagggcagttttgtcaaaatttaagttcagaatgatttaaaaagaatggcatagccaaaaacactaaacgtgataaaagatagaagggaagtatatatcaattaaggcagttggtattcacactatggtttgcactggatggactacagatacagcacttaatttacgagagggacccagaacagtgaagggatttggaaaaatgaacaagggattcatttggcattcaacaaacagttcctgagcaatattccaggatgtaactgtataaaagactgacaaggtctcaggctttcatgcactttatatcacatcttttcatccgccttcccctccaaaaaagaga

SEQ ID NO: 175070 - DNA, 563 bp, Homo sapiens
ttttatattttatgtcctgttttactgaattcttagattcttaattcattcttattatgcctttaagctgcagtttttgatccactcctatggcacctattgttctcactcaggaaagtggatttttttttttggcatgaccaccacagaagaagccacattctttctgaaagagttattaaatgattaaatcacaagcaaacacttgaaacttgcacaatccccctacagatactgcaatccattctaattcttaggattaatttggttagtacagactctggttaaatctataaaacccatttgtagcaagagaagaaacaacaggtatctacaacccgaagatatgggagtcaactatcagaactgattctaaaacacagatgagtcagataattcaggaacatctcttggatagcaatgttccagttcaatggaaaaaagcactctaaaatgcacatgtgaaatccatttaaaggagaaagacaactagtaagggcatccacaattcctttgagttcagatacttagtgtgataatggatgatacttagacttcatggc

SEQ ID NO: 175071 - DNA, 308 bp, Homo sapiens
ggtgtccacttggaataagagttggaaaacactccaagaaatggatcctgtattaatatcacatctgtcccagatctccaacactgttcactttccttccacggtgccaacaccaagctagctgataggtgggaacagggcagctctgcggttggcccccaagagccagggagtcccccaagctgaccccctggggtggcagtggcacctaacaagaacttccaccttgttttccctctctctgttttgtccttttggactctgctcacgcatcacatccagaaagttccctaagctctccagtggga

SEQ ID NO: 175072 - DNA, 339 bp, Homo sapiens
ttacacagagccaactatgtggcttccactcaaagatacacttgattggaagcataaaaacaacttcataatacattgatgttgaaaatcagtgagttatagtcaatcttttcaaatcacctcttaaaaataattcgtcttgctctgtcacctaggctggagtacagtgacacaatcagctcaccacagcttgaaactcttgggctcaaactatcctcccgcttcagcctcttagtagctggaacttcagctgcgtatcaccacaaagagctaactttaaaattgtcttagaaatgggatcctactatgttgcctaggctgccattgttcttgatagag

SEQ ID NO: 175073 - DNA, 843 bp, Homo sapiens
acccccatcttccagtaatttgccaaaatgatgaacacaaacggaaagaggagaggcacccgatatatgttctctaggacttttagaaaacatggagttgttcctttggtcacgtatatgcgaatctataagaaaggtgatattgtagacatcaagggaatgggtactgttcaaaaaggaatgccccacaagtgttaccatggcaaaactggaagagtctacagtgttacccagcatgctgttggcattgttgtaaataaacaagggcaatattcttgccaagagcattaatgtgcatactgagcacatgaagcactctaagagccgagatagcttcctgaaatgcatgaggaaaatgatcagaaaaaaaaaacaaaaaaaaaaaaaaacaatttttgggcggcttctgggcctggaaaaagtttttaaaccccattctctttggggcgcggggccccagttggggtacggggacaccctgggccaaaggggtccaaaggagaaacccgggcacggacatcctggggttgggtttccccaccaaaataaaaaccgcgggggaacacggaagttgtttgtggcaagcacatccccgagggcagtttccggcggacccaagacggggtctccacacacgagggttcccagggagatcgaaataaatgccggccggcggggtgggaaacagcacaacccaccaccaaaacaagtagagagaaaaaacaacacgacagaaaaagcgcgacaacaacaacacacagagaacagcacgaaagcacgaaacaagcagagacagagaagcaacacacacatagcgaagagaaaaaacgatgaccgacagaa

SEQ ID NO: 175074 - DNA, 303 bp, Homo sapiens
cctagaggatcccggtattgagtgtcatgtgatgtggggctatgagccaagggatgtgggtggcctctagaagctggaaaaggcaaggaagcctacagatggaattcagccctatagataccttgattttagcccctcaagattcatttcaaacttctgatctccagaactataagagaagacattcatgttgttataagccacaaagtttgcggcagcaaatacaaatgcaaaggtgaataagaaagtaatcttatttccttttactatatctctttcgaaaggcagcatgatagagttgaa

SEQ ID NO: 175075 - DNA, 873 bp, Homo sapiens
actgtctcctctcacggccccgacagaaacggtttctgaggagtagaagtgtcctaagtggattggaaattacaaatgccggaaagaacctagggatggaaagcagccctcaactcagcccaccagcacccagttgaaataaacagccatgttgctcacagaaagcctgtttggtgatctcttcacacggacacatgaaacatttggtgccaaagacccgggtcagtgggactccttttggagaccagtcccctgtcctcaccctcactccgtgaagagatccacctacgacctcaggtcctcagaccaaccagcccaaggaacatctcaccgattttaaatcaggaccccactagaaattggactgtccaactggcccaaggctctgatcgactccttcccagatctcctcggcttagcagctgaagactgacactgcctgatcgcctcggaagccccttggaccatcacggacgctgagcttcgggtaactctcacagtgaaggccctgcatcccaatcctggtctccagctgctttccaagattgataggaaactgaattccaaaaaggaaacgaactaactcaaattttccctgatctggaattacaagcatcagctcattattcctgcaataaaaccgattggcaggagctaaacagaagacttctaaaaaatgaaaacccctggccgggcgcggtggctcacgcctgtaatcccagcactttgggacgccgaggcaggcggatcacgaggtcaggagatcgagaccatcccggctaacactgtgaaaccccgtctctactaaaatgcgaaaaatagccgggcgtgttggcgggcgcctgtagtcccagctactcgggaggctgaggc

SEQ ID NO: 175076 - DNA, 827 bp, Homo sapiens
actgtctcctctcacggccccgacagaaacggtttctgaggagtagaagtgtcctaagtggattggaaattacaaatgccggaaagaacctagggatggaaagcagccctcaactcagcccaccagcacccagttgaaataaacagccatgttgctcacagaaagcctgtttggtgatctcttcacacggacacatgaaacatttggtgccaaagacccgggtcagtgggactccttttggagaccagtcccctgtcctcaccctcactccgtgaagagatccacctacgacctcaggtcctcagaccaaccagcccaaggaacatctcaccgattttaaatcaggaccccactagaaattggactgtccaactggcccaaggctctgatcgactccttcccagatctcctcggcttagcagctgaagactgacactgcctgatcgcctcggaagccccttggaccatcacggacgctgagcttcgggtaactctcacagtgaagggaaactgaattccaaaaaggaaacgaactaactcaaattttccctgatctggaattacaagcatcagctcattattcctgcaataaaaccgattggcaggagctaaacagaagacttctaaaaaatgaaaacccctggccgggcgcggtggctcacgcctgtaatcccagcactttgggacgccgaggcaggcggatcacgaggtcaggagatcgagaccatcccggctaacactgtgaaaccccgtctctactaaaatgcgaaaaatagccgggcgtgttggcgggcgcctgtagtcccagctactcgggaggctgaggc

SEQ ID NO: 175077 - DNA, 241 bp, Homo sapiens
gtgcgctaaccccagctctgctgctgaccctgggaaaacaccttgagttctctgagaacctcagttttcctgtttgtaaagtgggggcggtaatagttcaagtctcatagagtgattataaggattcagtgagacaatccatgtgaagcgtggggcctgacacacagagagtgctccaggaatgtcagctactgtttttagaagtatcactagctagtgtggtgccctaagcatgtaaact

SEQ ID NO: 175078 - DNA, 320 bp, Homo sapiens
atgtaaacacgtcacaaagtatgtatttagccaaaattatgccttcaaaggcaggaaagaatgttactgaaacctaaagatcatttctaagcatacaatccctaacttcagtaaaatcatatatacaaaacagttaagatctaatcaaattaagctccagacttggttaaaataaagacggtatactggtcagttttagtcaaaacaacaattaggttatgcagattttcagaagtaacacaaaatgtacaaacaaaattctctttgtaaaacaataaatataatctcagttacacttataactaattcattgataccgg

SEQ ID NO: 175079 - DNA, 409 bp, Homo sapiens
tttgtaaattgaattcaggtagtagtatcatccaccaatccatctgttgctttgttggtcttctgaaggggggatttaaaactctgaaacagtctgagcaccttgagagaaatcagaaacaagacaattatttgcagtgctgtcaaacaagccagaaggagaaaatcaaggtagaatgccccactttccagttgccttaggatagcaggctgcagcctcagacttgatcctgtcattctcctctgtctcccacatctgaattgataattgctgcaaaatgtcattagcctacacttcatccatcagggctcttggattcttacaccacgacttgctgtgcaaggtgtttattgcatcttcaaagtgaaactttaaattattattcaaacatttattttccttttgtttt

SEQ ID NO: 175080 - DNA, 689 bp, Homo sapiens
attttactgtccattttacagctcaggaaactgaggctcagtcaggttgtgtaatatccctaagattactcagcttgcaagtaaaatagatggcagtcaaaacaagcactgtctaactgcaaaccccaggctcctgactaatgtgtttccagtgagcaatgttttatggtttttagcacatttactttggatacttatgtataagctcatttgtcatttttcaacctatactttaaaaaatttaagatctcaaatttctttttgatttgcagcattttcattgtcttaaccagctttgccaaattcatttccaatttcttttggtctctttctacaaatatatgctaaagatttttcatcgaattttccacaaattcccacaaaagatactgcaacagtgatgaaaacaaagtctttctttgatgctctatagacataagcatgtatttgttttatttttaggtatgatttttatagtatttttcatttttatgtataattgcttttatttttaggtatgataagtcaaaaatgtcatagggagtatcattgccctaagagactctggtaagaaatttatcaaatgaatgttccatacagaaaattttgaaagagtactacagcaaattttcaaggttgaagacactctgtatgagcagggtgatggaattcagccatttctcattttt

SEQ ID NO: 175081 - DNA, 528 bp, Homo sapiens
aggcggaggttgcagtgagctgagatcacgccactgcactccagcctcagcaacacagcgagactccgtctcaaaataaaaaataaaaacaaagaaaagagaaactcagatggtagctatcagaatcatccaaactagctcaaaattttgcttaaatctggctgagaagcaataagaagcaacatctatacatgtgtcttttgctcatgtccctcctgattctgaaacattaatttgatggcatattttaaacactgaagctccatggtcatgcacaacaatcaccagtaagatataataattttacggatcacttgaggtcaggagttcgagaccagcctggccgacatggtgaaatcctgtccttactaaaaatacaaaaattagcccggggtggtggcgcatgcctgtaatcccagctactcgggaggctgagccaggagaatcgcttgaacccgggaggtggaggttggagtgagcccagatcgcgccactgcactccagcctgggtgacagagggagactcct

SEQ ID NO: 175082 - DNA, 514 bp, Homo sapiens
cctgtaatcccagttactcaggaggctaaggcaggagaattgcttgaacttgggaggtggaggttgcagtgagccgagattgcaccactgtactccagcctaggcaacagagtgggactccctctcaaaaaaaaaaagaaaaagcaaagaaacaaacctctcttcttaaccaaagcaaagttttctaacactgggcaatacttgctaataatcagagctgttggctgaaatgaaatccatttagaatagtcagtgtgtgatgaaagtagtactgtcatcactttgttgttgtttttgcagttgtataattttatttgatgaccagtggttagttcttatccacatggagtgtctgtagattttgaaagtggtaacaggtacataagtaaccaaagtatagagcttgttttagtgaatttttatcttcattacattttctggacaaccacgcagggatacactgtgtgagacattccttattcctttggcccagacagctttgttgagcctgcta

SEQ ID NO: 175083 - DNA, 368 bp, Homo sapiens
gactcgagttagtaccctcgataggcaacagcaacgtatcatcactgggcaatacttgctaataatcagagctgttggctgaaatgaaatccatttagaatagtcagtgtgtgatgaaagtagtactgtcatcactttgttgttgtttttgcagttgtataattttatttgatgaccagtggttagttcttatccacatggagtgtctgtagattttgaaagtggtaacaggtacataagtaaccaaagtatagagcttgttttagtgaatttttatcttcattacattttctggacaaccacgcagggatacactgtgtgagacattccttattcctttggcccagacagctttgttgagcctgcta

SEQ ID NO: 175084 - DNA, 383 bp, Homo sapiens
gtgcttggatcacagaaatgtgccactttctgagaatgccctagtagatgtacacagcaggggcctcactggccatttttctgccatgtcatctcttggcccttttttatggagctctacaaatcactgcagcgtggaactggttcttgcccatcccgaggtttggatgttcagtttctcctgaagtctacagtatttgttttcaattgtatcccccttttttgcttaaactagacagaattggtgtttttgggcaaacactatttaaaccttttaaaaagggtctgggggtctgggtactgtggctcatgcctataattttggcattttgggaggctgaggtgggcagatctcttgaggccaggagtttgagaccagcctgg

SEQ ID NO: 175085 - DNA, 1204 bp, Homo sapiens
ggccgcgcaaccagcgcgggagggaacacagccccctacttacctaccccagaaaggatacctggaacatacagtcggtgggcccgggttctccctagtatttccttataaaaacattttattcggaggcggagagtgagggacgttttgaggaaccacacaaagtagttgcgagttctaccccagaacaatggtttctggagctccctcaaacaatgcctgcattaccatttccaccaacacagataaatcagacgaatgtcaccattaacaatatcttcctctcgacgacagtaaactgtctcaattgctaaaagatctacttccatcgctgagtctggcgtggagatttctccctgtcctgggaatgatgttaaatgcaaccaaaagagctcattaaatgtcctcaaaatgtaaaaggaagtgtaaaagacacactaagatcattttaaccggattttataagcacaagtgaaacctaaaagttatgtgtacaccctatcctgattaaagaaaaactaagtagcaaatccaagcagagggacattaaaatgcagccttcttcttactaggggtgctaagtggtgacctcataaatcattagctaggttcccaacgcctatcagaacctgctacactccatattaaattaaatgtttcgagactattgggtaatacattatttgagttctaatttagttatcaataaatgcagtttaaaatgatttctaaataagcatggcattagcacatttactatttacaatgcaaaccaggctattgataatttgaaaatactttctggaattaaacttaaaccagtacctctgcttcaattctatatatttatggtttcctcacaaccctcctgaaatggaattagagcgagccaataattttattaaagctgtaaaggcttctgttaaagctgcttttctttggagaggaaatgtatctggatgtgatttttactaaaatgctatttcaaattactgcatcaaatattgcagcagtatgtccgttgacagtttaatgattactacattagattgtaaggaaaatggtcagatgaacttacctccttgcttggtgaatttaaaacattatttaagttccgtaggaaaatagaaaatttattacatctctcatttggcccagttagtcactgaaatttgttggttatgtttagcagcccttgcatgga

SEQ ID NO: 175086 - DNA, 621 bp, Homo sapiens
aaatgtcaacaggggccatcgaaattattgaaatgaaaggggtgttaggcaggggctgttgtagacttgcaggaggctggccttgcccaaggaggggcagcactcattggagtccggggaaagctgggctcagtattgccccatcttctgttttctctagaaaaatcaaatatctggttttctagtgaaatctctacctgttgaagtcacatttttggaaatactgtgtgggctagaacaaaacacatctgggagctagtcatcttgattctagggcttctctttcttttttcacctcaccatatttctctatattcatttgccagcatttctttgtctccagggtcacttcttttccttcctgtctcacatgtccagttgttttctctctaccttttatctgcataaaaacattcaggatgtcccccttcctaagcacatagctaatgactcctccttctgtgctactccccgtgtcccgtcttttcttcgttctttcatactgagtttataaacagtgaaggggtctacgttcattgctcttacttcttcactccttttaacacctacagtcgtttgtcttcacgacttctctgaagctgtctcattccctggacccta

SEQ ID NO: 175087 - DNA, 194 bp, Homo sapiens
agaatctccctgtgtttttatttcctgtactgggtgattgattacagaagagcaaattagctcctactgcttttaagatgcattttctttcttaaagagaagatgatgtgagcattacttctccctgtccactgtgtgccttggctttgggcctgtagtcactgcagctttggtagggccttcctggaagggag

SEQ ID NO: 175088 - DNA, 285 bp, Homo sapiens
gaaagaacttttgcctatccaaagactcaggaaaaataaaaaagaaagccagccctcataatgagataccacttcacagttacatctgttggaaaaaaaaaaaaaggataacaacaaatgttggcaaggatgtgaggcaactggaagccttctgcattgctggtgggaagatggagctgcgcggctgctgtgggaagactcctctaaacgctacacctggagtcaccacggggtccagcaattctactcctgattatagaccccaaagaattgaaaactggtgtt

SEQ ID NO: 175089 - DNA, 221 bp, Homo sapiens
agcagctccatgaaaacaggactcactccaatacagttggtaaaatacttccatttctggatatgagctttcctgttcaggaggatgaggccaatgattaatcagtttaccatatgtcaagcaattgaagctggtgaactgtaagatcagccaaatctttggagaatattagtccctgggttttctctattaaaatatttctagccaggagcggtggctca

SEQ ID NO: 175090 - DNA, 278 bp, Homo sapiens
gtgtacacacggtatactaccttctgtgtaaatgggggtagggaaacaaggttataggttcatacttgctcatatatacattatgaaactttgcaaggctacacaggaaaccaacaacagtggttacatggggcagtggaggtggaaggggcacactagaaactgggcagatggaggaagcctgagaaggagatgttctctctccccccctttctttttatctaacacacacttttgaaaacattgtatgattcacctggtcttatatgaacaaaaaa

SEQ ID NO: 175091 - DNA, 269 bp, Homo sapiens
tggtcggcgtgacttggtcagggcgatagtgaatccacagcgctgtcctgtacgtaagccggtgctgttactttctaaagctaatgagaaacacggcagcagcttcaaagctgatacgcagggtacgcgattcccagctgctccgaagtgctgaccgctctacaacacggggagcagcccggggcgcagccgcaaagggagtgtggatgatctttctagagcagcagtttgactcaacagtaagtattttaagcatgaaacatgattgt

SEQ ID NO: 175092 - DNA, 558 bp, Homo sapiens
caaagtaaccataggatgaatatggggacccatgtgaggagaacctgggttaaacttccattgaccacctaacctcaacaagtccctactctgaatggcgggccaaaatgacactttgagtgtcctggaattagtgtcagttcagacttaagagttcagtaatctgtgagaagtctaattatttcctcttctccagtgcacacttaccctgataagccataggtccctttgggaaacctgagaaaaaaattaacggtataaattcttagcagcgcaatggggtccttcctcaaaaggatccagcctcccctcagtcagggggttctgagtctgtaaaatgactcaaatctgggaactgattgagggaccatgactctttctttggtaattaaagtaaagcttccattcacttgacctagaactcttctgcttatagagatcaagtcagaattcagtagactgcccaacgagttctcttctagggacaccatgaccacctacccaattaggacccccaagtcaggctgttcagattgttgctttgactccgctgtcccc

SEQ ID NO: 175093 - DNA, 384 bp, Homo sapiens
attgctggtgaagagataaaagtggatgcattacagtaaaaacagaataattaaacacttggcctcacatttgtattgaaggatgaaaaaaaatgccaacagtctgtcagactctccaagaatgccagaagagtcctccatttcctccctctgtaagaattgtgataaattctattgtgaacacttagttaattaattgtggggcaacaaagtcaatgatatagaactgtggggaaaaccaaattccattaatttggctttgggctacagaaatggcctagaaaatgttgagatcgaaaggagtgggtaactgatcaagtttagcatattctatatgagggagagttgaaagctattaattggtgttcgtttctgtttagtgca

SEQ ID NO: 175094 - DNA, 384 bp, Homo sapiens
ctcttcctctacacatggaaaacatgtacatttgagggtatcaccttttctttgcactgcaacttttcacttgccagttctccacttgttcttgctggttgtgagtcactggtgaattttagaactagaaccatattatatcaatctttatagttccgcagcctggtaccaggtgtgggcatcaaaaaatggttcccaatccaagcttgctgaaagtgatattcaacagatgacaaaagaaaggagccagaatgctggtctgctaatccacattgctttccactattgctttgctgaaactctcccaatgtcatgagaaatataacaatgataataataatactagcagtaaatagagaagacaagtcagttaaaattgagctg

SEQ ID NO: 175095 - DNA, 813 bp, Homo sapiens
cgccccccccccccccgccactcccgccccgccccccccgccgccactacgctaggtcagccggggttgaaaacattaaaaatactgtacagtattactagtaagagaaactctgtagccacaagggaacatcactcccaccctactgatgagaaaaagcctgaagtacaaatctttttttcttaagcatgtcagagaacagaggtcacaaggcaaccaggcgaactgaacttcaaagggtgataaacccctctaaggaaagacaaaaactgagaatgggaggaagaggcagatgccataaaagagggtaagaagaagtgacatattacaaaatacttaaagtcccacggtaggctagtattgaatgtagaatctctggaagccccagatagtcactctctaactcttctccacagacctcagtgtgtgctcacaagaaagattaggggtgaagctggagagtaaagagagcccctgctaatggtacagggaacaaaaccccactcacttcctggaagtttatctcatagaagaaaacctgtcaggcgctgggaaaggggcaggaaaccctttcactccctctaagaaaagggtatatgcaaaaggcatgtaatgctgggaggggcagaactccactcccctgccccacacactcctccaccctcaccagcccagtgtcaggcaaaagtccactattctagagaaggggaagaagcaaaatatctaccactgggcagcgggggtgggtggcaggaaagtctaaggggcccagagtccttaagtgacataaagcagatatctaccacgggggca

SEQ ID NO: 175096 - DNA, 1024 bp, Homo sapiens
gtcagagcctgagtgaaatgggggcatccacaaccagcaagcagcctggcaggaggggccagagcccgagacaggtggcctggtgtagggcatcacagcctgagcagctggacagggcactgtacagagtggtggcctggcacaagcagggacagggcatccatgagttgtagggaaggcagcaatgatgggagatgggttacacacagggggactgatcaaatgagtcaacatagtaagaataacgggagccaggtttcactgttagaggagggggttgaaaacattaaaaatactgtacagtattactagtaagagaaactctgtagccacaagggaacatcactcccaccctactgatgagaaaaagcctgaagtacaaatctttttttcttaagcatgtcagagaacagaggtcacaaggcaaccaggcgaactgaacttcaaagggtgataaacccctctaaggaaagacaaaaactgagaatgggaggaagaggcagatgccataaaagagggtaagaagaagtgacatattacaaaatacttaaagtcccacggtaggctagtattgaatgtagaatctctggaagccccagatagtcactctctaactcttctccacagacctcagtgtgtgctcacaagaaagattaggggtgaagctggagagtaaagagagcccctgctaatggtacagggaacaaaaccccactcacttcctggaagtttatctcatagaagaaaacctgtcaggcgctgggaaaggggcaggaaaccctttcactccctctaagaaaagggtatatgcaaaaggcatgtaatgctgggaggggcagaactccactcccctgccccacacactcctccaccctcaccagcccagtgtcaggcaaaagtccactattctagagaaggggaagaagcaaaatatctaccactgggcagcgggggtgggtggcaggaaagtctaaggggcccagagtccttaagtgacataaagcagatatctaccacgggggca

SEQ ID NO: 175097 - DNA, 491 bp, Homo sapiens
cgttgaataaaagaatataccagaaaaataggttgtttttctcacttctctgagagtatttctgatttcccaggccaaaactaacctattgtggattgggacaggactaaggaggatggtgagcacatagaggggtatgtgtgggtcaggaactgtgcagtgactgagtagtggaggccatggctggccctgtgctccaagaggaagggaaagggatctggcagggctggccaggttggaggtagagagagaatttatgagcagaaggactgtgtgctcaaggaggcatgctgctgttcaaggaaatggtttaaatggggctgccacgtggttatgtgtctgtcacgagaggcttgttaagcagttagcacttgagtcatttttctacacttccattcagccaggcagacagctgtggttatgagtgggaacaattttggccattatgtggtgtggcttggttgaaaatgcttatggcaagctgcctaagg

SEQ ID NO: 175098 - DNA, 335 bp, Homo sapiens
tagaaggtcaagtccaaatatccagacgtatatgaaaagatgaaaagctgctcaaatttgctactagtcaaggagatgaaagcaatgagagggattgatgttttgattagcctggattggaactttgataactctgatactttgataactcttattgttatcaaaaagctatgggatttgccttaggtgttaccaaagacaggatgaaggacatttgataatgtttgaaaacagtaataggaaaaaaaaaatgaagctgtttcctaattgtatctactaaattcacccatttctctcttcctctctctctcactctctctgttccatctcactcc

SEQ ID NO: 175099 - DNA, 516 bp, Homo sapiens
cgagacgtttggagctggtcactcctctcccgctcacaccccctctgggcctcggtcccctcaatcataaaaacaattgaacgggaacgtcctttatacctttaactagaaaagcttgactcttcttatctagtagtgttaaagttggcggtttctagctggaaactatggcttaggtttttcagttctgctctggaaagcgtagccctgggaaggtgtggactgtgttatacccaagagtacataggatgaaaaaagccacgacagagggaagaacacaaaatcagctctgtgtccaagtagcaaagcagtcctgcttcattagtcaattaaaattctttggtcttaagagatgtaacttgggctgggtgctgtggcccctgcctgtaatttcagcgctttgggaggccaggcgggaggatggtccgaggccaggaaggagttcaagaccagcctgggcaacatagtgggtccctgtctttacaaaaataaaaaaattgcctggtgtggtggtgt

SEQ ID NO: 175100 - DNA, 570 bp, Homo sapiens
ggatcacacataatttgcaagattatctcaacagctaaattgccataattagaagaccacatattatttttataattagaatatttacaaaatcataataaatgctacatggaaaaactatagggaaaaataagtccatatatatgtatatataattcatatatctcagaaagtgcaacaagtgctatttgttcttgaaaaaaggttataaattgaaaatgaagactatggaaaataaggacaatgacaggactgattatgtgtagttgttctagtaatgaaaagcaatactactcaagctaggcgagagagaagaggaagtggtgcaatcgtgcatcttaatacggagcaagagcccaaagtggagcacataatatcacagcctttgaaatagattcatcatacactacgtttagagtttccaaaagcacacaattttcaggaagaactaagttaaataatgcttcaaatcaccatatatccacttttaacataaaattcaattctataaccaattcagtagaaagctaaagaacgtagtgccaatattcttaagtcaataattcttac

SEQ ID NO: 175101 - DNA, 174 bp, Homo sapiens
aggcaggctcacggtgtcgtcagaattcagaacgatggtcgtggggctgggggtgctgggaggggctgggcatggttggctttgtgatctggggtctggtgtgttccatctctgaatctctctcgagctgcactctttcttaatacattttcataagtttaaccaaaaataaaa

SEQ ID NO: 175102 - DNA, 184 bp, Homo sapiens
gtttcctgagttgggaagggactggaaaggggattaaagagaagaaaaaatgaaagggtaggcatgatagcaggtagagatcagacttcatctgtgtaactccagagaccagaatcaggtctgaaaaacacagttgtagacaggttaacttctattcaatttaataactactcctggagctgct

SEQ ID NO: 175103 - DNA, 514 bp, Homo sapiens
taaaacacagcctatatcaatgagggcctgggagaaaactggggtgggggaggactgtgcctctcttgaccttcatttacaaaaaataagttggctcctagacccgtgttggagccacactgcccgggacagccctgaagcagccacgtccccacctttcaggagtcggccaagagcacggtggctgcagaaggccctggctgatggagataacatttgacaaacagggtgagcgccttccccctccgcccctcttttagaaacccggcgttctttatggctttgctcaggtagatcattcattgccataaattttcttatctccagtgcttttccaattatggataacaacagaaaagcagtcattggtttctaaaaggtcatcaagatataaagcccgtttgggaagggaatgacttacgcagtgggcttgtataaatctggagaagttttatgcacaagtcggacaagaaatgtaagtgagattcataaaatatataacgattcatggtgt

SEQ ID NO: 175104 - DNA, 250 bp, Homo sapiens
aatatcagtgagatgagtgcttggttccacaagatcatgaactggaaggacttctcatttgggtattaaagtgctggcatgcttactttttgaaagtctcatttattgatgctttgaaagctcaaatacagcatgcaaatatgaatttcttttaatgatttcattttgtgagattattttattaggataaaactgactcattcaaaataattggagaaaagatgaatcatagtcattatatagtatgaaa

SEQ ID NO: 175105 - DNA, 141 bp, Homo sapiens
taatgcaaagttatttgcctaggcccatatttatacgatgagaaatccatgttttgagacaataaagtggtccatatatttttgtgttatctagataagccattttgaaaacatacagctttgaaatctgtcttgaatcca

SEQ ID NO: 175106 - DNA, 665 bp, Homo sapiens
  misc_feature (529)..(529): n is a, c, g, or t
  misc_feature (553)..(553): n is a, c, g, or t
taattgatatttatagactactgcaacaaacaacagcagaatacacattcttttcaagaatcatagaaaaatgaccaagatagaccataccctaggctataaaaccaacctcaacaaatttaaatgaataaaatacaaagtatgttccacaaggaaatcaaacaaaaaatcaataacagaaagaccacagaaaagtctccaaaggaattaaaaaataaaaacaaaagctttctggaaaagcaaaaactatttggaaattaataacccacagttaaatgacctataggtcaaagaagaaatctcaaaggtcattttaaaaataaatacacctggccgggcatgatggctcagccatttttgtatttttagtagagatggggtttcaccacgttggccaggatggtcttgatctcctgaccttgtgatccacccaccttggcctcccaaagtgctgggattacaggcgtgagccaccgcgcccggccatttttttcaataaatatattggaaacttctttggagatttgcnacaatttgaaacaacagacatagnctagaaatatcggtaagattaagaaaaagttaagcatgtcatgaatgcgtaaaatataagtaggtactaagtctgttcatcatttactagcataaatatcacaaatctattc

SEQ ID NO: 175107 - DNA, 413 bp, Homo sapiens
gattaggggagagaatgctgtatgtgaagtttccctatttggggtgaggcctgaagcccctaagagaggaggagatttgaaaaccacagacagagcccagtcctttcatgttatagcaggggaaatagaaacacataaattttgttcagctgcctatagctttctcctcctgtggttctgctcagtttccagaaagcctgggtaacgtctgaatcctcctggaatctctcttcttccttctggtacggtgtgggccatttcaaagctcaggcaggtggcctttcctagagggagcagagacagcgcagctactggatgagctcctaggcacctttcagtgtgggagcctcaagaagtgaaagaaaaaaagcaaatctaaaggggagcaaaatagcatctcaggattaggcaag

SEQ ID NO: 175108 - DNA, 366 bp, Homo sapiens
aatagttgtatcaatgacttgaatgagatcgatgtggatatatttttcaaatttataccttttgcaaaatttttaaagggtgggtaatatgttggtgacagattttaaaaaacaaaaagatcttcagatgtggaatcttctgttggatcttataacaaaaagaagacattaggctgggtgcagtggctcacgcctgtaatcccagcacttttaggaggcagaggcaggcatatcgcttgagcccaggagttgaagaccagcctggacaacatggtgaaaccccatctcaacaaaaaacacaaaaattagccaagtgtagtggcatatgcctgtagtccaagctacttgagaggctgaagtccaagg

SEQ ID NO: 175109 - DNA, 284 bp, Homo sapiens
agtagagatggggtttcaccatagccaggatggtctcgatcttctgacctcgtgatccacccacctcggcctcccaaagtgctgggattaccggcgttagccaccatgcccggcgaaagattttgtattttatttcaagaggagaaggaagctattgaagtgttgtaggcagggaaatgacatccaaagtaatgacaacagtcatagtttaaatatgctgctatcacgttttcagtaaatatgattggttttttgtcttaactgggtttctgctgcatcatttc

SEQ ID NO: 175110 - DNA, 484 bp, Homo sapiens
tgtattttgcagttgttggatgaaatgttctgtatatatttgttaaggtccatttgttcctaggtatagtttaaatccattgtttatttgttgacttgctgtcttgatgacctgtctagtgctgtcagtggagtattgaagtccctgactattattgtgttgctgtttatctcatttattaggtctattagtaattgttttataaatttggtagctccagtgttaggtgcatatatgtttaagattgtgatattttctagttgaacaaggccttttaccattacgtaatatccttctgtctcttttaactgttgttattttaaagtttgttttttctgatataagagtagttacccctattcactttaggagtccatttgcatgaaatgtcttttaccacccctttactttaactttatgtgagtccttatgtgttaggtgagtctcctaaaggcagcagataggtagtttgtgagtttttttc

SEQ ID NO: 175111 - DNA, 235 bp, Homo sapiens
gagcaggtaatcagaatgagtcagggtggagtaggtaatcaaaaaagattgctttacgaggaagttaagtttaaaagtagaaggcaaagaattgaacataatgacatattaattctttgaaaagaaatttagaattcatatctaacaacccctcctcttgtatttccttacagctttcttttcaaactttttaaacatagcttagttattttgcttgattttctaaaagaagaag

SEQ ID NO: 175112 - DNA, 558 bp, Homo sapiens
aatggctttatcggaaggtatgggactggaggttattgtgtgaggggaaaaaaccctcacccacatgtggtgagcaaacaacccaagattctaagaccagttatcaaaatccccaacattactacagagcaagagactccaaacactattttaagacctaattctgaaatattctgcaggtagggagtaaccataaaactacagaatcactagagaggatggatgggagtgaacattaaaaatttaaaatgaaactcattcaaaatgagcctacaaactaaatttcccaaaacataaaaaagtagttctaaaagagacaaatatccaaatcaacagtcatgatataataccataaaatgtaaagaacatctcaagaactaagaatgtctaagatgaaaaagaaaagatgaagttatgaaagttttcaaatatttagaggattatggcagaagaggattaaacttaagaacccaaaccagctcttaagttcaattctctcaaatcaattttgagagatgtttcttatcagaaaagtaagttttaggtttgtcagatgat

SEQ ID NO: 175113 - DNA, 289 bp, Homo sapiens
gttaactgagtattccttggagtttgcagggttctgaaagaacctaataaacacacagcttggtgaaatgtgagttatgtttctaaacttatgacctctaaagttatttgttgtttgtatgtaagaataagtggtggaaagataagcccccgaaaattctcgattagtaatttatgttaattgtattttttcagtatattattatagaaagacaggaaaggtaaaaggcaccaaatatgactttggctgataatatttctgttttttactctgaattcaaggtaaatta

SEQ ID NO: 175114 - DNA, 320 bp, Homo sapiens
tgattgtctgggaaactcgacaactaagcttgttaccttatgtgcaggtctgaactggtaaattccgaatttgaccttcatgctcctatcccagagaaaaagtatgtgggcttgagatagcaaatttttgcaattcccagaaacatttcttatgcctcgcgtctcttggctgtgtcctggaaggctgagattttgccaaattaactgaggagttaataggtataaatgactgccgaactctttgttgcatcctttataccgtaataataatgggtgtaaccaaggcttggtttataatggtttgtaaccaaagcttgtca

SEQ ID NO: 175115 - DNA, 607 bp, Homo sapiens
taccatgctcgtcccccaacactctgacccaggaatgaattcttagttggaagacctggatctatcatttggctaacggtctagtcttagacaaattactggccatttaggtgtttctttagtgttaaaatgggacctaattaatttagctttagagaatagaatgaaatcatgcatggatgcacttctgtaaaacacagtgtcttcgactgggctgccacaacaaaatacagttgacccttgaacaacacgggtttgacctgtgtaggtccacttatccacggattttctcccacccctgacacagcaaggccaacccttttcccactgttggagataaggatgaaaatctttatgatgatatacttccacttaatgaatagatatattttttcttcttgatgattttgttaatattctccagcttactttattgtaagaatacagtataaatgatacatatacaaaatatgtgttaactgatggtttatgttatcagtgagacttctggtcaacagtaggcaatattggtagttaaatttggggggacgtgaaaagttatacacagattttttactgtgttttgggtgttggctcccctaactct

SEQ ID NO: 175116 - DNA, 525 bp, Homo sapiens
ttatgttttgagtgattcgctaaacagcaatagtcaacaaaatacaaattaacatgtgtaatgatgagcttatttaatcacatctgaaaaaatgcgtttgcacttccaggtaattttcttgccattaaatctgtcttaaatacttatcagaatgctttgagtttctttgtatttgcactctcttttagatatgcatatacgcatgatatatatgtgcttacagaagtagaaaaaggatttctggattgacagcattaaaggtgattattctctgtgacacagagaattgtatattaaaagtatgattctacattatcctttaaaaaaacagttaaatgttttataggctatccatacagtttgagtcaatatattttgaggtcaatttgctatttaagattttaatatgaaactgtaaaaacactagaactatgtctactatctccagaattagagttttatcaataatatccctaaggccaaatactttgactgttctattccaaaagcagatgcattcaagca

SEQ ID NO: 175117 - DNA, 411 bp, Homo sapiens
ccagtttgcccatccttgtgttgataaacattacccatgaagtgtaatgcttcagtgactatctacccagaatgggattgtgggtttataggatacatacttcttcacccttattttttactagatattgccaaattgctttccaaattgtgctgtttcatatatccacaacggcatgagttctgtttgttccacatccataccaagacttgatcttgttaaattaatttttctagtgtgtaaatgagtgcaaaatcctgttactttagtctttactagattactagtgaggttaaatgtatatgtgtatgtatatatatgcacatatgtgtatattattaggtatttgtgtttcccattcaatagcttttttgtatcaattgtcctttttaaaaattgggttatcttttt

SEQ ID NO: 175118 - DNA, 435 bp, Homo sapiens
ccagtttgcccatccttgtgttgataaacattacccatgaagtgtgttcgaattgtctgtgatacaaataatgcttcagtgactatctacccagaatgggattgtgggtttataggatacatacttcttcacccttattttttactagatattgccaaattgctttccaaattgtgctgtttcatatatccacaacggcatgagttctgtttgttccacatccataccaagacttgatcttgttaaattaatttttctagtgtgtaaatgagtgcaaaatcctgttactttagtctttactagattactagtgaggttaaatgtatatgtgtatgtatatatatgcacatatgtgtatattattaggtatttgtgtttcccattcaatagcttttttgtatcaattgtcctttttaaaaattgggttatcttttt

SEQ ID NO: 175119 - DNA, 461 bp, Homo sapiens
gaaaaacggaaagaaaactatttcaaataccttgaaatgtgtgcttcaagctgactttcagaataggtgcacatttatatagctatgtaaaaaagaaggggaaaaacacagaaattccaaaatattttcaaactggcttagacatcttgacactttactgttttcctctgccaggagagtaaatgagtggtttgccctctggggaaaaatccatttaaaagcgaaactattttaaatgcatacctttttacaagaaagaaaagaatagttcttagtagtgggggagtgggtaggatatatgtatatggaagggcacagtgaaatgtattagtatagggtcttgtttacttgtaagtattttcttcctttttgtcattcctcacacatttacatggttagcactggtgatacaaagaagaaagaaatattcctagccttcacgtgttttagtctaaagggag

SEQ ID NO: 175120 - DNA, 457 bp, Homo sapiens
tagttatttgcatgaggaacaaaaaataacccttttaaattgttattcttataagatatatatttagtgagatggaagcagcttagtgtagtagaagtagattggctcttgaaaaaacaagctgtatgttcttggtcagtctgttaactcaactgcttcagtttcctctggtctaaagtctttccccacctcatgatggtcatgaagctcaaattagattattatatataaaataattttcatatatactgtgctttcaaattttaatataaattatcaagtaaatgtaggtgagtgagttgaggaagcactgtaggattggtaccttcatgaacattagcttcagaatagttgccctctgagggtaataagggcttatctaaaacttgtctttacttcagaaacctatccatcctccactcccctcactcgctgccaagcaaggaataattctaaa

SEQ ID NO: 175121 - DNA, 387 bp, Homo sapiens
taatatggagataaagtcaatcacagtatccacctcacagaattgtgaagattaaaggaggtgatggatgtatagtgtttaacacagtgtcagcagatgagaggtgctgtgatagctctagttcttattattatagatttctgttatgatgaagacaatagatacggtatgaaataagagagtaatttttttcctgtttatttgaaatgcttcttttaaatcacatacatgtatctttgtgctccttagatctttatttctttatgagttgcatactattattgaaaagcaagaaaattatgtaaaaatactgtatgactttatgtcctatttcaaagcagatgtatattcaagttattaaattttaaaatttttaacattttactt

SEQ ID NO: 175122 - DNA, 445 bp, Homo sapiens
ttttagaaacagcttgccagttactacagaaacacacacacagagagagagagagatttccctatcacaaccacagcactctgctgagcagcagcagaggttccaggagccgtgcctacagcacttacaaagccgtggagctgcaaactgctctctcgtagacatccacacagccaagactcttcttttatggtctgtaatcatggagtatattttctctacctggttcaaagcttccatgagagaacggctcctgggatcttgagatctggggtgacagatacagctgacctggaccgtgtttctcacttctgtcatcagagtagcatattcttgggtactttttagtttgacttttgtaagccaagaaagcttctcacttctccaagctcacatttcactccttcaggaaaaacaaactcatttaaattcctcatcttccaga

SEQ ID NO: 175123 - DNA, 170 bp, Homo sapiens
gtagaagaatgtctggggaaaaccagtaaatatagaaagatagtaccaaaaaataactcctgtgagggaagcttttaaaaaaatgagtgaggttgtttagtctgcagaaaagatgtcttcacagtgacttaatgactatctttgagtaaacaccagagtaacgctctttt

SEQ ID NO: 175124 - DNA, 341 bp, Homo sapiens
gtgtgctggtacaaaattaatatacttgaagacaaaagctttctcatgtaaacacctaagaatgaaaaaatcccactgataagagtaattaaaaactctactgtgtgggatttttttgttttttgagacagagtttcactcttgttgcccaggctggagtgcaatggcacgatctcagctcaccacaacctctgcctcccaggttcaagcgattctcctgcctcagccttccaagtagctgggactacaggcatgtgccaccacgcccagctagagatttcttttttttttttttttcctttttagacaaataaatagagaaagcaatcttgctcttgaat

SEQ ID NO: 175125 - DNA, 572 bp, Homo sapiens
gtaaagggaggaggtgcgacttgaacccaggtaacctatctcctgagaccacacttttagacatcacattatgctgtccaagttaagattggttaactttataagctgttagttatccttaaatagatggggtataaacaacagcagtcatattaacaatgtgtagtttatttgtttacccttagaataatgttgcaaataaaatagttacagattctgttatttgctatgtgctttaacaaatcagtataaaaaacaaaggctatgacctaacaaagtttcttttctaaagaattcagacataaaagcatataaggtactgtactgatatataaaatttgtcaatctgtgcatgtgtgtgcatataaaataaatttaccatgcaggtagccatcttatgttttaatatacccttacctaattatagtagtgaacttgatgaaacttggaaatgctatttattatgattttaatacctaccttgactatcctggctgactctttaaaataatttttaaaagcacacttttagaacttgctaggcaaatgattctaaggttctgtttgttatc

SEQ ID NO: 175126 - DNA, 412 bp, Homo sapiens
atgttatttcttaaatgcatttgattggcttggaagaattttgcattagtgaactcttgtctagaaaatgcaaatgccttgttgtggcgcttgagaaaagattattttcaaagagtttttcctgtgatcccaggcaaaatgacaaagagattcccttccttcacaatacaaatccttccttctccattaaggttggaagtaaagctttatgtcagtttccaattaagacgtacatatattattttaaggaaaactgaagaaatgaaaaagtgttttagtttgtcctgaagaaacagaattctgttttcaaatgatgggaaaagagaccggtttccaatctattcactgtcaaggctgcagtgagccgagatgagatcgtgccactgcacctcagcctgggcaacagagtgag

SEQ ID NO: 175127 - DNA, 657 bp, Homo sapiens
tactttttcaccttgcagtctcaacaatccttcctgattcttagaaaaagcacaaatctccagcagccaaagtaagtgctatttggagagggggctttcctctgagcccacatgcagccagcttctccaggtcatccttattgctgcagttctcttacattaacaccatgttgggcatggcaaaaaatgaagattgtagcacatcaacctttctgcttgagaaaaaaaatgcataaatgcatacgttttgcatttcataatcggtaaaagcctcctcctgtataatctactgataataacagtttatttgtccttaacccacgaaaaccaattacagccactgctggaggtaagcatgggcaaatcaaggagaaagcagctccaggagcaccaacttgaaaaaaagatcatctagccagtttcatctgtgaagaattctgtccacgttgcccctccccctctttcagattccaagacaaagggcgtttttaaatatggtaaactcagaaaattcctagaaagcatgtgttgagttgacacatattcagctgatgccatcattttcagggtcagaggaaatctggccaagagacatttaatgttcctcgataaggtagcatttgacaagactcctctgagaacttatttttttaaagc

SEQ ID NO: 175128 - DNA, 650 bp, Homo sapiens
aaaggaaaagaggtaccaaaaaaacacttggtcttaaggagcttacgcagagttgtggtaaaccaggatgcagcatctatattttgtcagttaaaattctccagcagaacagaaaatgaagaattgatagagttttgcttaaagtgtttattattttctactactggacagaagtacgatgtaaatatgaaaaaagacctgaaagaaatgaaactgaatcagtaagcccaatactcagtgccaggacagccgggggaaaggcagccaggataaaataccttaaagtcaggaactgggtgcgcaccaaggcaagacagaacttccatgataccatataaacacaacctatattcaattaacattcattagaaatatttcaactgtctacttttaaatatatttgtattaccttaaaatatcattttccttttatttgttgacaatggaaaaaacacctcttaatatagtttggtcatcgagttcagcttcacaccacagaatgctaccatcgagattatagtcaatatatttggcatcacagaaactaaatatatcaagttgtatattatactagctctaaattccaattatttcttgttatatattaacactgtcatatcacacagccaccggagaaaggtaaacataag

SEQ ID NO: 175129 - DNA, 516 bp, Homo sapiens
gaataaagaagaggttctctctttccatccttaggaaaaggtgggctgttttggcttcctaccatggaggaggaccttgaaggagaaaactggcagaccttctccattccctggtgcttcagcagggcagctgaggatgaaggagaacatatttgccatgctctgagttcctctaacagaataccacctcatctggggctgaaaactcaaatgcctacaggatgccaggcaagtaaactaaaaaggagtactgagcagcaagaagggaccatggcaattgtggaaagtttgagcatgcaagtctaactaaaggcatttaaacacacgtttttaagaacactggggaggctgaatgaaacacatccaagggccaccactttgcaactcctgaaccaagcaaaaccaactggtgtcctgttgtatgcgtgtgttgtagagctttaaagctataatcccttgaattatttgatatttctttataacttttaacatgccattttgttgccagcctctctt

SEQ ID NO: 175130 - DNA, 960 bp, Homo sapiens
gcaacccgttggagtccctttccacactgtggaaggtttgttcttttgctctttgcaataactcttgctgctgctcactgtttgggtccacattgcttttatgagctgtaacactcgccgcgaaggtctacagcttcagtcctgaagccggcgagaccaccaacccaccaggaggaacaaacaacttcagacgcgctgccttaagagctgtaacactcaccgcgaaggtctgcagcttcactcctgaagccagcgagaccacgaacccatcaggaggaacgaacaactccagacgcgccgccttaagagctgcaacactcaccgcgaaggtccgtagcttcactcctgagccagcgagaccacgaacccaccaaaaggaagaaactccggacacatcctaacatcagaaggaacaaactccggacacgccacctttaagaactgtaacactcaccgcgaaggtccacggcttcattctttaagtcagtgagactgagaacccgccaattccggacacacagctacagccaagcctctttgcttctctgggccagcctctctggagctgaatcgtggctggctggatttgaggagcctgcatgggcgcactctctctttctgaatcccagctagggctctcctggctgtaattactaagactcagctgctgggaatttccacgcctcctacctctctacagggcagtccctccatattaggaaacccactggcacgctccgccgttatcttcgcaagacttccgttgttgcctcaagttgcagattgccttttaacagagaagaaagtgacaggaatgtgctgggcactgatgacacagtaatgaccaaaggtcttcagtgtttttggggcatctccctaccttggatcacccctgaaaggcaacaaccaacaagcagacaaagctctgcccagtaacattgagatcccagaaaccagagc

SEQ ID NO: 175131 - DNA, 314 bp, Homo sapiens
agcctctctaagtgctgggattacaggtctgtgagccactgcacctggccgaatatcatcactagatactcttagaggagatggctagtgcaaaggccctaagatgggagcaagcttgaagtgttttcttaataagagcaaggaggccagtgtggatagagtagagtgagcaaaggggcaagagatcagggatgagagtagagagtactggggaccaggttatgtggagttttataagccattgtaaggaatttggcttttcactaagtgaaatgagggggagccattggagaattgtgaacaaacagtgaaat

SEQ ID NO: 175132 - DNA, 464 bp, Homo sapiens
ccagtaggttcccatccttctagagttgaatcaatgaattgttctcatagaaaaccaggtggtcaggaaaggaaacaccatcatcctgcatcaggcttcttggggctgtcagatagaaactccctgttcaaactgatttaagccaaagggaaaaggttaagccacataactgagaagtccaagagctgtgtgatccaggggctcaaagagtgtcacttagactttgctttgtttccatctttacacctgcagggctggctcatttggaagctgcagtgatgttcagcagctccaggctaatgccctcctgagttcaagtccaaccaagagaatttctcttcctctaacagtatgactgaaagtcctgggcctggtagacatcagtctaaattgggtcctgtggccatccctgcatcaaccccagtggtctggaaacggatggtctaaaataacagggcttacag

SEQ ID NO: 175133 - DNA, 389 bp, Homo sapiens
agttgctagtgtccttcagaccttcctcttttgtagaaagtttcattctttgtgtgtctcagactgagatggaggaggggtgactctgttttctaagggatctagagagaaagggcagatgtagtcttgagcagtgggcttctcagctgtgctgcttcttccacggagaccatctggatctactcggttgatggagcagctcctctcattctgagtgggtttagcatttgagaaatagaggggcaccttggctgactggactaaaccttctttggcaatttataataaatgctctctgatttattgtttattctttcacattgaggttgaacctgatttgcctttgaaagttaagagcaggactaggactagaactagaaatgcctgat

SEQ ID NO: 175134 - DNA, 144 bp, Homo sapiens
tgttacctcattttcactgtcctggaggtgtgaaaagaaagcaacatactttacttttcatttaaagggccacatgtcttaaagatttacatcttgccaatctcttgttctgaaattcaaaagctcatcggccaagcacagtgg

SEQ ID NO: 175135 - DNA, 410 bp, Homo sapiens
aactctgataaagtcttagctcctagcaacctctaattattgtcctctgtcttcctttaaacccagaggacttcttaaaatgagaagtcacatctgttacctaaattgccaatggtgtatttcatctgtgctttaaatgcaacacatctacaatcaacattattgctgtctttcctttcccgcccccctccaaacaacactttcttctcctcactttttgtgtttgtgatgccactgtcctcaggcaaccatatatgaaacctcaggcacctttgatttcccccttttcccacagtccccagaacaatcacttggatattatttctgtgccctcctccaccaaacctttcatctatccctttctgttcattttcactgcctcttaaccctctacaaatcctttcccagaa

SEQ ID NO: 175136 - DNA, 276 bp, Homo sapiens
atagacatgcctctctgggctgttgtaaggattacaaattaggtcgagtgcttggcatgtggtgggttgaacagatcacagctagcattacagatgatatattaaagccaaaaaaagatgcctaatgtccaccagttggtgaacggacaaaggaaatgtaccatatttgggatattatttggcaatcaaaaaaagtactgacacctgctacaacacggatgaatcttgaaaacattagactaagtgaaagaagccagacacaagaaactgctaatg

SEQ ID NO: 175137 - DNA, 474 bp, Homo sapiens
ctgcactccagcctggcaacagagaaagaaaagtatttaatatttatattttcctacttatctaatcatttccttaagatttagtgagtatacatacttaaaatttggttttcattgccatatagccttcaggaaggttgtatactttacattttgtagtttgagaatttcatttatatacttgtcaattgtcagttttcttaatccttgccagtttaatgaatgggaaaaatttaaatgatgtctcattgttgagggcttgtgttttggccaggcctggtgggtcactcatgcctgtaatgccagcattttaggaggccaaggtgggaggatcggttgagcccaggagttcaagaccagcctaggcaacatggtaagaccctgtctttacaaaaagttaaaaaaaaaaaaaatagctgggtgtggtggcacatacttgtagtcacacctacttgggagattcaggggaggatc

SEQ ID NO: 175138 - DNA, 257 bp, Homo sapiens
ccttggacctacatgccagccactcagtacccctgtcaacccccaccttcttccccactctgggctcactgtgacttaatttacctactcaaagagtctgcttcacaggggagccttcctccccaaatctaagaatctagaaagcaagcagcagtatcttggcatgatccactgtgttctgagcaaccagctccagggttcctgtccttcaactagaatggtcccattgtccccatgttatatgtttctggttgtca

SEQ ID NO: 175139 - DNA, 370 bp, Homo sapiens
aatagcactgtcatgagaactaaaaaccaggtgagcactcacagtacctggttttaacttcatacacctgaaagaggcactgaagagggtagaaaagacagccttgaactgccgatgccaacccctcttccatcccccagcagcggccgtgtagtgtggagagagaatctgtgtacttgggggagggagagcacaacaaatgggggacatagaattgcaccaatgctgccctgtcacagcagacagtaaagctgtgctgggctcaaccactgcatgcccacagaaggagcatgtggaccagccctagccagaaagaaattccccatcccagtggtcaaaacttgagcttctcagcaagcctcaccacaac

SEQ ID NO: 175140 - DNA, 488 bp, Homo sapiens
ccacacgatgttccctgctctttcttcactcttggcactttcttctctccattgcctttttctcctgacttgggtaagggtctgccgctcttcctcaccttccgggtcgggccttcggcattctaagtggagctttctggagagggagccccgttctaagggcactgagagaggagtggctgaactgagaggtaaccaggaaagcaagatcagtccatgcccccaggccatacctgccaggtggccgacaggagatgcaaatgtgcttctacctgagacaatgcaagcagaagaagggatgtcgcaaatggagacacacacccgctagcttcacacgccgttcccattaatcacgctgcaaagaacaaaaatcctggaaaatcattaaaattacagatggctagattaagtaattagaatttaggctaaagcagatgtttgtaattaagtgtttatttcattgaataaaatccagattgtaagaacta

SEQ ID NO: 175141 - DNA, 462 bp, Homo sapiens
gtgtgtgtgtgtgtgtgtgtgtgtgtgtgtgtatgtgtatatgcgtatatatgtgtatgtatgtgtgtatatatatatgtgtgtgtgtatatatatatatgcaattatacctttatccctactctagtccaccttcctataaataagatgtattgagatgctcagtgcccccattctgacagcatccaatcgagtgaatcctcacttccttgaaatcacccaaccagggccaaaatcctaaaagaggttctttgtgacaccctctgtctgagaagtcctatggttctctgtgatgaatagacccaactttttcaaatacaggcatttctggtgggctttggctgaaggcattcacacccaccagtgaatgtcttgcacttctaattgtgtctcggggcatgcctggtggaggacctgactgagacaattgtgactggatgtggtctgagagcaggcagtagg

SEQ ID NO: 175142 - DNA, 110 bp, Homo sapiens
cggtgtagaacaaaacccttgccagggtcccaaacctctctttagaactctaattaaaggtacttccgtttcccacacaacttggaatgaaggggaagcaacgactgtta

SEQ ID NO: 175143 - DNA, 2838 bp, Homo sapiens
agcggggtaggaggcaaccatgtggttccagctgaattttttttttccctctctctttcttcactcctttttctttccaaacagggaaaagtgttccacgaagcggtagcgcctttccgcctcgcgttttcctccctgaccctggtcccggctcccgtccgggcgccagctggtggggcgagcgccgggagcccatctgcccccaggggcacggggcgcggggccggctcccgcccggcacatggctgcagccacctcgcgcgcaccccgaggcgccgcgcccagctcgcccgaggtccgtcggaggcgcccggccgccccggagccaagcagcaactgagcggggaagcgcccgcgtccggggatcgggatgtccctcctccttctcctcttgctagtttcctactatgttggaaccttggggactcacactgagatcaagagagtggcagaggaaaaggtcactttgccctgccaccatcaactggggcttccagaaaaagacactctggatattgaatggctgctcaccgataatgaagggaaccaaaaagtggtgatcacttactccagtcgtcatgtctacaataacttgactgaggaacagaagggccgagtggcctttgcttccaatttcctggcaggagatgcctccttgcagattgaacctctgaagcccagtgatgagggccggtacacctgtaaggttaagaattcagggcgctacgtgtggagccatgtcatcttaaaagtcttagtgagaccatccaagcccaagtgtgagttggaaggagagctgacagaaggaagtgacctgactttgcagtgtgagtcatcctctggcacagagcccattgtgtattactggcagcgaatccgagagaaagagggagaggatgaacgtctgcctcccaaatctaggattgactacaaccaccctggacgagttctgctgcagaatcttaccatgtcctactctggactgtaccagtgcacagcaggcaacgaagctgggaaggaaagctgtgtggtgcgagtaactgtacagtatgtacaaagcatcggcatggttgcaggagcagtgacaggcatagtggctggagccctgctgattttcctcttggtgtggctgctaatccgaaggaaagacaaagaaagatatgaggaagaagagagacctaatgaaattcgagaagatgctgaagctccaaaagcccgtcttgtgaaacccagctcctcttcctcaggctctcggagctcacgctctggttcttcctccactcgctccacagcaaatagtgcctcacgcagccagcggacactgtcaactgacgcagcaccccagccagggctggccacccaggcatacagcctagtggggccagaggtgagaggttctgaaccaaagaaagtccaccatgctaatctgaccaaagcagaaaccacacccagcatgatccccagccagagcagagccttccaaacggtctgaattacaatggacttgactcccacgctttcctaggagtcagggtctttggactcttctcgtcattggagctcaagtcaccagccacacaaccagatgagaggtcatctaagtagcagtgagcattgcacggaacagattcagatgagcattttccttatacaataccaaacaagcaaaaggatgtaagctgattcatctgtaaaaaggcatcttattgtgcctttagaccagagtaagggaaagcaggagtccaaatctatttgttgaccaggacctgtggtgagaaggttggggaaaggtgaggtgaatatacctaaaacttttaatgtgggatattttgtatcagtgctttgattcacaattttcaagaggaaatgggatgctgtttgtaaattttctatgcatttctgcaaacttattggattattagttattcagacagtcaagcagaacccacagccttattacacctgtctacaccatgtactgagctaaccacttctaagaaactccaaaaaaggaaacatgtgtcttctattctgacttaacttcatttgtcataaggtttggatattaatttcaaggggagttgaaatagtgggagatggagaagagtgaatgagtttctcccactctatactaatctcactatttgtattgagcccaaaataactatgaaaggagacaaaaatttgtgacaaaggattgtgaagagctttccatcttcatgatgttatgaggattgttgacaaacattagaaatatataatggagcaattgtggatttcccctcaaatcagatgcctctaaggactttcctgctagatatttctggaaggagaaaatacaacatgtcatttatcaacgtccttagaaagaattcttctagagaaaaagggatctaggaatgctgaaagattacccaacataccattatagtctcttctttctgagaaaatgtgaaaccagaattgcaagactgggtggactagaaagggagattagatcagttttctcttaatatgtcaaggaaggtagccgggcatggtgccaggcacctgtaggaaaatccagcaggtggaggttgcagtgagccaagattatgccattgcactccagcctgggtgacaaagcaagactccatctcaaaaaaaaaaaaaaatcaaggaaggataaaaggaagttcagtattgtaccacacttggaacttcctccatttcttccattttagaaggatatgaacctggaacttttgatgattctaagccttaaactatcaaaaagatcagggattgccaatgcttctaatggcactgcaagtatatgccataaccgttccctcctaa

SEQ ID NO: 175144 - DNA, 1188 bp, Homo sapiens
tggacgagttctgctgcagaatcttaccatgtcctactctggactgtaccagtgcacagcaggcaacgaagctgggaaggaaagctgtgtggtgcgagtaactgtacagtattgctggatttgacatcgagctacgaagtcgcagactaattcctggggtcatctgtttaactggtggataaattatttccatctctactagacagaggtctacaagttgcccctacagagttgtaaattgccaagttctgtagttcttttgtctatttccaagtttagataatttttcttaaaaacacaacagtcaggccgggtgcagtggctcacgcctgtaatcccagcactttgggaggtcgaggcgggcggatcacgaggtcaggagtttgagaccagcctggccagcatggtgaaaccccgtctctactaaaaacacacaaaaaattagctgggcatgcctgtaatcccagctactcgggaggttaaggtaggagaatcgcttgaccctgggaggtggaggttgcagtaagctgagatcaggccactgcactccagcctgggtgacagagagagactccgtctcaaaaacaaaacaaaacaaaacaaaaaaagtaacaggcagttttcaggaaaagaaataaaaaatggtgaataaacatgaataaagaggcccccaaaaatccttttttccccactaggttgagaaaaaaaaatcacccttttaattttaagctatcagtttagtaaatataaaaactgtagaatctatattagaaaggttatgaggaaacaggtgcttttacatttttgactaacatatacattagtagcacaatttagatttatctatagatttctgaggggtaaatatattaaagtaaaacttatacaaagaagaaggataagtgtacaacttgatagattttcaaaagtgaagataactgtgtaaccagtatcatgattaagaacctgtttctggccaggcacggtggctcatgcctgtaatcccagcactctgggaggccaagctgggcgcatcacctgaggtcaggagtttgagaccagcctgaccaacatgccaaaaccccagctctactaaaaatataaaacttgccgggcacggtgactcacgcctataatcccagcactttgggaggccgaggcaggtggatcacgaggtcaagagatcga

SEQ ID NO: 175145 - DNA, 2448 bp, Homo sapiens
tgtactgtatttttaacttttatttagaacagaggtctcttggactctcagccccaggcttgactactttgtgccactgggagtactccctttcctcttcttcacaccatcaggaaaggcaggctgagagttacgctgcttgactctgcctcggtctatcccacaggtgatcacttactccagtcgtcatgtctacaataacttgactgaggaacagaagggccgagtggcctttgcttccaatttcctggcaggagatgcctccttgcagattgaacctctgaagcccagtgatgagggccggtacacctgtaaggttaagaattcagggcgctacgtgtggagccatgtcatcttaaaagtcttagtgagaccatccaagcccaagtgtgagttggaaggagagctgacagaaggaagtgacctgactttgcagtgtgagtcatcctctggcacagagcccattgtgtattactggcagcgaatccgagagaaagagggagaggatgaacgtctgcctcccaaatctaggattgactacaaccaccctggacgagttctgctgcagaatcttaccatgtcctactctggactgtaccagtgcacagcaggcaacgaagctgggaaggaaagctgtgtggtgcgagtaactgtacagtatgtacaaagcatcggcatggttgcaggagcagtgacaggcatagtggctggagccctgctgattttcctcttggtgtggctgctaatccgaaggaaagacaaagaaagatatgaggaagaagagagacctaatgaaattcgagaagatgctgaagctccaaaagcccgtcttgtgaaacccagctcctcttcctcaggctctcggagctcacgctctggttcttcctccactcgctccacagcaaatagtgcctcacgcagccagcggacactgtcaactgacgcagcaccccagccagggctggccacccaggcatacagcctagtggggccagaggtgagaggttctgaaccaaagaaagtccaccatgctaatctgaccaaagcagaaaccacacccagcatgatccccagccagagcagagccttccaaacggtctgaattacaatggacttgactcccacgctttcctaggagtcagggtctttggactcttctcgtcattggagctcaagtcaccagccacacaaccagatgagaggtcatctaagtagcagtgagcattgcacggaacagattcagatgagcattttccttatacaataccaaacaagcaaaaggatgtaagctgattcatctgtaaaaaggcatcttattgtgcctttagaccagagtaagggaaagcaggagtccaaatctatttgttgaccaggacctgtggtgagaaggttggggaaaggtgaggtgaatatacctaaaacttttaatgtgggatattttgtatcagtgctttgattcacaattttcaagaggaaatgggatgctgtttgtaaattttctatgcatttctgcaaacttattggattattagttattcagacagtcaagcagaacccacagccttattacacctgtctacaccatgtactgagctaaccacttctaagaaactccaaaaaaggaaacatgtgtcttctattctgacttaacttcatttgtcataaggtttggatattaatttcaaggggagttgaaatagtgggagatggagaagagtgaatgagtttctcccactctatactaatctcactatttgtattgagcccaaaataactatgaaaggagacaaaaatttgtgacaaaggattgtgaagagctttccatcttcatgatgttatgaggattgttgacaaacattagaaatatataatggagcaattgtggatttcccctcaaatcagatgcctctaaggactttcctgctagatatttctggaaggagaaaatacaacatgtcatttatcaacgtccttagaaagaattcttctagagaaaaagggatctaggaatgctgaaagattacccaacataccattatagtctcttctttctgagaaaatgtgaaaccagaattgcaagactgggtggactagaaagggagattagatcagttttctcttaatatgtcaaggaaggtagccgggcatggtgccaggcacctgtaggaaaatccagcaggtggaggttgcagtgagccaagattatgccattgcactccagcctgggtgacaaagcaagactccatctcaaaaaaaaaaaaaaatcaaggaaggataaaaggaagttcagtattgtaccacacttggaacttcctccatttcttccattttagaaggatatgaacctggaacttttgatgattctaagccttaaactatcaaaaagatcagggattgccaatgcttctaatggcactgcaagtatatgccataaccgttccctcctaa

SEQ ID NO: 175146 - DNA, 2572 bp, Homo sapiens
agcggggtaggaggcaaccatgtggttccagctgaattttttttttccctctctctttcttcactcctttttctttccaaacagggaaaagtgttccacgaagcggtagcgcctttccgcctcgcgttttcctccctgaccctggtcccggctcccgtccgggcgccagctggtggggcgagcgccgggagcccatctgcccccaggggcacggggcgcggggccggctcccgcccggcacatggctgcagccacctcgcgcgcaccccgaggcgccgcgcccagctcgcccgaggtccgtcggaggcgcccggccgccccggagccaagcagcaactgagcggggaagcgcccgcgtccggggatcgggatgtccctcctccttctcctcttgctagtttcctactatgttggaaccttggggactcacactgagatcaagagagtggcagaggaaaaggtcactttgccctgccaccatcaactggggcttccagaaaaagacactctggatattgaatggctgctcaccgataatgaagggaaccaaaaagtggtgatcacttactccagtcgtcatgtctacaataacttgactgaggaacagaagggccgagtggcctttgcttccaatttcctggcaggagatgcctccttgcagattgaacctctgaagcccagtgatgagggccggtacacctgtaaggttaagaattcagggcgctacgtgtggagccatgtcatcttaaaagtcttagtgagaccatccaagcccaagtgtgagttggaaggagagctgacagaaggaagtgacctgactttgcagtgtgagtcatcctctggcacagagcccattgtgtattactggcagcgaatccgagagaaagagggagaggatgaacgtctgcctcccaaatctaggattgactacaaccaccctggacgagttctgctgcagaatcttaccatgtcctactctggactgtaccagtgcacagcaggcaacgaagctgggaaggaaagctgtgtggtgcgagtaactgtacagtatgtacaaagcatcggcatggttgcaggagcagtgacaggcatagtggctggagccctgctgattttcctcttggtgtggctgctaatccgaaggaaagacaaagaaagatatgaggaagaagagagacctaatgaaattcgagaagatgctgaagctccaaaagcccgtcttgtgaaacccagctcctcttcctcaggctctcggagctcacgctctggttcttcctccactcgctccacagcaaatagtgcctcacgcagccagcggacactgtcaactgacgcagcaccccagccagggctggccacccaggcatacagcctagtggggccagaggtgagaggttctgaaccaaagaaagtccaccatgctaatctgaccaaagcagaaaccacacccagcatgatccccagccagacaggagtccaaatctatttgttgaccaggacctgtggtgagaaggttggggaaaggtgaggtgaatatacctaaaacttttaatgtgggatattttgtatcagtgctttgattcacaattttcaagaggaaatgggatgctgtttgtaaattttctatgcatttctgcaaacttattggattattagttattcagacagtcaagcagaacccacagccttattacacctgtctacaccatgtactgagctaaccacttctaagaaactccaaaaaaggaaacatgtgtcttctattctgacttaacttcatttgtcataaggtttggatattaatttcaaggggagttgaaatagtgggagatggagaagagtgaatgagtttctcccactctatactaatctcactatttgtattgagcccaaaataactatgaaaggagacaaaaatttgtgacaaaggattgtgaagagctttccatcttcatgatgttatgaggattgttgacaaacattagaaatatataatggagcaattgtggatttcccctcaaatcagatgcctctaaggactttcctgctagatatttctggaaggagaaaatacaacatgtcatttatcaacgtccttagaaagaattcttctagagaaaaagggatctaggaatgctgaaagattacccaacataccattatagtctcttctttctgagaaaatgtgaaaccagaattgcaagactgggtggactagaaagggagattagatcagttttctcttaatatgtcaaggaaggtagccgggcatggtgccaggcacctgtaggaaaatccagcaggtggaggttgcagtgagccaagattatgccattgcactccagcctgggtgacaaagcaagactccatctcaaaaaaaaaaaaaaatcaaggaaggataaaaggaagttcagtattgtaccacacttggaacttcctccatttcttccattttagaaggatatgaacctggaacttttgatgattctaagccttaaactatcaaaaagatcagggattgccaatgcttctaatggcactgcaagtatatgccataaccgttccctcctaa

SEQ ID NO: 175147 - DNA, 1899 bp, Homo sapiens
tggacgagttctgctgcagaatcttaccatgtcctactctggactgtaccagtgcacagcaggcaacgaagctgggaaggaaagctgtgtggtgcgagtaactgtacagtatgtacaaagcatcggcatggttgcaggagcagtgacaggcatagtggctggagccctgctgattttcctcttggtgtggctgctaatccgaaggaaagacaaagaaagatatgaggaagaagagagacctaatgaaattcgagaagatgctgaagctccaaaagcccgtcttgtgaaacccagctcctcttcctcaggctctcggagctcacgctctggttcttcctccactcgctccacagcaaatagtgcctcacgcagccagcggacactgtcaactgacgcagcaccccagccagggctggccacccaggcatacagcctagtggggccagaggtgagaggttctgaaccaaagaaagtccaccatgctaatctgaccaaagcagaaaccacacccagcatgatccccagccagagcagagccttccaaacggtctgaattacaatggacttgactcccacgctttcctaggagtcagggtctttggactcttctcgtcattggagctcaagtcaccagccacacaaccagatgagaggtcatctaagtagcagtgagcattgcacggaacagattcagatgagcattttccttatacaataccaaacaagcaaaaggatgtaagctgattcatctgtaaaaaggcatcttattgtgcctttagaccagagtaagggaaagcaggagtccaaatctatttgttgaccaggacctgtggtgagaaggttggggaaaggtgaggtgaatatacctaaaacttttaatgtgggatattttgtatcagtgctttgattcacaattttcaagaggaaatgggatgctgtttgtaaattttctatgcatttctgcaaacttattggattattagttattcagacagtcaagcagaacccacagccttattacacctgtctacaccatgtactgagctaaccacttctaagaaactccaaaaaaggaaacatgtgtcttctattctgacttaacttcatttgtcataaggtttggatattaatttcaaggggagttgaaatagtgggagatggagaagagtgaatgagtttctcccactctatactaatctcactatttgtattgagcccaaaataactatgaaaggagacaaaaatttgtgacaaaggattgtgaagagctttccatcttcatgatgttatgaggattgttgacaaacattagaaatatataatggagcaattgtggatttcccctcaaatcagatgcctctaaggactttcctgctagatatttctggaaggagaaaatacaacatgtcatttatcaacgtccttagaaagaattcttctagagaaaaagggatctaggaatgctgaaagattacccaacataccattatagtctcttctttctgagaaaatgtgaaaccagaattgcaagactgggtggactagaaagggagattagatcagttttctcttaatatgtcaaggaaggtagccgggcatggtgccaggcacctgtaggaaaatccagcaggtggaggttgcagtgagccaagattatgccattgcactccagcctgggtgacaaagcaagactccatctcaaaaaaaaaaaaaaatcaaggaaggataaaaggaagttcagtattgtaccacacttggaacttcctccatttcttccattttagaaggatatgaacctggaacttttgatgattctaagccttaaactatcaaaaagatcagggattgccaatgcttctaatggcactgcaagtatatgccataaccgttccctcctaa

SEQ ID NO: 175148 - DNA, 397 bp, Homo sapiens
ttaataaaccattacccataaaatatttatgttgccaatttctactttttatccattagtgtggaatatacagtaaaaaccaaaaatctatcatttctgtgaaaatggcaggtagagtgaagatttttatttatgtacttttgtatcagcataatttatagttcataattgcacacttgaacctccttgattatacagtttttatacttttttgtgtgtgtggaccaaataccatacttgctaattctcttatttctctgaaacaaatttaaagaaacaaaagatgtgtcttccactttggtttcctggtatttcaggaaattaatacaattatgaacccaattttattatatttaagtctactaattgaactacaaataaaaagttatttgctttt

SEQ ID NO: 175149 - DNA, 690 bp, Homo sapiens
cggcttacaagggacctatccatgtactcgtgtacgctcttatacaactccctcctctctgtatctcaccccgcacgatctatctgcttccgctgctctgaaccctgatttccacatcctccactccgtgggaccactgtgctctacatggactccagctatctgtgccatggttggaagtagttctaagacagaaagttgggtgatcatggggttcacctcatgagtttccctctgtctgggatcagtagttctgtgctacctattgttcactgcctgaaaatagttgtctcatctattttgtcatgttgtatagcagtttatggtgggagggctagcctagtaccagttactccatcatagccagaagcagaaatccaaagaaagcttcaaaaaatataagtctgatcatgtcacttctctggttaaaatctttccatggctctaagaataaagatccaaatttgaaaatggcccgtggggtcttgtatgatctgagccaaacctgtgctccagcgtcattccccctcttcctcaggccctcgttccttccttagcctctggccttccttcagtcccttgccgttttctcctgtctctaggcttttgcacatgaaaacacacttttgcacatgaaaacacaccaccaaacattcttcccatccttcttcaccaaccagctacaagcca

SEQ ID NO: 175150 - DNA, 592 bp, Homo sapiens
agggacctctccaggaaggaagccagcccactgcaagaataactgagcctgtcagaaaacactgtgacataaatcaaagtgctaacctcataaactataaagatcattctcaaggtaaggcaggtgttaattactaccaaatgttaacagaggcatgtatggtgacagtggttttacttcatggttatgagactgaatttgaagcacttacaaatggcacattgattttttaattgcttttctgtccttccattcatgtatttggtaaatcttagaagtacaggctgaaagagtgctgagaggacccattcatctcatctagggcatgctaggaatcattagagaatcacaaacttggagaggtgtgacttgtcaaagatgaaagaggaaaacagaaggtgtcttcagggtgcttctcaaagaatggtcccagaatctcctggggtgtttaaaactggaagttccctctggtccctggctttgagcccactgggctgtacaacccacttatctctcacctgtcatgttcaagagtgatatgcaaaaaaatatggtaaattcaacagaaagtgatggacatgcatattctcaa

SEQ ID NO: 175151 - DNA, 379 bp, Homo sapiens
taataggtgctcaataaacgctgcctgtacggaattttactatcaaagctgccaaggaaagtttccagaaatcagctcttccaaaatatgtcctcagagttttctttgtccaacaaaaaaatatttttgaagatccaagagcaggaaatctgcgaggcaacgaggagccaaatataagccaagcggctccagctgggccccacattccgctaggactccccagtacctattccccatctctccgcctacatcctgagtgcgccctccctctcatctcggctgtttccttcccacaaccctacctccatactttcggccacacacaccccaagtgcgtgctcctggaacctcacagcccacctctccctctccagcaagg

SEQ ID NO: 175152 - DNA, 690 bp, Homo sapiens
gggctcattctaatcacatgagtcttttaaagcagagtgattctctctggctggacttagatgtaacagaaggaaaagttagaagtatttaaagtgtgagaagaattcaacctatttctggaggggcacacgtagaaagcaccagaatgtgggcagcttctacagagaaaaggccaacccccagctgacagctaagaaaacagggtcctctaccctgcaactgcaatacactaaattcagccaagaacccaaatgaatgtggaagcagattcttcctcagagcctccagggaaaaacacatttggttttggccgtatgaaacgtgatttggaccttgtgagactctaagcagaggacctagtcaagtccaatcaagcttctgacctatagaaattgtgagaaaatatatggatgttgtttcaaaaaacaacaacaacacaaacaaaaaaaaacaactgtggttgggcgggcctcggaccctgaaaaaacttcaaaaaacccattgggtggggccggggccccaagatggtttaggtgaccctggcaacagcgggtccaaagaaaccggggccggacataggcgtggggtttcccacaaaaaaaaagccccgggggaaaccggggttggacaaaccaaagggcgtcggaggcctacggggcaaacacggagccagggggcgccgaattaat

SEQ ID NO: 175153 - DNA, 419 bp, Homo sapiens
tttctttctaatcctaaactcacattttcacctattcatatgatttgcttttttcagttttatcttctgtgtatttcactatgatactagccagggttttgcctttgagcaatctccaattttatttttttgtgtatagttcttttcctccaatacttgtccaatgttttattagctcataattaaatacttccatgctatctgttttagtctgttctcacgctggtatgaagaaatacccaagattggctaatttataaaggaaagaggtttaattgactcacagtcctgcattgctggggaggcctcaggaaacttacaatcatggtggaaggcaaggagaagcagccaccttcttcacagggtggcaagacggaataagggaaaggaggggaaatgccaaatgcttataaaaccat

SEQ ID NO: 175154 - DNA, 274 bp, Homo sapiens
gtactggcaggctgctaggccctgcagcatgctgtgtagttgaagattttatgctgtttctcacatgaattttacctaagcacaaagttgccagagtatgtagacttaaagcagggtaggattcttagcctctccctggtactgagacacaaaaagtacctcttatagctcgattttttttaagtcccaactcttcccttttaaccactctcccttgttctgaaaatcagatcagtcactttgaaagttctaagaaccttttcccttggttgag

SEQ ID NO: 175155 - DNA, 369 bp, Homo sapiens
tacacaaaagccttcaataaatatgtgtggaataaactgaaggtttacatacaataaatacagacagctttggggcaagtatagtgataaagtacagaattctccctgagttcgtggaattattttaatttcatttccgtacagtcagtgagtatgaggacttgaagacatggtttttctcctgttaagtgaaggtctgcattttatttttttagtctagagaaatagccaaaatattattttttttaaccaggagaattttcagttggaatggttcataagacagttgtaagttaaatgctgaaggtaatatgaacaagtggctatgtatccttcatatcttcaaggaggttcagttttagtgtgtct

SEQ ID NO: 175156 - DNA, 320 bp, Homo sapiens
gcccacttcatggcttcaacagctatctatatgcacacgcacacacacctcaaacctttcttttgagttcccaacccacattagctaatatcccaggggcacctaaaactcattatctcccccctaaacgagaaagaaactggtatcattattccccagttgtccaagtcacaacattcgtacctcttaaaccaatctgtatctccccatccgcactctcccttccacaggcagaccatcatcatccttgcctggaaaagagcctcacaactgctctccttgattctcctcaattcattcatccttcacactgcacgcag

SEQ ID NO: 175157 - DNA, 924 bp, Homo sapiens
tgactcgggaagatttgggatgtgtcaagggctctgatcatgccactctactattcaatgccttccctcatatcctattgcctggcatacttcagtggaataaaactccacttctataacatgggagacagccctctacagtaaatggccccaatttcccaaacatatgtaactcctgccatttcctgcagggccccaatagcatcaacagaatacttactatttcctgaacacaactgagctctggtttatgtttgtttgttcatttttgttttggtttttgcatcttggtgattatatttattggaagagttggaggaaaaagtgacatttagctcaagaagtcatgagttatctgcaaatcaattcatttccagagtggaaaaatcctcagaattatttcttaatatcaaaatgtatgcaggtttctctttcaaatgctttgtacatttaaagaggcaattgtacaaagtctcctattttccatacaggacaaattctttgtgtcagccaactttcagtggagggacaaccaggacaacaccatctccctggataatgcgcgttggaatactcagtttcattgatttacatatcccttcgtatgtttattcatcaatttctatagtagccacagtttcttctacatctcccaacatcatatttaaatgttgatcataagcatgtaatctgccttgaagccatcagtcatttcccattttcatgtaaatttgctcatctaggctgagcctgataagatcgaggggctcctctgcggttttggtagtttgttgatggtccacataatctgccatatttcaaatcctgcacccttccccctgaactcttactcttccccctgaactctatgacagatgcttgttacataaaactctgcttgttttatcatatccttccttgcct

SEQ ID NO: 175158 - DNA, 537 bp, Homo sapiens
caaactctccccttcgttaagtaatttttaaagctgaattactgtattttatttcttgaagacatacccactgctttcttataaacaaccaacctttcaattactgaccagtcaggcaaaatcaaatacacaggctaaaagagtatcttcctaaatgcaggcaaaaatacaaaaaaacaaactgggtaccctggtgtgtgcctgtaatcccagctacccaggagattgaggcaggacgatcacttgacccaggagtttgataagagcctgggcaatatagagacacccccatctcaaaagaaaatttaaaaatacatacatatatattttttcaaaaaccctaagcacaatggagctacattatcactaaattcatgatggctcagaactcagtgtaattcaggcctgttttagaaacagaaagtagatacacactagaaataaccacatagacatttgtatacaaattgttatctacaaaattatggcaccctaagtccaaagaatggcattgctgcgagatcccagagcccccag

SEQ ID NO: 175159 - DNA, 976 bp, Homo sapiens
aactcatcccttcctctgttcctttcatcacaacaaacgttatggagattatgcgataccaggcactgtgctagctgatagggtgggggtcagagtacccagcgaggctagacattgtgtgggattcagagaaagcatataatagggctcctcccacaagaagcttgtggccacaccagggagagagaatggatgcacatgagcatacgaaactcttagaaggacttaggcaggaagcacaggtgataggcagaatgtgtgatatgagggtaagggctgagcaaccaacgcagaggaattggagaggccagaataatcagaaaagctttggagggggtaggatgtgacctacattttcagaacaagagtggagtagaaaaggcattccaggtgggataaacagcggaggcaaatacatgagagggaattaaatctgttgtgatttatttgatagtaagattgacctgcctggcatcgagttgaagtagaggcaaaagacactgaatatttgcaaggaggtccttagaatggagtgatatggaaataagcagccattataggttcttgagcaggaacattttgcatgaaaagcactgctttggaatgatgagtctagaaaggtaacactgacctctctaaggtggcattctagggagagacctgagtatttggggctgagattgagagaggagcttacttttcttggtatatttttatttactattcaagttctgcatcatgtgtgtttactgcctatttaataattatttttaaatttaaagaacccattgtggcagcagggggaattctctaagctcagttactaaagggttatgaagctgggtatggtagcacacacctgtagtctcagctacttgggaggctgaggtgcgaggatcgcttgagtttaggagttagtgggaggatttcttgagcccaggagttaagagaccagcctgggcatcaaaaaaattaa

SEQ ID NO: 175160 - DNA, 444 bp, Homo sapiens
tccagcactttgggaggctaaggtgggcggatcacttgaggtcaggagttcaaaaccagcctggccaagatggtgaaaccccatctctactaaaaacacaaaaattagccaggcatggtggtgtacacctgtaatcccagatactcaggaggctgaggaaggagaattgcttgaacctgggaggccgaggttgcagtgagccgagatcacatcactgcctccagcctgaacgacagagtgagactccatctccaaaaaaaagaaccaggatttaggaacagagaagcccatacatcatctaatttatccccaacagccctttaatcaatgtggaaactgaggcaggagaaatgaagtaactggttccagattaccaccgacacacagtattggagaattgaaaccctgatcggaatactgaccttggtgactctgggctgtcac

SEQ ID NO: 175161 - DNA, 107 bp, Homo sapiens
attgaaaacgtcttaaaatttttattctgaagggaaaaaatgaatgcagtatggcctgtttttttaaaaaatatctgttggactcatttcacttttgaagtgagtca

SEQ ID NO: 175162 - DNA, 495 bp, Homo sapiens
tttttgtgtgctgaaggcatggctggggtttgtcttacagcagaggcaagcaattgcagctctgaaagacgttgctgcttggctgcctcttctctattgttgaacaccttgaaggcgagattgattaattcctgttgtggggtttgagggccagattccaatttttgaagctttttttgtaatgtcaggagctgactgagtgataaaatgcatattgagaataagatggccttctggcccttcagggtctagggctgtaaagtttctaagggtagccaccaaacgggccatgaactgggctggattttcatctttaccttgggtggcttcttaaagcttgtcataattaacagctttgtatgctgcctttttcagcccttcagctaggcaagagaccatgtaatctcgcctagctatacctggggagcctgtctggtattcccatcaaggatcctctcagggaactgccctgatgccttcttggaggtctggctc

SEQ ID NO: 175163 - DNA, 199 bp, Homo sapiens
tgatgaagatattctacaattaggtattggtgatggttgcacaactctttaaatatactaaaaaaccactaaattgtacattgaaagtattatttaaaagctggttttaaaaaaagttttcattgatctaaaaattgctcccataccttgtcacctttgtttctctgctcatatctttcctctacctgaaatgcacatc

SEQ ID NO: 175164 - DNA, 323 bp, Homo sapiens
aagtcacttaatccagtagtttgagactatagtgagctatatcgcaccactgcattccaacctgggcgacagagcaagattctgtctcaaagaaaataaaacaaaacaaaacaaacaaaaaaacagccttttctctttctctccttcaatctgacaaagacctttcataaaagtcacacacgggcagaatgtctgtccctaacccaggtgtgtgcttggggctcctctccctccctttctccactgagggcttcagttttctgctggcttccaggcatggagagcaggtccgcaagtctcctctgcttccccctgactgaggc

SEQ ID NO: 175165 - DNA, 263 bp, Homo sapiens
gcagcaaagtaacggcaagttctctttcaaagcctagcccactgttttgcagaaggtgttctgccagccccattcttatctccaacccacctaccccatctcctggatcaaagccaaaatcatttctaagggaagcaattgtgaaatcattcccttctatcaagagcagtttgcattgtctccatgcagaaagtgtgcagtttaatatattagggtgggttgcggagtggcaactaatatcaaacaatttttttttaaactaa

SEQ ID NO: 175166 - DNA, 309 bp, Homo sapiens
ccaacaagggcctgtgcattctggccttgctctctccccactaaccactacatcttccaccaccagcaaccttcctgcagttcctggaagagccatatttctcgccatcacagcttttccagaagctatgctctttgtttagtacgttcttctcttcctcccctcaccatctctacttccactcatccttcaggtatatcagcttagataccaccctgtcacgtggccatcctggacatcgcctccttaacactagtcatgtgccaagatttaagactcaccaactgaagttggaccttttatccgatg

SEQ ID NO: 175167 - DNA, 155 bp, Homo sapiens
aactattactgttcaatggggtattccagatgactagtcagcacatttcctgcagcttttttcaagattctgtaagagaattaagccctaatgtcataaggcatctattttatgtaactaatccatttgaaatgactaatttctcctttgtgtat

SEQ ID NO: 175168 - DNA, 698 bp, Homo sapiens
tagagccccagaatcagtaccactgggtcaaagagcatgaatgttttatcatttgcttattttttttagagtgaaaaaagtacggccttattacttgtaagtcattatatatggatttttaaattattatttgtacataagaacaattttaatgatatttgcactatcaaattatctttaattggccaaccaatttttatgacacactgacatgtttggattatatcagtccataaggtaaagattccaaaatggcaatgaccaaggtctaccataggcaccttggttagaaagtatcactctgcatagtactgacttgtagatgaatagctggatattggaaggaagatttgattcatgaaggttaatgggctggggaaagcaatgggtccaattagcaaatggattgttcttggaccttctgctagtctcaaaaggataagcttatggttcccatggcccatggcagaaaacacagaacaaataaccaggttaaacactgaagttcaaaagttggccagtaatggttgtcaagggctgtgtccaggaaatcccgccagacaggcactgtttgcaaatggctgggaaatatggtctgttgccatcaaaaacagatgaaaagcaggatttggttaaaagagtaagtctttgcgcaagcaaaacctttccaaaataaagaaacagtgtatagctgttgc

SEQ ID NO: 175169 - DNA, 554 bp, Homo sapiens
tttagatatctgactcattcagtactaccccaaggctcactgacaattggaatatgtgcaaatgagggttcataacacataatttgacttatttcacctatttatctagctttggccaaacaattcaaaacaaacttcctagttacttcctgggaaaaaaattgtggaggagaaaaatgaagagggatgttctaacggctcttacagaagtaactgccaagattcccattctagcatatttattagggtcatttatggggatatttgcctttatagtatgagccaatgatgctctatcaccattttataacatacaattgcaaagatgaaagaaatatgtctatacatatatgcaccatagaattatatggtattttaatgatgtttagagagccaggctcactccttggttgtgaaaatccagacttgattcttgatagttaactgcaaactgcttttctttctctgaagtggcttggtaaagataaagctaataaacaattgactattttaagttaggggcatcacttcttgttctctatgcacagcaatta

SEQ ID NO: 175170 - DNA, 250 bp, Homo sapiens
aatgctcaattccccgcacagttctctacaatccaattaccctagtttccccctacccccacacagtacatatcgttacctaaaataatttcatggactcatttattttatgtttcttatctgtctcctccctatacaatataagctctctcttgttccttgctatgttgctgacacataaaagagtgcctggtctgccacagtagatgttcgaacacatctgttagataaataatgatcacagataata

SEQ ID NO: 175171 - DNA, 763 bp, Homo sapiens
gcttcagtgtgggcccccaaggaactggagacatggcccagacttgaacaggaagcacacacgggctctatcctctgtccagcttcagggggcgttctttcctgcccggcctctctggagttaggaagtcggcctggacggatgggtttgggccaagtgtggatgggcaggctctgattcatggactggaaaatccctccttagtcatttgccaactgtccctgaggcctgggctggtcattgcctctcccacttcccctagaaacccaggtggagtaggggctaaggagggccccttcattgcatgtgagacacacagaacaatctgaaaaccatctccgagcctcccacaaacctgccctggccaagccgagccctcagagttcttgacccacagaagctcatggaatcccctgcaaccctttggcagttgttcttgttcccactttgaggaaactggggcacagagaagttgagaaacttgcccaaggtcacccagccagggaatagcaagtccagattggaaggcaggctcagccagctcactgtattgcccagagcccacagcggtggccaggacaccccctcccctcctggggccccttcccagggatggggcatggaagggaaactgaggaacgacagagtctgtcttaggagttgaaacaactcacagctctgggaccctgaacaagtgaattcatcccactaagtctcagattctcccagctataaaacaggttcatgatttagtatcaatgtg

SEQ ID NO: 175172 - DNA, 712 bp, Homo sapiens
cgcctcggcctcccaaagtgctgggattacaggcgtgagccaccgcgcccggccctgtctcactcttaataaggacaattgtgattacatttagggatctcctgaataacccatgctaattttttcatctcaagatccttaaaatctgcaaagtctcttttgccttgtaaagttatgtattcacatattccaggaattagaacctgactatctttggggctgattattcaatataccagtgttaccatttagtattttatgactttttaaagagtaatacaggctcacttgatattggcatgaatgagagaactaatctgatatggtaaaaatttcttctgtacaagagtaacaaaaagaaagaagaaagagagaaagaaaggaaagaaagagaaaaaagaaagaagggagaaaaaagaaataaggaagaaaaaagaaaaagaggaaagaaggaaaagagaggaaggagagggaaagaaagagaaatgaaggaaggaaggaaggaaaaggggaaggggaaggagaggacggaagaaagaaagattataggaataaatttaaccaaggagatgaaagatctcgataacaaaactacaaaacactgacgaaagaaattgaagaggacacaaaaaatggaatgacatcccaagctcatggattgcaagaattgatatttttaaatgaccttaccacccaaagcaatctacagatg

SEQ ID NO: 175173 - DNA, 101 bp, Homo sapiens
ctgtctaaattgtttagatgtcaggttttttttcttaaaatataagctcttttagggtggggacaagattttatgtctctagctccagcatttccacatca

SEQ ID NO: 175174 - DNA, 548 bp, Homo sapiens
ccgagtcccttggatctgggtcccaaccctgcctgtgtggctctgaagtcaagtgactcctcctccccctgttgtattccccggcagcactaacagtggctccccttagctggacacctagagtgccaggctctgtgctcaggacttcactgtttgaggtccctggagagtggaacctctcacccacaaggtggtgattcccttgggagtgggcagcatgcagtcagaagggaacttgggtggggacaggcatcctatatcctgggtttacccactcctacccatgcactgatgggcttgactgcctggccaacacttactgagcatatagtgaatgacgggcactgaggctcaggggatgaagccataggctttgagtcccagagtcagtgatggaatcaccagggagcccaggcatcgtgtctatgctctgtgccatgtgacaagtctctgccttctcttcatcctgaagagaccctgggttcttgcctccctgggctgtggcaccatgcaaggtggccaaggtaggggccctggtgttctggccc

SEQ ID NO: 175175 - DNA, 729 bp, Homo sapiens
gggaaaggacaccctattcaacaaatggtgctgggataattggcaagccatatgtagaagaatagaactggatcctcatctgtctatatatacaaaaatcaactcaagatggattaaagacttaaatctaagacctaaaaccataaaaattatagaagataacattggaaaaatcttactagacattggctcaggcaaagacttcttgaccaagaacccaagaaaatcaaatgcaacaaaaacaaagataaataaatgagattaattaaactaaaaagcttctgcacagcaaaagtaacaatcagcagagtaaacagacaaccttgaaaatcttctcaatctgtacatccaacaagggactaatttccagaatctacaaataaacaaatcaccaagaaaaaaaaacaaacaattccatcaaaaagtgggctaaggacatgaatagacagttttcaaaaaaagatatacaaatggccaacaaacatatggaaaaaaaatgcttaacatcattaatgatcaggaaaatgcaaattttagccattatgtgataccaccttactcctgcaagaatggacataatcaaaaaatcaaaaaataatagatgttggcatggatgtggtgaaaagggaataattttacactgctggtgggaatgtaaactagtacaactatggaaaattgtgtgtagatcccttaaagaactaaaagtagaactaccatttgatccag

SEQ ID NO: 175176 - DNA, 709 bp, Homo sapiens
gggtttttttaagtaatgacatatatatcattctaaatataccagatgccacattctgaaagataatcttttttaaaaacctttcatttggaatcctgggtgcttccatttttaaatgactgttctctatagaaagagaagtttgcaataacgaaccctgtacactatctgagctgctagtgtcaaagctacagaagtggtttgctggggagaatagcttttctgggttgaacctagttgtcatctatagtcctttttcatttgaaggaacatttaaaacaatacgtccctttttagtaggaatatagttgaaacttcaagattggccaggggtgctaattgcttaagccaaatgttattagaggttcctcatgttattctttttacttttgtatgtgtttaaaatttctcataataaaaagtgttgcttttagcttactttctaaataggttcttcatagattttttttccaggttatgtcttgtagtcgttctaatattctctgattaaatgctttgtcattagtctgagttgcatttatttgctatttctgtatataatcaaattttagatttggagtcagttcagtacaaatagcatactaaaattcagagacactggcaaaaggagaaaattttaaagtccctaaaaatgcatgccttttgtatagaagtttgtgcttataaatacaagcaattaggatgtgct

SEQ ID NO: 175177 - DNA, 131 bp, Homo sapiens
agctcctgcaggagtctgggaaggcagaaccagagtgataagacagctgcttctttctgttgctctcccacccttaacttgaggtttccctccaaggtggttgctctagccactgacagcacttccacctt

SEQ ID NO: 175178 - DNA, 842 bp, Homo sapiens
gttgctctgtggcccaggctggtgtgaggtggcgtgatcttggctcactgcaacctccgcctcccgggttcaagcgattctcctgcctcagcctcctgagtagctgggataacaggtgtgtgccaccatgcccggctaatttttgtatttttagtacagagagggttccaccatgttggtcaggctggtctcgaactcttgacctcatgatctgcccacctcggcctcccaaagtgctgggattacaggcgcgagccactgcacctggccaccagcctcctattctattcaaagtcactcctctgctcactgagatagatgcatatctgagttgcctcctttggaaaggctcatcagaaactctaaagaacgtaccgtttgtgtatcacccatctgtgacctgggagctccgtcccctctttgagtattcctgccttcgcttcaagttgtcccgcctttacagatggaaccaatgtacttcttacatatatcagttgatgcctcatgtctccctaagtgtataaaactaagctgtgccttgaccaccttgggcacatgtcgttaggactccctgaggctgtgtcacaggggcttcctcaacgttggcaaaataaactttctaagttaactgagacctgtctcagattttatgggttcacattatggtaaccacgaggggattctgagtggaggtgcccctgacctttgacaaatctattggttcttggtagcagcatgagctaactttatggctcaagccaataggacaatttgctgaggtttgagagcaccccctccagagaatccctgatctcttaaaatttggtcaagatctaaagttt

SEQ ID NO: 175179 - DNA, 289 bp, Homo sapiens
aaaaaaattcagacatggtaggtttattaccaatctttttttgtgctagtaatggtagaatttattttttcctgtggacacctacgttaaacttatagactacttttacattttaacatttttttcctttgagttcttttaggagttgttaaacaatcctgaaatttcccttacaatatgctacaaactaatcataatttctcaaattcatttgacataatgattgattaaagaaatatgtgtagtataattacacctgctcataacaagagtatttgaaacttcaaga

SEQ ID NO: 175180 - DNA, 501 bp, Homo sapiens
ttgtggatggggtcatgggatatttcgagagaaaagtagttgagtttcagacatttccattttgaggactcatgaatgagatcattgaacaaaaatgatagcaaaaaccactcccaggggaaatgcaccatgcagcaggggataggtagggccaagtctagagcttcagttgttaagcatagctgctgctaccaaacagcatttgactaaggctggaaactgttggcacagctggagcttggtcattttcagaaatagctttgtttgaagccttagcaagcgaaagtaagcacttcggaaacgataaagtcatttgaaaaatatccctcccaagttgaatataaactgcttttatattcaacttggtaattctcaaaataagttttttaaaccaaaggtttgctgtagttgtggagctgaacttactgagagcctttttgtttctttaagctattgtctgaaattgagaacgaaattattaaaaataaaggatttatttca

SEQ ID NO: 175181 - DNA, 333 bp, Homo sapiens
tgagggtggcctctgttttcactatctgccagccatgaaacagggctgcttcatccctgcacagatatcttcagtagaacttgtcagcaaccaacctcacttctccagcatgaatattagctctctctctgcatgcgggaggcagaataatgaccttctcaaagatgcccacattctaagccctagaacttgtgaatatgttatgccacatggcaaggtggggttaaggttttagacgaaatgaaagttgttaataagctggctttgagacagggagattatcctgaattatctgaatggccccaatgtaatcacgagtatccttacaagagg

SEQ ID NO: 175182 - DNA, 417 bp, Homo sapiens
ggaagagccatgtttaattcacctggcagtgcagtgtggccaggcagagagggagggcctaccctgtgcttatgatcccaccccagttcccctggggtgtgccctggcggtgaacaccaggaggctgcagtggggcccaacgtgaaagggaggagcagcctcaccggggccagatggggcagcagcagatattcacagatgtccctgtgagtaaccagggcagaggccaggggtctggccttccctttcttggagccctgggccagctgggcaaggcgttgagagaaagattacccggtgacctttatcaaagcagagtaaggagggctttattcagaaccatcactgtaggtaccaggaccccagcggtgggattttgtagtaggggaaagaaaatgggctcgacgttgaatacag

SEQ ID NO: 175183 - DNA, 275 bp, Homo sapiens
ggaggggagggtgttctagtgcttgggacgctgggaagctcctgtgttgcactggatgatgttcattccatgtcagtttctggccccgatatgagtagggggagcgcagagtacggtgaccccaactgctttttgtcctgggttggtacattggtgagggactctggctaaggctcttcatttcccctggagcaggggcagaagtgaggaggggagggtcggagtctctggaggcttttgccgtcctgctgggtcttttagttgctactttgagt

SEQ ID NO: 175184 - DNA, 477 bp, Homo sapiens
cgagcccaggggacccaggagccccaagtggtgactttcatacccaaggtagtcaggcctttggactacaaagtgtggattagtgaacggaacaccccaccgagaaagccaccccttccagtttgtctgccttttagcagctgaagctggggagggccgggacagggtgtgaaccccgttgctcccgttgcccgggttcctaatgacaggtgtgggagttgatgttcacacctgagctaatgacagagtcaggccagatggtgcaggtgaccgaggacagcctccagcctagtagagaggccctggaggagacccgctgccaccctcctggctgtgcgacctcagaggagctgcttggcttctctgagcctgttttctcacctgtgggatgggaataagcacggtgcctgcctggcgatgttggctcaggattaaatgaaataatgcaggggaaaggttgtgaatgataagcggccg

SEQ ID NO: 175185 - DNA, 264 bp, Homo sapiens
cagcggaacaagcaaaggaaaaagtaaagaagaagaagaagaaacagcacaagaaacatagtaagaagaagaaaaagaagtctggatcaagtcacaagtcaaggtaacatcaagaaaaaaagcaagaatgagtttgccgagttcccctgtgttagtagaattatttctggactttgagttgcctatcaatcccactgtgccagtaaggggcatagtggctgctggcaacttcaatatacatttttgtttgtttgcttgtccttc

SEQ ID NO: 175186 - DNA, 322 bp, Homo sapiens
ctatgaataggctgtaggttccttaattctcaatgcttgctcaatgcttctcttatagcaattgagtaagggaacctgtcagtagcaggaggcaccactggtttcatgttattaggatgggcgggttaggggaagttatcacttagcctgcccacatcaaaacacagcacacttcatgtaccttttttctgctgatcaatttcctctcatttttaagaatagttaagaatggcagagtagcttatcattttgtagaatacctgtagtgtcctgcaggttcccagtgaactttctccccagttttcatgccttactgtgtctt

SEQ ID NO: 175187 - DNA, 115 bp, Homo sapiens
atcacttgtgttaaaggttaatttattccagacttatgtgatagaagcttctgtttgtcaaatcctaatattagttttgttctacttttgttcaatttaatattcaaagccactc

SEQ ID NO: 175188 - DNA, 362 bp, Homo sapiens
atggtcatttcacttcattcacagttttggataatgacttggttacatgtgtgcaggttgaggctttgccaggtctgtcagaaattgtctgctctggggctaaatggtgattccataggttgcacggtactctgaaacattggagttctgagaagtcagaatgcagacatattgcagggtacttcaaacactccatttagactacagaaagcctggacctgaatagaaaggatcacaccctataggaagtgccatctataagactgagataaaaaccagaaacctagcccgataggaagtgaaggattcaccagttaatctaaccagtaactgatgaaggattaatcagtaatttagttgcc

SEQ ID NO: 175189 - DNA, 160 bp, Homo sapiens
aatggacaaatgcaatttggctctaggctgtgaactcagggactttatccaaatcaccaccattctaatttaggtaatttggcaagattagcttagtcaataaattaaatatatatggatttacaaaagattttcacatatccccacaactaccctaaag

SEQ ID NO: 175190 - DNA, 503 bp, Homo sapiens
  misc_feature (4)..(4): n is a, c, g, or t
ctgnatagtcgactcctgaggatcccccaggcatgcacttgggtgtgaatgttggttggctcagatgctggctgtggccttgaagtcacttttcagggctggactgagtcccaaagggcagtccctgggtcttctccattttcatcagatatcaaatggggaggatgagaggtcctttcgtggcatcagtatattagagtttgaaggattctttagaatcagctagttttcttactcaccttatagatgatgaaactgagagataaaatgattcacataggtaatgatccagacattttaagctctgtgttgaataatcaaagggaaaagctctttacttgaactttacagatttaacagattgttggacagaaaagaactcttgccttgaaattcctaacgcaggagtggcatataactggtatgtatgccaccataccctgccccggccacatgcccatagcagacattgttaatcgacccagcaccttttcctcagccaa

SEQ ID NO: 175191 - DNA, 166 bp, Homo sapiens
accctccatgaatggtgccctctccatagaggcagggtgtattaaactgaaccttgtttagagtccattcaattagagccctcctgacctctctattggtccttaactcctagaagccagaaaagctttcttctggctagacagattcaggtgttctgagttccaa

SEQ ID NO: 175192 - DNA, 563 bp, Homo sapiens
aaggcagcaaatacagaatagagcaaatctagggagggggaagtcaagttcatttctgaatatgtctccattgatctgacttcaatacatgaaagtgaagataatggttagcaaatacttggatatgtcgccctagatcgagaggtctgggacaaaaagttaactgaggactgatcaccacagtgatcagtgaagctacagcagtaaataacatggctccagaaagatgttgtaaagatgaaaagatctaaaggatgagcagagaaaaataagtctggtagagaagatggagaaggtgcttccagaggacaggaggaaaactggagaatatggcgtgtcagaagcaatgagaaaaagtgttttaaaatgtaatgagtgactcaacaataagaaaataaaacaacctgaagttaaaaacgaccaatagacctgaagagacacctcaacaaagatatatagatggcaaataagcataagaaaagatgctcatcctcatacatcattagagaattaaaaattaaaacaacaatgaaatatcactatatacctattagagtggccaa

SEQ ID NO: 175193 - DNA, 96 bp, Homo sapiens
gagccattgtggctccggccggttgcgcgggccctcggaccctcagagaggcgagggttcgagggcacgagttcgaggccaacctggtccacatgg

SEQ ID NO: 175194 - DNA, 660 bp, Homo sapiens
gtatttacatatgtatgcccaaagaaatgcttatgctctcatctgttagggagcaggaatttaactgtattctttcacaacatgcaaaggaactatagcaaaagaaaaactgcagagcttggggcttctggcttcccacatctctacttctttaggtagctaaactgtgccatcaccaggagacatttttaagccatgactcaatggcatccatggtaactttagaaataatttagcccaatgacagccaattaaataaataccacttataaatcagtttgttttaaaactccgtctttgtagttcttcttatacatcttaattgctccaacagagaatgctatcttctgcagtcttttctctttttatttaaagaaaatcagatatgtttcctcactaaatattgagaagtagaaatgcaagggttgtaaataacttactttaataccaagggctgtgaacttactcaaagactaaaattccatgagattaaaaatacctatgcaataattctaactgactaacactgttaactattgttatctcatctagttctgtattttggactccagttaacctatataaaacaaattgggccgggcgcggtggctcacggttgtaatcccagcactttgggaagtcgaggagggtggatcacat

SEQ ID NO: 175195 - DNA, 351 bp, Homo sapiens
ctgctcaagaatgttgctgcatcagatcgcccctcttttccttgcatcattaaaattccctgcataggccaggcatggtggctcacggctataatcccaggatttcgggaagctgtggcaggcaggtggcttgaggccaggagttcgagaccagcctggccaacatggggaaaccctgtctctactaaaaatatttaagaaattagccaggtgtggtggcacacacctatagtcccagctactcaggaggctgaggcaggagaatcggttgaacctgggaggtggaggttgcagtgagccgagatcacaccactgcactccagcctgggcaacagattgagactccgtctc

SEQ ID NO: 175196 - DNA, 594 bp, Homo sapiens
atacgaattcagctcgtaccctctataagggccaatcaaaagccattaaaatttcacagctaaatttgtatttttagctatgaaacggggttttcacctatgttggccaggctgatgttgaactcctcacctcaagtaatcccagcactttgggaggctaaggcaagaggatcgcttgagcccaagagttcaagaccagcctgggcaacacagggagacctcatctctacgataaataaataaataaaggaaaagagttaataagattggctgtcaggaataaaggtgaagaaagatcaagtgaaatcccaaagtttcttctacagcatgcttgaaacatgacctacagggatgggaccctcagaatgagtgtggagctagaggtgggaggatgtcatcagatggaggtatgttgagtgtgagatgagagcagcacgtccagagagagggggccagagggctcagctgtccaacgggggctgggctgaggcatgttacctggtgtgggctgagtccccacctgcgcacagtattttagcataagtaaagcctggttgaaattgtcattgtggacagcactgaaaaggaaatgaa

SEQ ID NO: 175197 - DNA, 234 bp, Homo sapiens
tccaggaggaagaggtgaatgccaacattggtgagcactgactgtctctgctgcatcctcaatcctggttctctttttggtaatgacactatcatctgtttaatcatggaggccagtcttctcatgcatccttatccttcatctctttatggccaaggtcgcctcaggccttcacagtctgatctttgcttgttcctttgatttgtccacttcaatgcattcccacctccacca

SEQ ID NO: 175198 - DNA, 112 bp, Homo sapiens
actcagagccaaacaccaaagcaaccattagcaatgatgcaggactttccggtccatgcactaattctgccactggctttatctgcttctttcatttcttcttggcctttat

SEQ ID NO: 175199 - DNA, 413 bp, Homo sapiens
gttttctttgaagcaatttgaataaagtgtttccaaattataatcaatgtaagattattgagattcatggttttggggaaaaagggtagaaagtttcttgtgggaagattttctaggctagcttaaagaacaggctgggcaaatgttcaccttagtataaagtgcacagatttggtgaggagattctgacaggacttcgcacatctaggcagtgaagatttgaaataatctactaggttttattgcagtcagtactaattcagcttcagaatcactggatggaattgtaagaagtttgttgaactttctctttcccttaggctcatatttttctgtaacgttatgagacaggtaaactagccctcctattaaggtgaccttcagaaccagtatagaattcaatattgtttttg

SEQ ID NO: 175200 - DNA, 508 bp, Homo sapiens
cgtgatgtgctggtttatagcagatgctgattactgtggtgtaaatactcctattatggccaatttcaagcaccaacagttaagatttggcttgcaaaattcctgaaaatttaacagtgatacatcttgagttagcaggtctgttacagaatggatgttcctgcttcatgtccttgggtgtggggagctccaggattggaagacacccctcaggagagtaatttctgggcaggcgtagtggctcacggctgtaatcccagcaccttgggaggctgaggcaggaggatcacttgagcccaggagtttgagaccagcctatgcaacgtatgagaccctgtctctccaaaaaaaattactttttaaagagtaattagctttgtcttcttactgtatttcctacctggggctcacagagttagtaatgaaagtccttaagctatttttgttattttagtggttcaaaactcataatagaaactgagcatacagccataagatggctgcagag

SEQ ID NO: 175201 - DNA, 518 bp, Homo sapiens
tggggaggacaggttggcccagatgcccccactagaccccttttatgcagtgcacaaaactctcagctgtgtgtgctgatcccaaccttaacttcctgcaaactagcctttcctgtgtgttcctggtgcacacacacgtgggcacacagaacaaaaggatctgttggtaacagggcttgtgtggctaccgtggttagaagtcttccactggaatctctcttatggaagtatctagatatgaagttagaagttgtagacattgactcttaaggtctcttgtagctctgacattctatgattccccaactctattctctgacattctgattcctcgactctattctctgacattctatggttcctcacctctgttctctggtggtctgtgattccttgactttgttctctgacattctgtgattccctgacttagttctcaagcagtttttctcccctatcttcatctcgtatcatcaccttaggactaggatggacaggactgatgtttccagccttat

SEQ ID NO: 175202 - DNA, 517 bp, Homo sapiens
ctgctgatgtgacaggaggcggagctcaggcagtaggtaatgctcacacagtggctgctcactccctgctgtgcagcccggttcctcctaacaggccacaggtcagtactggtcctccccagttcctaacaggccacaggtcagtactggtcctcagcctgagggtcagggacccctggtctagaggacaaaagtgttcaccacatattacatcagctaagaaaggcactttgattaacaataaatcctttaagggctatttttataacaaaaaggattaagtctattagtcattcagagcatactatagtgactttaatctgcttgccaagttaatgcaacaggaattacagtgggtctgagagaggtgaaggaggatggaagaaggaaaaaataaaacaatgataacttgggagagagaggcgcatatcaagagaaatgtagagaaggttggactgccccagtgcagggcttcaaacagctgtaaaacccctgggggaaagaaaggccaaagcta

SEQ ID NO: 175203 - DNA, 321 bp, Homo sapiens
agcaaatgctgccaatgtgggccaggcaggcgtaaaagattagacacccatgctttagactataagtgcagtcacttaaaagttgtgtttacaaataacctttagtagaatatggaacggaatataatatttataaagcaaggctgaaaacaaatatatataactaaataaaaatacataatcattcaaggaaaaagaaacaaaacaggcccagcacagtggctcatgtctgcaatccaagcactttcggaggccacggcaagcagactgctcgagtccaggagtttgagaccagcctgggcaacactgcgagacctcgtg

SEQ ID NO: 175204 - DNA, 726 bp, Homo sapiens
tcttgtgaaaactgtgtaataatccttggtacagttatcagttatttaaccagtcccctaagatatatatttacattatttctaattgtttcttgctgccagcaatactaaaatgaatttccttccttgtatgtgtgttatttcacacatgctgaacaattgtgtggttttgttgtccatatttaaatctgatctatctataatttatagatacaatctaaggtagggctccctctcctttcctaggttagataaccagttgtcccaatgtcctgcattgattaatcagtctttctaccaataatgtgaaatgccacttttactgtaatgaaaattccgatttgttcatcttttttctttgcatcagtagaatttcagaatttacacaaattttgtcattctatttcttcctggaaattttatttttcttactgttgttgtaaataattgagttttggtcttcttttcaatcacctgtctttttggtttctgtatatgaatgctgttagtaaattagtttgtacccaaagaatttattgaactatatacttaatttaaattacttaaaaaagcatatcagctgattttcttgggttttctagatacatgatttgcaaactccttatcaacttttataactagtccagttatgttggttattacctttgcagagtgttaaggaaaagtgacaaccacagacatctttgaatattcttgattaggtta

SEQ ID NO: 175205 - DNA, 206 bp, Homo sapiens
tacatattgccaagtaatactaactacctcaaaatggaattgtagggtggggatgccaatcagagcaaccctgagcatagtgttctaatcacggccaaatcgaattcacttgtagtgattctagatggagatttctaattagaacagggacaaatccaggttctgtggagcctaaagtttatgcaattctaacagccctccttggt

SEQ ID NO: 175206 - DNA, 170 bp, Homo sapiens
aaagtgattcatgggatcccctataatcgccctgctgaccttcaagctcgactcagggccaaatcgaattcacttgtagtgattctagatggagatttctaattagaacagggacaaatccaggttctgtggagcctaaagtttatgcaattctaacagccctccttggt

SEQ ID NO: 175207 - DNA, 566 bp, Homo sapiens
gcagtgagccgagatcgcggcagtacagtccagcctcagcaacagagggagaccgtggaaagccggagagggagacagaagagaggggagaggggagaggaaccacaagaaatatttgaagatataatgctcaagaacttcccaaaattcatgaaacaccacaaaccacagattcaagaatctcagataccctcaagcagaaaaataccaagaaatacagacctagggaattactactaaactgctaaaaattgaggacacagaaaatcttccatcagcctgaaaaaaaggaaatatttatacaggggccaaaaataagaattagaccttcctcttgtcagaaacaataaaagccacaacgatagagtaatatcattaaaggtatattagtctgttctcacactgctgtaaagaactacctgagactgggtgatttatgaagaaaacaggtttaattggcttctggctccacatggctgacaaaccctcaggaaacttacaatcatggcggaaggtgaaggggaagcaaggtgtgtcatatatggtggcaagaggaagggggaagt

SEQ ID NO: 175208 - DNA, 290 bp, Homo sapiens
cttttttgagtaggggattctgaaccttttgagaagtcataacatctttgataatgtggtctaatctgtccttatagttttcattataatcataagttctgtgaaagagaggtacagaccatcaggaaagtgcaaaccactgatccttaacaaagaggacataatccttggagggaacgtcaaaaagactttctaaagaaagtgaattcaaggtcaagtctgaaagttgaagagaacttaacaaaaagagggagtatttttcagatagcgattatattcagtaaatcctg

SEQ ID NO: 175209 - DNA, 638 bp, Homo sapiens
ttacctagtaggcatgtctatgaagctaacaccagaattcctccaatataggttgcaactccaataaagttcagaggtaaaaagaaaactattcaagaaacacattggactttcaggacctgcaagttaatgcagccatgccccaaaatacatcagacatagacataatctgcaaaacctaggagctaagtaataatccaatctctgttcttgggtcaggatatggagttttgaacttggctgagccacgaaagtagaaactgagacctttctaaaaagcttcaactctatgaaaattgctagtgcgaaagcagaaaacagtaactacagtatcttataagctaaacataaacgcaccaaatgactatacctagtcccaggaatctacccaagagaaataaaaacatccacacaaagacatgtctacaaatgttcatggtagcattattcataacagctaaaaaccggaatcaacccaaaccaccaaatgcagatgaataaactgcagcacaggttgagtatcccttatccaaaatgcttgggacgacaagtgttttagagtttggaatagttgcattttcaaccctatctttacgccacagagcagagaataagccaaaacaccaccaccaccacca

SEQ ID NO: 175210 - DNA, 178 bp, Homo sapiens
tgagaatttacacaaggttcatcctttgtttcacaaaagtatacagtggcttcagctctccattccttagaacatcgtttcctgccctgcatgattagctttggctagaaggtgcttctgtaacatctcacattgtgtatctcacatccctctttgtacctcagctctgtgtattctt

SEQ ID NO: 175211 - DNA, 366 bp, Homo sapiens
cctatgtgtttctctgtttgcattgctataaagaaacatctgagattgtgtaatttagatagaaaagaagtttatttggctcacagttctgcaggctgtacaagaagcatggtgccagtatctgcttcagatgagggcctcagaaagcttccatttatcccagaaagtgaagggggagcatgtatgttacatggtaagacatggagtaagagagagaaggggtaggttccaggctccttaaacaaccagttctcacatgatcccagagtgagaactgattgccgtgaggaaggcaccaagacattaaggaggaatccactcccaggacccaaacacctcctatgaggccccacttccaacgctgga

SEQ ID NO: 175212 - DNA, 393 bp, Homo sapiens
gttttgcctccacactcatttgcgcaatccagcttcccggacccctgtgacgctccaagaagacgaggaggcaaaagccggcagttcaccaacaggaaacacagaactgtctggtgctagcaagacggccgtgtcgccaatcaaagaagcgcaaatggaaacaagagactgtcctcatccttccccctggcacagattaaaacgcctgataacaggaggtgccagccagggtgttgggaacaggcccagcggctggcaggagtgaggagtcgcacagacaagatacttctgtggagggcaggttggcaggcccggccagagccctgaggaaacctggcccctcccctctcagaatcttccaggaattcgcccgacggctggagtgagaagcct

SEQ ID NO: 175213 - DNA, 198 bp, Homo sapiens
aaaggagacacagcaaggactctcaaggtatttatctgatggagaacacacacaagaggcagtcacagcacagaaaagcaagtgctacacaggattacaagaacgcccaggagaggcatccaatctatgctgtagcatcatagaaggcctttcagaggcagagggacctttcccagaaggctgaagaatgagcaagag

SEQ ID NO: 175214 - DNA, 305 bp, Homo sapiens
ttatgaaatcttaaactgaacagaatagctactatatgagcctcaagaaccaactgactataggtgattaaaaacatattgattgaagctaaggacactgtgtaatagagacatatctcattacacaacaattaaccctcaaataggtttccaacaatcaggtggtatttatttaatggacagtaactgctttatgaaatataaattaaatacatacacaggaagcttcatttatgaaacttccattttcaagtggaatggaggccaaggcttgaccaaaagtctgatacttctcatcaccacag

SEQ ID NO: 175215 - DNA, 233 bp, Homo sapiens
ttggcctttccaagtgctgagattacagccataagccactgtgcccggctcattcggctgttttgattgttttagttagccttataattattgtcttatatcattatgaatttttttaacacttatagctgctttctatttcatcatatagtataaacgtgaaatattctgggggaggtaaagtatttaaaaatcgattaaatggtcatccattgaattgtataaaaacttat

SEQ ID NO: 175216 - DNA, 601 bp, Homo sapiens
agagacgatgtctcactatgttgccctggctggccttgaactcctggccttaagcaatcctcctgccttggcctcccaaagtactgggattacaggcataagccaccgtgcctgaccaagatgcagaactattatatcaccacaaagatttcccttgttacccttttacagtcacatgcacagccctccctgctcaccatccctaacatctaacaaccactaatttgttctctatctcaataattttgtcatttcaagaatgttacatatatgaaagcaaacagtatgggaccctatgaaactggcttttttccttcagtataatgtccttgttattccctgttaattcaagttactgtgtgttccaatagcttgctcctgttctggtcaccctgcaaatgcaacagggactcccaaccaaagtttggtttggatggtgaaactgatgacgccacacacacacagcaagaggatatgaaacgttttcttacatacttgaagcctagggagagtagaacggccctattaagcagatctgaaaaggcctgagaaagcaaggaaaggagactggccttggtgtttactgtggttaggaggtggg

SEQ ID NO: 175217 - DNA, 474 bp, Homo sapiens
ccacgaacgcggtatatttctcaagttctaacacgtcagcgtaactgagtcttccaatccacgaacgcggtatatttctcaagttctaacacgtcagcgtaactgagtcttccaatccacgaacgcggtatatttctcaagttctaacacgtcagcgtaactgagtcttccaatccacgaacgcggtatatttctcaagttctaacacgtcagcgtaactgagtcttccaatccacgaacgcggtatatttctcaagttctaacacgtcagcgtaactgagtcttccaatccacgaacgcggtatatttctcaagttctaacacgtcagcgtaactgagtcttccaatccacgaacgcggtatatttctcaagttctaacacgtcagcgtaactgagtcttccaatccacgaacgcggtatatttctcaagttctaacacgtcagcgtaactgagtcttccaatccacgaacgc

SEQ ID NO: 175218 - DNA, 102 bp, Homo sapiens
gatgcttctcaaatcatctgtaatgacttttatttatagaaaaggtagattattcattagtttttatgaaaaacactcagtttaaatagccgggtatggtgg

SEQ ID NO: 175219 - DNA, 185 bp, Homo sapiens
catgttggccaggctagtcttgaactcctgacctcaggtgatccacccgcctcggcctcccaaagtgctgggattacaggcgtgagccaccgcgcccagccatctaagtcacattttgagaatccacttgtccgtgggtggacaggcgggttgttcccaccttttggctgttgtgaattgtgctg

SEQ ID NO: 175220 - DNA, 264 bp, Homo sapiens
catgttggccaggctggcttcgaactcctgacctcaagtgatccacctgcctcagtctcccaaagtgctcgtattacaggcgtgagccaatgcacccggcccttggtgtggatttctttgggttttcctgtttggagctgacttactttctttaatctgtaagtttatgtctcatcaaatttgggatgttttcagactttgtttctttgaatttgactcatcttatttgcatcatttgatcgtcttctccctctctctcgcgtt

SEQ ID NO: 175221 - DNA, 483 bp, Homo sapiens
  misc_feature (445)..(445): n is a, c, g, or t
  misc_feature (459)..(459): n is a, c, g, or t
cagggaaaccaatggggttgccacagagtaagcaaagggaggagtggcagatcttgaaacagactttagctactattaataactggagaacagataataagaaatcaagggcagaagcagagaatgcacttcaaaagaagatattgcaggccgggcatggtggctcacgcctttaattccagcactttgggaagccaaggcaggcagatcacttgaggtcaggaattcaagaccagcctggctaacacagcgaaaccagtctctactaaaaatacaaaaattagctgggtgtggtggctcacgcctgtaatcccagctatttaggtggctggggtgggagaatctcgaactcaggaggcagaggtttcagtgagccaagactgcgccactgcactccagcctgggcaacagagcgagactccgtctcaaaagataaaaaacaaanaacaaccttactcntcaatccctggcattccctactca

SEQ ID NO: 175222 - DNA, 185 bp, Homo sapiens
gggtcaccatctagattattttcacaatccccactggtctctttgtcttcccttccaccctccatgcttaagtgagttattttcataaacttcacgtcttatcatgagtcctcctcaaataacgtggaagacctctgttcccctcacactcaagatcacccagcagggcttccaggcagctcaga

SEQ ID NO: 175223 - DNA, 642 bp, Homo sapiens
gatggggggtggagaagaccaagtgtaactgaccaccttgtcagaagcagccagcagtttgatgcggcttctgaaaatgacagtgctagtgttaaagctgaagttccagtggtttcagcactggtcctccaatatctaagatcagtaaataacggcccatgggccaaatgcagcccatagcctgtttttgtacgcctctccaactacaaatgggttttgcatttttaaatggttggaaaagaaaaagcaaaaggcacataatatttcgtggcatgtgaaaattttatgaaattcaaatttcagtgtccacaaataaaatgttactggaacacagccacgcctattcatttacatgttgccctatgcctgctttcatgttatgaggtcagagttgagtagttgcaacagagaccttacggcttgcaagtctaaaatattgctatctggcggtttgcagaaaaagttagttgacctctgctgtaacgcattgcgttcaatattttctaaagggcaataagaaagaggaaccacaggaatggtgagggagacaaaagcatttcataaattcaatctgaaggaattgagagtagcaagccagtggaagagaagatcaaaggagaacaatctagatttcttttcttt

SEQ ID NO: 175224 - DNA, 360 bp, Homo sapiens
aggatactagtgctctaactgatgaaacagacttttctgacttagaccttaccactgcatttgactaatagttgcttttcaaggactccctagagataattgagtgctggttgaaaagtagggccttcaaggatatgttttaagttctccgcaatgatataaaggacagcccttagctggagccttcaagaagtttgtataggaacttgttcttatccttatcagttcagctaatgagaggcaaattctgagaggcaaaattcttataattttctaaggatagttataaaacctttttctgctaaaattgtttcaactctgggtggactgtcatttgtccccttgcccccagtagttgtc

SEQ ID NO: 175225 - DNA, 411 bp, Homo sapiens
gcagacgctggatcagagcacggggaaggccgtggtgaccggggattgaatgcagggtgaggaagagcatggaatgaaggatgagctttagcttagcggcttgaggaactgggcggtgctgttgactgaggtggggtgcaccctagaggaaaaggttttctaggagcagctagcactctgctttgtgaaatttgagctgtccattgaacaatcagtggagacactaaggaagcagctggctattggagtcggaccgaggggcgagatgagggtggggtgtagatttgggagccatcagtatgtggatagtatttaaggccacaagactgggctgtatgttatgtgtcacaaaggtgaagtgtctcaggtgtccccacaagccgacagtaagtgctgaaccaaacaaccacg

SEQ ID NO: 175226 - DNA, 524 bp, Homo sapiens
caatacaaccatcacataaattttggagcactcatattctaaactctggacagattcttgactaatttctgaagtagagatgccaaactcatttttaaacatgactgaaactggcataaaaacagatacatagaccaatggaacaggatagagaacctagaaataaatctagacatttacagccaactcattttcaacaaaggtgccaggaatattcaatggtgaaaggacaatctccgaaaaaaacagtgctgggaaaactggggatctatatgcagaatagtgaaactagacccccacctctcactctatacaaaaatcaaggcaaaatggatgtaatactaaaatataagacctaaaactatgaaactactagaagaaaacatgggtaaacacttcaagacattggtctgggcaaagactttttgagggtaagtcctcaaaaacacaggtgacaaaagcaaaaattgataaatggaattacatcaagctaaaaagcttctgcacagcaaaggaagcaatca

SEQ ID NO: 175227 - DNA, 667 bp, Homo sapiens
tgatctcagactgctgtgctagcaatcagcgagactccgtgggcgtaggaccctccgagccaggtgcgggatataatctcgtggtgcgccgttttttaagcccgtcggaaaagcgcagtattcgggtgggagtgacccgattttccaggtgccgtccgtcacccctttctttgactcagaaaaggaactccctgaccccttgcgcttcccaagtgaggcaatgcctcgccctgcttgggctcacgcatggtgcacacacccactgacctgcgcccactgtctgacactcctagtgagataaacccggtacctcagatggaaatgcagaaatcacccatcttctgcgtcgctcacgctgggagctgtagaccggggctgttcctattcggccatcttggctcctccctccgtccacatctagaatggagacttggaagatattttgggggatcatcctccttgaagctggttttggcttcaagtcacagaggattggtaatacctgggtttctttaagctgaaaaccatctagtggtagtgaccatcttaaaaggaaatattacagaagcttcagaattaataagaggcaatcgattcattgaaggagaatttagtcagaatctggaagcttatagtgaatggtgggcacttgttttttcagtactta

SEQ ID NO: 175228 - DNA, 489 bp, Homo sapiens
ctgtcctctgcagggactccttaagagggaggagtcatgactgacccccagctttccaacacaggttgggtgagctgtgatgccaccaaccaaggcaggaatgcaggcctgtatgtcagtgggttgtggggaaggctgggttttgaataaactgaatgtgagatggcctcagaacatccatgcagaaacgtaagcaggcagtggaaagtaagggctagagagagatctgagtgttactgacattagggtgtagctgaaacccgaggcatggacgacaacgcttcaggagaaaatccagaatgacggagatgctggagacagaagctggtacgcatgagcacggagggccagcctgacagaggagtgcagaggcagagaaggaaaaggcagaaagaaaaacccaggagtgcattattgcatgtggcaacagtccagaaggggtagtgatcagtaagtgaactgaaagggtcagtaatctaagggctaaaa

SEQ ID NO: 175229 - DNA, 314 bp, Homo sapiens
gaaccactgtgcctggcctttacctttcctaaacatcaatttccttcttaagcatttatgttcagtttttccagttttaaatattattttcattaatagtaacttctagtatataagttactattaatgaaaatagcttcctgcttctgccagggtcttctttcaagctcatagggctgttggaaactcacacggatgtcatttgatcagcactcaggaggacctcatatattgtaaaacgctgcttcctgcttctgccaaccttctgctgcttcctgcttctgccgcttcctgctttgctgccttcctgcttt

SEQ ID NO: 175230 - DNA, 284 bp, Homo sapiens
ttgagcttgactctagtctggcacggtgaagagacatgagaggggcagaagcaggaagcgcttcctgcttctgcccaggtcttctttcaagctcatagggctgttggaaactcacacggatgtcatttgatcagcactcaggaggacctcatatattgtaaaacgctgcttcctgcttctgcccccctccgtgcggtccaacatccgggtcacagtcacagccaccgcggtcatcatcaacctagtggtcatcatcctcctggacgaggtgtatggctgcatag

SEQ ID NO: 175231 - DNA, 405 bp, Homo sapiens
accaacaaaatgggtccagagtacatgtaccgtttgagatttgacttaccagtgagtatatgagatgactcataggagctaggattagaaaggtagtgttggccaggttgtggaaatgccgtggagtagaactgaattttagtcttcaggcatggtcactgttggcattttctgagcccaggagtgatagcatcagagctgggctttgaaacgttgaatggatatgtgattggggtggacttaaaaggagaaatactggccgagcggaccggtccgctcggaccagcctggccagcgtggtgaaaccttgtctctattgagaatacaaaaattggccgggcatggtggcgggcgcctgtggtcccggctgctcgggaggctgaggcaggaggatggcttgaatgc

SEQ ID NO: 175232 - DNA, 450 bp, Homo sapiens
cttatcctgcactcaaaataattccctagcccaagaagtgaatgaactgagaagtaattactgatgatcctctggctacacccaggcctacggttgttcagccactctgcctcagccccaacctcaagcaaaaattacttttaggagctaaataacccctttgctgaccaaaattgctcatttggaagccaggatcctctctgcttaggaaagcttgggtattccatggttatctttatcgtggggcccaacttgaagtcagctcaaagtcacggtctaaccataaaccaatttgctgttttcgtaaactgtctgcaaacaaaacataatcgtttggttttcccgttgtcctgaagcaaaacaaaaatatttaaagtcactcatatgagaatctaacaagcagtttaaagaggagtcaaaatatactttgtactctggatggaacaggta

SEQ ID NO: 175233 - DNA, 343 bp, Homo sapiens
actgatttagaataatcagggacaagagacaaaaagatggtctaccttaacactgcaacaaaatcataatgctcatctgatgaactggggcatatgtgcatacagctttagagactcaatggggtcatctgtcactggtgcatcccatgcggacaagcaaacggaacacaccaatttcaggcagtttaagattatcaagcaggttttgtaaccttcccacatcttattaacaccactcatttgcttgacaaacctgccctctggtcttggactgaaggactgaggcatgagccctgccctgaggccagttataaatttcaaactgagccacccccaaaaaaca

SEQ ID NO: 175234 - DNA, 387 bp, Homo sapiens
ctaagatcaaggtgccagtagattcagtatctgttgagggcccacttcctgattcatagagagctgtcttcttgctgtgccctttcatggtggaaggggtaagggaagtctcctttattttatttttttattttatttattattattattatttgagatggaattttactcttgttggccaggctggagtgcaatggcacgatctcggctcactgcaacctccgcctcctgagttcaagtgattctcctgcctcagcctcccaagtagctgggattacaggcatgtgccaccatacccagctaattttgtatttttagtacagatggggtttctccatattggtcaggctggtctcgaactcctgacctcaggtgatccacccacct

SEQ ID NO: 175235 - DNA, 490 bp, Homo sapiens
atgggatctttttataatattttctaagtagttattaacagtatgttggaaagctatttgattttcatatatttatttataactatctagtttattaaacttactttctagttctgatggactttcagttgattctcttgggttttccagagagctaatcatataatttgaaaagaagtatagtttaaacccctctttttccaatacttatatttatttcctttcttgactaattaggtaggtgagcaattctagaatgtcaaatagtggttgtgatactgaccatctttaaaggggttctggtcaatatttctccatcaggttattaagtatttttatctggaatagatattgaaaattgccaaaagcagtcaaggtcagtggctcatacctgtaatcccaatgctctgcgaagccaaagtgggacgatctcttgaggctaagagttcaagatcagcctgggcaacaaagggagacattatttctacca

SEQ ID NO: 175236 - DNA, 563 bp, Homo sapiens
agcctggtacatttttgagaattttgcaatggatatcatgatatcatgttggtagcttgaagacagctacagtggtggtatttacaccatagaaattggcaaacgttaccaatcagaaattttttctttctcctggagagccaactgttaggcatttccagcataccactgctttgcaggacaaaatctgaacacctacgaaaatctggccattctgcaaactgtcacaccgaattgaggagcagttgcatgtctcttcctgaaagaggcaatcatcatctcaaacagcagttatatgcaaacgtcacttctggagctgggaaagcatggtctgtttctggcagtagaatgatcttttatctaattaagctcaacttgggctaatgttgtgagcgtgcactctctgatcagacaccaacagctggcggctgaggtgcatgccggggtggcctgagaagctggtctggagtgttaaaagtgctgtgggttgcccaccatctctattgagagggaagtctcagaaagagcccagccatgcagtcaggaagttggggttcaagccc

SEQ ID NO: 175237 - DNA, 448 bp, Homo sapiens
tcaaagtactgggattacagacatgaaccaccacatgcagtctgcaattaccatttcttaaaacacagtatatgccaggcaaggtactagtgtttttttacccattatctcaaacatcccttatcctgggtcaagaaggttgtccaagatcacacaactcataaatggcaaagttaagattccaacctgaacttacacatgtgaatccaaatgctatatatttcatgctacaggcccccaaatttaataattatagctccttcaagtccaggctttactactatcaaacatacaagccctgggatggcaaaaaggtttcaccaactggcaatggtttcctggaccctgtgttaaggatggtatggtgccctgtttgtcatgaggaagtatgtgggataacataagcaccttgcagtctacccactctctgtccaaactttctcattca

SEQ ID NO: 175238 - DNA, 419 bp, Homo sapiens
ggacatcaaaagcacacacaacagaagaaaaactaaacaaattgactacatcaaaattaaaaactttatcaaagccacagtaagacatcccctcacacctgttgggatggctattatcaaaaagacaaaaggtaacaagtgttggtgaggatgtggaggaaagacaacccttgtacgctattggtgaggatgtaaattggtacagcgaacatggaaaacaatatggaaggtcctcaaaatactaaaaacatgttatgatccagcaattctacctctgggcatatatccaaaggaaatgaaagcagtatctcaaagtgatagctgcactcccatgttcattacagcactattatatgtatatgtgtgtgtgtgtgtgtgtattaattatatagcaaagacatggaaacaactaagtgtcc

SEQ ID NO: 175239 - DNA, 304 bp, Homo sapiens
gtactacctgtaagaggatgtcaattcaaatcagatgttgggaacaagaagggaaggaagaaaaggcagttacaggagaatgtgagtactgctcctagtaggaaaccaatggcaataactgaaatcagaggggatgatgggcattgcacgggaggacaagtaaaggtaacaactcgaatgcaaacacaaaggctcccacattctggagataaccaggggaaaagatgtatgtgcagtgaaaactgcttctattgggtagaaaaggggcaggatgccctgtaggaaaagcagcccctggaggaag

SEQ ID NO: 175240 - DNA, 549 bp, Homo sapiens
ggtatgccttctggaaaattccaacctgacccttgttggaactgtgaaaaggggacctccagcagctctgtcaggattggccatgcctccagttctgggagtgggctgaccaactatcttggttttcttggggttgtcctggttttaaaacctgaagtctcacaactcaggagaccccctagtcccaggcaaatggggatggttggtgactctcccaggaagaatggttgctttgccttcatctccagcttctagaaaggaagacatgagcttggggcaaggtgagaagaaattgcagggatttggggagctctagacagccaaggggtggtgcttcctcggctttctggctgtaacaggaagtggggctcagacttgagatgcgccagtttctgctgaatatgagaaagggctgaagtgtgagctcctggtcacaagaatgttcaccgcagccgcagccgggaggaagaatggatgcctggctggggcccaggggcctctatggccacgcccacttccaggctatttcctacaaaagctctacctctt

SEQ ID NO: 175241 - DNA, 541 bp, Homo sapiens
ccatgtctggcctaataaactcggagataaccaattcgaaacaaatagttgatatgttaatgtaaaacacatacgcattctcttagattgcattgttcctttaggagaaagatgcattcttctgtatgttaaatgttgttgtatacagcaaatatgattccagcaaaatccctatatgtgatcactagcctaaaaccactcctgtcaagcaatcactttcagcaaagtcctaatggaaagtttcagatttctctcataaagttaaagttcatgagattgtgcaagtacttgttgacaaagttttgaaaactcaggaaaagtaggtttttaatgtgttgctagtagatataataaattggttttaattgtgatttttgatgttgtgaggtttggattttgttcttttatatgttctttcagtcatcattaaacatttttaggtcttgattgaggaggttgaagttagagtcagtgcctgagactgtgcagtattaaaattatgagaggactatgatatctcatttttgggtaaaatctgtaa

SEQ ID NO: 175242 - DNA, 325 bp, Homo sapiens
ggaggggattaatactcgggaggctgaggcagaagaatggcttgaacccgggaggcggaggtggatgtgagccagagatcatgccattgcactccagtctgggaaacaagagcgaaactccgtctcaaaaaaaaaagaaaaaaaaatgctaatatcaaaatgagtactacattagtggatttaaacatatttcagactagagttttaaagtaagacaaagttattaagtttatagttaagcttaggagcattttgaaacaaagatgctttttagagaaaaagttaagtaaactatggtccaaggttaatgaggagtactatagag

SEQ ID NO: 175243 - DNA, 320 bp, Homo sapiens
ggtgaccctagaggatacggtattgagtgcatgtgattggacagcaagagagtgggcaagccagggacagccaccacagttaaagtactgtgggccatgccttcatgcccccctcactcatggaatttttctggactgagccagagtctggagaggtggtgcagctgttccctaagtgagtggggttcccctacctttcactcagggaatgtttaatgttttccttttacaatttccttcttcagcttccctctctcctaatgatgaatcctgtaaacttttgcattgcctatgttctgctggaaaccatgttactgtgt

SEQ ID NO: 175244 - DNA, 603 bp, Homo sapiens
gggactataggcacccgccaccacgcccggctaattttttgtattcacagtacagacggggtttcaccgtgttagccaggatggtttcgatctcctgacctcgtgatccgcccgcctctgcctcccaaagtgctgggattacaggcgtgagccaccgcgcccggtggaaaggacacttttttacagtatgagcactgaaacaaaaaggcaaagcaaggtctgttcaccttcagctgagaacgtgagcgatggttcacgcgagtacatgcgcaggttagtcatataagcaaattatgtggcacagaagtttggcgtatggatcatttcatcaacccagaaacgacataaaaacaggggactatctcctctgatgtgatttaactaaagtattccttacactcttcagtttgcagaaagagctgaattactcaaagacatacaccacacaaaacattcgtgtacttcatcgaggcctgctgcctggaatgcatatgtgatggctggaaatgctagctctaattcggatcactgaggaagagtcccaacaccatctgcgcatgcgggcatgagcctgcccgcgctgcgggcgggacatgtacgtgg

SEQ ID NO: 175245 - DNA, 142 bp, Homo sapiens
tgaggtcagtgaatacagccctccacctgtgtgtccttcgggtgtgaggggttttgctgatagagcagcaggccccgtcccaccctttatgcatctctgccccccacctcgtgctccagctgacctctcccctgtggcatgg

SEQ ID NO: 175246 - DNA, 375 bp, Homo sapiens
ggggagatgcaatggtggaatgggtggccaatttaataaaacttttcacaatggcaaacacatcaacaataaaacatatgtcccggaaattgttttaataaactcaacaaaacactgttaaagaggccaggtgctgtggctcacacctataatcccagcaatttgggaggccaaggcaggtggatcacttgaggtcaggagttcaccattagactctcacatttacatatattccggaagatgtgagagtctaatggtgagctctatgaagatgaattggacacagttcatacccccagaggaatctggtaaagaagacaaacagggccaggcgcggtggctcacttctttaatcccagcactttggggggacga

SEQ ID NO: 175247 - DNA, 330 bp, Homo sapiens
cctctctccaagtccctgtgaagctacaaacaagcggtgtttggaaaattctaataatagcatcaaagcggaacgttctgaagcatgttttgtgccccatgtagcagaagtagccatgggccctcctagtttcatcacctagggagaacaggtaaaatacaggtagagaagtaagatcagcctactgcaagctttgaaagctccagcccaacagctcccaaaacctctacttaggcaagaatcaaaagatatgaaaggtttaagaatgaagacctgggtagagtacagagtgaggaacaagacagaaaggccaagttttggatttcccaa

SEQ ID NO: 175248 - DNA, 244 bp, Homo sapiens
gaaagaaaggaggagggaaggaaggaaggagggagggagggagagagggaggaaggaagggagggaagggaaggaaagaaggaaggaaggaaagaaaagagaagggaagggggaaagaaggaaggaaaggaggaaaggaggaaaggaagaaaggaagaaataaatcccctccaaacactgtagcatgatggaaagcctcataatctcctaactcaagtacactactgaaattcacctctagatg

SEQ ID NO: 175249 - DNA, 311 bp, Homo sapiens
gcttttgcgagaataccaatcactcctggtctcaagaggcttgtggtctgctgcagatggacaagtacataaattaactgaaacataaggcaaaaagtaagatgatcctgtaagagttttttttttttgtgagacagagtcatgctctgtcacccaggttggagtacagtggtgcagtcagtttgttgcagccttcacctcccaggctcaagtgatcctcatgcctcagtctagtgagtagctaggactaaaggcacatgccaccatgcccagttaatttttttggtttttaatagagataaggtctcact

SEQ ID NO: 175250 - DNA, 286 bp, Homo sapiens
aaggaagtttgatcgactcacagatctgcatgtctgggggaggcctcaggaaacttacaattatggcagaaggggaagcaaggcacatcttacatggcagcaggagagagaaacagagagtgaagcgggaagtgccacacttttaaaccatcagctcttgtgagaattcattcactatcatgagcacagcatgagggaaactacccccatgtaatacctactccagtgacaatgtaggtattacaatttgagatgggatttgggtggggacacagccaaaccatat

SEQ ID NO: 175251 - DNA, 208 bp, Homo sapiens
gtagctcctgaccattttttaataagatctttcagattttgtccgttcattgaaacttcatctacgtgtaaagatttgaactatcaggtcattttgacatgaggtgatggttgaaatagtgtctggaaacaaaaccagtttaaagaaaaatacactttacagaattatgcacagtctcagctcgagagggacattgcaattttttttc

SEQ ID NO: 175252 - DNA, 257 bp, Homo sapiens
gaaataaaggggtagaataaaaagcatcctgttaggcagtggttttcaggactggccagacattgcttagggaatttctcaatctaccaatgcccaggcccatcccaaagcttctgaaattactggcctgtagaggggcccagacaggagtttttgaagctcttcaggtcattccaatgtgtggcccaggctgagaactgcatttgggtaacatgacagatgtgagtggggacagtaacccccacactactccccgc

SEQ ID NO: 175253 - DNA, 494 bp, Homo sapiens
cattcaaatacagcagttttctgtgcgacttttcgcaaccatagctactttgatttctaattacatgattagtagctaacctgattagctctgcctgagatacaaaattcaaatagcactttgctacagaaagtggaatttactgttagaataaacatttcaaaatagtgtcataaatattcctaaagctagaaatgacctggaatgttaatcttgtttatccttctgctttaggacagatctaaataaagacaattccaatcacatattctgtttctgagctattccaatataattaaatacaacaaatatttactgagaatttatatgtaccaggcacaatatctagaaaaagaaaaactaaattcacttggcaaacttttcttactctttaaaattgttaattatgtttgaagttgtaaagaagctatcctgatcccccttccttttttattgttttactaatttatttgtctttttttaaaaaaaaaaaa

SEQ ID NO: 175254 - DNA, 708 bp, Homo sapiens
  misc_feature (60)..(60): n is a, c, g, or t
  misc_feature (89)..(89): n is a, c, g, or t
  misc_feature (176)..(176): n is a, c, g, or t
  misc_feature (369)..(369): n is a, c, g, or t
agcggagttggaacgatggcggcggcagctgccgccgggcctagcccggggtctggaccnggggactccccagaagggcccgagggggnggctccggagcgtcggcggaaggcgcacgggatgctgaagctttactacggcctctcggaaggggaggcggcgggacgccccgcggngcccgaccccctggacccgactgatctgaacggggcgcacttcgacccggaagtttacctagacaagctgcgtagagagtgccctctggcccagttgatggacagtgagacggacatggtgcggcagatccgggctctagacagcgacatgcagaccctggtctatgagaactacaacaagttcatctcagcnacagacaccatccggaagatgaagaacgatttccggaagatggaggatgagatggaccggctggccaccaacatggcagtgatcaccgacttcagcgctcgcatcagcgccacgctgcaggaccgccacgagcgcatcaccaagctggcaggggtccacgcgctgctgcggaagctgcagttcctctttgagctgccctcgcgcctcaccaagtgcgtggaactgggcgcctatgggcaggcggtgcgctaccagggccgcgcgcaggccgtgctgcagcagtaccaacacctgccctcgttccgcgccatccaggacgactgccaggtcatcacggcc

SEQ ID NO: 175255 - DNA, 155 bp, Homo sapiens
aatagagaacccagaaaaaagccaaatgcttaaagccaactgatctttgacaaagcatacaaaaacataacctgtggaaaggacatcctgtttaataaatagtgctgggaaaacaagatagccacatgtagaagaatgaaattggatccctatct

SEQ ID NO: 175256 - DNA, 502 bp, Homo sapiens
gtcatcttagcacagcatccagagtaaactcccacagctgcctgatgtcaggtgcaataagtggggagggagtgtagggcccatcatgcccagcatgtgtaatctccccaagggctgaggagatcagcagtaccttgggcacacctagaaccggggctggctatataacctgagggtcccagtgcaaaatgaaaatatagggctcctttttcaaaaaataggaaaaaatgcctttaaaggtcctaaaatataaaggttttcctatttgtctgcaatctctcaacttgtcatggtattttttatttgctatttaatgttattctaacattactgttttccattttatttgttttctcttattatattccttatttctgtcctgaatattagcccttctgcagacagaaattaaaagaacagagtagttaaatgattgcaaagttttccccactaactccatctctataaaaaattaggtataacagttgatttcttgttttaa

SEQ ID NO: 175257 - DNA, 409 bp, Homo sapiens
gcaggaacatcttacaaagttggaacagaaggaagagagccagagggggaaggtgccacacacttttaaacaaccagatctcatgagaactctgtcacgagaatagtaccaaaaggatgatgctaaatcattcatgaaggatccaaccctatgatccaatcacctcccaccaggccccacctccaacactggggattacaattgaacatgaaactcgggtagagacacagatcccaacccttccggcagaagagggagaaggcagccattttgaaccacagcaaagcattctgttcccgtaacaaggcctttgccatcaggagaaactattttaccagagcctaatctgttgggattttatcagagactaacctacctgggagaagggaaataaactccagcccaccct

SEQ ID NO: 175258 - DNA, 515 bp, Homo sapiens
tgctttgttccttcttgtacataatcctcatcttagcagattctgagtcccactccttgtctcttggtccattccagctgatgccctatgtctcattccaagtgacactttccctaggaaaactctgaccccccccccattacttttcattgttgtaactcattctgttataattatttaaagtcctgcaccctctattagactgtagagttctcgaagactgcagcattacttttatctgtgtattgcaaacatctaccacagtacctcacatagaatcgtcatttaatggttgaatggatgaattgaatgtatttaaatgaggatagacagatggaacccaaccagccatccagactggctggagactttagtgggacaatatataaaactaaagtattagaatgagaaaaaagactttccttagcagacacaggaaaggacaaacactggtcttggtcctaggtaatgcaagggaactggcacagggatatgtctgggactactgtgtggta

SEQ ID NO: 175259 - DNA, 464 bp, Homo sapiens
gtagccaggctactctgagataatattagatagcaaaagtagtacaaacatgaaaacggatctaactcccaagtatgtagaagaatgaaggtaatggtgtcggtatgtgtgagtatgtgtgtgagtgtgcacgtgtcagtatatacatgaaaatgggaatgtatgtgtgtgtgtgtgtgtgtgtgtgtgtgtatgtatatgtagtagtattccatggtgtgtgtgtatatgtatgtatgtgtgtgtatttatatgtctcacattttctttatccactggttgattgatgagcatttgggctggttctatatttttgcaattgcaaattgtgctgctatgaacatgcatgtgcaggtatcttttttgtataatcacttcttttcctctgggtacatgcctagtagtgggattgctggatcaaatggtagatctacttttagttctttaaagaatcaccacactgt

SEQ ID NO: 175260 - DNA, 316 bp, Homo sapiens
ttgcccaaggtcacacaggtggtaatgcagagagtggatctgaagccacattatctaactcattctggagcctaaactcttaatcattaccgttgctgcctctcctggagaggtccagaacacagcttcagcagaaatccaggaaggtccgtactcacagactgaatagtatcgctgcatggaggggcagtgtccctcttaatctaatactttgaggttgaaatgagactttactaaaaacagctgaatagcctgcctcccatttcctccctttccttaaattttccattttcactcatttcttaaatacagattg

SEQ ID NO: 175261 - DNA, 358 bp, Homo sapiens
tagaatgccatggagttaatagcttctgtgatcctacatgttccaagataactgcagcagtccaaaaagccagtttcctttctggtgtttgtgggcatacactttgttctgctcctgagtaagtcacactttgtcttccaggtcctctaggatccctgcaatgttccatttgttgcctgggcattggagtaatagcagtgcttggtgctacagaaatagatggatggaagttgtggttactgtgacaccaaaaacttgtcccctgagctccctactcctctttctcctatattttttggtaattggctctgtcattcacctcactgcaggattcagaatcctggtactgggtcttgta

SEQ ID NO: 175262 - DNA, 264 bp, Homo sapiens
gtgaactcagctagagggtgcagctttctgttgtcctgggaaacacccgaacagcagagtaagtgactctacctaccctgccactggtagccagttgggtaacaactgctagagctcctggcccagcagctctgcttctgtgtggattcaactggtgggtgcagcctcctgttgtcataggaagcacccaaatggcaaggcacatgaccatacccacccttgccactgacagccaggtggataacacctgctagagcttctggc

SEQ ID NO: 175263 - DNA, 373 bp, Homo sapiens
ttgtccactccagagccaggacaagaactcacgggtcctcacctgaatcggccactgactgccttgggcagagacatcgaagtctctgagcctcagtttcctcttctgcaaaagggaactgcagggttcccagtcacttccctgggctgagcgagtgagaagtcaggcaaggaggttccttccggggaagtctccattgggtgccggctggggtcaggagcccagagtcctaggccctggtttgctcctggccatgtgttcacctcattcattcattcaacaaacattcattcaacaagcattcattcattcattcaacaagcacttaaaaacaatgcctgtgtgccaggcactggttttaagagaaacagca

SEQ ID NO: 175264 - DNA, 184 bp, Homo sapiens
tcctttttttgtaaaatagaaccagctgattccaatctctatggtctcttctagcacggagcttcacgttttttctcccttcaggatcctgaggcctctggatcgctagagattgggggtgcccccagaagaggcgctgcttctgtgccctccctcaccccaccgtgcctggctccttgttttt

SEQ ID NO: 175265 - DNA, 548 bp, Homo sapiens
attggcacaacaaagccaccatgagtttgttttttttttccattatcaaattagcaaaaattttaaaacatgatcaagcacagtccctagtatcagggaaggtctaagaaatggggcacttgtgctgctagtagtaatataaactggtagactaataggaacaagtgggtagaattttagaagtctttgaaatacatatcctgggccaggtgcggtggctcacgcctgaaatcccagcactttcggaggctgaagtgggcggatcacctgaggtcaggagtttgagaccagcctgaccaacatagtgaaacctcgtctctactaaaaaatacaaaaattagccgggcatggtggcacgtgcctgtaatcccagctattcgggaggctgaggcaggagaatcacttgaacctgggaggcggaggttgcagcaagccgagatcgcgccagtgtactctagcctggccaacagcgtgagactccgtctcaaaaaaaataaaaaaatacatatcctggctgggcgcagtggctcatgcctgtaatcccagca

SEQ ID NO: 175266 - DNA, 487 bp, Homo sapiens
cctttaatctagctgtgaatcattctgaaaatgagcccaggaaaaaagcatgatgctaggcttgtgtttggaaataacattattttctaatgtgatcactgtttgtccctgtgaaacccacgtcattttgcaaccctgggggatactttttgctgtattaaaaccaatgcatccctggcttctcagccatgtgccagcagcatgagcttaggtgtgttaaaggtgaggtgctgttcttgaacttccagcacagtcagctcccagcttccctcagtgtggtctttcctctgctgtgactggtggccctctaacctcatcccctgtgccctcgtcccctgtgtggggagacactgctggggtcggggctggtacctggggacagcagccttttccaaaccttgattttactcttgaatttcacacttccctcttagagccagaggagtgagttatttcctcttaaagatatttgccacatacaagctta

SEQ ID NO: 175267 - DNA, 290 bp, Homo sapiens
tgcaacaaaaagtaacattaaaagctaatgattaataatgtttataataatgattgataattgtccatgatcatctctgtatctaatttgtattatgactattcttattctgttttctttattatactgaaatagtttgtgccttcagtctcttgccttggcacctgggtactctttgcctacaaattaatactccattttatagatatactccattttatttattcatcaattgatgaacatttgagctgtttccagtttgggactattatgaataatgctgctgtgaa

SEQ ID NO: 175268 - DNA, 692 bp, Homo sapiens
aattaaaaagcaaaaatcaaacagcagtagtcaaaaaactaatcccctaagtagaggctccatgtgcaaagtccagattgcaggtaggacagtcggcaaggcctccctgtttcacagctctcttcccaacccgtggacaaagactacggtctgccgccaggagcggaatgccagatagaccttgggtttctcagtgacacttccaaagacacatttgcatctcaacactttttccaaaaagcaagctgaaacatgtattggtaattaaaatgagaagatggccacatagatggacatatagtaacaaaaactgaaatgtttaaaccacaaatgatagtataactcacaaaccatggcactcaccaagtcaaagaagtcaaataaagccagaccaactgaatgctagctaaaaagggcggaactcagaatcagaagaaacaggaagaagacatgcaccacaaacacagcactagaaaacagcacccagagccatacaagtcattctgctgcagacaaacaataaattgcacatcaatcctcctgaaaatcaactacagtacaaggagaaatgaaccgatttatatcaggctgtgtaagtctcattctgttggccaatagccagatccacttgggaatctcctattttaaaaatatgagtaatgtacttgtagagagcctatttagttcaccta

SEQ ID NO: 175269 - DNA, 230 bp, Homo sapiens
aagaagggtcagtcacatggatatctgggggaagagcattccgtgaagaggaaaaagcaaaggccccaaagcaacaatgccaaggttgttcaaggaacagcaagaggtgtatgtgggtggaacggagtaagagtagtggagatgaggtcagaggtcaatggaagcaggaagcaggtggtttaaagccttgttcaggccgggtgcggtggctcacacctgtaatcccagca

SEQ ID NO: 175270 - DNA, 746 bp, Homo sapiens
catagagccaacatgatcttcatccagcaaacagagagttatcactgcatgtccagaagcaaggcctgtgtggttggagagggaaggttcatggggactgtccatccttttttgaagatgaaaacacatgccctcagatagcagaagttcttcactgtaacttacagtgggaatcagcactcttgtgtttagcccaggacactggctcctgcatgggtcagaaaacaccaaaacacatgattgctctcgctgatggtttggaaggtactttaagatcttatacagccaccaattcatgagatgctgaccaggagtgttgcagagagatgggatcttataggacctgctaatataggcattctagaaggttgggcaacaagtattgccatggtgagcagcatgggctgcaccatcccaaggccaacactttctcctttccatcattcctgataggtgtgcgtggtcctgaacaagtatgtctgtgatggggtcccaacctccagctcaatcagaatatgcaagtgaatattcattcatactcttaactggcattgagtggctctgtgagaaaaagcctaattaagtgacctttagggaaaacctacagaaacaaatttgctgcatatctatacccactgacacattcaaatacattcacacgtgcatacataaacgcatgccacatgctgaaatgcttcataaacaaacagccccaaacacacacatcatatagtaagctcatgcct

SEQ ID NO: 175271 - DNA, 464 bp, Homo sapiens
gaggcgttctagaggagtcccggcgacaggagtgttgcagagagatgggatcttataggacctgctaatataggcattctagaaggttgggcaacaagtattgccatggtgagcagcatgggctgcaccatcccaaggccaacactttctcctttccatcattcctgataggtgtgcgtggtcctgaacaagtatgtctgtgatggggtcccaacctccagctcaatcagaatatgcaagtgaatattcattcatactcttaactggcattgagtggctctgtgagaaaaagcctaattaagtgacctttagggaaaacctacagaaacaaatttgctgcatatctatacccactgacacattcaaatacattcacacgtgcatacataaacgcatgccacatgctgaaatgcttcataaacaaacagccccaaacacacacatcatatagtaagctcatgcct

SEQ ID NO: 175272 - DNA, 156 bp, Homo sapiens
taatgaccatcatcatcaaattacttattaaaaccacacaaggaagcaatctaaatattctgtgatcggcttccactacaacccatacacttttcttttatactgcttatcacattttaattatttgacaactgtctcactactagatagtaagct

SEQ ID NO: 175273 - DNA, 278 bp, Homo sapiens
tttctctgtcacccaggctggagtgcagtggtgcaatcatagctcactgcagccccaaactcctggcctcaagtgatcctcccacatcagcctcccaaggagctgggactacaggcatgagccaccaaatatttcaacttcattacatcatgaaatgggtgaaggggagaagttgtatataaggtgggagtagagagccaaatctcaccaaacattcattcaatggatatgaatgaaagaataaacattcgattggggccagttcgtagagaaccttg

SEQ ID NO: 175274 - DNA, 822 bp, Homo sapiens
ataacaagccctgcccctagagagctttctatctgcaacagcttcagccacattcttaaactagtcgtgactatgtaaaagaagtgacaacactataggagatgcaagagcacctcctgtaatcagtaaaggctcttgggaggaggtgacacttaggctgggacctggatgaggaaggtgacaggcatcagatgactggtactgtaatgtactgtagtctgtttctgctcacaagtccaacttcatacacgacactcctgccccatgatgttctaatcaagcggaattaccgtctagcaatagctgactacattcccgtgcatatgttgtccctttgcttggaatgcaaacctcccctctatttctgttgtgaatgactcctccagctgaagaatgaactcactgatatgagaaagggctccccaggcactgcaaactgatctttatcacaccatataaacacttcagattttacctactccagtaagtaagcttttagggcaaggactgtgtctgccatcactaatctctgcattctggcacaaagtaaatgctcaaaagatttgctaaatggatataaaggtgcattaatagatgccagctgtacagacattggaagagtcctcccttttccatggttttgcttcccatggtttcagttatccttggtcaactatggtctgaaaatactaaaaggaaaattccagaaacaaacatatcacaagttttgaattgtgtgccattttgagttgcatgatgaaatcttgaaccttcccacttcatcccacccaggatgtgaatcatccctttgtccagcgtatc

SEQ ID NO: 175275 - DNA, 515 bp, Homo sapiens
ttctagatttagcggcaaaaaatgagcatagttcctacctgatgctttctcttttctctgagaaatagaaagtaagatcatttactacaagggaggaaacccaagggagagatggaggtctgaagagaaataactgctggagcaagctgactaaagaaaaagagtgaaactgctgggcagtgtgaagggttgaccacaggtctgtgatgcgacaaacagtgaaacagtggcatcaatctaccctgtatgaattttcagttcatgcagcactgtggtactaccgaatgggtttgatgaaaagatgaagggacaagaaataataccagttaatctctaatgagcatgttactatgggccaagccctacaagtggtttacatgaattgttccactgaagcctcatgactactctacccaatattattttcattttatagatgaggaacctgaggggtgaactaattaacttcttgaccatgtgtagagtcagaattcaaggtttgagattttgttgca

SEQ ID NO: 175276 - DNA, 406 bp, Homo sapiens
ctctagcttctcaacagtactgtgcgttctagtttctctcctcttctaaaatgtgcacttaaagctatcactgtcatcatttcagttgctcctaaactggaacctcagtcacaacttcaggtcacgacgcagagcctgagtcacagcctcagggacctctacaaagcctgagtcatagattcagttcaccatacagagcctgagtcatagcctcaggtaagctcaagctgatcatagtgggggctgtgaccccagtcacaaccttaggtcaccatagacagcctgagtcacagactcaggtcactatagacagcctgagtcacagccccagttcaccacatagagcctgagtcacagccccagttcactatacagagcctgagtcacagcctcagttcaccacaga

SEQ ID NO: 175277 - DNA, 1013 bp, Homo sapiens
attgctgcagtcgggtccttacccgaccagttctggggcatgtttgcgtcttgttcccgattacccacgcttacctccttaatatccttttagcaaagtacttctctgcttaaatcaagcattgttgatttctgtttcttgcaattaagaatcttaattgatacaccctgatacacagattctggatcagtggttttaaaattcttttcaggcaaggaagcctttcattaaatgaaatcttatgaggaagcgtaacacatgatgctggtaaaagaggtgctgctctgcattagggccctggagggaatgctagtgcataaagcatagctgtaatccattgccctggacattctgtgatcctggatcaattactgcctccctacccatgttacacaggccctggtctccgccaggcagctgctggatgaggaggggttgatgtttgctgctagttctaaatcagtgtgtatttccagggcccttcatatgctgtttgtctcctccaagacaccggccttctctgccttctgatcgctttcactgggtgaatggtgacataccctcctgtgtgcaggccctgtacaagtgtggatacctggatcaaagagattacatgcctcttagaatcctcttcaaaataccagtccatttctaagattaaaaaacttagcagtcaactaatcagtaagggctgatatttgccctgttaaaagaaagaccttagccaaattaaatttaatagagtttaattgagtgaggaacgatgcccaaattgggcagcctcccaagccagagtaggctcagagagactccagcacagtcactgcagtggaagacgatttatggacagaaggaggaaagtgacgtacagaaaacattagtgaggtacagaaagagctggattggttacaaggtttgccttatttgaccatggtttaaaccgttgatcccctttgactggcaaaaactcagtgattggcacaagactaggttacagtctattgacacctcca

SEQ ID NO: 175278 - DNA, 215 bp, Homo sapiens
gggggggggcgttttcatataagtgccaagatacctgaatgttttagttggaaagcattcttaaaaagatagcagcatcacttagcttcaagatacaaaaacatctcaatatacaaatttactttttttgtaaccactatataagcaggttaagtacaccacagagttgccttcaaataaccttcagatacaggaaagttttggttatccacaga

SEQ ID NO: 175279 - DNA, 211 bp, Homo sapiens
agaatggctcctctgtttataacacacccaacaggaatctggggtcaatgtgatgagaggcacaaagcttgtggcctccctacaaacaaatgcctacattatgaatcggcatattaaggagaaagtagtagaatcagtgtcgacacccaaagagaaaatgcacatcgattgaccctgcgtccaaccataacagcgaacacaagtcgctagg

SEQ ID NO: 175280 - DNA, 343 bp, Homo sapiens
ctttccatcctcacaagccaagtattgagaccaaaaaaagagatatcgagaaagaaccatccagaatgaatcagtgttttggggcaaggcaggcagctgctccagggtcagcctatcaatgtccccagtaactgacaagagcaggcacaaggagcaggtgcagttcagctccccaggtctcctttcttctaagccccttctcctcatctcctgtgctggcctcctctgcccctccagccttttaatcctgactctcttacacttggcttcccaccaaactcactgtggccttgactttctgcttgcactagctggctcaatccataaaggaaataagaaagca

SEQ ID NO: 175281 - DNA, 644 bp, Homo sapiens
gggagcaagaagcaggacaggtccagagaccaaggaaataggaataacagtaaccttatctcagatggtcttgtctgggcagttccactggtacagctgaagctgaacaatactcagattcattgttgctgtcattaagattcaaatatcagagaagaaatgtctgattagcctagcttggttcaagtgttcaccatctaaccagggtaagcagagtacattatgggtagtgacgggctaagagttaaaccctaaggaaatcaaataattttagggagcagcctaggatatgaatatgagctgtttgtttaacagcaagaatatccacctcaatctagaggctgctgggagtacctcatttcagtattcaccaaatatttattaaacaactactatatgctattctaggcactagggatatagcagtggccacaataaacacaactttactgctcaatgaccttatatttttaatagataatcttggttggtgaatcgctgagtggcatggagaatattctagaattgtgagagtaggaaaagattttatggtctaggcaggcaaagggagagcgctccaaaaaaagaaaaaaaattaggagacttacgggtctctgggcttctcattcctgaaagatttcaaa

SEQ ID NO: 175282 - DNA, 399 bp, Homo sapiens
ctagacgatcccgtttattgagtggcatgtgacttggtatctctcctgaaaatgagctgtcctctgtgaatttcctggtggccatgtctagctccgtcacactggctagtcagtcctttcaatccttagaatcaggtcacagtttcacttcagagatctcttccattacaaccaggctgggtagggttgaagggtagctttttgttttcgtttttgttttttttggtagagacggggcttcattattttctctaggctgatcttgaactctcgagctcaagtgatctacctgcctcagactcccaaagtgttgggattattacaggtgtgtgcccacacgctgggcctaagggtacctttttatgtctgcccagggcttggcacagtctcactggcctt

SEQ ID NO: 175283 - DNA, 579 bp, Homo sapiens
actacccattcatctgtcatatattgtttttccttctatactcagttttttgaggatttttatcatgaagggattttgaattttatcaaatgttttttccaccatcaatcaatcgaaatgatcatttggttgttgtccttcattctgttgatatgatgtattacattaattgatttgtgtatcctgaaccatccttgcatccctaggataaatcccacttggtcatgatgaatgatctttttaatttgttgttgaatttggtttgctagtatttttgttgaggatttctccactactattcatcagtgacattggcctacagttctgtgttgtgtgtgtgtgtgcgcgcgtgtgtgtgtgtttaatgcatctttgtctgattttggtatcagggtaacactggccttgtagaatgaatttggaagtatgccctcctcctctattttttggaatagtttcagtaagattggcattagttcttctttaaatgtttcgtagaattcagtagtgaagccatatccaggctttcctttgcttggagagtttttattacagctttgatctcattccttgttactg

SEQ ID NO: 175284 - DNA, 404 bp, Homo sapiens
tctatgtttatatgcacatatacacggagttaacctagatatacacaaaacgaatatacacacagatatacaaagatacatataacaataagattataggagaaacagattataggagaaaccaaaatgttaacagtgtttatctgtgaatggtaaaattatgggtaacttttctttccatttatccatgttttccttatctcttacaacatgattatattactttacattaaaaagtgtttaatttcagaaatatagttataaagttgtgtaataacatggaaatgtgcttaagctgtaaaattaaatgaaaagtaaaagcgggatataaagggtacctgcattatgatcacaactatataaaaacaaagtatgtggcaaaagctgaaagtgaatatggaaaa

SEQ ID NO: 175285 - DNA, 462 bp, Homo sapiens
taccggcgaggggtgctatgatgcctctatgttttcatctgcagggatgatttgcaattgtatggttagaatttcatttttgagagccttcctattcctcttgaagcatcttcccttttgggtttcaggtcatgcatatattttctttgaacatttaaaaatcagttcttttaaactatgaagttcaaacctgactatcatcagcctctttttccatgctttattccaagttctcaatatttctgcttcatcagcagagcatctccacccgtctggtttctgccctccctctagttgatcagaattggatccaaagttgcagtttgctcaactttctgtgagattaaactatcagcaaggaaaaagtgtattagagatcctagtttcagttgagacttacagcagatatctaggtatttgataacgccctcattatttctatctttcctcgtcattttgtga

SEQ ID NO: 175286 - DNA, 310 bp, Homo sapiens
tctctctgtcttaaggtcaactgatttgggatttgaattaacgtctgcacagtccctgcaaatagtacctacattcgtgtttgattaactaggggaaggtatgtgtatcccaggggccaggaatcttaggaggaatcttagaattctgactaccaaaacaggaaatagaaattaagccatgaaaaatggttgttatttacagcttgtatacccagaaaacccaagatgataagctaaaaaattatttgatgcagtatagataagtcagtaactggactagatacttaccatcagtaaccattcaggcaat

SEQ ID NO: 175287 - DNA, 334 bp, Homo sapiens
ccccaacacaagaaattactctaagaaaaaagcagacatttaagagaagggttacttttcataaagccatgtaagggtggcatttgaaagttactattgaaggaagttaccaattatttccatatatatctctaaacattgacgtttacagcctttgaggcaaccatcctttactataagatataaaatagacggccagacatggtggctcacacctgtaattccagcactttgggaggccaaggcaggtggatcacctgaggtcaggagttcgagaccagcctggccaacatggtgaaaccccatctctactaaaaatacaaaaattagctgg

SEQ ID NO: 175288 - DNA, 230 bp, Homo sapiens
gtgacaggcgctcctggctcctctgggagttgcaacagcacagggaatgctgagtggagcaggaggacagagggccccagcagagcaggaggacaggcagccaccgtgagaagggatgggtggggcaaggtggccctgagggagggctgttagggaacatctggctcaggatggaaagtgtcaggccctgccttcacccctgagatcacacacacaacatcaccattgca

SEQ ID NO: 175289 - DNA, 541 bp, Homo sapiens
tccacctatctgtcatccaacagacattaacatccacccatttaacaaaactatgtgttttaggttctcagatttctgagacaagacaaaaattcctccctgcaaggagctctgagtcttgaaaggatggatattcgtgaattcaccgtaaaagagcatggtaaatgctttgctctaaggatgagcaaaatgctgcaaaagcacagcataagtggaggccttggtgcccagaacaataaggcaatttgatttccaggagaagagaagctcagtccacaggtatagattctattctctggggcttcttaaaatctgccagtctatggctcagtttcctaggaagagacccctaggcttcctttatcccacttgctttggtgcatctctgcaaagcccaaccatctgagcaagttagggagaacactagcatgaaggaggtgctcttaaagaagtaagtggcaaacaggaaatttgtgcctcaaacagatctctgactaggtcatgctataaatgttgtattccaggggtgcacctggaagga

SEQ ID NO: 175290 - DNA, 516 bp, Homo sapiens
ccaggccctgctgatcagaacggctatgtgaagcaggaggcagcaaacaggccccaggctcaaataggcacttcgtagtggtctagttttgcccgactagttacccttaaccttgattaaggtacttagttttaccaaaaaaatcatcagaaatactctggctgccatggaatgtaacatgtcctcattacgagtttcacgtggggaaggccctgaagtgaggagaggcccagcctcttcgtgccacttttacctgctgtccctaggtcaacaccccggacacaaagagtcccccattcagtcgctcccttgtgagctggactctgaaggtcctctcccagaggagggcaaggccttaccgttacatctcactctccatgcaaacagaccgtgagatagtcatctgtttgcctgagagtatgtggtgtgtgagggtcttctgatatttcaggcagccctctcctactctccacgctgcctctggaggtcaggagaaaactatgtggcttccctaac

SEQ ID NO: 175291 - DNA, 135 bp, Homo sapiens
aagcaggtgacttcatctctctcttcattttatgattaaattgccaataaaaaaatcatctcataggactgttctcgagattacgcaacatactttgcaatgcagagatcagaatgccacactccacactcatgt

SEQ ID NO: 175292 - DNA, 511 bp, Homo sapiens
tgaggcaggaggatcacttgagcccaggaattcgaggttgcagtgagctatgatcaagccactgcactccaggctggatgtcaaagcaagatcccatcttttaaaaaaataacttttagaaaaatgaaataaaatacgtgaaaaatgtattataagctcactttattagatttgacaaatataaaatgctcaaagtctctacacagttattctcagtttccttacttcttcgcttgtcacagcttggtaacagaggattctggaccaatactggtccatggcctacactttgaatagcagtgcactagatgacagtttttagggttgctggagcagaactgtggacatctgtgagtctgcgataccgagcacaggaaactgaagccaggagggagtcaagaataaattaacaagtttaaatagggaacaaatactttgtaagaggcaatgatcctaaaatacatctctgcacatttgaaaatgcatcatttatggctttattttatagttt

SEQ ID NO: 175293 - DNA, 386 bp, Homo sapiens
gttacatcacagcgcatgacgtgcttcaccatcactgcacttactacaccgtattgcagtcattcttctgttgccccaattagactatgaattcccttcaaaggcaggtaaaattttatcgttatccacagtacctggcacagtgctgattacatgaggtacttagtatctatcaaatgaatgaattaatgtttttgacttctacaataccttttgagattgactcctacttccactgctactctcaaagttcaggccctttattctgtctctatcccctcacatgtccttctacctctagcttattaacccacctaatggtacccaaattatttctaaagcacagttctgatcatgtcctgcttaccgtcagaaactactattgc

SEQ ID NO: 175294 - DNA, 621 bp, Homo sapiens
ttaaatcaaaggagcagctagcccttctccctctaagacaggtgctgggagtcaaggtatggatgcctcctgaataactggggcctatgacagtgcccctcactttcttattctctgacttgctctttgttggctaaaaggccgagtgtgatgacaaaaagttcaagtgtgaacactacatttatgtttacatgtgtgtatatgtgtatttgtctttattgccatgttttggggcaaggttgtacccttgagtttccaaatctagaagaaaaggtacaacattttgttcactattaccagtttcaaaatcatttgatatatctataaaatttcttttcaggctgggtgcggtggctcacacctgtaatcccagcactttgggaggccaaggcaggcggatcacaaggtcaggagttcgagaccaacctggccaatatggtgaaaccctgtctctactaaaaagtacaaaaattagccgggcctggtggagggcacctgtaatcccagctacttgggaggctgaggcaggagaatcgcttgaacccgggaggcggaggttgtagtgagtcaagatcatgacactgcagtccagcctgggcaacagagcgagactccatctca

SEQ ID NO: 175295 - DNA, 338 bp, Homo sapiens
ctgagggacgcccctttcctggggttgcatgtgtcctttagctaagccgcctgggccacattctcgatgggtttttcttttctgcctgttagtgtctgtgaagttgatcaatggaagggccacgtccacaagatcctggtttcatcgtgacatcccagacccaccagtgcttccacatctgcccaacagtcctcctgtcggggaggtagaggaaggcggattggaaccttactagagccaatttaactcaatgttaatttagttattaaatgttaataaacgttaggacattatttttaatatcaatacatagctaaattagagaagatagtataaaa

SEQ ID NO: 175296 - DNA, 396 bp, Homo sapiens
ttgatggccacacagtgtttattgagattgttataaatcattgttcttcagatttgactgggtaaatattccctcaggttatttcctgacacagctgattaataacagatatgtcctgtgaaagaagaaccaaaagacattaacgaatactaaccaaaagccacattaatattgctccatggtgttgtagtcgcagttagaacgcccatctcgtcatccagtgtgttggataggttggctgactctcccactcacatcttggctctttcaaggaggaggaggttttagcagagtcccccaccccaagaggcatctgagtctaagccaagggagcatattattctcttattttaaacctctccgtaggcagcaacattatattaggttttcccttta

SEQ ID NO: 175297 - DNA, 267 bp, Homo sapiens
gcatttacccttatagtttcagagagtcctgagctcaaatccaaagatcttgccagcacagaccttcctgtttgttggtattaaagaaaggaagtgcatggtggctcaagggcattctagtggttagttttgtgcttagcctgcttatggggtgcaggctcccaggcttggaatcacaagcaggtctcagcctcctgggaagtaaatggaagactgtcaggtattcttttaacccaacaggtttaagcagctgagttgtatttcagt

SEQ ID NO: 175298 - DNA, 134 bp, Homo sapiens
cactcggtacctgcatgcttggatcttggagggagtggtatttgtttttgtttgtttgtttgttttgagacggagtctcggagtctcgctctgtttgttttgagacggagtctcgctctgtaaccccaggctgg

SEQ ID NO: 175299 - DNA, 251 bp, Homo sapiens
atattatctcccaccagtcagaataactattattaaaaagtcaaaaacaatggatgctggcaaaggtgtggagaaaaagaaatgcttatctttgtatttttaaaaccatgatttccttcctctaatcttaatattttaagtgaagagttcacatttctgtcaaaatccatcatatgtcgaactttgcaataaaatttctacttctccaccactacccttaataatcaaatcaaaaataaggctaaacttgt

SEQ ID NO: 175300 - DNA, 348 bp, Homo sapiens
ccttccacccacattagaatgtaagctccgggaaagcaaaaaattttatcttcttagttcaattctaaggttgaatcctaaggaactggcccacaaaataacaatttcgtatgggtcaacctaccacacccccagcacctaagagcaacccttggcacacggtagcactcaggcagttagtgagtaatcaacttatctatatatggaatactacaaatactatatgatacagcctttatacactttactagcctgggtaagaaatttaccatcagctggtcagatttgtgatatcatctctgtaggtcttcctaatcctatgcggagccaaatatagacggatatgca

SEQ ID NO: 175301 - DNA, 408 bp, Homo sapiens
ggcatgggatgaaaagggcagaaagccagtccctgggctcagtggctcaacatgcctgagactcacaccatggggcaagccactcgatcgatcgcccaaggaaagcttctgcacagacttggacctgaaaccccacttgcccagccactagcttccttcttgcattagcaacacggaagaggcccctctactctcggcaggactaggaaaatgaaacaagtcaacctacttgaagcatgcagcacatatcccatagacctaacaattggtactagatcctactgttgaaaaaaatctgccttcccaggctgcaatgagggccaggcgtgagtgatgtgtgtgcaaagggcatcctctcctccatcacccatgtctcttcaccgagccagagtcaagctccacagggcc

SEQ ID NO: 175302 - DNA, 451 bp, Homo sapiens
ttttccctgctccagtctggaaaacttcctgtagctggccccagagctttatagaatggctggctgggatggcacagtcttgaggctatgaagaataaacttcttaatgtgtcagcagctccggaggctccattaacactagttctaacagctggtggatacttgctggttctagctggcaggtggaagtctgaggaggctgctggttattgctggctcttcctgaccaggtccagatgcttttcttgtatttttagggacttctaggcccctgactccatacaaggaatgtggaactgaggcatatttccccgagtgaaagagcatgatgttttcattttatgtgatggaatagagtcatggaacctggtcagacatcaagccacctgtatcaccatggggattgtgcttcagaaggaaagtggaggatagggtaggtgggtttcacctg

SEQ ID NO: 175303 - DNA, 169 bp, Homo sapiens
atgtcattttctgtcacactcaagtcacaaaatatttaaccacttatttttttatctctggaggaataatccaaaagattgtactggtaaagccagaacaatttccaattatgctaattatttgtataatacttagttggctttatctgtggtttgttggcttattttc

SEQ ID NO: 175304 - DNA, 122 bp, Homo sapiens
aatacataatgctggtttcacagaaacctaacactctaggaagtgggagtcaccctgcctgacggtggcagagccgagagcaggcctgggtctgtcgcctccaggtcccagttaccatctta

SEQ ID NO: 175305 - DNA, 393 bp, Homo sapiens
agaatctgcagagcaagaatatgtgcaggagttaggcgtatataaggttgagaaaatgagacacttcaagaccaaatgagcgttgtgaattctaaaccgatggagagttgtcatttcagaactcttgcttgaggctttttgctcaaattgctgctccatttttgcctcctggttgtgtatctctctcaccttggtgaggtacctggcatgtggtaaccagtatcttaacatcttaagatgattctgaagatgagatcgtttcaaaaagctagagtcagcagggtgcagtggctcaagcctgtaatcccagtactttgggaggccgaggcaagagaatcgcttgagcccaggagtttgagaccagcctgagcaacatagggagacctcatctct

SEQ ID NO: 175306 - DNA, 431 bp, Homo sapiens
agggactgcgggttgacgggggggaggttgtgcagtggggtgtagcagtttaaagcgctgtggcgcgttcttccgggaggaggtggtgcaggcagcgtgagagcttgtgaagcagaggctttgagaccctagcaggacaattgggagtcccaggattcaaggtggaagatgcgtttctggtcccttgggagaggactgtgaaccgagagtgggagaaaaattggacaacaggagcatcataggagggggtgcctgccctgaaggcacattcctcagagcagccccactgcctgggccaaaggtttggacctgctgccaccagccacagcacatgctagagtccacagccccactagacacccagaatgccactggcagccactgagctggccaacctgcctgtcaaaactcactgccagctcttgtccttc

SEQ ID NO: 175307 - DNA, 365 bp, Homo sapiens
aggtgactaagccttgtgggtcctagccctgtaaatatataaaatgtaatgaacagataacatagggctcacaataaatgctgagtaagaagaaatatcaggaattcctgaacctagttttatccaaagggaatcttttcatgtctctccaaatacattattttggagttaaatataaaaaagtttgtagctcacacatataatgagccaacactttgggaggccaaggcaggactgcttgaggccaggagttcgaaaccagcctcggcaacatagtgagatgctgtctctacaaaaaaaattttttttttaattagctgggcatgattgcatatgcctgtagtcccagctacttggaaggttgc

SEQ ID NO: 175308 - DNA, 138 bp, Homo sapiens
gaatgagatgtccaagtgtttgaaacaatgctctgaacacacttcatacttctgaggaagagctttgaacaaaggagtaaacaagtagaatgctgagaaaaatagggagacgacagtggcacatgacacctagttttt

SEQ ID NO: 175309 - DNA, 624 bp, Homo sapiens
gactctccaaaaggactgatggttgctctgaaatagccagagagctgggacacaggacgagcaaagcttctcttggggtctcattggacctgggccatctcccccaacatagtcccacagcctggccccagggtggtaccctgatgatttttcagagttgtgtggtgttggtagttggcaggggcagctcttagcgctggaggtgggaggctgggaatgaatgacttgagccaagatcggctcctccccactcctcatggtggagatcccagtgtgagggacctgcagctgaagtctatccatacaggcagagagactgagaggtgattctcagatgagtgtgggctggtcacttgcaggtcttcctaaagcccgtgctggcgtttctgattcagcagatctgtggggggcaggggcttcttcactcttaatcagttcccagctgatgttgatgccgctggttcagatgccatactctgagaacccatgcgctcaggtcacagggcacctggctgcttgtgagtttcctgtggtctctgggctggcacagctagttgtagccgatatcctatcagttaattttaacttggagtcttttagagaacagagtcctgttctgacggt

SEQ ID NO: 175310 - DNA, 194 bp, Homo sapiens
ggaccgcatgcacttttcttcatgcgtgcgcgcatctctcttcacgggcgcctgcgctcagccaccgtgcccaacctcacttgctttcttatccttacactcccccagtcccagagaaactgccacatacaccacaaaaaccaaacatcccccaatgaccttagccctggataactgaagaaaagagtgcttgg

SEQ ID NO: 175311 - DNA, 380 bp, Homo sapiens
gggagcaggagtggaggctggacatttcaggctagagccatgtgaatttcacggattttgcagaatacaactatgactattacaatatctgatggagaggcaggtgagtgacagactccagagaatctaagtctcagcaagggcaaagagagaattcgtaaacttccaggtagaaaggggaagagaggaggctgggggactttgggatacaggaagaaaccatcactgtaatgatgctgtattacgccactaatgctcatacttctacagaataacattttgcaatccctccttgtctggctgcatttgatataaatgactcttacacccccaaaataatcctttcttttacatagctccgtatggtcctgcagagtcct

SEQ ID NO: 175312 - DNA, 1349 bp, Homo sapiens
tttcctcaggaagagtcgctcccttttgcaaacgccagccacagaggtttatttttctccctgagagaaggaagagtgaaggctgagactgagacagaaggacagaaggagaagacttagaagccagtgagcccggaaccacgagacgcgctctgaggacacggggcctcggggaaaccgggcacgggcaggggttggtcttggcttccccacaacattgccgcgagctcgggtgccatctccactcgcaggctggcctgtcctctgcagccacgagctcaggcaccgtctccattcataggccagcctgttctctgcagcctgaggtccctgtggtgccaacatccagatgctgagataattctgccagggtgttggctgatcggtggttggtggttggctgttccgtgagttctgcattgatcttgctggctgagcgtccaatgcggaggggcaggtgctgttagggtctccactcccatccctctccccaggactcatcacccactgcaaccgtaagctgctaggggctcacagccgtgagtctttgggacgggtggtcccacctggcatgtagctcaggctcctagccccaggaccctgccgctgctcccctcccgcccacatcttggcttagccgtcttccctggctgccagccccttcccctggtcttagttggcttgagccactaaactgaaatagcacaccctgaggccttcaacagcagacctgatttctcaccatctggaggctggaggtccaggatccaggcccccaaggctgctttctcccccactcccccacccaccttccaggacacgcagactccaccctcttgctgccctgtctcagggctgtccctctgggcaagcaggcccctggcatccccgtgtgtcctctcctcctgttcttataaggacaccagtcatactggatctgggcccaccctagtgacctcatttaccttaatcacctctgaaagaccttgtctcaaaaacagccacattctggggcactgagggttagggctttaacatgggaatttgagggatgcaattcaccccataaaacccagaccattcccccagtaaatcactttcacaagagctcttctctcaggctttgcttctgggggatcccccttgagatggatccatctagcttcctgcttctcaaagaacagaggggagagctctggtgcgaagggaacgggtggcctcggggacctgcggataagctgctggcactgccaggggacaggctgagctgaaagccaggaggagggcggcgaggcccggggccggacctcattcttctgagtgttataaaatctggctttgctcagaaa

SEQ ID NO: 175313 - DNA, 2336 bp, Homo sapiens
  misc_feature (1710)..(1710): n is a, c, g, or t
tttcctcaggaagagtcgctcccttttgcaaacgccagccacagaggtttatttttctccctgagagaaggaagagtgaaggctgagactgagacagaaggacagaaggagaagacttagaagccagtgagcccggaaccacgagacgcgctctgaggacacggggcctcggggaaaccgggcacgggcaggggttggtcttggcttccccacaacattgccgcgagctcgggtgccatctccactcgcaggctggcctgtcctctgcagccacgagctcaggcaccgtctccattcataggccagcctgttctctgcagcctgaggtccctgtggtgccaacatccagatgctgagataattctgccagggtgttggctgatcggtggttggtggttggctgttccgtgagttctgcattgatcttgctggctgagcgtccaatgcggaggggcaggtgctgttagggtctccactcccatccctctccccaggactcatcacccactgcaaccgtaagctgctaggggctcacagccgtgagtctttgggacgggtggtcccacctggcatgtagctcaggctcctagccccaggaccctgccgctgctcccctcccgcccacatcttggcttagccgtcttccctggctgccagccccttcccctggtcttagttggcttgagccactaaactgaaatagcacaccctgaggccttcaacagcagacctgatttctcaccatctggaggctggaggtccaggatccaggcccccaaggctgctttctcccccactcccccacccaccttccaggacacgcagactccaccctcttgctgccctgtctcagggctgtccctctgggcaagcaggcccctggcatccccgtgtgtcctctcctcctgttcttataaggacaccagtcatactggatctgggcccaccctagtgacctcatttaccttaatcacctctgaaagaccttgtctcaaaaacagccacattctggggcactgagggttagggctttaacatgggaatttgagggatgcaattcaccccataaaacccagaccattcccccagtaaatcactttcacaagagctcttctctcaggctttgcttctgggggatcccccttgagatggatccatctagcttcctgcttctcaaagaacagaggggagagctctggtgcgaagggaacgggtggcctcggggacctgcggataagctgctggcactgccaggggacaggctgagctgaaagccaggaggagggcggcgaggcccggggccggacctcattcttctgagtgttataaaatctggctttgctcagaaaaaaaaaaaaaaaaaaaaaaaaaaaaaaaaaaaaaaaaaaaaaaaaaggggggggggcaaaaaatccccgggggaggggcgcaagcgatggagaggatagaccagggtttttttggacaaaaggggcgccccatatagggggtgcgcggaatataatataaggccaaggagccgggagcggcggagggtaaacaccacacgtgctgtgcggggggggagacaagtcggtgtagttgggcgacactttggggtgagaagaagaccccacatttggtgggcggggagcgacacaattgggaagcaacaacaatccactacagaagacatttttaaccgccccgagagaggaaacacaatcaacnttaaggagtgttaacagggggggtaaacacaagagaggattatagagaggcgggcgggtggagaaaagaatatggggatcgcgggaggggttatttgcatgttgggagaaacatttttactacgcagggggttttgtgtgtgaaataaacaaggttgtgattagaagcaaggtaacagaacgtagtataaagagaataatgacgtagtctgagggatatgaaagtagaacagtcagataagcgatatagtagaaaaaaagtgtaggtatgaaggagataaagtcaaactaaataactcagtaggaaacagaacaagcacataaaggatagacaggtacataagaaaataaggttgaggaagaaaaatagaatcaagagaaaaaagaaaaaagtaaatacagtataatcaataaagaagtttaaaataagagagagaggggtaaaagacacagatgtatgagagcaataggatcataagataagataaagagaatgagagagaagaagagatagagaaagagagataaagagaatactgagagacgtgagaatgaaaaggaagtgaagaaaagacataaaagaaacggaaaaagaaaaaagagagagaattataaagttggtattgt

SEQ ID NO: 175314 - DNA, 1355 bp, Homo sapiens
  misc_feature (1305)..(1305): n is a, c, g, or t
  misc_feature (1307)..(1308): n is a, c, g, or t
  misc_feature (1331)..(1331): n is a, c, g, or t
tttcctcaggaagagtcgctcccttttgcaaacgccagccacagaggtttatttttctccctgagagaaggaagagtgaaggctgagactgagacagaaggacagaaggagaagacttagaagccagtgagcccggaaccacgagacgcgctctgaggacacggggcctcggggaaaccgggcacgggcaggggttggtcttggcttccccacaacattgccgcgagctcgggtgccatctccactcgcaggctggcctgtcctctgcagccacgagctcaggcaccgtctccattcataggccagcctgttctctgcagcctgaggtccctgtggtgccaacatccagatgctgagataattctgccagggtgttggctgatcggtggttggtggttggctgttccgtgagttctgcattgatcttgctggctgagcgtccaatgcggaggggcaggtgctgttagggtctccactcccatccctctccccaggactcatcacccactgcaaccgtaagctgctaggggctcacagccgtgagtctttgggacgggtggtcccacctggcatgtagctcaggctcctagccccaggaccctgccgctgctcccctcccgcccacatcttggcttagccgtcttccctggctgccagccccttcccctggtcttagttggcttgagccactaaactgaaatagcacaccctgaggccttcaacagcagacctgatttctcaccatctggaggctggaggtccaggatccaggcccccaaggctgctttctcccccactcccccacccaccttccaggacacgcagactccaccctcttgctgccctgtctcagggctgtccctctgggcaagcaggcccctggcatccccgtgtgtcctctcctcctgttcttataaggacaccagtcatactggatctgggcccaccctagtgacctcatttaccttaatcacctctgaaagaccttgtctcaaaaacagccacattctggggcactgagggttagggctttaacatgggaatttgagggatgcaattcaccccataaaacccagaccattcccccagtaaatcactttcacaagagctcttctctcaggctttgcttctgggggatcccccttgagatggatccatctagcttcctgcttctcaaagaacagaggggagagctctggtgcgaagggaacgggtggcctcggggacctgcggataagctgctggcactgccaggggacaggctgagctgaaagccaggaggagggcggcgaggccccgtgggcncnnggattacaacaccttcggtgctngagtagtttattaattctgcaccc

SEQ ID NO: 175315 - DNA, 928 bp, Homo sapiens
agtgctctatgctccgcggtcgcgggccgccagcctccagccggccagccgcgaggggtgcgcagagggaggcggggcggaaaggcgagaggtgtctcctccaccggagccaggggagacccgagcaagctccgtgacagcacgtcggccgccatgtcgccgagtggggctggaaacagacccggcgcccagcggtagccctccttgcgcctccgattcccagacatggaaggtctttaatgtaactttaaatggttcaccaaaggatgctctaatggatgacagcgatactcctacatattatctgcaaatagaaccacaagatggatgtcatcctggtgacagcgtggaaaggagtgtgacctgtctgccttctgcatcagatgaaaatgaaaatcagcttgacggggacgggcatgagcatctgaccagcagtgacagtgcgatgggaaagccccaagtgtctgagcaggacagtctcaataataatgaaagctgcacattgagctgcgaggtggctgcaggtgagaactcgcaaaacaccctttgtgaagcctccagagatgaacaggccttcttgggaaaggacaaaaaaattcctggaaaaagaagtccaagaagcaacaaaagggactgctaagaagataccaccaggacttttttcaggagatattgcacctttaatgcaagaaaaagtactaagcgcagtcacatatgctgttgatgatgaagaagctgctgaagtaaatgctaatgagcagccagaggcgccaaagcttgttctgcagtctctgttttcacttatacgaggtgacgttgagcagttggattccaagagcacttcccctttgccttcatcagatagcagaatcctatttccaggacgaggactatgacgaaagcactgacattcactcaggctacgaac

SEQ ID NO: 175316 - DNA, 312 bp, Homo sapiens
acggggacgggcatgagcatctgaccagcagtgacagtgcgatgggaaagccccaagtgtctgagcaggacagtctcaataataatgaaagctgcacattgagctgcgaggtggctgcaggtgagaactcgcaaaacaccctttgtgaagcctccagagatgaacaggccttcttgggaaaggacaaaaaaattcctggaaaaagaagtccaagaagcaacaaaagggactgctaagaagataccaccaggtattgtttaaaatagtatttatcctcttctttaattaattaaaaatgaacctccttccctc

SEQ ID NO: 175317 - DNA, 828 bp, Homo sapiens
aagcaggctggtccgccccgggttatgggctccgtgacagcacgtcggccgccatgtcgccgagtggggctggaaacagacccggcgcccagcggtagccctccttgcgcctccgattcccagacatggaaggtctttaatgtaactttaaatggttcaccaaaggatgctctaatggatgacagcgatactcctacatattatctgcaaatagaaccacaagatggatgtcatcctggtgacagcgtggaaaggagtgtgacctgtctgccttctgcatcagatgaaaatgaaaatcagcttgacggggacgggcatgagcatctgaccagcagtgacagtgcgatgggaaagccccaagtgtctgagcaggacagtctcaataataatgaaagctgcacattgagctgcgaggtggctgcaggtgagaactcgcaaaacaccctttgtgaagcctccagagatgaacaggccttcttgggaaaggacaaaaaaattcctggaaaaagaagtccaagaagcaacaaaagggactgctaagaagataccaccaggacttttttcaggagatattgcacctttaatgcaagaaaaagtactaagcgcagtcacatatgctgttgatgatgaagaagctgctgaagtaaatgctaatgagcagccagaggcgccaaagcttgttctgcagtctctgttttcacttatacgaggtgacgttgagcagttggattccaagagcacttcccctttgccttcatcagatagcagaatcctatttccaggacgaggactatgacgaaagcactgacattcactcaggctacgaac

SEQ ID NO: 175318 - DNA, 411 bp, Homo sapiens
aattcaattgagctgctctgcaataaggatgaaaggataaaattagaaccaattaaagttacttgatgaaacatctcataagcaccatggaaaattccatgttaagtgatggggtgacctgacatgtgaagtcttgctgtctcatccccagtgcagagaaaaaaaatgggctggagctctgaggcctgcgaggtcggtggccagctttgagggtagggacacagtaggaccctacgagaaaggagaggtcagcaaaagtggatgggggagtctcttttgggtatctcctcctgtgctttgatatttttcccagaggttgctggggcttatctttggggtgcatcaccaaaaatatccttcctagaagatagagtgatggataagacacccgagagtcagaagggggttctc

SEQ ID NO: 175319 - DNA, 116 bp, Homo sapiens
gaatcagaggcgttgagcttggaaggtaggttggagtcagattacacagagccttgaatgccaaggtaataaacagcatagattcggttctccatgagagtcactgatagttttgg

SEQ ID NO: 175320 - DNA, 560 bp, Homo sapiens
ttagtaccacccgttccacaaattaggtaactaaggcttgaagagacaatgcaatgcatattgggcttgtgacctggcttctgggcatcggtttcaggtactaaatctaatgaagggagacttgacagaccacaggaagaagcacagagtaaaagggcagaagcacggacataacaagagctttcttgggaactaaacctccaatgacatagagaaatacttcaaaatgttgctttcttttgctggcagtaaaattgagagctctcattagcttaaatgaaaaatgtgactaccaaacacatctttaacaggaaaacagttttcttgattgctgaatttcctccctaacagagttgaaatagaaaaatgaatgtgtttgaacttaatggtgtcagttgtttcctaagaaagggactgatgctacagcaagacaaacagccctaaattacttctgacccaataaatacgcgcttcttgactcttcacgtgttgctcatgacataatactattctagttcttccacttctctgattgtcctcacttgttgcctcttcctctt

SEQ ID NO: 175321 - DNA, 466 bp, Homo sapiens
ggcttctgcttctgccctcaccaagacctccctcaccaacctgtctcttaaaaaacaggcaaattattgattatagttcagtgggctaaatcctgtggtagaaacattcatgcatagggtggtgcatccacatcagtcttaggtgggaggagggtcatggaaggcagatttttggttgcacttgaactgaactttgaaggatgattaggagtaagctgggtgggggaagggaagaacctaccaggcagaaggactggcataagtaaaggctagtttgtaagaagtataaagcgttgaggtaaaatgcagttcagtatttattttttaaaattaattccactcaacgctttatacttcctcccaggttggcaggggactgggctgaaccggtagacactgggaggaagtaaaaggaggggctgagccaaccccacgagacctggtttggcctggctggctagccagg

SEQ ID NO: 175322 - DNA, 520 bp, Homo sapiens
ctcaggtgggaggattgcttgagctcaggtgtctgagactacagtgagctaggctctcctcactgcactccagcctggaagatagagcaagaccctgtctcttaaaaaacaggcaaattattgattatagttcagtgggctaaatcctgtggtagaaacattcatgcatagggtggtgcatccacatcagtcttaggtgggaggagggtcatggaaggcagatttttggttgcacttgaactgaactttgaaggatgattaggagtaagctgggtgggggaagggaagaacctaccaggcagaaggactggcataagtaaaggctagtttgtaagaagtataaagcgttgaggtaaaatgcagttcagtatttattttttaaaattaattccactcaacgctttatacttcctcccaggttggcaggggactgggctgaaccggtagacactgggaggaagtaaaaggaggggctgagccaaccccacgagacctggtttggcctggctggctagccagg

SEQ ID NO: 175323 - DNA, 247 bp, Homo sapiens
ttatccatgattgcatcatcaaactgaagcctgagacagaacattctgtgaggtggccttgttcactgcagaggagctgactcacacagttttgtctgggaagttgcaacctgtgccaggagtagccagcctgggagtaacaaagaggcttttctactgcaggttttcctagagctcctctccctccctcccctggccaaaggtgagctctgcagggagggtccggctctaggggactttgctcctg

SEQ ID NO: 175324 - DNA, 393 bp, Homo sapiens
ggatctttcccaactcataaatgtccagaagaaaacagaatatattttcctgattagttatactcattcttttctatatttgcatcttcccccagttaagaatgaaaagcaagacagggcaaacgtttacctagtttaccttggtgcttcctacagcagaattaagataaaacatgccataaaactgatggaatcataaggaaatggaaatcataatgaaatgaacgttgactttgaaaccctgggagagcattacaatgaaaagattgtttaatgaggcatttagaggcgaggaaaatgaccaccttcctttcccctgtccccctccccaccaagggccctgctccagtaactggttgctcagctgcctctaaggatgggtgttgggcttcg

SEQ ID NO: 175325 - DNA, 448 bp, Homo sapiens
agtcactgcatattgtctaaagtaaagaagtaagtagaagaatacacatattgtctagccttgatactcaaatgtgtcgtctgcagaccagaaggattgacatcacttgttagaaaagccaaatcttggcaaaaccactgaaatggaatctgcattttaacaagatccatacatattttataaacacattaaagtttgaataccacgtttctgtaatagtgattctcagtctttgctgtgcattattagagtcatatggacagcttaaaacattattttaagaagagcaaagcccagtccttaccttaagaaattatgctttaaatgggatggagcccagaaatcagcctttttttttttttttatggtttctgaggtgattctaatatgcagtcatggttaagaacctgtgatctagaataatagtggtaagtgaccaatagaatga

SEQ ID NO: 175326 - DNA, 155 bp, Homo sapiens
gtttttcctaattagttttaatattttgactggaataggttaacattttatctgagaacttatggaagtaaaagattcttatatcctttctcattaattttaatggtttctgttctttgtttttcactaatgaacaggatctctgtcgaagtttg

SEQ ID NO: 175327 - DNA, 391 bp, Homo sapiens
actcagatgaggcgccaagaagaacttctgatgggagcaagatggacttcatcccatctgccatattatacaagtaagtgcaacgcgaatacaagaaagctgggatcattgagggctctcctacagtctacctaccactctctatattctggctctcaatgattcatgttgctctctcatgcaatatatcctcatccccttctgaggaccccaaaacaatacaacccaaagcagtccacagattcaaggcaatccctttcaaaataccaatggcattcttcacagaaatagaatattatcctaaaatttatatggaaccataaaagacccagagtagccaaagctgtcctgatgggagcaagacgcatcttgctcccatcagctgggtaag

SEQ ID NO: 175328 - DNA, 1051 bp, Homo sapiens
  misc_feature (39)..(39): n is a, c, g, or t
gccgtcccaacaactcatccaataccaggcacactcatncaccaggcatcaatctcaactccatccaacaccaggagtgacacactgccactcagggccgccaaaacaagcacgaagcaaagacgggacgaaaaagtagagcggctagtagctcccctaaagagagtttggaccttggtatggaaaccctaaaaggaaagccagaattggtatgtaacctgcggccccactacacagtgccagccccacactccctcccagagagccggcacacacctcacagtgggaactctgccagggctgtttcctgtggatgtcagagggaagataggttcttggtgctgccaggatattcctgcaagccctaattacctgccggacagtgttgctggagggtgttggaggcttgccacgagcacacgacctgtctgaagctgctgtggggacaggcagggccaggactcggggccctgaatgcatgcctgggggacgagtgtgcctggtgttggatgaagttgagattggatgcctggtggatgagcgtgcctggtgttggataagttgagattgggtgagcatgccttgtgttggatgagttgagattggatgagcgtgcttggtgttggatgaagttgagattggatgcctggtggatcagtgtgtctggtgttggatggagttgagattggatgcctggtggatgagtgtgcctggtattggatgaagttgagattggatgcctggtggatgagtatgtctggtgttggatgaagttgagattggatgcctggtcaatgagtgtgcctggcgttggatgagttgagattggatgcctggtggatgagcgtgtctggtgttggatgagttgagattggatgcctggtggatgagtgtgtctggtgttggatgaagttgagattggtttggatgaagttgagattggatgcctggtggacgagtgtgtctggtgttggatgaagttgagattggtgttggatgaagttgagattggatgcctggtggatgaccgtgcctggtgttggataaagtt

SEQ ID NO: 175329 - DNA, 267 bp, Homo sapiens
ctttagctcggtaccctttctctctgaagtggagtgaaggaaggagaaccagaagctaaagcgtgtctggtgttggatgagttgagattggatgcctggtggatgagtgtgtctggtgttggatgaagttgagattggtttggatgaagttgagattggatgcctggtggacgagtgtgtctggtgttggatgaagttgagattggtgttggatgaagttgagattggatgcctggtggatgaccgtgcctggtgttggataaagtt

SEQ ID NO: 175330 - DNA, 311 bp, Homo sapiens
tatgtctggtgttggatgaagttgagattggatgcctggtcaatgagtgtgcctggcgttggatgagttgagattggatgcctggtggatgagcgtgtctggtgttggatgagttgagattggatgcctggtggatgagtgtgtctggtgttggatgaagttgagattggtttggatgaagttgagattggatgcctggtggacgagtgtgtctggtgttggatgaagttgaggttggatgcctggtggatgagtgtgtctggtgttggatgaagttgagattggtgttggatgaagttgagattggatgc

SEQ ID NO: 175331 - DNA, 416 bp, Homo sapiens
  misc_feature (39)..(39): n is a, c, g, or t
  misc_feature (347)..(347): n is a, c, g, or t
gccgtcccaacaactcatccaataccaggcacactcatncaccaggcatcaatctcaactccatccaacaccaggagtgacacactgccactcagggccgccaaaacaagcacgaagcaaagacgggacgaaaaagtagagcggctagtagctcccctaaagagagtttggagtccagacggtctgctcagtatggacaggtcacagtggacgaagttgttgtgcacacgccgaagtccagaccgactggtttcccttcctttttaccaatctctaataagtcaaccagggtatcagggtagggtgtgtggtgtttgtgtgtggtttgtgtattgtgtatatggttngtgtgcatgtaatgtttgtggcatgtggtataaatggcatgtggggtgtgtgggcgttcggcgtgtgca

SEQ ID NO: 175332 - DNA, 197 bp, Homo sapiens
ataagggaggctgtgcatgtgtggggacagggagtaaatgagaactctctgtaccctctgctcagttttactgtgaacctaaaattgcactaaacaaataaagtatatttaagaaaacggtcacggccacttgaattgcagtaataaacatacagagacttggttaacgggtcacagagtattgaatctgacaaaca

SEQ ID NO: 175333 - DNA, 345 bp, Homo sapiens
ccaagggtaagtgctaacttgtctgatcaactggcataattccatatctcattctaaagtgattcattcagggataggcagagataagtcaatcagtgtatggcatttccctggtcgtagggattggttcaggaatgagcataacctattgggccaataagatatgtggtttgctagcaacttccaggaaagaagaaagttcttactcttttaagagagcttacaaaagcaattctcttagtgcctcgacccagaaaaggaggttgttggtagcatgctgtgaatacaaaggtaagccaggcttgggttgaagctgacataccaaaagacttatgggaaagatga

SEQ ID NO: 175334 - DNA, 739 bp, Homo sapiens
atcaggatttccctctgcgttttccagcagttgccattaccccaaacgtgtcctagtgttcttcaagtcaatacaactgtagtctccacatgatgcagagtgaggagttcctcaggctatgaactataaaaataggaaactcacccagtgctatttcttctaagtattcactcctctgtaggatcaacctgcttttggttgttttctattactttcagttagttaatttttaaatattttgtccagagtttgtaatttcatatgttggcaggttggtctgaaagaacttcttgaccatcacttgaagtggaaccctctccaattgggtagtattctttttctacttcctatgattactgagtagggatttgttcctgattatttttaaaactaggtgagtagaaatttttaacatgttctatctatgaaaaaccttaattataaacatttagtaaatgtttaccaaattagcaattcagtgtttcctagttggtgtcctactaggaaggaaaaagaaaatgaaaagaagaagagaggaaagaacaaaaatgcttaacaacttttagaattccctccaaatttgtcatcaatagggtttttactgaatacattcttttaaaattagcactctctaatcttgatgaatttgtattttcataaaaatctgtattttcatatttccattcatttgcactgtgtttctcttcgggaaagctgttaacctttcttcatatttacc

SEQ ID NO: 175335 - DNA, 107 bp, Homo sapiens
tcccctgcagccgcggatgggggagcccgggggcggagcggggcgcggggggcggagcgggggaggcgcgaacccggggacccccgcgctggacaaacccgcggccg

SEQ ID NO: 175336 - DNA, 211 bp, Homo sapiens
atgagtgctgacaggtctggcactttcctttctattacccctggggctctatgagtagagggggcaaaagagaggaattcagttggatctttttgctccaggacttctcagataggcaaccagaattagaagaaagacactactggcataatcaacaagaaagaaaaccctggtctagaactaatgggatttttaattttatttttgcatg

SEQ ID NO: 175337 - DNA, 194 bp, Homo sapiens
catttaagtagataaactaggtgtggagttcacaaactggcttcttcagctatctctcactaactcccaggcagcatcttttctaaaactcctttctttagtttaaaaatcaaattaaattaaaatgcccttatatgttcactggttagaatattttagtcttttcacagaaagagatgagtatgaaaccactt

SEQ ID NO: 175338 - DNA, 373 bp, Homo sapiens
ttctagaggaagagaattactaagaggggatgagcaatctcaagtcctttctctagcacctctacattagctcttacttctgttcatttcccaccactatgttacatatgttacagcctgctataggaagagctgcaaaacttgtttagcaatggaagatcaagtaggtcaggttggtggtgcaccttattttcccatatcacaggacaaagataacaggttttttttttcccccacagcactgctttacttaggtctcttttccttgccccaagatttatcctaaattaggaaaggatatctatgaccttgatttcagacttaccatattattttatctgtcatatattagtcccactgagggaaagagggc

SEQ ID NO: 175339 - DNA, 372 bp, Homo sapiens
tgaaatcctgccaacatttcaacaacatggatggacctggaagacattatgctaagtgaaataagccagacacagaaagaaaaataatgcatgatcctcagctctatgggtaatctaaaaaggatgaactcatagaaacagagagtacaaagctggttgacccagtctcgaagtggggaaaatgggaagatgttcaatgagtatatacttccagtcctgaaatgaattaagttttggggatctaatgcatagcatcatggctatagttaatcataatgctctatatcaggggtatccaatcttttggcttccctgggccacagtggaagaattgtcttgggccacgcataaaatacactaacactaatggta

SEQ ID NO: 175340 - DNA, 350 bp, Homo sapiens
atatatatatatcactatatatttattacatattgcattatgtataatatataatacatattatatataatatgatgtattttatagaattgttatttttatgaaaaatcccattgaaatttgataggaattgcattgattctgtagatcactttgggtagtatggacattttaatattattaattcttccaatccatgaacatgggatattattttattctttttgtgtccacaataaaccagaatttctttatttatctatagacacctaggttttttctgtatattggctgttgtaaataatgctacaagaaacataaaagtgttaatatctcttctatgtactgat

SEQ ID NO: 175341 - DNA, 377 bp, Homo sapiens
caccccccccactaccattacaataacaattagatttcaacatgagtttttggaagagacaaacattcaaatcatagcaaactgcaagcacaagagtatggatgaatttcatagacaatattgagtgaaagaaaccaaacaacaaaaggataatattgtatgattctttttaataaaattcaatataagcaaaacacatcatgatattagaagttaattaagatagtggtatctttggtaggggaacaggaagtgactggaagcaggaacatagaggagcttctaggatgctactaatgttctgtttttgatctggattctaattatatgtgtttctttgtgaaaagtaattaagatagtgtatctttgtatgcttc

SEQ ID NO: 175342 - DNA, 333 bp, Homo sapiens
caggagttcaagaccagcctggccaatacggtgaaaccccatctctactaaaaatacaaaaattagctaggcatggtggcgcacgcctataatcccagctactcgggaggctgaggcaggagaattgcttgagcccggggtggggggtggaagttgcagtgaacagagatcgcatcactgcactccagcctgggcaacaagagtgagactcagtctcaaacaaaaaaaatgaataaaataaataaatatgtattttctcctctgtagcacagaaacatttactatcaacatcttagcattttggggagcgggaaatgagataatgtctgacaa

SEQ ID NO: 175343 - DNA, 427 bp, Homo sapiens
agcctcatttaacagcaactacctcactcctagatttctgcaataacctcctaggattactcctcaaaagagcagccaaggtagtaatctttttttaaaaactttttattttgagataattatagattcacaggaagttgcaaagacagtgcagagaggtcccgtgtacccttcgcccagtttccgccaatggttaaatcttatataattatagaacgatatcaaaacccagaatttgacatgggtacaatgcgtatgtatagttctatgtcactttatcacatgtgtagatttgtggaacaacaactgcaattactacaatagcaattacaactattcggactcagtcattactgagtactctcacatatatgcctgcatgtgtaaacggatcttgcctttcccctgttcaattttttgtatcaaa

SEQ ID NO: 175344 - DNA, 279 bp, Homo sapiens
ctgcagctaaaccatagcctgacaaatatggacaggaccaggaataaagtgcagaatgactttccacttcaggacatgtctccgggaggtagggaaaaaaggaggaaaaagaagcagctacttagtgtcaggcagagaagtagatgaagggcacagccagaaacaaactgaaatccatctgaccacaaaaaacactctctcttctcaccatgctgcctgacttgacccgcacagactcactgcttccacccatggaggagcctggccttcatttgtgta

SEQ ID NO: 175345 - DNA, 397 bp, Homo sapiens
  misc_feature (1)..(1): n is a, c, g, or t
  misc_feature (387)..(387): n is a, c, g, or t
ncttatgttctgacccaccctggctcgaaataatacgtgtagatgcccctgatccaggtgcagacccgctggctagcagtgtgaacggcatgtgcctggatattcctgctcacctgagcatccgcatcctcatctcggatgctggcgcggtggaagggattactcagcaggagatactcggtgtagagacaaggttctcctcagtgaactggcagtaccagtgtgggcttacctgtgagcacaaggccgaccttctccctatcagtgcatccgtccagtttattaaaattcctgcacagttaccccaccccctgacaagattccagatcaattatacagagtatgactgcaacagaaatgaggtgggtcagaacataaggtggatcntctagagcga

SEQ ID NO: 175346 - DNA, 549 bp, Homo sapiens
tcaataagtggctagctgctgcttttattattatattgtttgagaaaaacaggtgatgaacaaaggtacctttgatagcacctgtatacaatgcactggctggagaggagtgagactgacaacaagactggcagatgttgctgggcgacaggcccatgaggggttattaggagtttctcttctctttggatctgtctgtggaaatggtcaaagaccatggacaaatactgagaaaaaacagcccaggtagaatgcgaaacttcttaggagaacctcaggttatattgtgattgcatccgttacctgctgttcttggtggaatagaactgaatggtggctatgctgaccatgtgatctttccctcctaggttctcctcagtgaactggcagtaccagtgtgggcttacctgtgagcacaaggccgaccttctccctatcagtgcatccgtccagtttattaaaattcctgcacagtctcagccccatggggtatatccaccctcaagtgtgcagcagggaatacagcagacagcccctcctcgctcgata

SEQ ID NO: 175347 - DNA, 2431 bp, Homo sapiens
cgcttgcaagatggcggcggcggggcagtggctgctgcgttttcgtgtctgagtccttcctgggttctaatgagggcgcggttctgctgtgcccggcccgcgaggtctaaggcatgggcttccagcctccggccgctcttcttttgaggcttttccttctgcagggcatcctgaggcttctgtggggggacctggctttcatccctccttttatccgaatgtccggccctgcggtcagcgcgtccctggtcggagacaccgagggtgtgaccgtgtccctggcagtgctgcaggacgaggcgggaatattgccaattccgacgtgtggagtgctgaacaatgagacggaagactggagcgtgactgtgatccccggtgcgaaggtgttggaagtgacagtgaggtggaagagaggtctggactggtgttcctccaatgagacagattccttctcagagtccccctgtatcctccagacccttctggtttcagcatctcataattcatcctgttcagcacatctactcattcaagtggaaatttatgccaactcttctctgacccataatgcctcagagaacgtgactgtcattcctaaccaggtgtatcagccccttggcccttgtccttgtaatttaacagctggagcctgtgatgttcgctgctgctgtgaccaggaatgctcatcaaatttaacaacgctgttcagacggtcctgcttcaccggcgtgtttggaggagacgtcaatcctccttttgatcagctctgctctgctgggacgacgacacgtggtgtccccgattggtttccctttctgtgtgtgcagtccccccttgccaacacacccttccttggttacttctatcatggtgctgtttcccccaaacaggactcttcctttgaagtatatgtggatactgacgcaaaagactttgcagactttggttacaaacaaggagatcccattatgactgtaaagaaggcatattttactattccgcaggtgtccctggctgggcagtgtatgcagaacgccccagtggcatttcttcacaattttgatgttaaatgcgttactaatttggaactataccaagaacgagatggtattatcaatgcgaagataaagaatgttgccttaggaggcatagttacaccaaaagtgatctatgaggaagcaactgacctagacaaattcatcaccaatacagaaactcctttaaataacggatcaacccctagaattgtgaatgtggaagaacattatattttcaaatggaataataataccatcagtgaaataaatgttaaaatttttagggcagagattaatgcccaccagaaagggataatgacacagagatttgtagtaaaatttttaagctataatagtggtaatgaagaagaattatctggaaatccaggttaccaacttggcaagcctgtccgagctctaaatatcaacaggatgaataatgtcacgactttacatctttggcaatcggctggaaggggtctgtgtacatcagcaactttcaaacccattttatttggagaaaatgtactctctggatgcctgttagaagtcgggattaatgaaaattgtactcagctcagggagaatgctgttgaaagacttgattcattaatacaagcgactcacgttgcaatgagaggcaactccgattacgctgatcttagtgatggctggctcgaaataatacgtgtagatgcccctgatccaggtgcagacccgctggctagcagtgtgaacggcatgtgcctggatattcctgctcacctgagcatccgcatcctcatctcggatgctggcgcggtggaagggattactcagcaggagatactcggtgtagagacaaggttctcctcagtgaactggcagtaccagtgtgggcttacctgtgagcacaaggccgaccttctccctatcagtgcatccgtccagtttattaaaattcctgcacagttaccccaccccctgacaagattccagatcaattatacagagtatgactgcaacagaaatgaggtgtgttggccgcagcttctatatccatggactcagtattatcaaggggagctgcattctcagtgtgttgctaagggcttactgttgctgttgttcctcacattggccttgttcctcagcaacccctggaccagaatatgcaaagcctatagttagacaaccacctggcttttatttttttgagatggagttttgctcttgttgcccaggctgaagtgatctcggcctcccaaagtgctgggatcacagacgtgagccactgcgtccggtccatctgacttctcaaagactttagaccttgacttcagtgatttgttgtagtcttgtatgcttctctataaaattttaataaatgaaatgtcttatttttgtagaaaatt

SEQ ID NO: 175348 - DNA, 1913 bp, Homo sapiens
cgcttgcaagatggcggcggcggggcagtggctgctgcgttttcgtgtctgagtccttcctgggttctaatgagggcgcggttctgctgtgcccggcccgcgaggtctaaggcatgggcttccagcctccggccgctcttcttttgaggcttttccttctgcagggcatcctgaggcttctgtggggggacctggctttcatccctccttttatccgaatgtccggccctgcggtcagcgcgtccctggtcggagacaccgagggtgtgaccgtgtccctggcagtgctgcaggacgaggcgggaatattgccaattccgacgtgtggagtgctgaacaatgagacggaagactggagcgtgactgtgatccccggtgcgaaggtgttggaagtgacagtgaggtggaagagaggtctggactggtgttcctccaatgagacagattccttctcagagtccccctgtatcctccagacccttctggtttcagcatctcataattcatcctgttcagcacatctactcattcaagtggaaatttatgccaactcttctctgacccataatgcctcagagaacgtgactgtcattcctaaccaggtgtatcagccccttggcccttgtccttgtaatttaacagctggagcctgtgatgttcgctgctgctgtgaccaggaatgctcatcaaatttaacaacgctgttcagacggtcctgcttcaccggcgtgtttggaggagacgtcaatcctccttttgatcagctctgctctgctgggacgacgacacgtggtgtccccgattggtttccctttctgtgtgtgcagtccccccttgccaacacacccttccttggttacttctatcatggtgctgtttcccccaaacaggactcttcctttgaagtatatgtggatactgacgcaaaagactttgcagactttggttacaaacaaggagatcccattatgactgtaaagaaggcatattttactattccgcaggtgtccctggctgggcagtgtatgcagaacgccccagtggcatttcttcacaattttgatgttaaatgcgttactaatttggaactataccaagaacgagatggtattatcaatgcgaagataaagaatgttgccttaggaggcatagttacaccaaaagtgatctatgaggaagcaactgacctagacaaattcatcaccaatacagaaactcctttaaataacggatcaacccctagaattgtgaatgtggaagaacattatattttcaaatggaataataataccatcagtgaaataaatgttaaaatttttagggcagagattaatgcccaccagaaagggataatgacacagagatttgtagtaaaatttttaagctataatagtggtaatgaagaagaattatctggaaatccaggttaccaacttggcaagcctgtccgagctctaaatatcaacaggatgaataatgtcacgactttacatctttggcaatcggctggaaggggtctgtgtacatcagcaactttcaaacccattttatttggagaaaatgtactctctggatgcctgttagaagtcgggattaatgaaaattgtactcagctcagggagaatgctgttgaaagacttgattcattaatacaagcgactcacgttgcaatgagaggcaactccgattacgctgatcttagtgatggctggctcgaaataatacgtgtagatgcccctgatccaggtgcagacccgctggctagcagtgtgaacggcatgtgcctggatattcctgctcacctgagcatccgcatcctcatctcggatgctggcgcggtggaagggattactcagcaggagatactcggtgtagagacaaggttctcctcgcgaacgtgttatccccccccc

SEQ ID NO: 175349 - DNA, 1422 bp, Homo sapiens
gtagcaagaggataatctttttcttttatagctggaaggggtctgtgtacatcagcaactttcaaacccattttatttggagaaaatgtactctctggatgcctgttagaagtcgggattaatgaaaattgtactcagctcagggagaatgctgttgaaagacttgattcattaatacaagcgactcacgttgcaatgagaggcaactccgattacgctgatcttagtgatggctggctcgaaataatacgtgtagatgcccctgatccaggtgcagacccgctggctagcagtgtgaacggcatgtgcctggatattcctgctcacctgagcatccgcatcctcatctcggatgctggcgcggtggaagggattactcagcaggagatactcggtgtagagacaaggttctcctcagtgaactggcagtaccagtgtgggcttacctgtgagcacaaggccgaccttctccctatcagtgcatccgtccagtttattaaaattcctgcacagttaccccaccccctgacaagattccagatcaattatacagagtatgactgcaacagaaatgaggtgtgttggccgcagcttctatatccatggactcagtattatcaaggggagctgcattctcagtgtgttgctaagggcttactgttgctgttgttcctcacattggccttgttcctcagcaacccctggaccagaatatgcaaagcctatagttagacaaccacctggcttttatttttttgagatggagttttgctcttgttgcccaggctgaagtgatctcggctcaccacaacctcctcctcttgggttcaagcgattctcctgcctcagcctccggagaactgggattacaggcatgcaccaccacgcccggctaattttgtatttttagtagagacagggttccaccgtattggccaggctgctctcgaactcctgacctcatgatccgcccatcttggcctcccaaagtgctgagattacaggcatgagccaccgcacccggcctttttttttttttttttttttgaggcggggtctcactctgtcacccaggctggagtgcagtgcacaatctcggctcactgcaatctctgcctcccaagcaatcctcccacctcagcctctggtgtagctgggaccacagatgctccaccatgcctggctgtatttttggtaaagatggggtttcgccttgttgcccagggtggtctgtaactcctgagctcagatgatctgcccacctcggcctcccaaagtgctgggatcacagacgtgagccactgcgtccggtccatctgacttctcaaagactttagaccttgacttcagtgatttgttgtagtcttgtatgcttctctataaaattttaataaatgaaatgtcttatttttgtagaaaatt

SEQ ID NO: 175350 - DNA, 1383 bp, Homo sapiens
tcaataagtggctagctgctgcttttattattatattgtttgagaaaaacaggtgatgaacaaaggtacctttgatagcacctgtatacaatgcactggctggagaggagtgagactgacaacaagactggcagatgttgctgggcgacaggcccatgaggggttattaggagtttctcttctctttggatctgtctgtggaaatggtcaaagaccatggacaaatactgagaaaaaacagcccaggtagaatgcgaaacttcttaggagaacctcaggttatattgtgattgcatccgttacctgctgttcttggtggaatagaactgaatggtggctatgctgaccatgtgatctttccctcctaggttctcctcagtgaactggcagtaccagtgtgggcttacctgtgagcacaaggccgaccttctccctatcagtgcatccgtccagtttattaaaattcctgcacagttaccccaccccctgacaagattccagatcaattatacagagtatgactgcaacagaaatgaggtgtgttggccgcagcttctatatccatggactcagtattatcaaggggagctgcattctcagtgtgttgctaagggcttactgttgctgttgttcctcacattggccttgttcctcagcaacccctggaccagaatatgcaaagcctatagttagacaaccacctggcttttatttttttgagatggagttttgctcttgttgcccaggctgaagtgatctcggctcaccacaacctcctcctcttgggttcaagcgattctcctgcctcagcctccggagaactgggattacaggcatgcaccaccacgcccggctaattttgtatttttagtagagacagggttccaccgtattggccaggctgctctcgaactcctgacctcatgatccgcccatcttggcctcccaaagtgctgagattacaggcatgagccaccgcacccggcctttttttttttttttttttttgaggcggggtctcactctgtcacccaggctggagtgcagtgcacaatctcggctcactgcaatctctgcctcccaagcaatcctcccacctcagcctctggtgtagctgggaccacagatgctccaccatgcctggctgtatttttggtaaagatggggtttcgccttgttgcccagggtggtctgtaactcctgagctcagatgatctgcccacctcggcctcccaaagtgctgggatcacagacgtgagccactgcgtccggtccatctgacttctcaaagactttagaccttgacttcagtgatttgttgtagtcttgtatgcttctctataaaattttaataaatgaaatgtcttatttttgtagaaaatt

SEQ ID NO: 175351 - DNA, 346 bp, Homo sapiens
ggcacctttgttcagctttgaaaggattagactaacagtgatctcagtttttgaaaactggcaactttatttctacttactgttttctgtttttcacggaaaactgaagttaatctttacttttgtttagcaaaaagtagcaagaggataatctttttcttttatagctggaaggggtctgtgtacatcagcaactttcaaacccattttatttggagaaaatgtactctctggatgcctgttagaagtcgggattaatgaaaattgtactcagctcaggtgagtgtttcattgatgaatatatcggcaatgtgaatggtttgcctagaattaattcactacatga

SEQ ID NO: 175352 - DNA, 222 bp, Homo sapiens
ttcgaaagcttcgcctatgtgttttctttccttgtgcatgactcttgtattatttgcagagttagggcttgctatgctggaggaaacaggctcacgttcctttgttgtgtttgtctaggttaccaacttggcaagcctgtccgagctctaaatatcaacaggatgaataatgtcacgactttacatctttggcaatcgggtaatccggtttggtcattatga

SEQ ID NO: 175353 - DNA, 2897 bp, Homo sapiens
cgcttgcaagatggcggcggcggggcagtggctgctgcgttttcgtgtctgagtccttcctgggttctaatgagggcgcggttctgctgtgcccggcccgcgaggtctaaggcatgggcttccagcctccggccgctcttcttttgaggcttttccttctgcagggcatcctgaggcttctgtggggggacctggctttcatccctccttttatccgaatgtccggccctgcggtcagcgcgtccctggtcggagacaccgagggtgtgaccgtgtccctggcagtgctgcaggacgaggcgggaatattgccaattccgacgtgtggagtgctgaacaatgagacggaagactggagcgtgactgtgatccccggtgcgaaggtgttggaagtgacagtgaggtggaagagaggtctggactggtgttcctccaatgagacagattccttctcagagtccccctgtatcctccagacccttctggtttcagcatctcataattcatcctgttcagcacatctactcattcaagtggaaatttatgccaactcttctctgacccataatgcctcagagaacgtgactgtcattcctaaccaggtgtatcagccccttggcccttgtccttgtaatttaacagctggagcctgtgatgttcgctgctgctgtgaccaggaatgctcatcaaatttaacaacgctgttcagacggtcctgcttcaccggcgtgtttggaggagacgtcaatcctccttttgatcagctctgctctgctgggacgacgacacgtggtgtccccgattggtttccctttctgtgtgtgcagtccccccttgccaacacacccttccttggttacttctatcatggtgctgtttcccccaaacaggactcttcctttgaagtatatgtggatactgacgcaaaagactttgcagactttggttacaaacaaggagatcccattatgactgtaaagaaggcatattttactattccgcaggtgtccctggctgggcagtgtatgcagaacgccccagtggcatttcttcacaattttgatgttaaatgcgttactaatttggaactataccaagaacgagatggtattatcaatgcgaagataaagaatgttgccttaggaggcatagttacaccaaaagtgatctatgaggaagcaactgacctagacaaattcatcaccaatacagaaactcctttaaataacggatcaacccctagaattgtgaatgtggaagaacattatattttcaaatggaataataataccatcagtgaaataaatgttaaaatttttagggcagagattaatgcccaccagaaagggataatgacacagagatttgtagtaaaatttttaagctataatagtggtaatgaagaagaattatctggaaatccaggttaccaacttggcaagcctgtccgagctctaaatatcaacaggatgaataatgtcacgactttacatctttggcaatcggctggaaggggtctgtgtacatcagcaactttcaaacccattttatttggagaaaatgtactctctggatgcctgttagaagtcgggattaatgaaaattgtactcagctcagggagaatgctgttgaaagacttgattcattaatacaagcgactcacgttgcaatgagaggcaactccgattacgctgatcttagtgatggctggctcgaaataatacgtgtagatgcccctgatccaggtgcagacccgctggctagcagtgtgaacggcatgtgcctggatattcctgctcacctgagcatccgcatcctcatctcggatgctggcgcggtggaagggattactcagcaggagatactcggtgtagagacaaggttctcctcagtgaactggcagtaccagtgtgggcttacctgtgagcacaaggccgaccttctccctatcagtgcatccgtccagtttattaaaattcctgcacagttaccccaccccctgacaagattccagatcaattatacagagtatgactgcaacagaaatgaggtgtgttggccgcagcttctatatccatggactcagtattatcaaggggagctgcattctcagtgtgttgctaagggcttactgttgctgttgttcctcacattggccttgttcctcagcaacccctggaccagaatatgcaaagcctatagttagacaaccacctggcttttatttttttgagatggagttttgctcttgttgcccaggctgaagtgatctcggctcaccacaacctcctcctcttgggttcaagcgattctcctgcctcagcctccggagaactgggattacaggcatgcaccaccacgcccggctaattttgtatttttagtagagacagggttccaccgtattggccaggctgctctcgaactcctgacctcatgatccgcccatcttggcctcccaaagtgctgagattacaggcatgagccaccgcacccggcctttttttttttttttttttttgaggcggggtctcactctgtcacccaggctggagtgcagtgcacaatctcggctcactgcaatctctgcctcccaagcaatcctcccacctcagcctctggtgtagctgggaccacagatgctccaccatgcctggctgtatttttggtaaagatggggtttcgccttgttgcccagggtggtctgtaactcctgagctcagatgatctgcccacctcggcctcccaaagtgctgggatcacagacgtgagccactgcgtccggtccatctgacttctcaaagactttagaccttgacttcagtgatttgttgtagtcttgtatgcttctctataaaattttaataaatgaaatgtcttatttttgtagaaaatt

SEQ ID NO: 175354 - DNA, 2530 bp, Homo sapiens
cgcttgcaagatggcggcggcggggcagtggctgctgcgttttcgtgtctgagtccttcctgggttctaatgagggcgcggttctgctgtgcccggcccgcgaggtctaaggcatgggcttccagcctccggccgctcttcttttgaggcttttccttctgcagggcatcctgaggcttctgtggggggacctggctttcatccctccttttatccgaatgtccggccctgcggtcagcgcgtccctggtcggagacaccgagggtgtgaccgtgtccctggcagtgctgcaggacgaggcgggaatattgccaattccgacgtgtggagtgctgaacaatgagacggaagactggagcgtgactgtgatccccggtgcgaaggtgttggaagtgacagtgaggtggaagagaggtctggactggtgttcctccaatgagacagattccttctcagagtccccctgtatcctccagacccttctggtttcagcatctcataattcatcctgttcagcacatctactcattcaagtggaaatttatgccaactcttctctgacccataatgcctcagagaacgtgactgtcattcctaaccaggtgtatcagccccttggcccttgtccttgtaatttaacagctggagcctgtgatgttcgctgctgctgtgaccaggaatgctcatcaaatttaacaacgctgttcagacggtcctgcttcaccggcgtgtttggaggagacgtcaatcctccttttgatcagctctgctctgctgggacgacgacacgtggtgtccccgattggtttccctttctgtgtgtgcagtccccccttgccaacacacccttccttggttacttctatcatggtgctgtttcccccaaacaggactcttcctttgaagtatatgtggatactgacgcaaaagactttgcagactttggttacaaacaaggagatcccattatgactgtaaagaaggcatattttactattccgcaggtgtccctggctgggcagtgtatgcagaacgccccagtggcatttcttcacaattttgatgttaaatgcgttactaatttggaactataccaagaacgagatggtattatcaatgcgaagataaagaatgttgccttaggaggcatagttacaccaaaagtgatctatgaggaagcaactgacctagacaaattcatcaccaatacagaaactcctttaaataacggatcaacccctagaattgtgaatgtggaagaacattatattttcaaatggaataataataccatcagtgaaataaatgttaaaatttttagggcagagattaatgcccaccagaaagggataatgacacagagatttgtagtaaaatttttaagctataatagtggtaatgaagaagaattatctggaaatccaggttaccaacttggcaagcctgtccgagctctaaatatcaacaggatgaataatgtcacgactttacatctttggcaatcggctggaaggggtctgtgtacatcagcaactttcaaacccattttatttggagaaaatgtactctctggatgcctgttagaagtcgggattaatgaaaattgtactcagctcagggagaatgctgttgaaagacttgattcattaatacaagcgactcacgttgcaatgagaggcaactccgattacgctgatcttagtgatggctggctcgaaataatacgtgtagatgcccctgatccaggtgcagacccgctggctagcagtgtgaacggcatgtgcctggatattcctgctcacctgagcatccgcatcctcatctcggatgctggcgcggtggaagggattactcagcaggagatactcggtgtagagacaaggttctcctcagtgaactggcagtaccagtgtgggcttacctgtgagcacaaggccgaccttctccctatcagtgcatccgtccagtttattaaaattcctgcacagttaccccaccccctgacaagattccagatcaattatacagagtatgactgcaacagaaatgaggtgtgttggccgcagcttctatatccatggactcagtattatcaaggggagctgcattctcagtgtgttgctaagggcttactgttgctgttgttcctcacattggccttgttcctcagcaacccctggaccagaatatgcaaagcctatagttagacaaccacctggcttttatttttttgagatggagttttgctcttgttgcccaggctgaagtgatctcggctcaccacaacctcctcctcttgggttcaagcgattctcttgaacctgagaggcggaggttgcagtgagccaagatcgcgccattgcactccagcctgggggacaaagagtgagacttaggtctcaaaaaaaaaaggcacaacaacacccggggatataagttcattatcccaccttcttgggtttcaccccgattttccctgaatttaaagccttgtactaaggacctgggaattcccgggcataagggggcc

SEQ ID NO: 175355 - DNA, 2146 bp, Homo sapiens
cgcttgcaagatggcggcggcggggcagtggctgctgcgttttcgtgtctgagtccttcctgggttctaatgagggcgcggttctgctgtgcccggcccgcgaggtctaaggcatgggcttccagcctccggccgctcttcttttgaggcttttccttctgcagggcatcctgaggcttctgtggggggacctggctttcatccctccttttatccgaatgtccggccctgcggtcagcgcgtccctggtcggagacaccgagggtgtgaccgtgtccctggcagtgctgcaggacgaggcgggaatattgccaattccgacgtgtggagtgctgaacaatgagacggaagactggagcgtgactgtgatccccggtgcgaaggtgttggaagtgacagtgaggtggaagagaggtctggactggtgttcctccaatgagacagattccttctcagagtccccctgtatcctccagacccttctggtttcagcatctcataattcatcctgttcagcacatctactcattcaagtggaaatttatgccaactcttctctgacccataatgcctcagagaacgtgactgtcattcctaaccaggtgtatcagccccttggcccttgtccttgtaatttaacagctggagcctgtgatgttcgctgctgctgtgaccaggaatgctcatcaaatttaacaacgctgttcagacggtcctgcttcaccggcgtgtttggaggagacgtcaatcctccttttgatcagctctgctctgctgggacgacgacacgtggtgtccccgattggtttccctttctgtgtgtgcagtccccccttgccaacacacccttccttggttacttctatcatggtgctgtttcccccaaacaggactcttcctttgaagtatatgtggatactgacgcaaaagactttgcagactttggttacaaacaaggagatcccattatgactgtaaagaaggcatattttactattccgcaggtgtccctggctgggcagtgtatgcagaacgccccagtggcatttcttcacaattttgatgttaaatgcgttactaatttggaactataccaagaacgagatggtattatcaatgcgaagataaagaatgttgccttaggaggcatagttacaccaaaagtgatctatgaggaagcaactgacctagacaaattcatcaccaatacagaaactcctttaaataacggatcaacccctagaattgtgaatgtggaagaacattatattttcaaatggaataataataccatcagtgaaataaatgttaaaatttttagggcagagattaatgcccaccagaaagggataatgacacagagatttgtagtaaaatttttaagctataatagtggtaatgaagaagaattatctggaaatccaggttaccaacttggcaagcctgtccgagctctaaatatcaacaggatgaataatgtcacgactttacatctttggcaatcggctggaaggggtctgtgtacatcagcaactttcaaacccattttatttggagaaaatgtactctctggatgcctgttagaagtcgggattaatgaaaattgtactcagctcagggagaatgctgttgaaagacttgattcattaatacaagcgactcacgttgcaatgagaggcaactccgattacgctgatcttagtgatggctggctcgaaataatacgtgtagatgcccctgatccaggtgcagacccgctggctagcagtgtgaacggcatgtgcctggatattcctgctcacctgagcatccgcatcctcatctcggatgctggcgcggtggaagggattactcagcaggagatactcggtgtagagacaaggttctcctcagtgaactggcagtaccagtgtgggcttacctgtgagcacaaggccgaccttctccctatcagtgcatccgtccagtttattaaaattcctgcacagttaccccaccccctgacaagattccagatcaattatacagagtatgactgcaacagaaatgaggtgtgttggccgcagcttctatatccatggactcagtattatcaagctcaaccagaacgtaagtatttccaaggaatatttgttggtgagatgta

SEQ ID NO: 175356 - DNA, 848 bp, Homo sapiens
cgcttgcaagatggcggcggcggggcagtggctgctgcgttttcgtgtctgagtccttcctgggttctaatgagggcgcggttctgctgtgcccggcccgcgaggtctaaggcatgggcttccagcctccggccgctcttcttttgaggcttttccttctgcagggcatcctgaggcttctgtggggggacctggctttcatccctccttttatccgaatgtccggccctgcggtcagcgcgtccctggtcggagacaccgagggtgtgaccgtgtccctggcagtgctgcaggacgaggcgggaatattgccaattccgacgtgtggagtgctgaacaatgagacggaagactggagcgtgactgtgatccccggtgcgaaggtgttggaagtgacagtgaggtggaagagaggtctggactggtgttcctccaatgagacagattccttctcagagtccccctgtatcctccagacccttctggtttcagcatctcataattcatcctgttcagcacatctactcattcaagtggaaatttatgccaactcttctctgacccataatgcctcagcactttgggaggccaagatgggaggatcactcgagcccaggagtttgagaccagcatggacaacatagtgagaccctgtctttacagaaaatatgaacgttacctgagcatgatggtgcacacctgtggtcccagctacttgagaggctgaggtgggaggatcacttgagccctgggaggttgaggctgcagtgagctgtgattgtgccatttcacacttcagcctgggcagcagagtgagaccctgtctcaaaaaaaaatcaataaagtgc

SEQ ID NO: 175357 - DNA, 901 bp, Homo sapiens
gccgcctaccagggcgactttaccattgaggtgccgccctccacccagcggctggtggtgacttttgtggaccccagcggtgagttcatggacgctgtccgggtcttgccttttgatcctcgaggtgccggcgtgtaccacgaggtcaaggccatgcggaagaaagccccggtcattttacataccagccagagcaacacgatccccctgggcgagctggaagatgaggcgcccctgggcgagctggtcctgccttctggcgctttccgcagagccgacggcaaaccctactcggggcctgtggaggcccgggtgacgttcgtggacccccgagacctcacctcggcggcgtctgcccccagtgacctgcgcttcgtggacagcgacggcgagctggctccactgcgcacctacggcatgttctccgtggacctccgtgcgcccggctccgcggagcagctgcaggtggggccggtggccgtgcgggtggccgccagccagatccacatgccaggccacgtggaggccctcaagctgtggtcgctgaaccccgagaccggcttgtgggaggaggagagcggcttccggcgcgaggggtcctcgggcccccgggtgcgccgggaggagcgcgtcttcctggtgggcaacgtggagatccgggagcggcgcctgttcaatctggacgtgcctgagcgccgccgctgcttcgtgaaggtgcgcgcctacgccaacgacaagttcaccccagcgagcaggtgagggcgtggtggtcccgctgcacatctggggcgcccggttttccccaccctgggcctgggcgcttgtcgagtcacggccccagggctgcctccgtttgcctctcgctagctccgctgtccccggtgcggctgccatcctctcc

SEQ ID NO: 175358 - DNA, 529 bp, Homo sapiens
agcctgaagctttttttaaatgaagatttattcaacaaatgtctattgagccacttatttgtgccacaagctgtttcagataaggaggataaagcaatgaacagacaaattccattcctccttgagtttacaattattgttatctagatttaacgagaacatttttcaatgggaatgacggtgactaagagggggtgaatgggcctgtgtcttgtaactagatggcattgctaggcaccgtggactcagggggctctctctgagattggtatagtgtatgggaaagaaaatctgtatccttgaatattttttcccagctctcttactatcctattatcttaggttatgttgcatgtattctatattgtatattatgcataatatatttataatttctgtctcagtaatgaagtgatttcagaggaggtaagaatgaatcctttgctaataagttattactttccttgaaaatccaaatgacaagaggattattcactttgcaaaaggattatttatttttataatgttt

SEQ ID NO: 175359 - DNA, 223 bp, Homo sapiens
caggcattctttctgcccaacccaacacactcaactcatgcctgcctcaggagctttgcacctgctgatccttttctttagaatatggcttggataggtcaaattcggcttgcaatttgtttctgcacagccctcgagtggagagaatgtttgcacatttaaagggttataatgaaaaggctgggagtgatggctcacgcctgtaacaccagcactttgggag

SEQ ID NO: 175360 - DNA, 305 bp, Homo sapiens
ttcccaataaaccgaacgagtacaagcctcagcatggaagcacagctttctagaagctggaaaatcaggctcatcacaaaagctcgagcacagttaatttcctctgacatttcctcctgtggttagtcttggagccagcaggtggccggaggcgccccattctttcccataaatggacggtctctaaggaatcaagtcaggccctcatctccaaaccctcatcccatttttccctggcctgcacgtggccagctgtgccccgcgcctcgtaggcctgtccctggctgtgccccgcgcctcatagg

SEQ ID NO: 175361 - DNA, 596 bp, Homo sapiens
cagtagaatgggcattaaaatgtctacatcttaatccctggaacctgtgaatatattaagttataagtggaactaaggttgctaattggttgaatttaaatggggagattatcctggattatccaggtgtgcccaatgtagttacaagagtaactacattgttagtatgtagaatactacatactaacatgaagagagaggtggaagaatctgtgtcagagtgacgcaatgtgtgagactcaacctgacatcactggctttgaaaatggaaggaggccagaaaccaaggaatggtgacaacctctagaagctgaaaaagaggtaaaaaaaattcttttctagacacttcagaaagaaccacaactctgccaacaccttgattttagtgactgcaaacccatttagaacttctgacctccagaatgacaaaataataagtttgtcttgtttttagccactaactgtggtgatttgttgcagcagcaataggtatgttacagtatgaaagctatattcctctgaatgaatattgctcattgaagacttacggattataggttcttcctccagtatattattttttcctgcttcctcct

SEQ ID NO: 175362 - DNA, 288 bp, Homo sapiens
acggattcagtctttttaccattaagcattgtgttggttccaagttttttgtagatgaaaagtttcctcactagtttgaggaagttcctttctattaagtttgttgagtatttttaacatgaaaggctgctagattttttttaactgctctcactctgtgaataattggtattaattcttttttttaatttattttttattttcatttttgagatggagtcttgctctgtcacccaggctggagtgcagtggtgtgatctcgactcgaatacagcagtctctacctcc

SEQ ID NO: 175363 - DNA, 384 bp, Homo sapiens
aatgtgattgttcggcttgtggatcgggtgtcagaaaatctcttgggctgcgttacccaagagtgagacctcagcagttccttgtgccgtttaagtgtttgtgttcactttagttatcatctgatcatatgccagctggtaataggattgtagtggctttgcccaacaatggagtcctaaaagagctgagaaaacctgacagatttggtgagtggcagaatccttagatgtctcatttaatgctgggtgatttagtgcatccatgtggaggagtgttttcaagtccacatcagagcagagcaattgtggaaagacatcagagccttccctgaatgagatggcatgagtgggcaaaggcagttattgcaaacaagctcagaaatc

SEQ ID NO: 175364 - DNA, 356 bp, Homo sapiens
cagcaagctgagggagtctccttgtgcccacttctaatttctgagtgaagtaggaggccactccattggttgtgagtaaagaggacggcagcagaacagcgatgattgggaggggagagttgggccattgagggtggagaaatgtgcagtagccatcgtggagagtgagaggtgaccaaattactgggcagcatttcaggtttcattcgtggtgggtaattggggctctgtaggcctgccaacctgccctgttgtcagaggtctgcttaggcggagacaggtgaaaaggggacgctagtacaatctaagtttgggattttgccagaagttaagactaaaggtcagagagagtccag

SEQ ID NO: 175365 - DNA, 302 bp, Homo sapiens
gggcaagagggatctgtcgtcagccgtctggatgagaacatggcttcactccttactaactgtccaaccggggcaagttacttgatctccccaagcacctgcctcctcccctggatgatgggataatgagcagcttcctcttagggctgtggtgagcacgagatgagactatctgtggtgagcgccatgtaccgtgtcttacaccatagaaatgttcttattctacgactccctcaccttgaaccaaaggaaaatgcagaaattctcttagatcttataaagaacttacgttacaaaactta

SEQ ID NO: 175366 - DNA, 328 bp, Homo sapiens
ccaccgcacccagccaaaaacctttttcttatatgagttggagggatgatatatgatggaagggaggggagaggacaagtgataaacacctggagggttgagggatacaggggacaacacagctgtggacttagcgtgtttggaaaagccaggcagtttgaccctgctgtgtgaggacgaaggcatggaggaggaatgtcaggaacaagagatgatcaccaggtgtcagaacttggaagatttagagcaaaggacaataggaaaaaggactcacggagttactattcacaatgccagtaagagacacgaccgtcacccttctctattt

SEQ ID NO: 175367 - DNA, 385 bp, Homo sapiens
tagataattgccttgtcatgaatatccaaaattgggggtgataatacatttagaaaccagtttctgctgacaagcatgtatcagctcacttttggataacccatccacagctacttattttgaagagtgctggatagtggtgaccacacatactctctgttgggtaatgtgttttaccttaaacatttgtgtttttgcctcaccgtggtgttgcccctcgggtccctggtttgttggtttctctaggctgtggggtattggcatgtcttacatacggctgttttctggatatgttagaccatctgatgcatcatctgtgaatgaagttgaatgtgttttttttttttggagacagagtctcactctgttgcccaggctggagtac

SEQ ID NO: 175368 - DNA, 340 bp, Homo sapiens
ctaattagcaatcaaacctatcgattctactcatgtcagcttccactacaaaacctcctaaatggtctccctgcctttgctaataccaatctttcccaatcttatcaactccagtgactttttctaaaatataatgggatcatgtctctcatactttacagcctgtaagatgaagtccaactaccttaacaaagcacacagggccatcaaaaactaaaccttatcctggggcctagcacataacagatgctcaataaaggctaggtcaacaaatgaatttatctctggtttaggaaagaatgaagccatatgggcattacagcaaacctcttagttcacc

SEQ ID NO: 175369 - DNA, 837 bp, Homo sapiens
cgtggtggcgcacgcgtgtagtcccagctacttgggaggctgaggcagaagaatcccttgaacccaggaggcggaggttgcagtaagccaagattgtcactgcactccagcctgggcgaaagaggaagactccatctcaaaaaaaagaaaaaagaaatttcatggttatgcaactcttatttatgatcagaaaaatggacattttgtgatttaactctgtaacatgtttcatgtagtaaaaatataataaaactattaatcatctagcttgggagagataggagaaagacattactgtcactagtcaaattatatatcttttactatccaccaaaaatctcttctgatttctggttagaaggcatactattaattgataagaaaataaaactgaaggcctctaacatatcacagggtaataagaatatagggaaagttagttcaatagtttaaattaaagcacacttcttacagtatagaactagtcgggcttttatgccttgttttagttcttactcttcctttaactctttttctgtgtgatgtaatttacattaatgcttaagagtgaactttttaagtgtgggtaaaaacgaaataattacttacaaagtttaattcttccatttcctttgagagaggaaagttatggaaaagcagctcttatctaaagcaaagagcccacagattgatttcattggccctggatgtatttaatggatttttactatgcacataatttccagaagcattgttatttatttattaattataaatttagtgtaaccatttcatagggttacacagaactacccagttgtgcatgtctgatgtaat

SEQ ID NO: 175370 - DNA, 484 bp, Homo sapiens
atgaatgattacaacaaatattcccaatagtatttggataccaatatcatctttacattttacttatagataatgaaacttaggcttagtgagttttccagattaccctaggtgaaaagataataattgtcagagtcagaagtagagtccaacttctctcccttcaaatttcaggctcttagcaaagtgacaatacttgaaagcaataagcagttggtttataacatctaaagcatctgagctacaaaataatctatgatccatcctgtcatttataccagatcatgaatataaatctcgctgaaagaacagcaagattatggggtgaaaaaaatatgtttttgaggaaaaaatacaacatacaaatcttcatcgaaattctagactgcttactagtttgtttgttttaaggttactatgtcattgtgtatttagccacattcttcaatttcctttttacatttccaaacactcaaagaaacta

SEQ ID NO: 175371 - DNA, 892 bp, Homo sapiens
actccccggctcactcctcactcccctgctcactcctcactccccagccctctctgccatgcctgctcactcctcagtcttcagtcattactcgtcacttctatcagggagggtctccctgatccacctgtccacagcgtggcatgctttctaaaagcgctctgcgatttccttcacagcaccgtcacccgtgtagccatgcctgtgtgtgactgatctcatgtctctcccaccacacttcaacggccaagagggcaaggcttgtggcagccttgcacagtgggatatacttggaccctcctcggcaccagcacacgggacaggtcaacgtctgataagagaatcagccacttcctggtacaccccctaacacaccccaggctgtggacgcgaggtccaccccaggcacagccacttcccctcagtccaccatgggggttccaccgtctttcaagacagagccctaacctcaccctccctgacaccttgctcccttcaattactctcacatcctctgtgatccccccaaaaagctgactcttcctaaaccactatctcagtttcacataatgtcatgcacatggtctgttttttctactagatttattttctttcattttattttgacacagtcttgctctgtcacccaagctggagtataatggtcccatcacagctcactatagcctcaaactcgtgacctcctgcgatcctccagcttcagcctctcaagtagctgggactacaggcacgcaccaccatgcccagctaattttttaattttttgtagagatttggtctcactatgttggccagactggtctcaaactcctggcctcaagcaatcctcctgcttcagcctcccattttggattacaggtatgagacccca

SEQ ID NO: 175372 - DNA, 585 bp, Homo sapiens
cattgagggaaatgtggcttctgttgtttctggcaaggatagatatgtatgtctggaagccaatcttagctcttgctttacaatctcttatgatgtcttcttttttttttttttttcaagaaagaaaaccttagagagcattaaagaaaaggttctaggctgttgtcctttgctatacttggttttgatgccctaaggttgatgcgtccatttgctgcagagcgattgaattacatctttatccataggcagagcaggaggccatacactgaaaaacgccgactgatgcacttaaggtatttgtggcaatctcatcggctgttgtggagcctgcacagatttcctgtgacatagaaaactcttcttgtttagatgcgctgtgctcagtttcattttctaaaaggttatgtatctgcagtcaggtgatagattagcaaggaggcaagtgggagaagaatagcccttttcatgtcttaaggcacatttgaaagtaagtggatctgagagacagtctaattctgggagactaagtttgtttgaatttttttttatggtccttatttgtctgcacaaaagttgtgctta

SEQ ID NO: 175373 - DNA, 675 bp, Homo sapiens
gactggggtattgtggtcccccggtgagaacgtcggtggctggcttcaggcacctttggcctgcccccgcctgtctgtcaggcctccgttactcaggtgtgttgttcactcattgatggagcaaacacttaacagacgttgcatctgtgccagcctctgagctagttgttgccctccctcccagaagctcccaggctagtgaagagcaaagaccagcaaaggggagctggcgatggaggctggggcagcaggatgttgaaggccattgggagccttggctctgtccagagaactggggagcccatccaccaagctcgcccctgaagcacagcgcaagtttccggatggaggaacagaggagtcgacatccaaagcaggcggagtgggagagcagcctggtgtctgcagggagcagggaaaggcaagggactttcatctccaagatgatgaggcctctgggtttctgtgaccacctcgactaccaccaacagagccctctgggcctgccagactctaccacccactggaacccactcccctttcccctctcaggcagccagagactccatctgtccctgcacacctgcccttgagggcctctcctcaggcttcccagagtgtgtccagcccctgcctggcctgaccctgaccttgcagctatgagatttgccttcc

SEQ ID NO: 175374 - DNA, 586 bp, Homo sapiens
gaggtaggggttcaacttgattctttttcatgtggatctcagttgtcctagcacaatttgatgaaaagacccttcgttgtttattgaattgtcctagcgctcattgaaaatcagtcaaccatctggactcacagttctgttccattaatccatatatctattcatatgccagtaccacatagtcttgattgctgtggctttgtagttagttttgaaattagaaagtgggattcctccaactttgtatttttcaagattattttggctattcatcaggataaatgaatgggtgtagggcagtttaatggtatttcctaacatcctgccagggctaaattagagattggagagttttctttcacatgagacactgataatttttttttttttttaagacggagtttcactcttgttgcccaggctggagtgcaatggcgtgatctcagctcactgcaacctccgcctctcgggttcaagcgactctcccgcctcagcctccctagtagctgggatcacaggcatgtgccaccatgcctggctaattttgtatttttagtggagacggggtttctccatgttttggtta

SEQ ID NO: 175375 - DNA, 395 bp, Homo sapiens
ttgagagtgtcaactgcccaaaggtaagggagctggactattggctgcaggaaggagagttacataaattactgggcagctccaattgctcaagggcaaaccgcagttacaggtagcagaaatgagctgttagcagcaaggaaggtagcctctgggcgatgggcactctgagcaggtcaaaaagaccttgaaagagtgctgacagcatctgctactgctccccaaatgtaatcctatctcattccatagcacatccttggaaagaacccattggaacgcaggggacttttgggtgggggtgggtagaagtgacaaaaattaaaaaaccaagaagtttagagtccctttctcaccaccctccatttcttgagaagaataaggtcttatttgatgat

SEQ ID NO: 175376 - DNA, 380 bp, Homo sapiens
tggcttaaataagagaaattaattttctcacaattctggagatggaaagagcaaggtgtcagcagggttggtttcttcagaggcctctcttcttgtcttgtaaatggccgtcttcctgtgtcttcacatggtcttccctttgtgtctctctgtgtctaaatttccttaccttaaaaagatgctaattggaatgggacctcaatttaaaagaaaagaaaaagaaaaaggacgctggtcatattggattggggcccactctagtgacttcacttttacttatttacctgtttaaaggcccatttccaaatacagtcacatactgagatactgtggttagaactttaacatgacttttggagtgacacaactcagcccagaac

SEQ ID NO: 175377 - DNA, 509 bp, Homo sapiens
catgagccaccacacccagccagatatttgttaaattataataaacaatagctctacaaacttcattttgtacatactgggcttctaaaatgaaatgatttcagataacaatttgaaacttatatagggcctcaggacattcttgataaaacctcagaattgaaaatgcaatcaggtattatgtgtaattaaagtcaggctattttaacttgcctcattaatttggagtttataactatattgacaatatctgcagaaaggatttgtttagcatattaatggtttagacaaggtccaaataatgcacacctacaacaaacttttaagcacttaaaataattttagaacctccttttgcatgaaaacaatttgctaaaataaattttatgtctatttgtaaatttggatctcatatgctctctacttagaaatattccaagatcctcttactaaagatatagtcgtgcaccacataatgacgtttcggtcagcggcagaccacatataca

SEQ ID NO: 175378 - DNA, 393 bp, Homo sapiens
ctcctgggttctcgccattctcctgcctcagcttcccgagtagctgggactacaggcgcccgtatacgtggaatatttctaaggaattcataagaataagaagctgacacattggttgccactagggaagagaactgagtagctgaggataaggttagaggtagaaaggggactctttactgaagagtcacttgctcagggtccatactcatcattctggtctcttagtattatcctcttttaagttaatatcacttgtcaacttctttcaacacttttttgcagatgaattcaaaatacctacatttaatcttatcagccttctactttcagctgtctattaaacaactctgcgtaggttccatgagccaaccccttaaatctacttaaaga

SEQ ID NO: 175379 - DNA, 376 bp, Homo sapiens
gatagaattgtttcaagggctgtggtcagaggtgtctaagtgctgaaaaaataagtttgatgagttaaagcagagggcttccagagtggggtccataggatcaatcaatagccttcaggaggttggtgagtccccagaaataacatgcaatattttgcatgcatttttttggggagagtctgtgttaaaactagattcttaaaggggtagagaccatgctgaagtaaagctactcctgccagctatctccaagtgcctattttacaggagcccatgagctctagctcaatttatttctcccctttcttcccagtcaccatccccttccctagtgggcacctactacttcatccctcttcatcctgcttcatcccct

SEQ ID NO: 175380 - DNA, 288 bp, Homo sapiens
tatgttgttcacatcagcatagtgcaagtttcttggagtaagtctagattcattttatttattacaaagttttcaaacatacatttcatgttatggctgcatctgttaataaatttttatttaatgaattttgtttgttgcttcaaaaatgaggaaaagcaataaagtttagcaagaaggaaataaggcaaagggaggtgtttagagttgcagtcccttaatatcgcagattgtttactggtaagtggtggggaggggttggtgggaggttttgtggaagatcatacc

SEQ ID NO: 175381 - DNA, 346 bp, Homo sapiens
tcagaaatataacatacacatctcctaagaacgactttatatccatacagtagaatattattcagtcttaaaaggaaatgaaatcctggccgggcacggtggcttatgcctataatcccaatactttgggaggccaaggcagatgggtcacctgtggtcaggagttcgagaccagcctggccaacatggtgaaaccctgtctctactaaaaatacaaaaagtagctgggcatggtagcagatggcggtaatcccagctactagggaggctgaggcaggagaatcacttgaatttgggaggcagaggttgcagtgagccaagatcgggccactgcattccaccccgg

SEQ ID NO: 175382 - DNA, 298 bp, Homo sapiens
taaaaatagctatttttttaaaaattggtgagaagaatgacattgttttacatttttgcagatctctttaatgtctgacttcataaaggatagctgaattctcatatctgcatatgtctgttacaatatactgtttgggttaaagtatatgaagaaaatctggttttacgtagatatataaaaaaagattttttaatagtcagttcagacaattttgcatattcttcttttgataccgtactagatcttaatacttggtagttttaaggttagttgcggccaggcgcgatggctgatg

SEQ ID NO: 175383 - DNA, 383 bp, Homo sapiens
tcaacctttaaatatgatcaaacttcaggcttcctgaagatgagattccagcaaaaatttatttgttgtattatctgtgttcattttagtagaagcaaagaattattaattttatggctgttctaccctgaatattcactaagaaggaagagattttctgaattcatcagctgtaatggcaaaaccaaaaagaaaacaataagactcacgtgttgctcatgaacacaatgacagaacaccacacaccagttctgctgctacaggtaatctatataaaaaatgtaaacttactgatactcattgaatttgagattaaggatagagagattaaggatagagagattaagggtagagagattaaggatagagagattaaggataga

SEQ ID NO: 175384 - DNA, 150 bp, Homo sapiens
tgatatgagtacatattgccttcaggatatattctcaatacatttctccattcattgtcatccacatctgtgcctctaggattcttccaaatccctcctgttattgaccaagaacttccatgggctcgtttatcatacttgagcggacag

SEQ ID NO: 175385 - DNA, 861 bp, Homo sapiens
ctgtgattctaggattgaaaaagaggaaatgattccaaagcaggacatttctgaagaattggaatcccagagagcaaaatcagaagatcatgtaaggaatatttttaaggaaactgaagagatgagtaaaactgagggaaagttagagaattgctggagaaaatatgcagtagaaggagttaagaactcattctcccagaagagcaatttcagagaaattaccatgaggtatgtgaaaaccctctctagagagaatggccagaagttcaatgctgttggagaaaactgcattacagactcaaatcctgccaaacatcttagagggtctagagaggagagtctccatccaagtgtgtcaagtgtagaaaacttgcaacaacatgaggacctcattaacctccagagtttccaattaggagaaagagcctatcagacagatgtgttagtgaaagtgcccagacagagctcagttcttagtgagaatcagaggatgaataatccagagagatggtttgagagtactgggcgtggaaaaacttacaatcagaacagagcttttaaccagcaccagagatttcatagtggagagaagacctatgagcacaatgaatgtggaaaagctttcagttggccctctatcctcagtaaacatcagagaatccacactggtaagaaactctacacatgtgaggattgtggcaaatctttcagtgttcactcatactttattcagcattgtaaaattcacactagagaaaaaccctatgagtgtattaaatgtgggaaagcttttagtacacattcatcttatgttcaacatctaaaaattcatacaggagagaaacatcatgagtgtaatca

SEQ ID NO: 175386 - DNA, 325 bp, Homo sapiens
ttgtaataataaaaacaaaaaaagaaagcctattgaaccagaaatccaatgtgcttcagattaagcagcaaaatctttagaagctggatcataatatcaatcagtctttgccacttcctctgcaaacgaagtccaccagttattcctggaataatgctttcaattaaaaatcagcaattactcatggttgttttatttattttttggtggaagtacaggtgaaagtaatcagaactaccttcggtcctgcaaatagctgaacttcaatcgaaaaattaattaaaacaaccatgactaatgtgctgaaactaaatgtgcggaaggg

SEQ ID NO: 175387 - DNA, 335 bp, Homo sapiens
ttcccgacttcgttggcagctcattttggttatatatagctcagaaataaacacaaatatcaaaaataaacacaaataaaaatatcttaggccaaaccaccaaatgtacttagagaagataattgtacaaaatggtgaaatcctcactttctcctgagatagtctgggttttaccaaaagtcttaactgaaaccactgttttctgttatcacctttgtttccttttcccattcatttattccctaatgtattcatttattcaaccatctgttgattagatacttactgtctattatatgccaagcatatttttttgggcttaaatacctcctttt

SEQ ID NO: 175388 - DNA, 747 bp, Homo sapiens
ggacctgggttgacgtggctttgcgggttctggggtcttgccgaaatgcggtacacctctcggccctgcgaggaccggagagcaggacagtgccacagcccttaggggggtccaggccagctggtcgaaagtgaggatcttgccccctcattcatctctttattcttcagccttaggatcttataattattgtccttatttccaaaccaggctactgtccccccacccaaaaaaaataaataaaaaataaaaataaaccaatgttggcaaggctatggagtaaagggaacgcttaggaacgcttatgcgctgttggtgggaatgtaaacgagttcacccactgtggggcacactttgtagatttctcaaagaactgagaaagcaactagcatttgacccagcaatcccactgctgggtgtatacccaaaggaaaataaatcgttcaacggcactgcgcccgtatgttcattaccgcactatctgcaatagcaaagacacagaatcaacccaagtgctcatcaatggtgacttggataaagaaatgtggtgtatatatactacggaatactacgcagccgtgaaaaggagggaaatcatgtcctttgcagccacatgagtgcagctggaaaccattatcctaagggaactagtgcaaaaacagaaaaccaaataccacatgttctcacttaaaagtgggagctaaacattgggtacacatggtcataaaaatgtgaacaagagacact

SEQ ID NO: 175389 - DNA, 616 bp, Homo sapiens
tgtcgtggtggcattccccgggacaagttctctgggcccagctgagctctcaccacgggggatagaaagtggggccggccagcactctgaggccatctccagtctcttctgttgtcaaatttcgctcttttcctcctgcacgcgaggtggaaataccaaaggcattgggcatccagagaccttgattgagttcgctttgccctttcacctgtgtgagaccttaaatgggtgcttgccctcctataacctatttcttcatctgcagtgtagcctgacagtatgtacttctcagcgtagttgtgagaggtaaacaaaacgaatgcatttctgaaagccatgaacctctacacaagttcatttgtggaattcctttaagataccccctgaaggccgggcgcggtggctcatacctgtaatcccagcactttgggaggccgaggcaggcatatcacctgaggtcaagagttccagaccagcatggcaaaatcccatctctactaaaaatacaaaaattagccgcgcgtggtggcaggtgcctgtaatcctagctactcaggaggctgaggcaggagaattgcttgaacctgggaggcgaaggttgcagtgagctgagatc

SEQ ID NO: 175390 - DNA, 411 bp, Homo sapiens
ttttattatgaacattttgaaatgtattcagaaatagcatttagtaaaccaccatgtacccatcactcaagaaagctttaaatcaatgaaaacctgaagccctttttaaaaacacgactttatttatttatttatttaatttttatagacagggtctcactctgttgcccagactggagtgcagtggcacagtcatagcttactgtaaccttgaactcctggcctcaagcaatcttcctgccttggcctcccaaagcactgggattacaagtgtaagccaccatgcccagccctattttatagtattttatagcttgccctttaaacatgagcatgatatctagagtaatagtggagtgatactagttgctttcagagctgagtatcaatttgtttagatgctgcaagaca

SEQ ID NO: 175391 - DNA, 464 bp, Homo sapiens
aacatataaccataatgatcacatttgggacatttatcattgttatagtactgttatttaatatgcagttcatattagatattcaagtttcttcagttgtcccaataatgacttctgtagctatctttttaattttaactaatctaatctatgcttactcagtgtgtttggttatctctttaatccaaaagaattctttagcctattttgttttgtacaacattggcaattttgatgttgctgttttgtagaatgtccttttttttttttttgagatagggtgtcgctttgtcatccaggctggggtgcggtgcagtgatctcagctcactgtaaccttcagctcacttgacttcctggggtcaagtgattcttgtgcctcaccctcccaagtagctgggagtactaggcacgcaccaccatagctggctaatttttgtatttttagtagagatggagttttgc

SEQ ID NO: 175392 - DNA, 467 bp, Homo sapiens
cacacacacacacacatttggcttatcttttatttagggtgatatcaccactctctttgttagtattatgtgaaatgatattgagaaaggacctgaaatctaataatccataaagttctagttatgttgaccattctatagcttcagctatcaacattatgggtgacttatggttatatattcttttcatgaaggctcttctgaatgcaaatgtaatatttaaagttgttcatcagacttgtctaactaggcatcctaccgaagtgtcatgcaggttgaatgtcccttattcaaaatgcttgggagcagaagtgtttcagatttcagatgttttcagattttgcaatatttgtattatattagttgagcatcctaaatccaaaaatatgaaatttgaaatggaacatgagcattttctttgattgtcaagttaacactcaaaaagtttcagattttagaacattggg

SEQ ID NO: 175393 - DNA, 401 bp, Homo sapiens
tcttaatctatttctagagggacaaccctcccttctagaactactctgtattctagaggaaaagaattctcaacagtgcaatctacaacactatcatccaggacctaactgaagtttttataatatgagtttccacaaccatgaaaaacaggaaaagaatacccaacatatacttttgaactctgctgaatcttattctctcatatagcgttattattaatcaacaaaatgtaaaacaacaaagaaatgaacaaaaaaaaacactggcgatgaagcatacaaatatttcctccctatacttctgcccccaccccatccagcaaagtaaggaaaggcctacaccaagatcacagaacagtcattatagtaatctaatccttatatctttgaaattagataat

SEQ ID NO: 175394 - DNA, 326 bp, Homo sapiens
gtagaagcagccattctttgtgtgtggggagggacctccgccaagttttcttagatggaaaggtgttggctttttcttatcatggggagatggtggagtagaggggggagtgtggtgggggtgtgatattctaccctaaaatatttttcaaaaatatactggcaactaaatctggccatgtttgtgggattgggtggagttttccttaaagtgatagggcagggcacactttatctcaaggttttaactggagttgacacttgggaagacattctcttgggtaatacatgctgcagagaccactcatgggcagcctgattcagaga

SEQ ID NO: 175395 - DNA, 498 bp, Homo sapiens
aaccacagcctgatgagaggctgagttacagcacgttatgtttattggctgcaaataaacgtgtccagtactcctaagagcagtgctcactccatccttggctttgccagcctcgtctgcttcccttagattcctgagtgtgacttcctaagatgtatgtgggactctaatgtcaaggttgctgtttttgttgatgttcactttcctacagccttgtggggtgtgctgctaccatggaatctccttggaggggtggcttcggcttcagatccagcatcctggaagttacttggtttagcaaggcattgttgcctggtagatgatctgatatggttgaccacagtctgaaggcatagaaatgctgttttattataaagtccgggccaggaaagaaatagaggatattgataattaggcctctgccctgtgggagctgtttttctatgcattcctaaaatacttgagtgcttgtgaggtgtatagtactgaagtagggga

SEQ ID NO: 175396 - DNA, 418 bp, Homo sapiens
tgaataactcatctaaggccatgcatattaaatagaaaaggcttaagttgaagcactgaagtaatttagaatgaacataaacagcttctgatactaggtgcactgagtgtgacgtgttttgggaacacagcgatctttgtttttgacaagtactacatctgagatgacatctgaataattaatatgtttagcccagatgatatattttcaaaagtaatgtgctactctggatacagattttcaaattacaatcagcacttcttgttgccacctcccattatgtgtctttcatcacctgtttagccagctgtgctgctatgtaggcaaaatcaaacattaaacagatgttccttgaactgaaagtaggaggtgttttcaaacatggctagctacattgattagggatgaaatatatcaa

SEQ ID NO: 175397 - DNA, 726 bp, Homo sapiens
cagaaaattggacagttttaaaaagtggtccagagaaccagcaaatatgaaggcaggctaataaaaatgcatatcactctaacagtttcaaggcagtttcctcgggagactgaggtgggaaggtcgcttgagcccaggagttcaagtcctgcctgggcatcccagtgagaccccacctcttaaaaaaggaaagaaaatggttttttaaatcatttcatttcgtataagattattttgcgaggttggtgcatgacattggagttgcccagcaattggaaaaagacatgagcgtttaatactgggcgttctttctaaggctcttaaagtgaaggcaatcacataaggctatcttgcttcatgggtaattaaggcatttccttctgcagttcccaaatctaatgaagaagaaggaatttctcttttgctgaaatatttcttgtaaggttttcatttcttctcattgctccgactttggaaaaatgttctttttacctctgattttctcttgtaatgtcttcttgaattgtgagtcggggaaaaaagtaaaagattcgctacagattcagacttgcaaaaaaacgcttagaatcttgctgtccgtaaaactgaaacatccagcctcacaaatgtccacatttctctctcatctgtgaaggcccgttgagactgctcagttggtgtctcctctgtccacaggacatggccgtagccgtgtgtggagaaggg

SEQ ID NO: 175398 - DNA, 467 bp, Homo sapiens
gacctgtgtggtgaagcccccagggttctcagtccccctccccccgcaccacaatcccccctcaggcacccagttcacctcccatcagaccagcaggcagagctcaggcctcctgcatggtgctgggtgccctgagcctccttacagatagcagtgaggtgccctggggcctgagggccagcgcgtacagcactccttgctaaagagccttaactgaggtcactcatggaggccacatcgctgcccagatgaggggcagcagcagtggcttcctggaaagtgccagaactcagaggagccggaggtgcggtggctcctgaggacgggcagcgggcgacgggttggacggggtggagtattttttaaggatttttaagtgtttcccacgatttgctgaacatgtcaagtgagaaacagcacatcacgcactccacgcatgaagctaatacagtgaaaatgtaaatgca

SEQ ID NO: 175399 - DNA, 405 bp, Homo sapiens
ggcttgaaacctgaaagaaggcattttaagaaaataaagcaaacaatatttttgactcaaatcacggaataaattatacaaagacgtgtgcccactggagctataaaataagctcaagaaatatttctatcaggtgatggatactagaagtgtgaagaggtgtctctggtcactgaagaaaacagagtgccatctagtggaaacatttcactataatgtattacagtacacactaatttagatttaggttcttttttttcccctcgttacggagacagggtcttgccacattgcccaggctggtcttgaactcctgggctccaggcgatcttcctgactcggcctcccaaagtgtttggattacaggcatgagccaccatgcctggccaagagttaggttcttaa

SEQ ID NO: 175400 - DNA, 252 bp, Homo sapiens
tacctattccacttgtagttcataccatagggaaattatggcaaattttaacatgtacaagaatgacaacaaaattttagaaaccaccaaatatccaccaataaaggtatggaaagtgaactatgacactcatatttccgctagcacagcagttaaaataaatgatctaaatctaaagtatcagcataaagctcaaaaggtaatactgaacacagaaagcaagttgcagaaagatccctataattttttttt

SEQ ID NO: 175401 - DNA, 114 bp, Homo sapiens
gtattttaaccactttcttcctctacagtggatgcttagaaaaaagaactgtatcaagatgtagtataaagactgatcaaaatacaattctttgttcaaacaagatccttacag

SEQ ID NO: 175402 - DNA, 166 bp, Homo sapiens
agatgaataaggtgaagggacttgcatgcctgatattgactcattgtaaagtgctatattgttagtgatatacaaaaacagataaatgaagcagactagcgagccctgaaatcaatagatgcatagatggaaatttgtattttaggacaattgattatccatgtgg

SEQ ID NO: 175403 - DNA, 535 bp, Homo sapiens
atgatggtgtcagcaccatcagtataaatagcaatacagagggaggaagcacatgtcttatgaaaacagccttgaccttacagacgctttgaaagggtcttgaggacctcaagggtccgcactttgaaaggtactatgatagttaaaaggctgtgtatgagagtggctgcaggtagggagaatgtcctaatttaggtaggttatgtagggaaagtcttgttgagaaggtgacattgaaaatgagtcttgaatgatagaaggcaagtttagtctctgatgcaatccatatcatctgcttgactaaatgagtgattttcaaccaggggcaattttgccctgaaggggacacttgtaatgtcaggagacattacaggttgtaacactaggggaatactactactggcatctagttagtacaggctagagatgctgttaaacagggaatgaatagctccccacaacaaagggttatctagccaaaaaaatgttaacaatgctgagattgagaactcctgccctaaaccagcattgaaca

SEQ ID NO: 175404 - DNA, 510 bp, Homo sapiens
aaaatgagtcatgtgaggtaacttccaggctcactgcaatgggtacggtggggtgtatcagattataaagtgggggtgccctcctcacccccaggcttggcctatacccccctctccatcaagtggcctctctgtgtctgtcctttggggtgaggacactgtaggccatgagaaatgggcagttggggggtcagaggccaagggttagggaggcagggcttggggagagtgtgggaccatcagaagagaaggaagtttacaaaaccacattttgtgtggagatggaggctggaggcccggccctgggacttggtctggggtttcttgaggaagatctgagggtccaagggaggaaggatgccctggccttctggccttctctggctgatcctgccttcttgctgcctaggacaggagagtaatgtcctagaatggtccctgggaggccagttaggaaaccctttgctgcttctgtctctagctcttgtcaataaagacggtgacacctga

SEQ ID NO: 175405 - DNA, 303 bp, Homo sapiens
tgagctaagaagtagtggtataactgggattactgcaattgttctgagttgaagaaacttctaaaatgtgtagtgtgaaatttggcttgctgaaatcatggccagagaggtgcattttaaaacaaaaccaatagggaaatcttaaatccaaaattgccttacacatgttaaactagtttaaaataaaattttgtcaaaaggaataaaattgtgaaattgtcaaagttttgttatgtgatatcatctaatgtttgtagagatttttaaaatgtaatggtcacaattttgcaaacaatatataga

SEQ ID NO: 175406 - DNA, 256 bp, Homo sapiens
tcagtttttttaatgcagtggtttttcttgatatgtatcttacattgaacacacattttgttttggttttaaaagctgaggaccagttataagaaaaagatttggaagaatatatgaaaaggctgagctagtttcccccactccctggagtagaaaataaataaaatttccaacttagatgtaggactaataaggggaaagcaaaaggtccttgtgatggagtcttcctaaatagcaatgctctgacttgtctaag

SEQ ID NO: 175407 - DNA, 348 bp, Homo sapiens
tgttaatcaccttagccatgactactacaaaaaataaagtatttttatttaaaaatgtttacagattgtgtaatagacaacagtactttggtatttgaaagttattgcctttcccctcctaattttatatactctttgcaaatatagttaacccttgaacaatgcagaggttggggcaccagcccctgtgtggtcaaaaattcaagtataacttttaattccctcaaaacttaactactaatagcttactgttggccggaagccttaccagtaatgtaaacagttcacacttattttgtacattatttgtattatatactgtattcttgcaataaaggtaagttagag

SEQ ID NO: 175408 - DNA, 123 bp, Homo sapiens
gtcatctgagtgcaccttttcagtctcctccagcgacccctttcgttccactgccactgaaagctttctacacagtcctctgccattctcactctacatctcttctctgggccatgtgagcca

SEQ ID NO: 175409 - DNA, 116 bp, Homo sapiens
tcctgaaattgctgattcaatttctcctaataaaataggaacaataattagctaataagaaatcaacaattaaagctatgagagaattaagtgagatcatgtaagcaaagtacatg

SEQ ID NO: 175410 - DNA, 323 bp, Homo sapiens
ctgcttctgcaattacaaagctaacctgaatcatcctggtgggcagctgattacatggaaacacactacacttagaattacgttcacgtttgggtggcactcctattaacaatttccctgaagaaatcaagtgcaatgctcaacctgtgaccctgaataagatgttatcttctcccatagcagatgctaatttttgattttttattctggtagacaaaatgctttcattttctaattctctattttctgtgaccaataaaaggatatgctttccaaggtcttttttaaagtatcagacactaaaggtatacctcagacacaga

SEQ ID NO: 175411 - DNA, 654 bp, Homo sapiens
ctggggtgatggtgacgtcctgtatattcacagggcttgggttatgcaagtgtctgattttccgaaaactaagagaatgtacacttaagatgtgttcattccattgtatttgccctccctcaattaaaaaagaaacataaaatattgaaccctaggtaacgatctgcttgcagaaatgtttaggagtgatgggaactgaggactgtaatctaatttgagagcatcccaaaaataacactgaccgatggacgaacagagcgagagggatggataaaaggatagacagccagatagacacagttgatttctgtcattctctgcagttctataaagtcaacgaaaacactgaattagcaatatagaactatccctcctaggggaaatacagagttaggttcctaggaaactgtttacattttcatcaactgatcaagacataaccttgtttttttgtgagtttctgtttaaaggcaccttatttaatagacatggttgattcactaacattgaactcttagccaacagcactataactataagcttatctgacatgttttctccataaggcacatacagcattcttgcccttaggaatgctagatagcatttcagcactatggttgggggccatgtcaaccactgaaatcaccaaca

SEQ ID NO: 175412 - DNA, 608 bp, Homo sapiens
tcttctttcttcttcttcttcttagaaactgttttgctggtctaggacctcaatggtcactgcttatattttttatagagttttaatagtgaaagggtatttgtgaagttggtcttgagctgtggccaatctggtgtgctttgtatgtcattctctatggttgtcaggaaattttgctgtaggcctctatcttgttttatgttttcaggagcatgacctgtaaccacgtggcaatgttctgttttggtctctgccattttacaatggtagcccaggtttaatcctggcttagggaataagtcccttctggtttcctatcagcatgtaaattttgccatttgcagattctcttccccttcacaaactgccttaattttttgtttttccactgagcacctggtaagttacctttgataaagtttgaaagccagaaatactggctacttggcactgctagagtcaggtaataaggaatttaaaaggattttcttaaagagtgctcaacttaattaaaagtggatatccaaattataggtatatttaaaaaacctttatgtttttctcttctgggatcttgttttgctggggaaaggtttttttctcagcca

SEQ ID NO: 175413 - DNA, 271 bp, Homo sapiens
ctggcttaagcagttctcccacctcagccttcccagtagctgggactacaggcacgcacccaccatgcctggctaattttttgtatttttagtagagacagggtttcaccatgttggccaggttgtttctcaaactccttatcttaagtgatacgcccgttgcagcctcccaaagtgctgggattacaggcatgagccactgcacccggcctcaatattttaaatatttaaaaatatatttttataaaccatttttatcttaatatggcag

SEQ ID NO: 175414 - DNA, 365 bp, Homo sapiens
caggtgcacacctatgtggcctttttgaatcagtattggttagtgaaattctaaggcatcctttcccactctcaccctccatcccccaaatttatcatttttaaaagaaaacacaagacattagagccaacattgccaatgttgtattataatcctaaatatgatccataaattagaggataaagcgttgtgaaaattttgcatgggaagtagtattactgtagaaaatataggactgttgttttattttatgttgaatttgttctaaatggttctattcaagtatttaatatgtgataagtcttttattttctagtttaagcattttgtcactgtagtattgttttgcagaagaattgctcaga

SEQ ID NO: 175415 - DNA, 511 bp, Homo sapiens
ctgctcagctgcctttcagtcgttgctcttcccctccaccacacaccattccaaaccttgtcactttgagctttcacatctagccctttcagcagacaccttgcccctacatcaagaaactcacagcttacagtcttccagcttccctccctgcatctagaactgcctccacttaaaatcacccttgcctctttccctctaggctccaaaggaaaagtgtatatctgtacatctttctaaggtgtatttcttcattagtgatcttgacttgatcctagattttcccccattgtttctactattctcagtttctttcaactatctttttcctccttggcttataaaaggtatttatctttcacctgctacgaaaccatcctataatcctatatctttgttcactgtgactgttccttcatcttttccatctcagccaagctccttaagagttctctctcctccttttcatatgccccatgcattccttaacctgctgcagcccagcatgcac

SEQ ID NO: 175416 - DNA, 180 bp, Homo sapiens
attgacagaattgacaaacccttagctcaactatgaaaaaacaaaaataacaactatcagaagtgaaagaaaagacattgctaaaaaaagtcaaagtatcataaaagactactatgaacaattatatgccaacaaattggataatctagaagaacagataaacttctagaaacctacaac

SEQ ID NO: 175417 - DNA, 2577 bp, Homo sapiens
  misc_feature (746)..(746): n is a, c, g, or t
  misc_feature (1765)..(1765): n is a, c, g, or t
  misc_feature (2133)..(2133): n is a, c, g, or t
  misc_feature (2345)..(2345): n is a, c, g, or t
tgcttgatgcctggggggaggagctggaaagcctgagaccatttgaaagcattaattgagtacccagggtatatagaccctattctcaggccatgctggaattccaaaggacaagggggctgtctcctgtcttctattagagcatggaccaccttcccccactttcaatttcttctctgtgcccactccccctccccaggccacagctccttcctgggctccgtgaagtacctacagatgcctgatgacctttttagagttggcccaattactcaactgaaacagcttaagcattgcaaattcacacacgcagactctgctagttgtctgagtaagagctagagcgctgggccctggctgtatattggactcacctggagaatgttttaaatgattggaacctgagtcccacccccagagagtatgatttaattggtattggatgcagtggcattttttaaaagctcctctggtgatttaaacatgccacaaagcctgagagcccctgagctggaggatttgggatttttgaattgtttaatgatgagtcgttgggctgaaattgatcaagtgtgatgggatcaagacaggcttagattctatgcacctggtgggctgctatcttgaaacaaaatagtgatgtaaggttttcatatgagtgtgattgtaatggatctacataagagttggtatgagtatagatttgcctggagtaaagtcttcactaaactggcattagttgaggnaagaggtggcaggaagaagtaatcgatatttcttgagtatctgttgcgtgccaggaactgtgcttggaagactatactgatatttcatttattgtttccaaccacatggcaaatgggcattactcctactttacagatgaggaaactgagactcagaaaggataagtgtaattttgcctgagattatacagctattgagttttgggagacaattttctgagggcccctcacatttctgtgtgtcttgcaaagagagacactgactgcctttgtctgaactatccttataaggatgcttgcctggtgaacagctttggaaaatccaatatcttcctctggagcaaagggtaggcatgcttactgtccattataaaagattcctattccttaagctcaggattcctcttttggaacacagtccactctgtgtgagcaggtatcacctagggccctctttgtgctgccttatggagaccatggcttggagaattggcacaaaaccctaatactctggctgctactattgtgtaataaactgtcctttgtctctgatccatgagtctcatgtcttccaccagcatccatgaaaccgtagcaggccagactaacttgttaacttgcaaatggggcaaggtttcagaccccacacagttcttgacaatgtaatctaaatctgttttcctctaaaacctgtgcatttaagagatgggtaagcaagaggagatattaaaacacaacaaaacactctccatcaatgaccactttctctctagatataacagaaattagttccctttctcctttctatgagatacataaacagattcattctgtatcaagagttaaaagaagtacaacacttgggcaccatgaggtgccctctgggttccaggttccatgtgattttcagttctgagctagttcctgttttccctcaaggatgtttcactggatcccatcaactggctctcggccttgataagaaaatctgggtctagcctcgcctcaacacccatacnccactcactctgtggctgttagaagcctattacccccttgacctacttatctttcaaatagaaatgatctttcttcgggtgctaatgctaccggcctgcgtgacccttcatttgtgaccattcctctttgagaccagaattttcaaaagactgattataatcacagtctcattctcaatatttgcaaaaggcctttcctaacacaattctttaaaaccagctaagttaccaggtaagtcaatttcgaaaggatggcttcgtttcagtgctaattagcttctcttctgatggatgagaagtttacatgcaatgatttctagtagcaggttcgtataatttttcaccgctaattattaaaaattattaancataatactcttcaggtgccagaaacttttaaaggtgctttataaagtatcctaaatctactctacaaccctaaaagtgaaatattttcactcaaagaagctgagatttcaaggttgaatatcttgcatgcacagctagtaagtggcagagctggaacccaaggtcacatctgtccagcccccaaagccagacttttctaataaccaactgncccctttttaaaacagctttattgagatataatacacatactctacaattcgcccatttaaaacgtacgattcaatgggtttagtaagtcctcagatatgtgcaaccatcgccacagtcaattttagaacattttcctcacgctcaaaagaaaccctgtagactttagttatcaccctccatcactcctcctccccagccccaaccaactgccttttataaagtctctttct

SEQ ID NO: 175418 - DNA, 573 bp, Homo sapiens
actgtttcccctgatggaaggctctctctgaatttgtaaaagaaaggaaataggcttcttcattgagatcgagagctgaagcatcaagagataaaagcaggttttggaaaacataagaaagagttttctaaaatatgtctgaagatggaagaggctactctgaaggtggcagctccctgtccctgggccttcacgtagtttccactggacaactccacactccagggaggccatggaggagattcaagaactcatgatggggccgggcgcggtggctcacgcctgtaatcccagcactttgggaggccgaggcgggcggatcatgaggtcaggagatcaagaccatcttgggcaatatggtgaaaccccgtctctactaaaaatacaaaaattagctgggcatggtggcacgtgcctgtaatcccagccactcggaaggctgaggcaggagaattgcttgaaccagggagtcagaggttgcagtgagccgagatcgcgccactgcactccagcctgggcgacaagagtgagacaccgtctcaaaaaaaaaaagaaaaaaaaaaaaagaactca

SEQ ID NO: 175419 - DNA, 364 bp, Homo sapiens
tttttagtagagaggggattttgccatgttggcctcaactcatgttgtcttgaactcctggcctcaagtgatcctcccaccttggcctcccaaagtgctgggactacaggcgtgagtcaccatggctagcctaaaatgggcaagtagctttgactgaggaagtggaaatggtctttgaccttttggttgggaagagcagaaatgagagaaatggatagaggtatttaaatgtccagactttaggttttgtttacttgcattattttctaaggccttgagcttggtatgttggagcagaaatgtaggactctagagaattctttcatatttattgctcactgacccaagtgaagctgatgggaaa

SEQ ID NO: 175420 - DNA, 325 bp, Homo sapiens
agtcaggctatggcgagctggcgtttggaatcggaggtgagggacggagtgttcaagagagcaggcggctacacagaggacatcctttgtgtgaggatgttgctgggcattgaatgtccatcagaatagaactgagcaactggccataccctgctgtgaatgaagtcagctgggagaagcatccaggtcagcccggccagcaagagaatctgggccacgcacgtccttggaattttctagtagccgttttttatttcatttcatttcattttgaggatctcgttctgtcacccaggctggtgtccagtgacatgattatgactca

SEQ ID NO: 175421 - DNA, 606 bp, Homo sapiens
ccaagagaacacgcggactgaagtgctgtccacgcggtgttcagatggggctctggaggccatgccatgtgatccctcggtgaggaaaggattccctggccagccatggggaatatgaactcctgaagatgaacaagagctctcagccccctcccccaggcccacccagctgtcctgaggtccccttggaagagaccaaaagagaagaagcaacagggggccagagacccccaggcccccaaccaccatataccacataaaccaactgatgaggaaagaaggtcctaatacaggcacttcccctttcattcttgataaactcagagtccaaacagccctcacagaatgactgcaatgtcagggaactgaaaaagaagagcttactctctcccttcaataagtttcttcccttctctgagcctcagttttctccatctgtaaaagggctgctaaacttccttccagctggaaaccaagatggcggtcttggcaaacctggcacagcaagaaaaattggcctagggcataggcaggaggagttagagagacagccaagtcttcctttgagtcagtcagaaagacaagaaggctttttttttttttttt

SEQ ID NO: 175422 - DNA, 468 bp, Homo sapiens
aatcacacttaaataggacaaggagagcttcaacttcagaataattatcaggataccaatcacacaaatatgattcaacaatcacttaaatatcattcaagaggaattcctggtagtaaaaaaagaaatcccgtaattaactagagcacagcattatcagaaactgattatgtaaaacaatagcttttctttcaggatgtgtgtatgtgtgtgtaacgaagttcacagctaggttacactaatgactcacttaaacatttgaattttctgctatcttaacctttaaatcgactgcaaaagtagctgccaaaagtagcttagtaggaaagcatactactctcaaaagaacttggtatgtccaacttattttactacttaaattttttttgatcactgatatttgaaactaatttttaagtaatgaatgcttactaaatccatgataatattcagcatatacaggttttt

SEQ ID NO: 175423 - DNA, 233 bp, Homo sapiens
cagccccaaacaatgtcaaagagatcccttgagtagttttcaggcgagagatatgttctcatttcaagtcttggagaaaactggatccatgttcacgtggaacttctctcgcggaggtgctatctcattttgcattaaactttaagcaggacagattgctgaagccatgatatttaaggtttgactttttaaaaatctcattactcttaaaataaatgctgccacatcagaga

SEQ ID NO: 175424 - DNA, 217 bp, Homo sapiens
aaaatctgaatatactaaaccacatctacatcttcttttaatctaccaatctcataaccctgtcataaacaaaaatgagggtaggctggctttacttgttcttatgagacaatgctagctccctgagatcaccactctttctaagaatggatgagccaggtcctcactaactgagtcccctgctgcccggccactgcttctcctcatccctgttgcc

SEQ ID NO: 175425 - DNA, 990 bp, Homo sapiens
agggcaggaattgcttgatgagtaacatttatatatacagaagaaaaaaatcataaaaatgtaaacttaaagaagtcttccactgagacatacaaaagcaaatgtatttaatactaagaaaaaaatttccagaaatgctgtccattctgaaatattattaaagagctcctagaataaatgtgataagtgtgtccataaccactacctgaaaatcagatcttagtcaaccttgtaacccaactgggctaatttgaaaatcatcatggccaggtgtggtggctcaccctgtcactgtagcattttgagaggccgaggtgggaggattgcttgaggccagttcaagagcagcctgggcaacatagcaagaccctacctctacaaaaggaagtcataaaaaattatctgagtgtggtggtgcatgtctgcaatcccagctacgtgggaggctgaggtggcaggactgcttgagcataggaggttgaggctgcagtgagctatgattatgcctctgcacctctgcactccagcttagaaaacagagcaagaccctgtctcaaaataatataaaataaaaacccatcatttagaccaggaggcagcgcttgtggagaaggcgttcagctcagagcagcaacagctttcaagcatctaccaacagccaacacagcccctgaatccgtctgcacctgccccgtccctacgcatcctaataaattcacgagtgtcctggtaagccagaacctccgggatccaggcagccagaggacagttcttcccgcacttgtgggtagcaacagccgtcctgctacccaaaaagcccagttcttggagccaagagctgatgcgaccacagcctgcaaagtcttgagcagggacgaagctcatgatggcttctggcctctcttcattcaggagggaaggaacccaggtgcccgaactgccggaatttgccaagaaggagggcagattggtgcacctccagctatttcc

SEQ ID NO: 175426 - DNA, 342 bp, Homo sapiens
ctataatgatgatgaagaacacaccataagggacaggtgtggtggctcgtgtccagtaatcccagcactttggggaggccaaggcaggcagatcacttgagcccaggagtttgagaccagccttggcaacatggcaaaaccccatttgtacaaaacaaatacaaaaagttaactgggtgtggtggcgtgtgcctgtggtccctgataccagggaggctgaggtaggaggatctcttgaacctgggaaatctgaggctgcagtgagccaagatttcgccactgcactcaagcctgggtggcagaatgagaccctgtccctccctccccacaaatgcctgttct

SEQ ID NO: 175427 - DNA, 711 bp, Homo sapiens
cagatgtgatccacttaaaaaggttctgaaaactcaattcagtgaagtgtgtttgggctcagtgcattggacctgtgacttcctgtaatgtttacttaaccccctaacttctaagtggtacctcccccacctccctggaggggaaaaagatacgcaattggttttgcaggattatggagatcaaacaagcatctaacaaagactcttccttccaggtacctctttctctcttccctctcatcatagattaatcacttagttgcaagggaccagtaaattaacagaatggtgaacattttccttttcttgctgcttttgctggatgactagtggtttctgctggaacagagatgaaccatctcaaggttatgaaaattcctgactgtggcaaatgtgaaagagtgtctttttaattcctgggaaatactaagacttcttctctaaggtgcttatttgtaaagtaaaaaggtgaccttaatttccagtgctatgcagtgaacacaatttttgtggaaactagttctaggatttgaaatgaagactatatggtctctgttaatctgtattggtaaacgcactgcactttattgagagttctggtcgttaaccagcggaattactagtattatagaaatttattaaggatggcttattggagttgacttgtaatttcagtcatttctttgtaattacgaggtaaaagatgatttg

SEQ ID NO: 175428 - DNA, 373 bp, Homo sapiens
ctctagaggatctcagagtcatgtatcagaactgactaaaggttgggtggagagcatcttatagaagaggtaggatgtggatgggcttgagtgataagaaggattggatgaacaggaaggaacagtgagggcattcaagttcctctactacctacttatatcttactttccacttctcatctacatgagtcacacagctcagttaagtcaagctccttgttaatctttattttgaacctttcataggaaatgccctcactgttcctccctgttcatccaaatccttcttatcactcaaagcccaatccacatcctacctcttctataagatgctctccaacccaacctttatcagttctgtatacctagcctt

SEQ ID NO: 175429 - DNA, 857 bp, Homo sapiens
  misc_feature (818)..(818): n is a, c, g, or t
aggaaattcccttccttgtatagaaacgtgaggaatgggacaaaattgtccccctccaaaattggtatctacacagagaatccatctgttttcccaaaataagtccttctattccctttaccagagctgtgtagttgaaaaaaaaattttcagcctagaattttaatgctcatactcattaacatggtttgaaaaattgtattcttccctaattcattgtaaaactatccctgatacaaaggtcataatctctgacagtgctgcttttaaaaaggggtgtcatttgagatttttggttttctttaccaagaaaacatattttgaactttctaaatagcatgtaaaattttataatgttacattgtctgtgaagagataataggaattttttacacagttacttgtcagtcataccatggtggaaagaggagcaggagaaaaagaagtttttgtccatgaggaactttcactgtagtccaggaggcaacatcagacatgaattagaagggggataaaagctaagagagctgttggtttagtagctacattagtaggaagctaaacttgtaaaactgcacttctgttaaccctggaatgaagagaagtttatcctgggagtactttctgcagttgaggtatttttttccccaaaaaatgtaacgtgcaaactaaattttttagaacaaagtttttccagttttaagagtgcatattggtgacactatagaaatgagtaggatacacaagtttgtactaactagcatggctatgtatacgcggcaattacttcacgtctctaacaccgtcatggcgagtgncattccatcgccaggcccagccaagagttgtataaacat

SEQ ID NO: 175430 - DNA, 448 bp, Homo sapiens
caattagagtaataatgcctactttgcagggtggtggttgtaaagattagagatgtcaaaaagtgccccacatggagtaggtactggataaatggcagctatttctaatatgagagcttgcacctcccatcctggatcccagccctccaatccaatatttctcaaactaagagcgtgcccacgaatcacccagagagcttgttaacatgcaaatacccatcccactcctcagggtggagcccggacacctgcagattgaacagcttccaagcaggtgattccaatgcaggcagctgggtctgcctcctgggaaaagagctagcccagggcagtcctgcaactgggtccatttcagaagccattcccctacagatggagggtgctggcagggaggtgaggtcttgcctatcccaccaacttgctaccttcacgtgggggtctgtcccgg

SEQ ID NO: 175431 - DNA, 167 bp, Homo sapiens
ctcccaaagtgctgggattacaggcatcagccaccgcgcccggccacctgttttatctgtgttctgaaggagagtgcctggctagggatatgcccacttcccatggctctgagccaatccttgtagctcctgtcatacctattgtagcatataatcccactttacac

SEQ ID NO: 175432 - DNA, 139 bp, Homo sapiens
gtggtggcacacaactgaggtcccagctactcaggaagctgagttgggaggattgcttgaacctgggaggtcgaggctgcagtgagccatgatcacgccattgtactccagtttgggtgacacagcaagaccatgtctc

SEQ ID NO: 175433 - DNA, 585 bp, Homo sapiens
acttgctttccctcacatggatgacctgtaaataattgtgtcttttccttagtgaatgatgacaggtccctatctatcaaattgcactacataaatgagatagaagccattgaatttagaaacagatgaaattaatctaatgattcattgtttttcattttcttgggcttctctcttgaatgtagaacagtttcttttgcagaattgcacagttagatttgaatagttcaaaatatgacctttcttaaagcacatgatcaagtgatgtccagatactttgagaactgcatgaacaattcaattttgatcatgcttatgggtcactagatagtacgacataaagaccgaggtctgggcagggtacattgctcgtatatccatgttttatggctttggcagcagtaagtagaggagagtatctgtgtatgtatgcatatgtgtgtgtacatgtgtgtgagtcctcatccccatgcaatcattctgttacctttctgcttccaatgagttgtctaagtatcctttctcttctgtcttcaactaggacttctttcaaacataaataatgagtagtctctgtctcacaga

SEQ ID NO: 175434 - DNA, 571 bp, Homo sapiens
gatgatattagtgcagctagtcgggtgtaattgcccttgcttaggtgatgtgagtggtagggactgaaacaaactgggaaacacatgcctcttcaaaaggagttagctgcttctcagctgaagctgatgattgccctgcagtaatgcaagtccattgttgcttgatactctgttttgcaaataaaagccagaaatttatatttgtatatgaattttcctgacttttaagtgttggctcaagattttaaaaaaacaatgcacaggccagatttggcctctgggagaccaatatacaacttttaatttagttataactatgctgtgcactgtcatatattgggaacttagcatatagttccttaccacaggaactttttcatatttgacactgaaaagtagaagtttccaaactttctcaatttataacacttatactgtctttaatttttcacggtactcctaagtcaagaaatacctcatagttctctgtattaagtagcaaggtccaaatagctaagtaagttttgttttttttattgtttttgtttttgttttgagaaggagtctcgct

SEQ ID NO: 175435 - DNA, 577 bp, Homo sapiens
aagttatatgctgtatttgtggcctacatggtcagtgatcaaagaaaatttataaaaatattaggaagatgggtaaattattcctttgaaaactttaattgtggtaaaatacacataaaatttaccatgttaaccacttttaagtatacagtttagtggcattaagtacattcacattgttgtggaaccagtccatctccagaactttgtcaccttgcagaactgaaactccatatccattaaacaataactctccattccccctcctccagcccctggaagccaccattctactttctatgtatttgactaccgtaggtacctctcataagtggaattagacaggatttgtccttttgtgactggcatatgtcacttagcataatgtcttcagagttcatccatgttgtagcatgtgtcagaatttcctgcctctttaaggctgaataatagtccattttatatatgtaccacattttgtttatgcattcatttgttgacggatgcttggtttgcttctaccttttggtcattgtgagtaatgctgctataaaaaacatgagtctacaaatatctt

SEQ ID NO: 175436 - DNA, 357 bp, Homo sapiens
agtaagttgataccatgacacccactgccagtcacatatattgcaaataatagttccttgaggaaaggtgccctggataagaaataacctgcctacagacaaaaagtaggagactggaggaacaggtgctaccgctcctttctttctcagttgggccccaataaaaaggcctctgctttaaagagttaaggccagggtttagcactctttcttcaaaggtcaaataaatattttaggtttagcaggccagatgatctctgtcaaaactactcaactctgacactgcagcacaaaaacagctaataaaaacacattaataaattagcttggctgcattctaataaaatcttatttaca

SEQ ID NO: 175437 - DNA, 407 bp, Homo sapiens
gctaagctatgagtatgcaaaggtatacagaatggtataatggacactggagactcacaagtgaaggaggggagagggattaaaaagactacatattgagtacagtgtacactactcaggtgaccagtgcactaaaatctcagacttcaccattatacaactcatccatgtaatcaaaaaccacttgcattccaaaagctattgaaataaaaaatatatattaaaaacatattaattaattagcagtcaggtgcagtagctcatgcctgtaatcccagcactttggaaggctgaggcaggtggattgcttgtcaccagaagttagagaccagcctgggaaataatatgagacaccatctctactaaaagtaaaaattaaaagattagtcaggcatggtgatgtgtac

SEQ ID NO: 175438 - DNA, 212 bp, Homo sapiens
atttcatctgtaatcccagcacctggcacacagatgctcagtaaacacttgctgaatgaataactgaagaaaggaactgacttcagtctggtgactatgacaatcatagaagcaaataattacaatccggaaaacgaagagcaaggagcatgggtaaagcccacagctgcctgggcgcacagaggagtgggcaatggctctcctgcaaggaa

SEQ ID NO: 175439 - DNA, 623 bp, Homo sapiens
gcagaggtgtaggatgggccaagggaactaacaaggaatgggagccacctaaaaggctagcaacaagggcaagcaggtactacccctgggcctcaagggcacaaagtgagggcacatagttacctgaacctggtaagaactggaaccacagagaaggcccccccaccccccaagccagggctggagtcacacagagggaagcagtgactgccacagaagttgcccagaagtgggagagagaaaggaaggaacgcccacgctctcttttctgtcatctcccacaggggagggaggaagtagaaaagggaagaggatgaatcaagaagcacaaataaagaatccccaggacaagtgggaaagtcacgctctccacatgacagcattagcattgtctctaaacatgtctaggcacacgcatgtacacacgcccctcctaccaaaaaagaaggccaactttgtatttttaaaatattatcctggaagcagtgtggtgtagtttaagacacaattatatgtttggtgatatatcctatcagtaaaaaaatttaaaaatcaggcaatccaaaatttgcatatttattaatgtataaattgtatatggcaagcttgtccaaccagtggcc

SEQ ID NO: 175440 - DNA, 162 bp, Homo sapiens
acatacatcagctcacccaatgttgacaactagtagatttatatattttttatgttgcctatccttttttgggtaaggattaacagaatgtataatcacctacattataggtacactactaatcacttgctacttgaaaaaacctaaagctttgaaatcttt

SEQ ID NO: 175441 - DNA, 137 bp, Homo sapiens
agactacatagggagttaggattgaaatatgacaaacgaatctttgtacccttataaattaattctggtcttttaaatttggcatagtcatttttttcctaggatattggtttctaacatggttagcacaaaatgaa

SEQ ID NO: 175442 - DNA, 541 bp, Homo sapiens
acaactttctaagaattactaaggctataaatcaaatggaaatgacacaaaatatttatgtgaacatttgtttacataaacatgcttatgtaaatataaatacatttatagccctagtttggaattccagtgaaatgctagtctctgtactcaagaaatacctcatgggatgaaagcattcattgatttacaaatgaaaatttaacatcagttatcagtctttacgaagagtcagtgttgagaaactcatagttgtatgtgtagaagagtctaagaattacaatctgaatgcagaggtgaaacctgaataaaatcaatcagaacttcaaaatgatcatggaagagagttctttcctattcttagaacctggtatctgagctccccatctatgttccacttactcctcagcaacaccacttggattgcacaagcatttcaaatctaccacttctaaaactggactcccaattcttattcttccaaacctctccaactccagtaactgcatgccctgactttatgctagttacatacttagta

SEQ ID NO: 175443 - DNA, 240 bp, Homo sapiens
ttagttctaattccctcatttaacattcaagaaaaccaaggactgtatcttacctcctcctagttttctgatgaacacatgacgcttactcaattctacttaataatattccaaatccttcataagtctccagattcatccttgttattaaatattcaacagtagtatgttaactctgacaaccaccaggccttgctaaaaggcaaaaatagtaccatttcctatttattcaaagtaata

SEQ ID NO: 175444 - DNA, 385 bp, Homo sapiens
aaatagatcctccaacatgaaggaaaaaataacattttcaacagaaacagaattctgcaccagcagactttcattaaaagaaatacggtttattaaactagacatgttgttaataaaatgtcttatcaaaaaaattattaaactagatattgttattaaataagtgtgatcggttaaaaaaaagacagcaacaacaacaaaaaggactcttcagagtaatataaatgcagaaagaattgaagagtaaaggtacaggataaaaaaaaaaaaagatgggtaaagataaatcaatattgaccacacagaacaattaaatacagtgttgtggtgtttaaaatacgtagaattaaaatgcatgggagcaatcatgcaagaggtgggctgg

SEQ ID NO: 175445 - DNA, 454 bp, Homo sapiens
ccatttccaccacaaatgtaacatgtttcgtttctctacatcctcaccaatacttgttatcatctgtctttttgattctaggcattctggtggatactaaatggtacctcattgtggttgtgatttgctctaataactgaaaatgttaaacatcttcatgtgcttattggcctcaatttatttttgacgcaattcagagaaaggtaaggaagatgcctttcaaccaatggaaaatgccatcccaccaactgcttgctgtcaagctgacttacaaatctctacctgtgcaattgttacagaaccaccttttccatattatgttatttagtgcatggcaaattattcactttacttactactacaaattacaaacatcttcatcgtatgtttccaggaaaggaaaaagctgaagtactcctaattaccaaagtcagagcacctagttgggagggca

SEQ ID NO: 175446 - DNA, 549 bp, Homo sapiens
gtaagcaaaatccatgtgtcacctgggatgctctcggttcaagtaagggaagacccaactcagaacaatgagaaaataaagaaataagttagtataaatactggagatccagaagtagtgtatttccagacaatcagcgaccagtgaacttcactggaacctcatattgtttctgactttctgctctgtcatctgtggatcagatttagctttagagtggttctccttagtatggcaagatgcagcaacatgaagtgttgcatcgagaccaggagaaaaaggagtagaccaattcgggcccttgagcttgtcttaatctgtgttgtgctgctgtaacagattaccacagactgagtaatttataaggcacagaaatttattgtcttatggttttggaggctgggaagtcaaagatggaggggctggcgtctggtgagggctttcttgctctgtccttccatagcgaaaggtggaagagcaaagagagagggcaaaacaaatacacacacacacacacacacacatgcacaaaagagggccaaactagtc

SEQ ID NO: 175447 - DNA, 556 bp, Homo sapiens
ttgacctggagaggtaaagcacctccaccaccactacaatggcaaggttgggttaccccagtattaatgttgggcaagattactgtggaaaggaacattagttggggcaacgtaaactttacttgagcaaatgatgctcccccttactccccacctcctttctttttcttaaaattaactttatcttggaattatttttttaacctagaaataatgaagtgtatataccagaaatgtaaccatctcagaaaaccttcagcttctctaccactgagatatgtggatcacaaagtgaggatcctcatatttatttgcctctaaagagaatagggttaagcagttgctgtcttgtagttaaggaatccttatagcagtcaggcagcatgtgacttaactcactttaccagggctagggttctttatggaggtttgaaggcaagtttacagttagaagcgttcatttctcaggctgtattctgaattcacatatcttttgaccatttcaaaatgctgagagtgacaatgcagactttgggtgttctgaactgcgggtcct

SEQ ID NO: 175448 - DNA, 427 bp, Homo sapiens
atgggtggatatgcaagcttggatttcagcctgaccagccatcgctgggattttataagaaggtttgctggtcacctccaactgtgcttgtggatggctaagctaatgatgtccaggagtcaagatcaggcatacctggatgttacagattctagcatgcattccagatttctaaaagtgattcagttatcaccagcctcactactgaattaaaaaatgctaaaaatccatgttctggggcccctattgaagtctcctcaaatagaatctctagagttgggtccaggagtctgaattttaaatatttaaacagtctcagtctagctgtgttatcttgggcaagttctaaactctctgtgcctccgttttctcatctgtaaagtggaaatacggtccttatttcctaggattattttaaggattaaat

SEQ ID NO: 175449 - DNA, 1041 bp, Homo sapiens
ggctagtagggcggggtgaatcggccgaggcctggctgcagcggatcggcacgccgggtgggcgagagcttggcctgcatgtgcctcccacagaccctggggtgatggccttccccctcttggccgggacgttgccccacgttgagtcccacacaacatcctgtgagcctggctccccaggagggcccccagacagctcccaggcacgtcataggcaaagcctgttcccccgactcaggatttccaaggcctggggtcctgctcacccccctttgctctcacgcccagcctgtccccaggtttcagctgggagaggccacctccctcagccaaggaaaacgagaacccccagggtacaggaggaggctggggcaggtccccttgggtgtcactccctcagcccctgcccaggcccactcccgctggtgctggagtacgcactggtgggggggccctgctcagcccaacctggagggtcccagtgtcaccagaaccaggggcacggcaacagcatcgatgggttctgcagcccagggcccccgatgcggggtcagtgcgtggggggcgcagggcccccgatgccgatgcggggtcagtgtgtgtggggcgcagggcctccgatgcggggtcagtgcgtggggggcgcagggccccctcgtgtccagggcactttggtacactgtcccacaaggcacctgtctcagaggaggggccctggcaggcagcgtggcaactcccttccggagcccagctccatgctaacctgcccacaaagaaaccaagagcaattcctgtgactgtctgaggctgtccaggcaggccagcagccaggatgagttgcctctaactgagttggagtggttcaggggatagtgtcaggctggactctggcggaaagggcggtctgaggtggccaagcccaaccgggttctgccggttgctggcaggaaccctaggtgtccaggcctctttgcgccgggctttaggaggaaactggtccaacgccttgcctcctcgcttactcccggccggcgcctcggg

SEQ ID NO: 175450 - DNA, 2700 bp, Homo sapiens
cctcacccccggtctggcagcagcagaccatcctcatgctgaaggagcagaaccgactcctcacccaggaggtgaccgagaagagtgagcgcatcacgcagctggagcaggagaagtcggcgctcattaagcagctgtttgaggcccgcgccctgagccagcaggacgggggacctctggattccaccttcatctagtccttgtgggccgcgtgggcccccagggccagcctggcactcagcccttcgagggtgggcgccccatcgcacccaccctctctggctggagacccccggcaggcccaggcacagtcccggagtgggcgccttcctgccgcccttgccagatgggctccccaggcctgcccccggctggtccccgcaccgagcgcttgactccgttttggctcctggtgctgacatgggctggggctctcttgagtccgcatagtccgcagctactactgccgctgtcagtggacagtggggtacccctccatgagttagcgtccccccgtttccagcggtgccgccctgggtcccatcttcagggaaaggcactgcccacgccaggctgcacttccaacaacgggcagcagagggcgcggggcggctccgacgcgggtccaagggcagcttcccgctcaaccagggcaccaggacgaggtggctgtagctcggacggacggaagtagatggagggggtggggacggcctgtaagcggggggtgcctgcctggctggggagccccagggatagcggtcggacttcaggttctggccaaggctgagggaccctggctgcagcggatcggcacgccgggtgggcgagagcttggcctgcatgtgcctcccacagaccctggggtgatggccttccccctcttggccgggacgttgccccacgttgagtcccacacaacatcctgtgagcctggctccccaggagggcccccagacagctcccaggcacgtcataggcaaagcctgttcccccgactcaggatttccaaggcctggggtcctgctcacccccctttgctctcacgcccagcctgtccccaggtttcagctgggagaggccacctccctcagccaaggaaaacgagaacccccagggtacaggaggaggctggggcaggtccccttgggtgtcactccctcagcccctgcccaggcccactcccgctggtgctggagtacgcactggtgggggggccctgctcagcccaacctggagggtcccagtgtcaccagaaccaggggcacggcaacagcatcgatgggttctgcagcccagggcccccgatgcggggtcagtgcgtggggggcgcagggcccccgatgccgatgcggggtcagtgtgtgtggggcgcagggcctccgatgcggggtcagtgcgtggggggcgcagggccccctcgtgtccagggcactttggtacactgtcccacaaggcacctgtctcagaggaggggccctggcaggcagcgtggcaactcccttccggagcccagctccatgctaacctgcccacagcaaccccacagagccacattccctgctgcacctggtctgcaggggtgtcccaggacaggcccaagtcagcccagcatgcagctgccctcctaccctgaagatgggagtgggctttccaggggacataaggatgtcaggcctggacctcctgggcaggaaagggtgcaggtcctgagggcctgtgccccacagccccagcaccaggtggactgcagcgcagtgggtgggccagtggcagccagggagaagccccccgtcagcaggctggggtctgcccaccagggcctccccacgtctgcctttgagggtgcctgccatgccctgggggatcctggcatctttactggactggaagcaggagacagaacagtgtctgtcccggggtgacttcatcaggagaccgcccacatagagctggaccccgcagctgaagcggaaatgtgagacaggctggcacctccggaaaaactgcctttcagccttggtgttccgtgcaaggtgaaaagaaataggtcctcccagtttacagcttgaaatcaggctagtgagtggccctggagaccacgaggggagaatttaaaggccccggctggcagggtctaggtggctggcagaggcacatgcagaccctgcctggagcctgccctaggacgctgggcgggtcagtctccgtgcaggatgtgagcagcgtccctgggctctatccgcgaggtgccagtagcgtgtgcaggtacatacacgtgcgtgcacactgtgatgacacccggaaatgtctcaggatgttgaaatgtgtccttgggggcagaagtgtccccagttgagaatctgccccagaggaacacacccacaccaggcctcaggattttgtgttgatcaagttccaaggaaaaggaacatctcagccgggcgtggtggttcacgcctggaatcccagcacttgaggccaggagttccagagcagcctgggcaacgcagtgagagaccccatctctgacaaccagcagttcagatccgggatgctccccagagaagtgctctcaagagcacacatgcggccggcgcagcggctcacacctgtcaccccagcactgtgggaggccgacgcagacggagaggccgggcgcggtggctcacacctgtcatcccagcactgtgggaggcc

SEQ ID NO: 175451 - DNA, 2742 bp, Homo sapiens
  misc_feature (1)..(1): n is a, c, g, or t
naacctaggctaggtacgaggccgggtggttaatcggccgaggcgcaggccttgaccaactgtgcacctgcccaggaggtgaccgagaagagtgagcgcatcacgcagctggagcaggagaagtcggcgctcattaagcagctgtttgaggcccgcgccctgagccagcaggacgggggacctctggattccaccttcatctagtccttgtgggccgcgtgggcccccagggccagcctggcactcagcccttcgagggtgggcgccccatcgcacccaccctctctggctggagacccccggcaggcccaggcacagtcccggagtgggcgccttcctgccgcccttgccagatgggctccccaggcctgcccccggctggtccccgcaccgagcgcttgactccgttttggctcctggtgctgacatgggctggggctctcttgagtccgcatagtccgcagctactactgccgctgtcagtggacagtggggtacccctccatgagttagcgtccccccgtttccagcggtgccgccctgggtcccatcttcagggaaaggcactgcccacgccaggctgcacttccaacaacgggcagcagagggcgcggggcggctccgacgcgggtccaagggcagcttcccgctcaaccagggcaccaggacgaggtggctgtagctcggacggacggaagtagatggagggggtggggacggcctgtaagcggggggtgcctgcctggctggggagccccagggatagcggtcggacttcaggttctggccaaggctgagggaccctggctgcagcggatcggcacgccgggtgggcgagagcttggcctgcatgtgcctcccacagaccctggggtgatggccttccccctcttggccgggacgttgccccacgttgagtcccacacaacatcctgtgagcctggctccccaggagggcccccagacagctcccaggcacgtcataggcaaagcctgttcccccgactcaggatttccaaggcctggggtcctgctcacccccctttgctctcacgcccagcctgtccccaggtttcagctgggagaggccacctccctcagccaaggaaaacgagaacccccagggtacaggaggaggctggggcaggtccccttgggtgtcactccctcagcccctgcccaggcccactcccgctggtgctggagtacgcactggtgggggggccctgctcagcccaacctggagggtcccagtgtcaccagaaccaggggcacggcaacagcatcgatgggttctgcagcccagggcccccgatgcggggtcagtgcgtggggggcgcagggcccccgatgccgatgcggggtcagtgtgtgtggggcgcagggcctccgatgcggggtcagtgcgtggggggcgcagggccccctcgtgtccagggcactttggtacactgtcccacaaggcacctgtctcagaggaggggccctggcaggcagcgtggcaactcccttccggagcccagctccatgctaacctgcccacagcaaccccacagagccacattccctgctgcacctggtctgcaggggtgtcccaggacaggcccaagtcagcccagcatgcagctgccctcctaccctgaagatgggagtgggctttccaggggacataaggatgtcaggcctggacctcctgggcaggaaagggtgcaggtcctgagggcctgtgccccacagccccagcaccaggtggactgcagcgcagtgggtgggccagtggcagccagggagaagccccccgtcagcaggctggggtctgcccaccagggcctccccacgtctgcctttgagggtgcctgccatgccctgggggatcctggcatctttactggactggaagcaggagacagaacagtgtctgtcccggggtgacttcatcaggagaccgcccacatagagctggaccccgcagctgaagcggaaatgtgagacaggctggcacctccggaaaaactgcctttcagccttggtgttccgtgcaaggtgaaaagaaataggtcctcccagtttacagcttgaaatcaggctagtgagtggccctggagaccacgaggggagaatttaaaggccccggctggcagggtctaggtggctggcagaggcacatgcagaccctgcctggagcctgccctaggacgctgggcgggtcagtctccgtgcaggatgtgagcagcgtccctgggctctatccgcgaggtgccagtagcgtgtgcaggtacatacacgtgcgtgcacactgtgatgacacccggaaatgtctcaggatgttgaaatgtgtccttgggggcagaagtgtccccagttgagaatctgccccagaggaacacacccacaccaggcctcaggattttgtgttgatcaagttccaaggaaaaggaacatctcagccgggcgtggtggttcacgcctggaatcccagcacttgaggccaggagttccagagcagcctgggcaacgcagtgagagaccccatctctacaaaaaaaaaaaagaaagaaagaaaatgagagatccaggtttaaaaattcataaacaccacaaggaaacaatacactatgagacccagcagaagcaacagattgactctagacccagatactagaattatcagagagaatataaagtaacagtgttttatatatctaaagaaataaaagagatttctggaaacatgaaaaaaaa

SEQ ID NO: 175452 - DNA, 2506 bp, Homo sapiens
  misc_feature (1)..(1): n is a, c, g, or t
naacctaggctaggtacgaggccgggtggttaatcggccgaggcgcaggccttgaccaactgtgcacctgcccaggaggtgaccgagaagagtgagcgcatcacgcagctggagcaggagaagtcggcgctcattaagcagctgtttgaggcccgcgccctgagccagcaggacgggggacctctggattccaccttcatctagtccttgtgggccgcgtgggcccccagggccagcctggcactcagcccttcgagggtgggcgccccatcgcacccaccctctctggctggagacccccggcaggcccaggcacagtcccggagtgggcgccttcctgccgcccttgccagatgggctccccaggcctgcccccggctggtccccgcaccgagcgcttgactccgttttggctcctggtgctgacatgggctggggctctcttgagtccgcatagtccgcagctactactgccgctgtcagtggacagtggggtacccctccatgagttagcgtccccccgtttccagcggtgccgccctgggtcccatcttcagggaaaggcactgcccacgccaggctgcacttccaacaacgggcagcagagggcgcggggcggctccgacgcgggtccaagggcagcttcccgctcaaccagggcaccaggacgaggtggctgtagctcggacggacggaagtagatggagggggtggggacggcctgtaagcggggggtgcctgcctggctggggagccccagggatagcggtcggacttcaggttctggccaaggctgagggaccctggctgcagcggatcggcacgccgggtgggcgagagcttggcctgcatgtgcctcccacagaccctggggtgatggccttccccctcttggccgggacgttgccccacgttgagtcccacacaacatcctgtgagcctggctccccaggagggcccccagacagctcccaggcacgtcataggcaaagcctgttcccccgactcaggatttccaaggcctggggtcctgctcacccccctttgctctcacgcccagcctgtccccaggtttcagctgggagaggccacctccctcagccaaggaaaacgagaacccccagggtacaggaggaggctggggcaggtccccttgggtgtcactccctcagcccctgcccaggcccactcccgctggtgctggagtacgcactggtgggggggccctgctcagcccaacctggagggtcccagtgtcaccagaaccaggggcacggcaacagcatcgatgggttctgcagcccagggcccccgatgcggggtcagtgcgtggggggcgcagggcccccgatgccgatgcggggtcagtgtgtgtggggcgcagggcctccgatgcggggtcagtgcgtggggggcgcagggccccctcgtgtccagggcactttggtacactgtcccacaaggcacctgtctcagaggaggggccctggcaggcagcgtggcaactcccttccggagcccagctccatgctaacctgcccacagcaaccccacagagccacattccctgctgcacctggtctgcaggggtgtcccaggacaggcccaagtcagcccagcatgcagctgccctcctaccctgaagatgggagtgggctttccaggggacataaggatgtcaggcctggacctcctgggcaggaaagggtgcaggtcctgagggcctgtgccccacagccccagcaccaggtggactgcagcgcagtgggtgggccagtggcagccagggagaagccccccgtcagcaggctggggtctgcccaccagggcctccccacgtctgcctttgagggtgcctgccatgccctgggggatcctggcatctttactggactggaagcaggagacagaacagtgtctgtcccggggtgacttcatcaggagaccgcccacatagagctggaccccgcagctgaagcggaaatgtgagacaggctggcacctccggaaaaactgcctttcagccttggtgttccgtgcaaggtgaaaagaaataggtcctcccagtttacagcttgaaatcaggctagtgagtggccctggagaccacgaggggagaatttaaaggccccggctggcagggtctaggtggctggcagaggcacatgcagaccctgcctggagcctgccctaggacgctgggcgggtcagtctccgtgcaggatgtgagcagcgtccctgggctctatccgcgaggtgccagtagcgtgtgcaggtacatacacgtgcgtgcacactgtgatgacacccggaaatgtctcaggatgttgaaatgtgtccttgggggcagaagtgtccccagttgagaatctgccccagaggaaaaacaccaccggcccagattgggggccaagcccggaaagaacacaacagggggggggtaaccgggaccaccaaggccgggttcaacggacggggacccccaaaaaaaaactcgcttcgggga

SEQ ID NO: 175453 - DNA, 546 bp, Homo sapiens
cccggggggggcgggggaaaaaaccttttaaactttttcccggggtttcgaacccaacgcgttccgcccacgtgtgcaggtacatacacgtgcgtgcacactgtgatgacacccggaaatgtctcaggatgttgaaatgtgtccttgggggcagaagtgtccccagttgagaatctgccccagaggaacacacccacaccaggcctcaggattttgtgttgatcaagttccaaggaaaaggaacatctcagccgggcgtggtggttcacgcctggaatcccagcacttgaggccaggagttccagagcagcctgggcaacgcagtgagagaccccatctctacaaaaaaaaaaaagaaagaaagaaaatgagagatccaggtttaaaaattcataaacaccacaaggaaacaatacactatgagacccagcagaagcaacagattgactctagacccagatactagaattatcagagagaatataaagtaacagtgttttatatatctaaagaaataaaagagatttctggaaacatgaaaaaaaa

SEQ ID NO: 175454 - DNA, 2664 bp, Homo sapiens
  misc_feature (1)..(1): n is a, c, g, or t
naacctaggctaggtacgaggccgggtggttaatcggccgaggcgcaggccttgaccaactgtgcacctgcccaggaggtgaccgagaagagtgagcgcatcacgcagctggagcaggagaagtcggcgctcattaagcagctgtttgaggcccgcgccctgagccagcaggacgggggacctctggattccaccttcatctagtccttgtgggccgcgtgggcccccagggccagcctggcactcagcccttcgagggtgggcgccccatcgcacccaccctctctggctggagacccccggcaggcccaggcacagtcccggagtgggcgccttcctgccgcccttgccagatgggctccccaggcctgcccccggctggtccccgcaccgagcgcttgactccgttttggctcctggtgctgacatgggctggggctctcttgagtccgcatagtccgcagctactactgccgctgtcagtggacagtggggtacccctccatgagttagcgtccccccgtttccagcggtgccgccctgggtcccatcttcagggaaaggcactgcccacgccaggctgcacttccaacaacgggcagcagagggcgcggggcggctccgacgcgggtccaagggcagcttcccgctcaaccagggcaccaggacgaggtggctgtagctcggacggacggaagtagatggagggggtggggacggcctgtaagcggggggtgcctgcctggctggggagccccagggatagcggtcggacttcaggttctggccaaggctgagggaccctggctgcagcggatcggcacgccgggtgggcgagagcttggcctgcatgtgcctcccacagaccctggggtgatggccttccccctcttggccgggacgttgccccacgttgagtcccacacaacatcctgtgagcctggctccccaggagggcccccagacagctcccaggcacgtcataggcaaagcctgttcccccgactcaggatttccaaggcctggggtcctgctcacccccctttgctctcacgcccagcctgtccccaggtttcagctgggagaggccacctccctcagccaaggaaaacgagaacccccagggtacaggaggaggctggggcaggtccccttgggtgtcactccctcagcccctgcccaggcccactcccgctggtgctggagtacgcactggtgggggggccctgctcagcccaacctggagggtcccagtgtcaccagaaccaggggcacggcaacagcatcgatgggttctgcagcccagggcccccgatgcggggtcatgtgtgtggggcgcagggcctccgatgcggggtcagtgcgtggggggcgcagggccccctcgtgtccagggcactttggtacactgtcccacaaggcacctgtctcagaggaggggccctggcaggcagcgtggcaactcccttccggagcccagctccatgctaacctgcccacagcaaccccacagagccacattccctgctgcacctggtctgcaggggtgtcccaggacaggcccaagtcagcccagcatgcagctgccctcctaccctgaagatgggagtgggctttccaggggacataaggatgtcaggcctggacctcctgggcaggaaagggtgcaggtcctgagggcctgtgccccacagccccagcaccaggtggactgcagcgcagtgggtgggccagtggcagccagggagaagccccccgtcagcaggctggggtctgcccaccagggcctccccacgtctgcctttgagggtgcctgccatgccctgggggatcctggcatctttactggactggaagcaggagacagaacagtgtctgtcccggggtgacttcatcaggagaccgcccacatagagctggaccccgcagctgaagcggaaatgtgagacaggctggcacctccggaaaaactgcctttcagccttggtgttccgtgcaaggtgaaaagaaataggtcctcccagtttacagcttgaaatcaggctagtgagtggccctggagaccacgaggggagaatttaaaggccccggctggcagggtctaggtggctggcagaggcacatgcagaccctgcctggagcctgccctaggacgctgggcgggtcagtctccgtgcaggatgtgagcagcgtccctgggctctatccgcgaggtgccagtagcgtgtgcaggtacatacacgtgcgtgcacactgtgatgacacccggaaatgtctcaggatgttgaaatgtgtccttgggggcagaagtgtccccagttgagaatctgccccagaggaacacacccacaccaggcctcaggattttgtgttgatcaagttccaaggaaaaggaacatctcagccgggcgtggtggttcacgcctggaatcccagcacttgaggccaggagttccagagcagcctgggcaacgcagtgagagaccccatctctgacaaccagcagttcagatccgggatgctccccagagaagtgctctcaagagcacacatgcggccggcgcagcggctcacacctgtcaccccagcactgtgggaggccgacgcagacggagaggccgggcgcggtggctcacacctgtcatcccagcactgtgggaggcc

SEQ ID NO: 175455 - DNA, 2707 bp, Homo sapiens
  misc_feature (1)..(1): n is a, c, g, or t
naacctaggctaggtacgaggccgggtggttaatcggccgaggcgcaggccttgaccaactgtgcacctgcccaggaggtgaccgagaagagtgagcgcatcacgcagctggagcaggagaagtcggcgctcattaagcagctgtttgaggcccgcgccctgagccagcaggacgggggacctctggattccaccttcatctagtccttgtgggccgcgtgggcccccagggccagcctggcactcagcccttcgagggtgggcgccccatcgcacccaccctctctggctggagacccccggcaggcccaggcacagtcccggagtgggcgccttcctgccgcccttgccagatgggctccccaggcctgcccccggctggtccccgcaccgagcgcttgactccgttttggctcctggtgctgacatgggctggggctctcttgagtccgcatagtccgcagctactactgccgctgtcagtggacagtggggtacccctccatgagttagcgtccccccgtttccagcggtgccgccctgggtcccatcttcagggaaaggcactgcccacgccaggctgcacttccaacaacgggcagcagagggcgcggggcggctccgacgcgggtccaagggcagcttcccgctcaaccagggcaccaggacgaggtggctgtagctcggacggacggaagtagatggagggggtggggacggcctgtaagcggggggtgcctgcctggctggggagccccagggatagcggtcggacttcaggttctggccaaggctgagggaccctggctgcagcggatcggcacgccgggtgggcgagagcttggcctgcatgtgcctcccacagaccctggggtgatggccttccccctcttggccgggacgttgccccacgttgagtcccacacaacatcctgtgagcctggctccccaggagggcccccagacagctcccaggcacgtcataggcaaagcctgttcccccgactcaggatttccaaggcctggggtcctgctcacccccctttgctctcacgcccagcctgtccccaggtttcagctgggagaggccacctccctcagccaaggaaaacgagaacccccagggtacaggaggaggctggggcaggtccccttgggtgtcactccctcagcccctgcccaggcccactcccgctggtgctggagtacgcactggtgggggggccctgctcagcccaacctggagggtcccagtgtcaccagaaccaggggcacggcaacagcatcgatgggttctgcagcccagggcccccgatgcggggtcagtgcgtggggggcgcagggcccccgatgccgatgcggggtcagtgtgtgtggggcgcagggcctccgatgcggggtcagtgcgtggggggcgcagggccccctcgtgtccagggcactttggtacactgtcccacaaggcacctgtctcagaggaggggccctggcaggcagcgtggcaactcccttccggagcccagctccatgctaacctgcccacagcaaccccacagagccacattccctgctgcacctggtctgcaggggtgtcccaggacaggcccaagtcagcccagcatgcagctgccctcctaccctgaagatgggagtgggctttccaggggacataaggatgtcaggcctggacctcctgggcaggaaagggtgcaggtcctgagggcctgtgccccacagccccagcaccaggtggactgcagcgcagtgggtgggccagtggcagccagggagaagccccccgtcagcaggctggggtctgcccaccagggcctccccacgtctgcctttgagggtgcctgccatgccctgggggatcctggcatctttactggactggaagcaggagacagaacagtgtctgtcccggggtgacttcatcaggagaccgcccacatagagctggaccccgcagctgaagcggaaatgtgagacaggctggcacctccggaaaaactgcctttcagccttggtgttccgtgcaaggtgaaaagaaataggtcctcccagtttacagcttgaaatcaggctagtgagtggccctggagaccacgaggggagaatttaaaggccccggctggcagggtctaggtggctggcagaggcacatgcagaccctgcctggagcctgccctaggacgctgggcgggtcagtctccgtgcaggatgtgagcagcgtccctgggctctatccgcgaggtgccagtagcgtgtgcaggtacatacacgtgcgtgcacactgtgatgacacccggaaatgtctcaggatgttgaaatgtgtccttgggggcagaagtgtccccagttgagaatctgccccagaggaacacacccacaccaggcctcaggattttgtgttgatcaagttccaaggaaaaggaacatctcagccgggcgtggtggttcacgcctggaatcccagcacttgaggccaggagttccagagcagcctgggcaacgcagtgagagaccccatctctgacaaccagcagttcagatccgggatgctccccagagaagtgctctcaagagcacacatgcggccggcgcagcggctcacacctgtcaccccagcactgtgggaggccgacgcagacggagaggccgggcgcggtggctcacacctgtcatcccagcactgtgggaggcc

SEQ ID NO: 175456 - DNA, 2408 bp, Homo sapiens
  misc_feature (1)..(1): n is a, c, g, or t
naacctaggctaggtacgaggccgggtggttaatcggccgaggcgcaggccttgaccaactgtgcacctgcccaggaggtgaccgagaagagtgagcgcatcacgcagctggagcaggagaagtcggcgctcattaagcagctgtttgaggcccgcgccctgagccagcaggacgggggacctctggattccaccttcatctagtccttgtgggccgcgtgggcccccagggccagcctggcactcagcccttcgagggtgggcgccccatcgcacccaccctctctggctggagacccccggcaggcccaggcacagtcccggagtgggcgccttcctgccgcccttgccagatgggctccccaggcctgcccccggctggtccccgcaccgagcgcttgactccgttttggctcctggtgctgtaagcggggggtgcctgcctggctggggagccccagggatagcggtcggacttcaggttctggccaaggctgagggaccctggctgcagcggatcggcacgccgggtgggcgagagcttggcctgcatgtgcctcccacagaccctggggtgatggccttccccctcttggccgggacgttgccccacgttgagtcccacacaacatcctgtgagcctggctccccaggagggcccccagacagctcccaggcacgtcataggcaaagcctgttcccccgactcaggatttccaaggcctggggtcctgctcacccccctttgctctcacgcccagcctgtccccaggtttcagctgggagaggccacctccctcagccaaggaaaacgagaacccccagggtacaggaggaggctggggcaggtccccttgggtgtcactccctcagcccctgcccaggcccactcccgctggtgctggagtacgcactggtgggggggccctgctcagcccaacctggagggtcccagtgtcaccagaaccaggggcacggcaacagcatcgatgggttctgcagcccagggcccccgatgcggggtcagtgcgtggggggcgcagggcccccgatgccgatgcggggtcagtgtgtgtggggcgcagggcctccgatgcggggtcagtgcgtggggggcgcagggccccctcgtgtccagggcactttggtacactgtcccacaaggcacctgtctcagaggaggggccctggcaggcagcgtggcaactcccttccggagcccagctccatgctaacctgcccacagcaaccccacagagccacattccctgctgcacctggtctgcaggggtgtcccaggacaggcccaagtcagcccagcatgcagctgccctcctaccctgaagatgggagtgggctttccaggggacataaggatgtcaggcctggacctcctgggcaggaaagggtgcaggtcctgagggcctgtgccccacagccccagcaccaggtggactgcagcgcagtgggtgggccagtggcagccagggagaagccccccgtcagcaggctggggtctgcccaccagggcctccccacgtctgcctttgagggtgcctgccatgccctgggggatcctggcatctttactggactggaagcaggagacagaacagtgtctgtcccggggtgacttcatcaggagaccgcccacatagagctggaccccgcagctgaagcggaaatgtgagacaggctggcacctccggaaaaactgcctttcagccttggtgttccgtgcaaggtgaaaagaaataggtcctcccagtttacagcttgaaatcaggctagtgagtggccctggagaccacgaggggagaatttaaaggccccggctggcagggtctaggtggctggcagaggcacatgcagaccctgcctggagcctgccctaggacgctgggcgggtcagtctccgtgcaggatgtgagcagcgtccctgggctctatccgcgaggtgccagtagcgtgtgcaggtacatacacgtgcgtgcacactgtgatgacacccggaaatgtctcaggatgttgaaatgtgtccttgggggcagaagtgtccccagttgagaatctgccccagaggaacacacccacaccaggcctcaggattttgtgttgatcaagttccaaggaaaaggaacatctcagccgggcgtggtggttcacgcctggaatcccagcacttgaggccaggagttccagagcagcctgggcaacgcagtgagagaccccatctctgacaaccagcagttcagatccgggatgctccccagagaagtgctctcaagagcacacatgcggccggcgcagcggctcacacctgtcaccccagcactgtgggaggccgacgcagacggagaggccgggcgcggtggctcacacctgtcatcccagcactgtgggaggcc

SEQ ID NO: 175457 - DNA, 1194 bp, Homo sapiens
ggcacgaggcctcgtgccgattcggcacgaggcaaccccacagagccacattccctgctgcacctggtctgcaggggtgtcccaggacaggcccaagtcagcccagcatgcagctgccctcctaccctgaagatgggagtgggctttccaggggacataaggatgtcaggcctggacctcctgggcaggaaagggtgcaggtcctgagggcctgtgccccacagccccagcaccaggtggactgcagcgcagtgggtgggccagtggcagccagggagaagccccccgtcagcaggctggggtctgcccaccagggcctccccacgtctgcctttgagggtgcctgccatgccctgggggatcctggcatctttactggactggaagcaggagacagaacagtgtctgtcccggggtgacttcatcaggagaccgcccacatagagctggaccccgcagctgaagcggaaatgtgagacaggctggcacctccggaaaaactgcctttcagccttggtgttccgtgcaaggtgaaaagaaataggtcctcccagtttacagcttgaaatcaggctagtgagtggccctggagaccacgaggggagaatttaaaggccccggctggcagggtctaggtggctggcagaggcacatgcagaccctgcctggagcctgccctaggacgctgggcgggtcagtctccgtgcaggatgtgagcagcgtccctgggctctatccgcgaggtgccagtagcgtgtgcaggtacatacacgtgcgtgcacactgtgatgacacccggaaatgtctcaggatgttgaaatgtgtccttgggggcagaagtgtccccagttgagaatctgccccagaggaacacacccacaccaggcctcaggattttgtgttgatcaagttccaaggaaaaggaacatctcagccgggcgtggtggttcacgcctggaatcccagcacttgaggccaggagttccagagcagcctgggcaacgcagtgagagaccccatctctgacaaccagcagttcagatccgggatgctccccagagaagtgctctcaagagcacacatgcggccggcgcagcggctcacacctgtcaccccagcactgtgggaggccgacgcagacggagaggccgggcgcggtggctcacacctgtcatcccagcactgtgggaggcc

SEQ ID NO: 175458 - DNA, 688 bp, Homo sapiens
ggcgtggcttattaatatcttacctaaaaccgcatagctagtgagaagtagagctgggattagaacatggctccagccgaatgtggtggctcatgcctgtaatgccaacacttgggatgctgaggcaggtggatcacttgaggtcgggagttcgagaccagggtggccaacatgatgagacccccgtctctactaaaagtacaaaaattagttgggattacaggcgtgcgccaccacacccggctaattttgtacttttagtatagacagggtttctccatgttggtcaggttggtctcgaactcctgagctcaggtgacctgtcagcctcggcctcccagggtgctgggattgcaggcgtgagccaccgcacctggccccaagcacttatttaaaacaggacaaaatataaaaagaaaatagtctcttctgtgaacaaatgtctcccctgacattaagaaagaaacagaactcaccttgactagtatgagtgtgctgccttgaaaaagaaatttcaccacagaagttactaaatatgacaggctctttacctagaatgatggctggttggcaccttgaaataataaggtcctgttttaaaccatacttgataacttggaagagactagatggacaggaccctcctgctggggtatagggcaaatgaactacagtcatggcagagtca

SEQ ID NO: 175459 - DNA, 497 bp, Homo sapiens
caaagttgggaaacagtaatccaagggggaccccagccccagaggaaggggcctggaggcttaggggttacagccgcaggaagatacctctgctggtcccctttggtcatttgcctccagagttagtctcctgctgaccctttgccgcctccaagtctctgcgacactcctcctaatctccccctccactcctcagtgagatggagaagctgagagctgcaacagggtgggactcagtccagctggtgggagccccgataccagccgtgggagggagggctgttcctggctctgctcacggattctggccaactggctggaggagggaaggcggcctcaccctcttccccacaggcccctccttccctgggtcaggggtcctggctgagactataatttattcccgtcataatccagtggttggtttggtgagagctggaaacatgttggttttcccttcccaagtataacaaggcctgtttccgcctccgcggccg

SEQ ID NO: 175460 - DNA, 633 bp, Homo sapiens
ggaggcagaatgtaaggaggagctgctgaaagatgacagttctgaacatggcagcgcaccgcccaacagcaaagagaagatgctcaggagacattgccacttcactggtgacgcgggcattgaagtgcgtatgtcagggccaccatgatcatagccttaaagagttcaacatgctcatcgctgatgcactggatgggcccctggacttctgcgacagctgccatgtgcagcctcctggtgatgaggaggaaggcctcttccagccctccaaggagcaggcttgacagcctgggcacctgcacctgccacagctacctgcatgcctgctgctaaacatcatcaatgagcagtactctcccaactcccagagcagcagctcccgcagctagatcaggctctgccagcacccaagaacttggcaaagcaaccagggtaggggagaaccacgagagaagcattaaatgactttcagagaaagtggtacagccacttgattcctttttttttttttctttctcctctcctgcattttcctccatctccaggtacagtttggggtgtggatgcctctcgccctacaaaggcacaatgttgtggagggctgagaagttggttctgtttctcgttcctcat

SEQ ID NO: 175461 - DNA, 708 bp, Homo sapiens
gaaagagacgggcccaaaataaaagaaaggaggtaccagattccactgaagtcaaatgagaaggtgaatacaggtaagcaggttaaaaggtcagatctctgtgccaggtgagaggagggagggggatctccctggcacagggtgggggcagttaccactccctgtcccctcatgcagaacactggcccagatgaatcaaaggatatttcctgaagacctgaagtgctccagaggaaaaacctctccagtgagtcttctggagattcccccaattaagtggtcaatggccaatcagaccctctaatgcaaaggagggtggataaccaagcctccccacccatggttgcaggcagctctaagtgtcgtgctcttaaacacgagcccagcaccaaggaacccctggacccagggaagcatccagtatgaatgaatccaaaacacacagaaatgaatggccctctgcagggccacagacataaggcaagggaagagaagatacccaacagagaaaccctgtgtgctatgaaaagagaacacagaaaaacaaagagatatttgaaattctaaaatacaactatgaaaataaaattcaggccgggtgcagtggctcaagcctgtaatcccagcactttgggaggccgaggcaggcggaccacgaggtcaggaaatcgagaccatcctggctaacacggtgaaatcccatttcta

SEQ ID NO: 175462 - DNA, 561 bp, Homo sapiens
cctgtctctactgaaaatacaaaaaattagcggggtgtgatgccacgtgcctgtaatccagctacttgtgaggctgaggcaggagaattgcttgtacccgggaggtgaaggttgcagtgagccgagatggtgccactgcactccagcctgggcaacagagcaaggccctgtttcagaaacaaaaaacaaaccccaaaattagctgagcctggtggcgcacgcctgtagtcccaagtagctgggactatggtgcaggagtttgaagtgggaggatcgcctgagcctgggaagctgaggctgcagtaagctgtgatggcaccactgcactccagccagggtgacagagcaagacccgaccctctctcaaaaaataaaaacaaacaaacaatggttataaatacagtgaaagaaaagaacaagaggtttttgagaaactaaagggagttggaagcatcatctggattggattggatatgattcctgaggaaatgatatgtaagccaaaatctgaagagttcggggaaaggatatgctaggcagagggaaacgtagggcaaatgt

SEQ ID NO: 175463 - DNA, 542 bp, Homo sapiens
ttataagggatgccacaactattttgcaaacatgaaagcagaggtaataacaaaacagaaagtacaggaagaacttggccctctacagtattatccagccactgaattaaccacctttgcaagctctgccatatttagcctttatacacacacacacacacacacacacacacacacacaatttatttttgataacacctttttcttgtttattttgtttggataagaaatttttgttaaatcagttgttagcctcttaactgatacagaaaccaaatggaatcagaagtagctaggtaaatggcaaaatcagagaaagggaatttaaatgattcaaatgcttattggcattagaaaaacgtggtcagcagccacatctcatcctttgaatgtgaactgtggaatcgcagtagttgaagctgggagtcacagtaattcttcccacagtggttctcaggctttagcatgtgccacaatcacctgaagttgagttgtgagatttcaggcttctcttctgacatggacctctcaattttctctga

SEQ ID NO: 175464 - DNA, 521 bp, Homo sapiens
aagcgaagtcgggccccctcctcctggtctgcagggtccctccaggcctttcctgtccgggcagagagacagtcacaggggcgatcggaggacgcgtgcgggagggccgggggcccgcgcggtcacggcttctcgtgacagtgtttgcaaagcgcggagggcgtcccggagaaggcggcgcacttgtcagggcagggccccagggcggcgcctgcggagaaggggcacacagtggcctggccgaagggcgtcaagggcgcggcgtttacgggcgcggccaggccctggccctggttgaggaaggccaccaggcgccgcatctcgtccagggcctgcgcctgcatgaggatatagttcttggcgagcagcagcgtggcgatcttggagagcttgcgcaccgacgggctgtgcgcgtaggggatgacggctcgcagcccgtccagcgcgtcgtttaggtcgtgcatgcgccgccgctcgcgcgcgttgatgctgagccgcagagaccgctgctctcgcggccg

SEQ ID NO: 175465 - DNA, 356 bp, Homo sapiens
tgtgtgtacttttcaaatgggatgtgaacgtataatattggcattcaatccagtatataattatagaatttggaagacttaggacattttagtcagtgaatctatatttagacttttcaaagacatggcacgtaaggacacgtggagaaaatgtcccacacagataacaggatttgtgattttggctttgctgttttatgattagcaaatattgtttgtatagagtgtctgggtgccctaaaaacacatgaaaataggtcaactaaatctcgttttaaagagaaaaccggaagagtgaacaccactctaaaaatagattttggatgtgtttgttttggtgccttgtatatcttaaa

SEQ ID NO: 175466 - DNA, 144 bp, Homo sapiens
ggaacaggtttatttctcagattcggggaatacttgttgagattcttctctctttggccaaatgattttgatatgataatcatgatgccctttcagttgaggtattatttggtagcattttgtttattaaagcaagcatgccat

SEQ ID NO: 175467 - DNA, 303 bp, Homo sapiens
ctcccaaagtgctgggattacaggcgtgagtgcccggccagtttttagaaatttatcagcaacatgggattgccagaaacaaagatgtgcttttcttcaaggcatttgatctttattgccaaattgctcattagaaatggaaacagcttctagcaaggtataatctttaggactatgtaaaattttttaaccaataaaagcttgtgaggtttttgatatttataagtgcagattggtagatatatttcgagtaatatcacctgtcagagtcattatttcattcagggctcttttttttagcaa

SEQ ID NO: 175468 - DNA, 174 bp, Homo sapiens
agttaatattcttactatataaagagcttttgcaaatcaataaacaaaccacagaaaaatggacaaaattcacagagaaggaaataaatggccaagaagcatcgggaagaaatggtctacttcatcaacatctggaggaatgcaaattggagctaagaagggtacaataaaatg

SEQ ID NO: 175469 - DNA, 697 bp, Homo sapiens
  misc_feature (599)..(599): n is a, c, g, or t
gagctcaccggcctcacccaagctcgcagcattgtgccgggaaaggatgttctcggctccggcctttttcctcctctcctggggacagaacatggatcctggaaggcattgaggaccctgtgctcagcccctgcccatcccttccaccacttatctgtcctgtaggcacactgacgcggctttcacaaaatgggaggctctgagaggtgagctcccaggagacaggaccaaggtctgccttcatcctgaagtttgcagggcagaggcccagatcctgcaaaggtgatgtgctcaggaagccacagcggagccccacacgcaccatgtgagtcacgctggtgccacaggcttgaactctgctggacacaaacagcctggggggtgtggaagtgggcattaccgctgtgctggttcttactatggggcagtgtctccaatatccctttcccattcagcaactgtgcaacacctgacttcagaaacagacgtctagagccctgccgtgatggagccaggaccagcttgcctggtggatctgtgccctggggacccgcttgggctctagcacagcatgctgcgtagagtcaagcacacatganggtggccccactgccctgcaaccacagatgcagccccagctcaccattgacatctgtccccagtcagacctctttacgcagcattctagcctctcgtt

SEQ ID NO: 175470 - DNA, 403 bp, Homo sapiens
aaacaaaacaaaaacacattaagatagggtattagattggtcatacaccctattttaatagagatcatgatgatagaaggttagaagggagttaggtggtagaaatggggaagaaatgacctggccagtagatggaagacaagagagtggtcatgtgtgtttagccagatggtacccaaagtagtcagaattttggtcatacatatcctgtcttacaaggctgatagaatatgaagcaaaaatggggcatgagacaagccaatattacctctgtgctaaggagagtgaatatcttcaaaggaagtgcaatgtttttgaggaataagaatatgtggggaaggagagggaagtgtgaagtttaagttgtttggcatagagggggagctcagagggtatgttagaa

SEQ ID NO: 175471 - DNA, 505 bp, Homo sapiens
tacagcatgttacagtactgtaggaaactgtaacacagtgttaagtatttgtgtatctgaacgtatctgcaacacagaaaagaggcagtaaaaataccaccttctatcttatgggaccatcattatataagtggtctattgttgacagaaatcttgttatgtggcacatgcctaaatttaaaaatacaaaaccattcttagttcgtggaccacacaaaagcaggtgtagtttgcagaacactgcgctagtactaactagaaagtatccgcaatgtctcctgtagaaaggtgtcttactcaagctcagggtctaaatgaagaatatcctccctgacttacctacaactcccgtctaacacacctcagctttctgctaacttgttctcgtctctcttctctccctgcacacagctcatgaatggccaatcaacttgacttgaaagtggttaaaatctacctcactctgcaaaactaagtgagtcacatgagaactctgaagagaggc

SEQ ID NO: 175472 - DNA, 467 bp, Homo sapiens
ctgatactgtataagtcgggaaacactctcatcccttgaacatagctctgggtgacatcgtccattcaataccggtcccaggtggtcaccacctgcaggaggagacccagccaccagccctcaccatgtttctgcttggaaccagcaataatcacttaagattgtgagtgacatgtggatgaaatggaaactgctaagatacctggctctttggcctagtttggtctcccagtggggtggtttcaagggtaaggatgtgcctctcccaccgtgggatgagcagaccatcaccgcagagcaatcagccctgcccaagggcagcagcccttctgaaagtggcccttcctgcacacgcccccactttagcaaactcaggcaggagggtgtgaaagggctggaaattcagagtgagcaactggaaggggagacagatggagggacaatttcccaagaggccgacttggggc

SEQ ID NO: 175473 - DNA, 593 bp, Homo sapiens
aagcccagctgattgagtgcaggagacctatttatgcagagaaaaatatagaaaatagagttaatgattacagtgaataggagagtgagagaaggtaagagagttaaagacatacatttcacagaaaaatttttatttttctatgagagccaaaggacttatataatccaaaatgaatgttaaaggtatgataaacagcaaaatgaaagcagacaaacctaggtagaatccaggttactttgacaagtaaaataaactcactgatttccattttttttttgataaaatataactattatatcacgtagttattatgatataactattatatcacatagattaaatacaataagccaaacctttggcatatgacaggtggctaataataagttgttattataggtattgtatagcatttagcactaacagacaatgaatattttctgactttcataagaacattttttgttgttgttcaaacttttattaaggtagatttattctgggtagtttagcttgtacattcactcaaacaaacttcccaaaagacaacattaaaaatgaaaacacatattcttaaaactgttactaca

SEQ ID NO: 175474 - DNA, 371 bp, Homo sapiens
aaccatgtgcaaagccttgcacaggcatccctcccatgaaagccttccttgaccttccctccaaacattgtcaaaatcatggccaagaaactggcatattttatcagtctattatatttgctgattgatatgattgtctccttctttaggctggattctcaaagacaggattcatacatttttcatttatttatatttagtttctggccttctagtacataagcaatgcatttctttgttaggataaacttcctccccaaacacattctcctcacagattttcagtaatttttattgagcttcagggacctcataaaatatgcctctgggtggagttagagggattataaaatgttaaagttggaatacac

SEQ ID NO: 175475 - DNA, 593 bp, Homo sapiens
ggagaatgtattttgacgggttttagcggcattgctggagtgccttatgtttcatgagaactgaaatatattagcattgaatttttctagcagatttctgtcaaatatttagaaggacatatggagtttctttcctaccattgaaaaggagaaaaatacatgaaatcaaggcatttggacaaactttcttgcttgctctggtagtttgatggaagcatttcttaaagccaagacagcatctgtaatacgacacagaggagtgatgagcggactgggagtctggattccacttggaacaggttttcttatagagcacatcctttctcgcttgtggtcattggcagctcagttctaggtgggctctggaagccttagaatgggcacttgtgctggacagatctccagctctgtggtgtggcttggtctttggctttccaaatcaatgcacttattctagttggtgtcagttggtagaggctgcagaatgacctgaggactccctgtcgttagactcctctcttcctgatctgttgttcactggtctgattgtgcactcagattctgtttcaccatcacttcccacagtccactgg

SEQ ID NO: 175476 - DNA, 630 bp, Homo sapiens
ggcactggcacatggagtgtctgtgaggggctgctttctgttgcatagacggagccttcatgctgtatctcacgtggtggaagtggcaagacagctctctggggcctctcttataagggttattactccattcatgaaggtggagccctcaagacctaatcacccccaaaggcttcaccttcagatactgtcacaatggtgattagatttcaatatgtaaattttgtgggagggcgggcacaaacattcagattgtagcaggctctgagggagaagtaggatgcacaggctttgggagcagcaagccagccagtgtaggccagtggagggtttgtaagtgggagttacacaaatcagggcagtggggagatgcagattgtgtagaacctcgcaggccattgtaatggttttagttttcccttgaaataacacaggaagctacagaaggggtgtaaaaggggatgtgagatgatataacctattttgatagcagtgttaagaataaccgaaaagataggatggtaggcagaatatagatcacaaaggcagaaggagaaagaagaaggtgtttccgtaatctgtgacaatgatggtgctggctcgttccaggttggtagcagtggaagtcat

SEQ ID NO: 175477 - DNA, 235 bp, Homo sapiens
aagaacactggctggaaattaggaggtctaggtcctaaggcctggtttttcaaccatttacctatgtgatgttaggaaatccactgtacctcaaggcacctcagattcaggacctataaagtgatagggttgacctagatactataaatcagttcaagtctcctggcccaggctaattagtgggccagtagtgggtttccctgagtgccaagggaacacaaagaagacctgggaa

SEQ ID NO: 175478 - DNA, 426 bp, Homo sapiens
cagctgtgataaactgtggttgaggaaactaataatttctttagaaggaaaaagagcacaggtaaaagctggaaagcagtgagattaggatgagtttagaaaacattctgttcctaaacaagcacactcataataaacagccaagtgcaagacaacaagggacaatgtcctagcaatggtgagcaatgtttaaccttgcttaagctctgggcagagaaaaatggaccctggcactgttctggttattgtgaacaatcacactccacaatgacagcatgtgctcattatatgacagaaaatatgctatggacttcaaatgaagtcagatttaagccacatcacattatcatccccatttaacagttgaattgatgcagagagtttcagtaacaagctcaaagtaatacagctactaagtgtgcttaa

SEQ ID NO: 175479 - DNA, 303 bp, Homo sapiens
ctcctcagagtaggagtagttgaaacacgaacacctcaaaacctgcgaatgacaatagccaggcagctggcagagatcttgttgcggggtatgtgtgagcagagctactggaaccctgtggaggatccaccgtgccagtcacctctggacgatcctctccgcaaaggagcaaacacaaaaacctacactctcactcggagagcacgtttgaaggagcaaacacctaaaatccagtacatttctaggtactgaggaataaaaaactgggaacatggtagaaacacagaaaaatggtgacaatct

SEQ ID NO: 175480 - DNA, 568 bp, Homo sapiens
atactgttttccataatgactgttccattttacattcccaccaatagtgcacaaagattccagtttctcagcatgctcaccaatacttgttattttttgttcttttgatagtggccaacctaacggatgcgaagtggtatctcgttgtggttttaaactgcatttccctaataatgaatgatgttgagcatcttctcattcaatagtcataaacaatagtgcttattgactattcatgtatcttctttggagaaatgcctattcacagccttgacccatttgtcaattgggttatttattgtcttgttgagttgtaggagttcctcaaatattctggatattaactccttataagatatatgatttacaaatatttattctcattccataggttgccttttcactttggtcattgcttcctttgacttgaagaaatttttaactttatatagtcctgtttgtctgcttttgctttagttgcctgtcctgttggtgtcatagtcgataaatcatctctcctttttccttaattagtcagtaaaattttgttaattttgtttatcttttc

SEQ ID NO: 175481 - DNA, 610 bp, Homo sapiens
ctcatctccgacttacccaaaaagcaatattgaagtagagggaacaaattagaaagacctcaatgccattagattagtgtttttcaaccctaagagttggagatgggtcatacatgcctgcgttttcccccatttttatgcatggagaaactagagctcagtgaggccaagtgatttgccagaggttctctagtgctgaggcttggtctgtcctccaaaaccttggcctgtctaccacttccctgccctgcttgtggtcccttgggacccttgagagctctccttcagggctagcgtagtctctggcacattgtacttaagacctcccgcctgctgattcccaggtactttccactatacttcaggaatttaccaagagggtgtatcaatcaggtaaacagaaatcatgccagatattttagcagagaggattgaatagcaggaattggttagacaggtgctggttgacccaaaaagcgaatggggagtactgaagtgatacagaaatagtaacaaaaggttagcagcaagccatcaccctcaaggctggaggagcaaaagaagtaatttggaggaagtaggaccaagaccctgttagtattgttacctc

SEQ ID NO: 175482 - DNA, 399 bp, Homo sapiens
attgtcattatatattttatttctacatgtactgtaatgcttatactacactgtttttatttttgttttgtcaatttttaaaaacaaacttaaataataagaatactattctataaattaacccaatgtattaaccatttcttgtgcccttcattcctttgtgtagattcttattttctttggatatcattttccttctgcctgaatgacttccttgaacatttctcacagtatgagtttgttgctgatgcagccctgcagcatttgtatgtctgaaagtctttatttcaccttcattttggaagacattttcactaggtaaagaattttaggttgacaggtttttagtttttgtgttttctaatacattaaagatgttgctcaaatgtcttcttactt

SEQ ID NO: 175483 - DNA, 229 bp, Homo sapiens
  misc_feature (20)..(20): n is a, c, g, or t
tgacatgatacgactcgagntggtacctgaaattcgtgtccccattattactcccacaaaggtcaatgacatcctaacggttatatccttgtcttagaaatcaccaatctaatttttctgtgatatctaacgctttctcaatactcctttttcccttggcttctaaaatactttcctctcagagctctcctaccacttaagccacttccgtcttttggacacgaatgtt

SEQ ID NO: 175484 - DNA, 324 bp, Homo sapiens
gaaccaattcagtgtaaaaggaaatacttgattactctgttgtataagagcaataaaagctaatttactgttatattactcagtactgaaagctgcaagaggctatctttcagttcattcttcattaattatgctgtatggtggtgatatcagtatgagttttatggaacgctttcaggttgacctctctgagcttgtattttggctcatgtgaatgtctttaccatattttcctcatgattgttgaggggtgaatgaagtgttgaaggcaaaatggactaatcaatcactgtgattcctctgtgaaaactcccatgataaact

SEQ ID NO: 175485 - DNA, 237 bp, Homo sapiens
atagctgctccatgatgtatccgcgagactagtagcagaccaaattacctggaagctcactgtaatccaggtgggaggtatgtgagccttggctggtgatggtggcattcccatgggaacaaagaagaggaagaaactagaacatttttttttttttgagacagggtctcactctgtcacctaggctggggtgcagtggcgcaatcacggctcactgcaacatctacctcgtgggct

SEQ ID NO: 175486 - DNA, 361 bp, Homo sapiens
tgacattttgtgttgaagaaaaatatttttaaaatatacaacaagcttccaaataagcttgtaacagtttacaacaggcttttcatctacaatgctggaaatgagaagactgtggaaaaactctacacgcttcagagggacaagctccgcaatctgaaacttctatagctagataagaaactactcacctctcagatgatagaaacttgcagatatgcaaggatgcagaagatgtattattggccaggcacagtggctcacgcctgtaatcccagcactttgggaggccaaagcaggcggatcacctaaggtcaggagttcgagaccagcctggccaacatggtgaaaccccgtctctact

SEQ ID NO: 175487 - DNA, 943 bp, Homo sapiens
tgcctgaagggtattttttgtagattccaatttctctaagagaccctctgaggttactaaggtgtctagctttctactctggttttcaggattctgagctagaccaagggaagtaacatgttcttcaacaatctctacttcctgtgacaaagtatttctggaaggcatcatttcaacaagaagctcactgctactaccactttgtttagaaatacttcctctgaaatctttaaacgtgcttcccacatttcgtaatccttttgaatcactattctttgctattgatttagaagttcttggttttgagtgaacattttttgttgccattgtacgtgattttttaggaaaaggttgttttgttaagatctgtacaaatcctccacgagcagccagattctgacgacggagatgtgttttgccaagataatgtgcattcaacaagttttcttctgaacactgaaaaccacaaagatcacaggaaaagaccttctgtggcccatgtgcttgtttgatatgcatatgtagtgctgagctgctctctgctttgtggctgcagtgacaacaggtatgttccttaggctgctgcatgtgagactcagcatgtttttccaagtcagagcaagaagaaaacaaatgcccacagatgctgcatttgagaactgtatctacattcccaatggtacaactaacactaatttctttcggggggaaaggagattctctttccagatcaagggaaaccatttcctgagcagatgttttttcagtgtctgttttcagagaaacaacatcaatagtgctaaaattgcaagaaggggagagggcatttgggagacatgtgcctccaactgtgcagtcactcagaaaggtctccttccctgtttcatctaatgcaatacccccttctgtgactgagctctcagaagtttctaatctacaaata

SEQ ID NO: 175488 - DNA, 438 bp, Homo sapiens
agtttggctactctgctgcagagaccacatggaaagtgctacatatggaggtcatgtaaagaggaagaagccctgaaactacatggagaaagagagaaactcagttcagcctcccagtgttccagctgagcccagcctagattgtggaatcatgagcaaactaatgagttaaccaattaggtaaagaagaaataaccaaatggtcccattccagaatgcccacccaagcccttcctctttctttaggatgctgtttctgaaagtctggcctgaagaccacctgtatcagaatgacctggggtgtttatttgaaagaaaaattgtcaatccaaccccagaatttcttgggcaaggcaggataatcagtatctttaacaaaacttttccaattgattcataaggaaaataaagtttaagaacctggttaagggctttctc

SEQ ID NO: 175489 - DNA, 619 bp, Homo sapiens
agaataggtctcgaaattgtatagatctcaaaacaatgatgcacccttgtagcttatattgtctttcctacctagttctgcagaattttattgcattctttttttctcttttagagatggggtctctctgtctccctggctggagtgcaacagaatgagactctgtctccaaaaaaacaaaacaaaacaaaatcctctggaaggttagggcatctatgtttgtaataagctcccaggggattctgattcacatcaaagttggaaagacatcgattttgctgactaaattggtcatcatttttgttcaactatcaccttccattcacctaagcctagatattactcagttctggtaaatactcaataaagatgcagccccactgtgtgttcacataagctcactggaaagactataaatgtgattttaaaaagctctttatgatttgctggtagaaagaaatattctgaaaccatcttttcatgtcattttcttagaggcaacacagtataatggattgattagcatcttacaaactgacaggttaaaagatagttttaaatctttattgataaactgtcatttgactgcaagcattttaaactttaagaatctctgttt

SEQ ID NO: 175490 - DNA, 445 bp, Homo sapiens
aggaacatgaggcctttaaactttcggtatgaggcataagatgaaacaatctgctggacgcggtggctcacgcctgtaatcgcagcacttcgggaggccaaggcaggcggatcacgaggtcaggaaatcgagaccatcctggccaacacgatgaaaccccgtctctactaaaaatacaaaaattagctgggcatggtggcgcatgcctgtagtcccagctactcgggaggctgaggcaggataattgcttgatccagggagttggaggttgcggtgagccgagatcgcacactgcactccagcctggcaagagagtgagactctgtctcaaaaaaaaagatgaaacaatcatcagattttgtacacaggctgaaaggaaggggtggtcattaaatggcgcaacatccatatggcctgagaagagggtctcactcccaccaccgtg

SEQ ID NO: 175491 - DNA, 114 bp, Homo sapiens
tacacctttcccttgtgttcagactctcactaacaataaactcctcagcaagccagctgatggggccctccacagcttggcttcagcaagtgttgctcatgttgtttcctttgc

SEQ ID NO: 175492 - DNA, 270 bp, Homo sapiens
ttcgggtcattgctgccgagttatctaaaacaaatgtttgcagaaggcgttacagataaaaaaacaaagcaaaacctatctatgtcctagagcagtggtctcaatggggacagggagagtgatttgtgtcctccaggggacatttggtatcgtctggagatatttttggttgttctatctggcaggcaggggtggggtgctactggcattttgtgaacagatcctatggtgcacaggatagccccccactcccctgccccaccacacaca

SEQ ID NO: 175493 - DNA, 876 bp, Homo sapiens
cattggccgtggcacgttcagtgaggtccaggatcacatgctgattgggacccaaatggccatcaaaatcatccccaaggctggctcccttggcatcactctccagagagtgataagtattttaaagttactctgtcacttcaatattgtacggttgtatcaagtgattgacacccccaacaccagttatttatttagtaacggagtatgcaagaggaggacacccacgcaaccaatacaccaccatggcctcatgagggaggagaaggcctagaccatgttcaggcagattctgtcggccatgcagtagtgccatagcaaattgcgcagagacctgaacccagaaaacatcatccttgatgaggacggtaacgttaagatcgcagacttcggctttggtaccacattccatgatgggcagaagctgacagccctttgtagcacttaacccctacatggccctggaacgtttcctaggccagggctaccaatgtgccaccatggatattcagagcctcagagtaattttataccacatggtggctggggttctgcccttctgctcatgcagcattagggtcctctcagcaaaaatttaaagtggaagctatttttccccagtctacttttcctgaggtcttaaaagcctcattaaaaaactattaacagtagaccccagggagcagaccacactagaagaagtatgagggacccgtgggtgaacagtggtcaggagttgcctctgacaacatgaagaacaaatcctggaccacctgaatcccaaaacaacccagcttttggtggccatgggattccaggctgagaacctatctgtggcaatcaaagaaaaattattcagttatcccatggccacct

SEQ ID NO: 175494 - DNA, 370 bp, Homo sapiens
ccactcagcggcacgagtcagaggccaggcgtgagtcagggctccccaccccaagcccgcagctcagctcccccaggccctgggaagctctatctgccccacctccatcccgggctgggtgtgagagccgcagtggggctcggaagcacaggcaccggtttcgtcctccgtgagagtggcttccccaaccaccccaggggccactgcgtgtcactgttttcacagatgtggctatgcgagtggggatgcctagcacctccaggctccattagcggccttcccagaccctcacccgtgggtggacaacggccttgagacatagacagcttttagagccacaagctgggtaggggggcacatgggcttggtc

SEQ ID NO: 175495 - DNA, 184 bp, Homo sapiens
cgtgggtgcctagaggatccccgtacgctcagccacttccctcgctgccaagttaggtcttcttccaataatataagatgctagaagacttagatcttgatcttatttctactttaaggttcgatagtccctcttaatgatttcctgtttagcttaatgcttgcgatgagacggggcttcatga

SEQ ID NO: 175496 - DNA, 347 bp, Homo sapiens
ttgtatttttgatagagacagtttcaccatgttgcccaggcttgtctccaactcctgagctaaagcaacccaccggcctctgcctcccaaagtgctgggagccactgccaccactcccagcccccttcctttcttaagcactgttagggattgtgtctagctacctaaagaacatagactgactcttcccttaagccacttccctcgctgccaagttaggtcttcttccaataatataagatgctagaagacttagatcttgatcttatttctactttaaggttcgatagtccctcttaatgatttcctgtttagcttaatgcttgcgatgagacggggcttcatga

SEQ ID NO: 175497 - DNA, 397 bp, Homo sapiens
tcactaactttttagcatggctcccttcatggcatccatcagaagaaagcaaagcaattaaagaagttattcattaatcaaaagcctctatcagtttcctggataaaaaggaggataagcacattaatttaaaaaattaactttatatggaatgaagtccacaggttctcgaaatttaaagagaactaggttatctggaaatgcagataaaaatacaaatattttaagaaatgaaagcagtgttaaagacagattcttatctattgaggctcaaaaagtggcagaggacatgctggtagatgtgcctggctaaagctggacacgaacaggaggtgtttcatcatttgtactaacactatcggtctgctcctcctaagtggtaggacttgggcacaag

SEQ ID NO: 175498 - DNA, 627 bp, Homo sapiens
ggctatttaagggtattgtggacaggggtgtggtgtcctgcgactgagggtgtggaagtatcctaaacagcggggttaactacagatgggggacaggcaggcaaggtgcttccctggaagctgcttgtgttttcatgaaggcattaactttggagtggagggtacggatttaaggacagatttagggacatgcagggagtggagggtacagatttagggacaggcaggcaaggtgcttgcctggaagctgcttgtgttttcatgaaggcattaactgtggagctgggcaggaggtgcgggcctgctccctattcacccagcacaaacttctaagaaacctttggcagcctccctcccctgccactgccacacctgcctgcaggccacacctccccctgagtttcaggcccaagttctgcctggacatcccctcagctaccttgaacacaacaggtctaagtaaatcaggctgggcgtggtggctcacgcctgaaatctcagcactttggtaggctgaggtgggcggatcacgaggtcaggagttcaaggccagcctggccaatgtagtgaaaccccagctctactaaaaatacaaaaattaactaggcatgtggtgggcgcctgtaa

SEQ ID NO: 175499 - DNA, 357 bp, Homo sapiens
aggcctctgaggcactagcagtggaaaggcccctcactcccatattttagacagcgaactgaagctcggaaggcgacgtccacagttggggtcgcttccaggccttgagcctagattcttgggtctaggttgccatggcaccaggagcctggaaaagaaaggctcctcaggcacccgctctggggtccatccggcccatgctcttgcaagggcactgcggtttttgcttgggaaacgggtagcaaacagctaagactcccagaacgtgggaaggaaaacgaggcccagcagaagagcaggagggcggcgctttccggtcgggccccggatttaactgtcttcacctacagaggcccc

SEQ ID NO: 175500 - DNA, 299 bp, Homo sapiens
ataaggcacagagaagaaagtggaaaaaaaggcaaaaaggaaaacagagcaacagataatgtgagacaaggtcagatagtctttatgtatgtgtaattggagtccccaggagatgtgagaggaaaaagagttgaaacaatcatagacaaaatatttccacgtttgatgaaaactatattagttgtgtattgctacctaacaagttattccaaaaatttagtggcttaaacaaaacatccattatctcccagtttctctgcgtggctcagctgggccctctggttcagggactcttcaca

SEQ ID NO: 175501 - DNA, 145 bp, Homo sapiens
gaggctgaaacggaaggtttgcttgagcccaggagtttgaggctattgtgtgctatgatcgtccctgtgaatagccatcgtgctccagcctgggaaacttagcaagaccctgtcctcccccaaacccccagcacaagaacccacg

SEQ ID NO: 175502 - DNA, 271 bp, Homo sapiens
ttaatggttttattgattgatgtttatgctgttcagtgataacctgaaatgttatatcatactaaatgtttctttaaaccagaaaatcttatttatcatgtctgtcctttcaagcttggtgtctataatccagattttaaatctgaaaaacaggcacaaggagcatggcgcctgtactgcagttccagtcaacctggtggtagctcttttgatgccatgtctgtttctgaattgttaggtctttttaatggtttctgcctttccctcttac

SEQ ID NO: 175503 - DNA, 647 bp, Homo sapiens
ataatagatatctattgttagggtataataacataagtctttaataagagtttaagcccctcatgctataaatattataaccatttgctcctccagcacttagaatagcttaaatatttatttattaccgaggaaaacaaaaaagttttgctccataactatcagtgctatttggaccttataaaaatgaagatttcaggccaggcgcaagagttcacgcctattaatcccagcactttgggaggctgggattacaggcatgagacaccgcgcctggcctaaattttattttctaagaaattgattcagaaaatcagactttccaatgattattttaattaaactgatagaataatagtttggcagacatatctattatcatggtcctattccatctggctgtcactttcaaactatcttcatacttaaggtaaagggttattctattcatcaaaaacaataagcattccataaacatctggattaaattgtgctacctttgagggttaataattagtgaataattcacaatgttgtgcctcattataatccacatcagccaagaaaactcagtctgctgtatgaggatagttaaattgtcactagcaaagtactttttaaaatttcagcaaaatctggttagggat

SEQ ID NO: 175504 - DNA, 571 bp, Homo sapiens
tcaagtgattctcctgcctcagcatcccgagtagttgggattacaggcacacgccaccacacctggctaatttttgtattattagtagagacggggttttgccatgttgcccaggctggtcttgaactgctgacttcaggtgatccacccgcctcagcctccccaagtactgggattacaggcatgagacaccgcgcctggcctaaattttattttctaagaaattgattcagaaaatcagactttccaatgattattttaattaaactgatagaataatagtttggcagacatatctattatcatggtcctattccatctggctgtcactttcaaactatcttcatacttaaggtaaagggttattctattcatcaaaaacaataagcattccataaacatctggattaaattgtgctacctttgagggttaataattagtgaataattcacaatgttgtgcctcattataatccacatcagccaagaaaactcagtctgctgtatgaggatagttaaattgtcactagcaaagtactttttaaaatttcagcaaaatctggttagggat

SEQ ID NO: 175505 - DNA, 947 bp, Homo sapiens
  misc_feature (222)..(222): n is a, c, g, or t
  misc_feature (482)..(482): n is a, c, g, or t
  misc_feature (569)..(569): n is a, c, g, or t
agaaggcaaagggagcagacagctggcaagctctgtcccaatatgcttccctgaaagaggcgaggaaatttcagaagatgcaatgcctgaatggctcactttgcaggaaaacagaagaaccaaggctggactgtactgccgcaatctcggctcactgcaacctccctgccagattctcctgcctcagcctgccgagtgcctgggattgcaggcgcccgccgncacgcctgactggttttgtattttttggtggagacggggtttcgcggtgttggctgggctggtctcagctcctgacctcgagtgatctgcccgcctcggcctcccgaggtgccgggattgcagacgggagtctcgcttactcagtgctcaatgttgcccaggttggagtgcagtggcgtgatctcggctcgctaaaacctccacctcccagccacctgccttggcctcccaaagtgctgagattgcagcctctgcctggntgcaccccgtctaggaagtgaggagcatctctgcctggtgctattgtctgggatgtgaggagcccctctgcccggtgcccagtctgngaagtgaggagcgcctcttcccggcgcatcccgtctaggaagtgaggaacattctctgcctggtccgcccatcatctggggatgcgagggagcccctctgctgggtgcccagtctgggaagtgagggagcgcctcttccccgggccatcatccgtctaggaagtgaggaacgtctctgctggcagcccatcatctgggattgtgggggagcgccccggccgggagggctgtcgggggatgggagctttctaaccggcaacacccgtgttggagtgaggacgcccccgcggggcacccctctgggagtgaggagcctctccgggccccattgggggggcgttcacggcgccccgggacgaatcccggtcccaggtgaac

SEQ ID NO: 175506 - DNA, 224 bp, Homo sapiens
acatttatggtattaatgattttgtcatctcatggttttaaatatcatctctatgatgtctcccaactgtatatctctagctaaagtctgaagtctgactcttgaactccatttctttttttgcttgtttgtttttttgagatggagtctcgtccaggctggactgcagtggcacgatcttggctcactgcaacctccgtctccggggttcaagtgattctcct

SEQ ID NO: 175507 - DNA, 451 bp, Homo sapiens
cctccggacacgcctgcaggggctacgaatgcaaattccccccgagacgcccctgagcctccgacctccagaccccaattcggttcgaacggtccctcagcccgaaacacggttggatcacaaccggccgatgtcccggcccatcttcccagttcccctggctcgccgcacggaactcccaggggctgcgccggcgggcgagccgagggtgagaagttgggcgaggctccagaagtgaaggggcagctccggctcagactgtgtacacacgacctttgaaaagtaaacgcccgcggggctgggcgaccttgggtgggacgcgctcgggtcagcctcgcaggcgggtgtgcacgctccggttaagttgaggtgcagagaggcgacccgggcgtcgcgccctcgccccccgcccccgaggacagtgacgcgcgtggggaggacggcgcggccg

SEQ ID NO: 175508 - DNA, 509 bp, Homo sapiens
acactccagcctgggcgacagagcaagactctgtctcaaaaaaacaaaaacaaaaccaaaaacaaaacaaacaaaaactcatattgcacatgctgtgttctagcttttttgtaagtgaactcgtttaatcttaacagtcacttaaagtccatttctcgagatgtccttcaccatgctttttctagtttatccctgcccctgagtgagcaaggctttgtgtgagaccttgttgaactgaattcgaggcaaggacttggccattgagttgtgtttatcaggtctcatccacttctaaatatgttacatttcagaccaaggaggaagtgtgtcttcagagacggtggtgcgcggtattcccctcgagtgagtgtgatacgtgaacgcacgcttatcgatcccttgtaaggagaggtcattcactttacaatgctacccaagagacaagcccttcaaatacagatgttggagtagagacggcagagtggaggtaaggcaggattgatctcaga

SEQ ID NO: 175509 - DNA, 219 bp, Homo sapiens
ggtgctcctacaaaacgctagagccaggaagagagatgccagcggtctcctgagttaataccgtattctaacgaagatctgtttcacacttttcaaagcttcagttcacagattccagaagaattttgcatacaactagaacatacttatcttttctcagtggcccgtcactataacattaaataagatcttaattgtaaaacacacttaagtgataca

SEQ ID NO: 175510 - DNA, 168 bp, Homo sapiens
ttatttttcttgtcttactgcatcgcccgtcatcacagtacctccatgtactgagactttatatgtgtcagttacatatagattgcctctaagtcacacaacaactctatgaagaaggtactattaggtaccgtattgtataaagacgaaaatgtagcacagaggggg

SEQ ID NO: 175511 - DNA, 354 bp, Homo sapiens
atattcaaatgtgtttgcatatttctaaactgatcatacatcaaaattagagccatattgtttcttttacagtgaaactgtttatataggaaatattgtaccaaacattccctgcttccaccctgagttgtgactgattacagagtgagataaaagcacttacatacacaaacacgagaaaagtctataggcatgcaagaaatcaaaagaaggtgtgatttttaacacaaacactattatcaaccaaaaataaagaagaaggaaaaagaaagattgctggagtttatgcgaattctgagaaagcaaaaagcatagacttacacactgatagattgaaaattagaggttgggtta

SEQ ID NO: 175512 - DNA, 157 bp, Homo sapiens
gcattatccttcagtatgtggaggtatgtgcaacaaagaaatggcagatatttcatctcactcttccctaaggacaagattcatgtgtaattcatctttctattcccctacagtgcctagcactttaatggcacctggtactttttcacatggtaga

SEQ ID NO: 175513 - DNA, 312 bp, Homo sapiens
aaaatagctaagaatttcacagaataagaaaacacatgtacatcaagcaggatacattaaaaaaaaaattcctcctagatatattatgagaaactaaagaatatcaaaattgaagagtttaaaggaagttacagagaaagacatatttcctaccatggaacaccatttagctgatagaaatctcttaacaggaaaaatggaaccaaaactgcagaatgctatcttccaagtgctgagagaatcatcagttacaagtgtgtaccgactgaagccactatgtttaccaccagctgctctacacacactagagga

SEQ ID NO: 175514 - DNA, 141 bp, Homo sapiens
tagttcttgaaaagcaataagcatctggaagtctgtactaaggaatgctatcttccaagtgctgagagaatcatcagttacaagtgtgtaccgactgaagccactatgtttaccaccagctgctctacacacactagagga

SEQ ID NO: 175515 - DNA, 2423 bp, Homo sapiens
gttcagtattcaaagaatgtcttaagattatgataattaaagaagtcccaggacgagacaaaatgaatcaaagattttgtatgcaagtccacaaagtctgtcagacatattgtaaataatttaccattgattttattttcaacaatgttaatgtattgacatttagcatatatctgttagatagatattctatcacaatgttttattccttgcaccagccctttactattttctaacaaaaaaaaaaaaacacaatttcagggcataaacaagaagtgtttatttttccgtagtacatctttgggttgactagagattggctgttctaagatgtgctcatgcaggcttgactctaaactatgcatttagagtcattttgttctggtctggtctacacgtaggttattcttttgaaagcagtactctgtcttaagcatgttcttctcttagtggagtttggagatgctaatatcgacaggtggaggcagaatgctccttaaagtctaaactagaattgccacactgtcttcctaaggttcataagccaaaggaaatctcatggcaatttccaacattagtgggacaagagattatactactcccaaggaagtggaggtggggaaaggaatgattatttctgtatcataatctaccatagtccttaagtgactgcctcttgctacttcccaatgttttactaatcacattgacttttaaaaaatagattccctaggaattcaagaaaaatacttattttctaaataaatcacagcaagacagacacaattgtctcactacccccaatatcctaacacactaacaaatacgtgtataatcatacacacacaaacactacaacatacacccctctatgatgttattaatgttatacagataaatagatgtaatatttctgtggattgtgctgcggctgtcctaaatcattgcacagaattataggtaactgcaattcatagggcttataatgttaatcattctaggaagtaattagctgaatgccttctgtacatttgctaggctaccagctcagcgacatgtattccatctgaaggacactcttttgaaatacattatgctcccagtgtggttgtaatattatcatcttattatcaccaattcccttgcatggtggctttgctgagcagctgtttcacagacaagccaatttcttttaagtattgctctatcagactctgaaaccagttctaccagaagggttcttggtaatgaatgttaatgagcagacaagtatcctttctctgacagaggctcactaatcctttgagtaagtatgggtgaattacaggagaaattttatttaagttaaattgatctgctactaagtagagaaaacttattttcttattttaatgaaaatcaagaaaaaatatttaatggggatgtaaattacagctccctggaaacatttttgtcttctgactggagaacacagtagctcagtagactggttcaactgcatagtgtgcttaacactagcaaactcatgatctccagtgaggcctgatcttcagtgggacagtgggaaatggagtagaaaccactcactctctctgggatttggtaccagcagattctttatgttccttagtgataagtaatagggataaaaaattattctttcttcttccactgagccagtgtaagagttcctttttttttccaaaacaaataagatagtaaagccataagaacagcacttgtatgctttttgtattctaagaatatgagaaaaataatttcagtgaacctttatctgaaaggatataaccatgtcctgatggaatactgcgatgggcaggtagaagggaatgagatgggccaggcgcagtggcttacgcctgtaatcccagcactttaggaggccgaggctggcagatcagaaggccaggagttcaagaccagcctggcccgcatggtgaaaccccgtctctactaaaaaaaatacaaaaaattagctgggcacgggggcatgcgcctgtaatcccagctactcgggaggctgaggcaggagaatcgcttgtacccaggaggcagaggttgcagtgagctgagattgtgccattgcactccagcctgggtgacaaagcgagactccatctcaaaaaaaaaaaaaaaaaaaaaggagaggaatgagatgggcagaaagatgatcattgttgaagctggttgatgagtctttagggagttcatagactattctgggttgtgtatagtttctgaatttccataataaagagattaaaagagagagagaaagagagttggccagcacagtgcctcgtgcctgtaatcccacactttgggatgctgaggtgggcggatcacctgaggtcaggagtttgagaccagcctggacaacatggtaaaactccgtctctact

SEQ ID NO: 175516 - DNA, 1373 bp, Homo sapiens
ctaagacccctaccacacacctcaaagtaacttgaaatacattatgctcccagtgtggttgtaatattatcatcttattatcaccaattcccttgcatggtggctttgctgagcagctgtttcacagacaagccaatttcttttaagtattgctctatcagactctgaaaccagttctaccagaagggttcttggtaatgaatgttaatgagcagacaagtatcctttctctgacagaggctcactaatcctttgagtaagtatgggtgaattacaggagaaattttatttaagttaaattgatctgctactaagtagagaaaacttattttcttattttaatgaaaatcaagaaaaaatatttaatggggatgtaaattacagctccctggaaacatttttgtcttctgactggagaacacagtagctcagtagactggttcaactgcatagtgtgcttaacactagcaaactcatgatctccagtgaggcctgatcttcagtgggacagtgggaaatggagtagaaaccactcactctctctgggatttggtaccagcagattctttatgttccttagtgataagtaatagggataaaaaattattctttcttcttccactgagccagtgtaagagttcctttttttttccaaaacaaataagatagtaaagccataagaacagcacttgtatgctttttgtattctaagaatatgagaaaaataatttcagtgaacctttatctgaaaggatataaccatgtcctgatggaatactgcgatgggcaggtagaagggaatgagatgggccaggcgcagtggcttacgcctgtaatcccagcactttaggaggccgaggctggcagatcagaaggccaggagttcaagaccagcctggcccgcatggtgaaaccccgtctctactaaaaaaaatacaaaaaattagctgggcacgggggcatgcgcctgtaatcccagctactcgggaggctgaggcaggagaatcgcttgtacccaggaggcagaggttgcagtgagctgagattgtgccattgcactccagcctgggtgacaaagcgagactccatctcaaaaaaaaaaaaaaaaaaaaaggagaggaatgagatgggcagaaagatgatcattgttgaagctggttgatgagtctttagggagttcatagactattctgggttgtgtatagtttctgaatttccataataaagagattaaaagagagagagaaagagagttggccagcacagtgcctcgtgcctgtaatcccacactttgggatgctgaggtgggcggatcacctgaggtcaggagtttgagaccagcctggacaacatggtaaaactccgtctctact

SEQ ID NO: 175517 - DNA, 115 bp, Homo sapiens
cactctcctggttttcttttccttttgactcatctcagtttctttcttttcctcgccctcactctttcctctcgtacccagggttctttccaaagtatctttgtcctccacacca

SEQ ID NO: 175518 - DNA, 406 bp, Homo sapiens
gattttttttagaaaagaaactttctataaatttatgcatatattatgcagacattcaattatatctgtaggaaataagcaaactatggaatttttagataaaaagctatactctagtttcagtaggccttcttaattaccactcattaaattttcattaatttcaatcctagaaatgtgaaaataacaaaaaaattttactgtctaaaatttctttggtttctcagttttcaattatttttcaaagtacttttaccatcaaaatgtctcttacaccagtcagaatggcgattattaaaaagtcaaaaaacaaaagatgttggagaggatgcagagaaaaggaaagcttataacactgttcatgagagtgtaaattagtaaacctctatggaaaacattatgaaga

SEQ ID NO: 175519 - DNA, 313 bp, Homo sapiens
gtgtttgactgcttggttctggataacaaaggcatgtccttataaggcaaagtggcttcactaagtatggtcctccagaggaaggcaggtcccccctccatggtgcgttcaatatatgggagagaattttgtgttcattcctttgacatgctaatataagtatgttttctgataggtactacttaataaatataatagctaatacttattgaattattattatatatgctaccaaagtatttcacttggagggaatattgggataactggaattgatttcttctaatgtaatggtccaaggcagattttacat

SEQ ID NO: 175520 - DNA, 233 bp, Homo sapiens
gccaggctggtctcaaactcttgacctcgtgatccgcctgcctcggcctcccaaagtgctgggattacaggcgtgagccaccgcgcctggccctgtcacctttcaacacactacatgttttactacacatcttgtttcttgtctgtctcctgtacttgattgtcagctctgccagcacaatagctgttgtcttttttttttttttttttttttttggagagatgggggtgggt

SEQ ID NO: 175521 - DNA, 398 bp, Homo sapiens
ctaccatcaccaccacgatcaccaccaccaacaacaaaaaccaggaaattaatcaaaccaaccaaccacccaccacaaccacaaaacaaatgtagaaagctaacgcaatcaaatgacaaattggaacatgaacaagccataaatctgatcaagtgttaataggtcgatgaataaagacagttcagtagaggattggtgaaataacccctggaacatccagtactatggaaaattaccatttaaaaaataacaatgtagactgttatttattggcatgtacatgtgcctgtgatatattaattaattaatagaaagttacagtatgcccctatgctgtgtgggagcaaaagcatgtggatgcttgtatgagtgtttgtgtgtgtgtgtgtgtgtgtaaa

SEQ ID NO: 175522 - DNA, 323 bp, Homo sapiens
tacagaaggaggtgcttttgaaatagagacaatagcttaataaccacacaggtgataagttgagcaatgttctaatgtttcttcttcttgagtaacatgtacattttaattgctttacttctgattaaatagcaatataaatattttcagacttgggcagggatactaaggactagaaaagaaatgaacatattttgagggctaaggaaattacctaaacttcaaatatcaggtgactgaattttcctctaagcaatagcattcaatcttcactgcacattggaatcatctgagaagcctaaaaactacaaatacctttgtcc

SEQ ID NO: 175523 - DNA, 562 bp, Homo sapiens
aaaaactttttgtagagacaggggtcttgctattgtgcccaggctggtcttgaactcctgaactcaagtgatcctcctgcgttttcctcccaaattgctgtggttacagatatgaaccaccccacctggcttgaaaatggttttaatggccttacttggagttctccaacaatgggctcataacagttattcctgggctcaccatggtggtagggcctggcctatcctctgtccctgtgttccgtgtgagcccagtactcccagagtcagagcttatctcatccttaggtcacttcctgcccaatgtgaagtatagtggagacgttggctcatggagctgagccctcagtggccccccatgtttgctgttttgtgtctttgcctggagccctgctgcttcctcttccacctgccccacaatctgctgatggctgcagaacatcaggctctctccgaaccctagtcagtggtttccttagtttggtaaccctcagtctttggctactttgtgcatccttgacctcatccacctattaaatccacatcagagctatttcccacc

SEQ ID NO: 175524 - DNA, 506 bp, Homo sapiens
aaaaactttttgtagagacaggggtcttgctattgtgcccaggctggtcttgaactcctgaactcaagtgatcctcctgcgttttcctcccaaattgctgtggttacagatatgaaccaccccacctggcttgaaaatggttttaatggccttacttggagttctccaacaatgggctcataacagttattcctgggctcaccatggtggtagggcctggcctatcctctgtccctgtgttccgtgtgagcccagtactcccagagtcagagcttatctcatccttaggtcacttcctgcccaatgtgaagtatagtggagacgttggctcatggagctgagccctcagtggccccccatgtttgctgttttgtgtctttgcctggagccctgttacaccgtataccgctaggaccacgattacgtaatggagctcgaataacccaggcatagtttgctaagccaagcaagtgtgtgttcagtaatgtcgagaccggtcgaatttt

SEQ ID NO: 175525 - DNA, 688 bp, Homo sapiens
gaaatagtagtactttaaaaattaacatggtttagaagatatgttttatagatacaaaatggtagttatacagaggtatatctgaagaggtctttgaatgtacttagacaagaaatagattttgttttattaataagagatgaagtagtttctgcttagatcaaaactatacttttcaaggatgaaagcaaatacaaaacttcttcagaataacaaatagcaaatttgttaaaggttctggtattaatcatgggtttcatctcaccaaatgatctggaggccggttgatatttgtatttctaatgctgatatttttaaggtataatttctcacggttagaaacataggttagaaatgttaatatccaagttaatgtaactggcatcctccaaataacagagtgctttggatcagaagtaatttgtgaaatctagcttttttcttttacctgttttcagaacaagttcctttgagtgcttctcttggcttacaagtgaagtttcattttagattgaatgggttctgttacaaagtcaggggaagaggtattactgaatttgtgagaatattttaagttgggaattactctttttatacaaaagacgatgatgattaggttcagaagcttgcctattataacctgctttgactcatagttgaagttccatattattcaaaaaagtttatg

SEQ ID NO: 175526 - DNA, 897 bp, Homo sapiens
gtaggggagggggaagacgtgattcctgtcctgctgaaggcgcggggttgatgacaaacggagttctagctagtaaactctgaagtgaagtgccaactgtggaagaggtcaacagcatgtgggaccctgaccttcaggtgtcactcccagggagtgttcccttttgtgtctgctgtgtggagttggtgggggatttacaaccctcctcctccagttgtctagccctgtggtctgagacaagatacttgcctttcctgagcctcagaggaggaatggcttacattcacagggagtgttctatgaggcaggcgcgcgctgcgtgcagttgtttacatgcagtgcctcattaatcctcataacgaaccagtgaagtaggtgcccactgtgatttgcacttttgcagctgagcagactgagtctgagatgggttaagtattaaaggctagtgcactgcttgccttccttagtgacagccactaactgagctcaggccagggccttccaggcagccctttggctccaggcagcaacgtctggctgtggctttgtgtttagaaggctaaagctgttatggggacagatgccaaggcctcgcctaaccttatcacccccaacatgagcacctctaggtccgatccgcccttgccgaggctggagatggccctgtggggcctgccaggcctcaggatcaaggagttctagagcgcagggcaagaggaggaggggcagctgagtctctgagagagagctgctgtcttgtgccaaattttatagctggacatggaaaggcatggacagtcatagcctggcagaagatagccaagctagtcagtgtcacagcccaagccacagagtaaggagggagcctcacacagagggctgtagtctggaagcctg

SEQ ID NO: 175527 - DNA, 354 bp, Homo sapiens
ttcttcctgcatgtgaggcacagagattttaagatgagcaggtgtgagatgcatggatttgaatagcatagaggtatctggagagcattgtgttggtattctgaataccctcagatcccagggggataacagctcattatgcctggggtagaacttacctgggctgtggaagaagaggggattcttcaaaaagggctcaacctctgaactggcaaaacagtgagttttgactcaaaggcaccagagtactaatacatgacatcctctcctggggtgatccaatgtggctggagttggatgaggtggggaggctggggatgggaatgggaatgggattgggatagcaggacgggg

SEQ ID NO: 175528 - DNA, 265 bp, Homo sapiens
ccgtgaagaggtcgagcaatccagcgacctgcccgaggccatgcggctcctgacagtgaatctcctcacttctgattgcagagcccacaacatctttacccctcccagcagggacgccacagcagcagggatgccacagctgcttcaggtcaggatgcagggtttctctgatgcactctgcaggggcccagagagatgattcccttcttttcctaggtcactgcccctttgtttacagctcctgcctcctctcttcaccggccat

SEQ ID NO: 175529 - DNA, 886 bp, Homo sapiens
gagcatggttgaatatttctcacatagggacacaagtccagaaggcatatggcatctctgagtactggatgtcataccaggagagtctcatctcaaaaggaggtgatgatcatgtatttggccttcaaagcccatgctgctataattttctaagatctgaaatctgagtaatacaacagcagtcagcttcatgaccaagagcccatccttgagggaaactgactcttcctcctctgatgagtgacttgactttccaggcaagtaaagcaggattgagcttactcctgggtctcagggttgcctccctggcctggggcagagcagatgaagaggaagtgggtgttgattcttagtggtttggggcttcaaccttgtcacctacctttcaggcctagcctcagtcctgactcaacaggagaggccaacacacccaactccacttcctaaaggctttggtgcccaaccccaagtcctgatcactactcaggaaggaaatacaaggaaatgccttccaggtaggaaaggaggtataaccatatgtagataaaaaaggaactttccatttctgtaaattgaagtcttattcacacaagagacagattgcagggggctggatttatggggtaagatgattaaattctgtgtcctctttcatatgtcatgctttatcacgcattactaaggatctgatttggtggcaatttgttgatttcttcagttcttagctcagttacaaaaacgcagtgagcaggacttgggtaccctgccagtcagctccttagggtcagagaaacaccgtcagtccacagtgctttataaccacccaaccaccttagacggggccttggtattcactacccactcgtcctcccctagcaacaagcac

SEQ ID NO: 175530 - DNA, 254 bp, Homo sapiens
catgcggaataaccagtgggaagttgaagaaatcccaggcccctgcttggtcttgcttcagagctgctttgtaactggtgacagagcacgtcgccaccttctttcatggagggctgtcatgtttagattattgttgataaaccgttttgagattttgaaatatacaaagctgccagcttggaaagtaacagtcattgctatggacatgattggctttgggggcatcaagccctcccagttcgctgtgtctaccc

SEQ ID NO: 175531 - DNA, 619 bp, Homo sapiens
aaacaaaaacagaggtagggaagaggtgggagagggcatcctacctgccttttggtccttgactcaatatctggaaaattgagactcctgtatgtgattatgacgattctgagcatcagcattagtactgtccaacctatgaattttagacaggtaagaataggaagtaaagtaatagaagcagttgtggggctccttcctcctaaagaagggcttcaaatgttttcctttcagctggtgtggtctgatgtaagaattgttagccaggaccctgaacacatagctagggtgaaggtcattattgttttctctttatctgattgtaggctctccacacacatcatggtactctggccacctgccttatgttttatgtgtttattataaaaggtctttttttcccttgagcattatcttagctcccaacttcaacataactttcaacacctttctctgttatttttgcaattaacagatatatttataccagattagtccttcttcttttacagaaacaacttcccactttagatgtttcatacatacagccacttatatttttacatagtttatctacagcatttctagaggcacagtcactgctaaatgagtagaagaa

SEQ ID NO: 175532 - DNA, 554 bp, Homo sapiens
aaatccgaaccatcttagagagcaatcttttcaagtacaaggtcttccctcccacttttgtttgtaagtccagaaaatacagtccacatttaatgatcctaatgtacagagtggaagcaagcagatggattgttaagactgctgcaacagttcggctgcccctcacgagtccaggacccactaacaggcctctggcctggcatggggcacaccaaccagcaggcaaaaggcctgacttctagtcctggctctgccactggcatgcttgcaggcaaggtggcctggggaagttgcttcccctctgtgaggatggacaggggttcctgtggccacttctggctgactgcgggtcacctgctccccctctggaggaggctccctgctctcctggtggagaagagaagagggctgcaagatgcattgcccagagagccaccggaaagaagactagaacctgcctcccagacaccagctgggtgaacctccatttcccgtctagggaagccggccaaactggttaacccttaccatgtcttctcactggagcctgaggg

SEQ ID NO: 175533 - DNA, 497 bp, Homo sapiens
taaaaagcatctaaagtaaaagtgaaatgtgtgaccaagaatattaaaataataaatgtcattttgtaacaactatcagaaaacttgaaaagtatttcagttcatattttgaagctgataaatatcagctctgtggttaagtttgtcttaaaactcaaatacccaattttatttacacagatagccaaagtcatctgttagcctgaaacatatctgaacagtacctgaagtcatccttttgagagccctttacctgtactatccaagatatgtacctcatcacaatttagaggatattcagaaatggaaattccatagtttataatacaaaaaagaattagcactcaaaatatgtatgcaaggaaatattaataaaggcagtaactgataacatgtacatacccaagggataatatatttcaatgaaaggagggagggatagctttcaaactctcacagtgtcacccactctgcttatgtgctaaactttgttgaca

SEQ ID NO: 175534 - DNA, 506 bp, Homo sapiens
gcttatgcaatgtcatgtatacctatagcatggtacatggaacagtcctcatattaatgacctgagataaatcaagaaaaagctttaatagctcttgtcttacactggataatctctattatccaactgggtaagtgaggtgatgaaagtgatttttgtgacttgcataccagttatacaaattcattcagatcgttttgttttgttctgttgtcacatttttcctttgataatccagaatggctgtcttgattctagaataagccaataaacttgtgactcaggattttaaaaatctggtggacttatgccgtaagggagcattttcctttaacatttgtttcgacatagtttgccctggcgttgttcagtttttttggagtaccactaatttctcccatacctatgagcaggtagtatgaattttccattctgggagagactctattgtagctaaactgcctgtattcaaggatgccttacctcattttattctttgctgtgta

SEQ ID NO: 175535 - DNA, 732 bp, Homo sapiens
agcaactttcagttaacgcgtccctcttgccccatgcttgtcctgccacacaaatgtgaaaatgcaacgttacaaagatctgtgcctcagacaccatttgaacacagagaaactcgtgggcttatgtgactacacttttcaggttacggaatttctttaaggtgtactcttgagtttaatatacttattaataacttatcattacagagaaaaaattaccagaagtacagggtgtttttaacggactttcttctcttgcacattgctgggcatggcgtgtactgtgacagggcggagtgatgggctgagaatgtgtgtgtgtctccaacagttcccaaacgtctacattttcaagaaaaaggcaatctacatcatctggaaaattgtaacttagtaattaattaggataatttccctaggttctctgtgctgcatgagaccacagcgtattcattaaagaggaaagctgaatattggcggaaaacagggttgtaaatttgtaacaagttgttctatcagaaaatgaaatgcaattttctgtcctctctgagcttttaccacatagctcttagcaatgggtgttttttctgtcattccactcaattctcactcgagtaaacctccaagcaataagaatgttgtctttcctgtttagactagactgactacctttccaggacagtccattaagttgatttccaatggtgaagggtcagacacgcctcccctggg

SEQ ID NO: 175536 - DNA, 393 bp, Homo sapiens
tatctccatgggagtcggttctgtcgtccccatatcattggctgaaattctgagaagtaaagtaatttgcgtaaggtcacccaacttgtaataagtaaactgaggttcaagcccacctttgtctggttccatagctacactgtgtgagtgagaaacgtgaaaacacctcacagactcagcttgggcagtgttttctgcaacagattttgtctggggaacttggacaatgccaatattcattcatagagtttctttgcccattccagcaaattatcattttctgctttctcgctcagttatttgtatacttagctgatggactcaacttcacacatttcccacaccctacttagcagagtacagaaatccatttgctctctcccagctggttcc

SEQ ID NO: 175537 - DNA, 279 bp, Homo sapiens
gatttgccatgtagcatgtatcaaaagttaattccttttttatggctgaatattccattgtgtgaataaatcacatttggtttctccattcttctgttgatggacacttgggtagttcctacttttgggttgttgtgaattgtgctgccatgaacaagtctgtctgagtccttgttcagttcttgtggggctacgcctaggaagagaattgctgggctgtatggtaagtctaggtttaactttgtgcggaacccagatgttttccaacaggcagctgca

SEQ ID NO: 175538 - DNA, 461 bp, Homo sapiens
gaagtggtacgaggcagccacccccacgccatccacacccgctggtgatcggattccacctctgctacttcttacccctgatacttaaggcagttcaatttcatctgagaaacattcattaggcacctattgtatgccaggtcccctttgtccccgcagggacgagtgggtgacaactcacaagctagtgggggcagtggaaatggccccggggggctgcagttcctctgggtcctctgagaaaggagaaagaggatttaacccactggggggttgctgggaatgggaccaggaaagcctcctgaatcccttaagaccaacgattctcaacctgaggaacaagttcaaaaataaagaaaaatggcatccaattcccaggttcccccgcagcgtatgaaagctccgtactgagtttccaacaagaactcaccacctccccctccccagcggaggagtgcagg

SEQ ID NO: 175539 - DNA, 691 bp, Homo sapiens
agtaaacaggccacagggccaatcttaggaagcacaaggagatccagacacctcttctgacaagggttgaggaagggagaagagatggccgtaaacactggtgaccggatggaccctcatcccctaagtgaaggcagaaccagtcctctgcactgctgggacagaggggacagaacctatggagggctctctcagagccactgtggccgccagccacttgcagcctgtgccctggaaagctgaagtccacccaggtgcctgctggccagctccaaggccaagctctccctggaactcagcagtttgcaaatctcagcgtgatccgagtcagctgcagcgcttcttaaaatagattgctgggcccagcccctgagtttcaatttagtggtctggggggaggtctggggacatacagtcccggtggattcccaagtgatgctgctgctgatgatctgggaccacaccttgagaaaccctgctttcattcatctgcccagagggtattctacaggtcataagtcgatgggatccaggtttagaaccgacctccaggaatgcacacgggattcgagtctcagcctggtagcacgtttgagtcacctggagatttctgtacaaatgatacccatgcctgggtctcactttcagaaatttgaacacagtttgtctggggatgagcccagggatatat

SEQ ID NO: 175540 - DNA, 266 bp, Homo sapiens
aatcatttttagagtacagtataaaaataaaatgcagaaagcaattatagttggttaaaagttggggccaggaaagcaggaaagccaattatagttggttacatagttgggtccaggaaagcttccattgcttctactttcttatggaaagatagtggtgtaacactcctggtccttctcttacttgtccacttacataatacttccaaatgggagaaataataactcaccggtcttgtgagtttgagagcaagagctcagcaagc

SEQ ID NO: 175541 - DNA, 469 bp, Homo sapiens
caggggctgtgtccctccacactgcagtgcccactggtagctgctcctaggctcctgtcctcactggaccccaggaatatcacttcctccccctgccctttcagcccctggggtggttaagagctctgacactactccgctctgggagccccagcaacctgttgctccatgggcactgcctatacccccgtaagctgccattgcatgacagggtctttctatgaggctcctgtgcgaattctgctcccccctggggccttggcccatctcccgtggcactggggaagggttcgttagtgctcatctttgacatactcggggagcccagagctgatgtccccttccagaacctgggagggcagtgctctttcagagggactcagaggggtggaaacacatggctctgacactcaagcccgccctgaggggccttatctcacctatgcatgtcagcttcctcatctgtaca

SEQ ID NO: 175542 - DNA, 591 bp, Homo sapiens
tgttccaggatactgaaaccgtcacttcccatctcatctgaagatgaaccatataaccatcaacacggcatcgttcctttggttacttttatagatgaacacatattccttccagtccttgtgatagaaaagggtaattttaaatggcattgaaactcaagtattaaataaaaaatatctttctatacaacagcagacagtaagtatgtcctggcaatttctcaaagattttagttcacaggtttgagaaaaattccattagctttaattatttatcagcagtcaatttagattactgttcttgacctatttttacagtgtataggccacccagcaatgaaataaatgaatagtctttttctacaatggctgattttctgaaataaaagaaatctggtttaaaggaggaatgaaaccccaaacatgtaattaccacaatatataacccgccacgctgcttttgtagtcggataaaatgcacatctttgtgagttttttggttattaaataagattatcttgaaagggataaactcactcctgctataatttcttcccatttaaatgtctttgtgccatttaaaacacgttc

SEQ ID NO: 175543 - DNA, 451 bp, Homo sapiens
ttacaggtcgcccaacaccatgcccggctaattttttttgtatttttagtagagacagggtttcaccatgttggccaggctggtcttgaactcctgacctcaagtgatctgcctgcctcggcctcccaaagtactgggattacaggcatgagccaccgcgcctggccagtttttgactttttggagagatggggtttcaccatgttgtccatactggtctcaaattcttgggcttaagcagtctgcctgccttggcctcccaaagtgctgggattacaggcgtgagccaccacatctggccttttttccccccccttttttaatccccagcagaatctggctgaagaattcagaatttgaaattttgcatagaaatgcatatactagctacttccattgattaataagacttggtatgtgttggggataacatcacggatcctctaggtcg

SEQ ID NO: 175544 - DNA, 727 bp, Homo sapiens
ggtctggaactcctgacctcaggtgatctgcccaccttggcctcccattgtgctgggattacaggtgtgagccacagtgcttggccaggagtgttttgacttatataagtttttttaaaaatgtagccaaacttaccaacttttatgacttctcttttcaatattcattgaaaacactatcaatgtaataatgatatgctgcattttcttttaaagttataaaatgctgcttttcatatttatcttttaaaattatctagaatttatcttggcatatagactgaagtagggatctcattttatctttccccatgtagacagccagttgtatcagcaccctgtattgaataatccagattttcctcactgatttgtgatgccattctgtcaaataccaagttcctggtgtgaataggtctattttttccttatttatttataggggtactttgtgttttctgaatgctaattctttgccactgatatatattgtgaatgtcttatctcactttgaatttcttatgaatagcagctcaattaaaattatcagtcttttatagtttctgttttatgtttcatatttgtgaatttcctttttactctaagaacataaagattttctcctatatagtctcttaaatgtttcataagttatgtctttaagcctcctcaaattgatttttttggtatggtgtgaggtagaatctgtagtaatttgtattatttg

SEQ ID NO: 175545 - DNA, 366 bp, Homo sapiens
ggttggggaaaatagaccaaatagggcatggataacaaccatgagcatttgtacagccctctacagtttccagatggccttcctgtgatcttcccatctaccccagaaagcaaaggaggcaagggtactcacttcccccattacaggagggaaaccttaacttacagaggcaaaaggccaagaagatggtatttgaatccaaacttcagcccagttcttccttcaccctagctctggtgtccctggatattagaaacaaatgccctagccttcccaggtttcataatgatgggaccctggccacttttatgatctggggaaaccactggaaattactggaaagccaagggagatggggtgaatgtg

SEQ ID NO: 175546 - DNA, 379 bp, Homo sapiens
caagaaaggagtaggcaccaatgaaaatgaggtcttttattcttcagagttctgttaccttagtctttagtatctgcagcaaagttatttattcacattcttcctatttttatatctagctagctagctagctatccatctgaagggcgttgtgtttaaagtgaaaggagaagccagttgcaatagtttacacttataatccctgtgttttgagagactgtctctaataaaaataaaaaataaagtggaaaagtcatgtattaatgagcctgatttctgcaactgattatgcaaatacaatattttaaatatccgcctgtcattacttgggtaagttatctgattcttggaaaagaaatgaaatctctcaactgggaga

SEQ ID NO: 175547 - DNA, 224 bp, Homo sapiens
tcaatcgagccctcactggttggtgcacataaacactaatatcaaatgatggttttgtcatgtgatccaccccccagcacatacaaatatagaacatgaccataaaaagtaacgaaccatgccctctgctaagtaatttatgacagcagatccagactggaatgccagctggaattaccttctccttgccttcaattttcacatatacagctttgtacagatga

SEQ ID NO: 175548 - DNA, 183 bp, Homo sapiens
caagcatactttaatttttaattcatcagttaagctgtctttgagttaccatgatattgggcatacctcattattttttacaccaaatgcattttaaaaaggaaaaaggacactgttttatcttctttcttgctgctttaatgaggatggagggataagttacaggctggcacattaaatgta

SEQ ID NO: 175549 - DNA, 863 bp, Homo sapiens
ggatgttggtgacccacagacctcagaaggccaagcctttcttctgacttccctgtggcctcacaggaacctcagaagcaacaggttccaaacctgacttctgtggcacccagtagagaagagaggccctgctgctctcgtccccagaggggagtgagaggaagaggcccctcagagtcaggtaaggagggaccaggcgacgtacatgcaaaccacttgtccactagtgcggctgccaagcccccagggtctggaggaccctgcaacaggcaagtccaaagctccctggcctccctcaggtccacactgagtgctcaggaagaaagtgccaaaagctgggagtgggggcagggagctgacggacactccctcgagaacgcccctctcacagatatgctgggattttgttcccaaagtctggaggcccagcaggggagctgggacagtgggcgggaggcaagcccccaaaggctgaggaagaggctgcaagacaccccgggcgcaaggcgaggggctggaatggagagcaaaggaagcctccagtggccaaaaaggacggcagtccggctgaagaacggagaaatcatgcagcccccaaagccagtggcttggctgcgacacacaggctgatgtccagaatcactgtgctcaaagctcagaccccaccgaagccatgccctgatgccaccctcagggcgtctgaaggcctaactacagctgcagagaagtccagagctagctcaactaccgggaaggacaactctgttcccactctggcaacctcacagtggaaggcacgtgcccctctgtggaactaaacgttgtttgcttcagcctcgattgttcttttatatgaactgtct

SEQ ID NO: 175550 - DNA, 641 bp, Homo sapiens
tggtagaaaaattatttgtatataactttaaaaggagtagaagggctttttgcagagttattacgtttgaagtatactttatttcttgaaaaaattacagattttttgtaaataatgatgtaattcaactctcaaaatatttcctactgtttctttattccagttgtattcacatgtgaaagcatgtgatcagttattgctgcattaaaaacatgagtcttttttattaggtggccattatttatgatcttttctatgaaagagtaaggacattaaaatgtaagatgcatgatgaaaaattaagtgaagaggctctttatggttaatttatattgaataatgcattaggtaggtgttcagagtaatattttgcgttgtgagaacatttttaattttatttaaaattaaatgaaaataaattagtatattattgtactaattgtacttttgtataataaaatccagtgtatttttaaaatgttaggttatgtgtggttaatattttaatccaatatttttaacatgttaaatactattgtgcattcaatgaagtgttattatgccacgaactttaacctgttccactttacttaaaggtatagatgaaagataataacaataaggggccaggcgtagtggtt

SEQ ID NO: 175551 - DNA, 483 bp, Homo sapiens
aacagaggtcttgctttgttgcccaggctggtctcgaacttctgggctcaagcaatcctcctacctcagtctcccaaagtgctgggattataggcatgagccaccatacccatccacttctgtctacttctgataatctcacgaaagagaaggtaattaggcaattatcacgttttagcctttaaaatattttaaatttactttcctctccatttctattgccctaatccaatttaatcagacttagaacttgtctgcatctaaaatgcaaaaatcttcactaattgcccttctgtgatgtatcatatcgaacagaccaaatcacttggcacttgattatatacgtgctaaattcttctcacttgatcttaagtttcctgtaggcagaaaccatgacatatttcaatgcacaccttctgttagttccagctagcatgcagcctatgaatgacactgtaatagtaccattctaacacatggtta

SEQ ID NO: 175552 - DNA, 388 bp, Homo sapiens
tcttacccttgcacatattggcagagtctctatactaaccatggcaatccctatggagtgtttttggtatttgtattgcatggtttttctggccatgccttgtagttggacactttgtgggtggtttccagattttcaccatcatagatgctgtcactcagtgttatctgttctcaggtgagggtggggatcttttcttccttgcgttgggtgagcttctgagtgagcttctgtcatctttagatgaagtctcagaacaagtgggaatgtggatgtggcctatcaaaagagatcacgtgaagctgggcgctgtggcttatgcctataatcccagccctttgagaccaggggttcaaagccagcctgggcagcatagcaagatcctata

SEQ ID NO: 175553 - DNA, 491 bp, Homo sapiens
aggcgtaacaagcaagcttatgtaatacttgaggactaatgtgttcttgtttcaaaagcatgatgatagcaattaaaagcgaaaaaaagaagacagtgtcaagttaacccaaagtatctaatgaataacaaaatgtaatctcagcaattccccactgtaaaaaaaaaatactaagcataagatgacagcttagcaaataaacctttagtttttaccacagaaaactgtgcaatgtctgctccaagtaggtttcatggtatcagtggaaaccaagattgatccaagactggtgaaattactataaatgggtttggagagaaaacagatcacttccaaataagtcatgtatacagagccttctgtaatatgggatggcaactaaggcacacagaccaaatctagcccattgtctggttttgtaccatccatgagctaagaatggtttctgttttaaaaaatttttttttatcaaaaaaatacttcattagagg

SEQ ID NO: 175554 - DNA, 552 bp, Homo sapiens
tgacacccttgtcatttctcaagtccccaggactctagagtggccacagtcttctctccacctttcagcatcttcctatgcttctttgttatatgaagtccagggattttgagtcctaagagggtagagagaaatggggctgctccaccttggtaagacagtaaatctctggcccattcccatttcttcatctttcttttctatcttgcagtttctacttttcctttcctgactcccactggtctggttggattactattcatttcatttttgcttctgtgaatttgaaagttctagtgcttactttcctcttcctggcagtagtgatcagtcccatattttactactatttcttacagactactttctccacaaagaccctcttatccttcaatcttccaattaagacaagacctgtagaataatttccctgtccccatcttccatttggcaaatatttgagcacctactatgtaccaggtgaagaaaagataacacaagaagcaaaataacattcctacctatgaagcttatagtctactggggaacaga

SEQ ID NO: 175555 - DNA, 218 bp, Homo sapiens
accgaggtacgaaccaccagctcatctgcaccaccactcatctgctaaccagtgcctggccttcagctgggctgccttccaactagattctcttagggctcccagagtggggggttttagccctcaccttatgggcagagaagcagggacttgcccagggcacactgccagtgaaggtgcagctgggattcagatccacgtctgactcccaaagtggg

SEQ ID NO: 175556 - DNA, 583 bp, Homo sapiens
gaaatatgcagtcatcaaatgttatgtgacagttcaaaattgcttgcttcctaggttttcactggaaattagggttactaagtcttaaaattctaataacataattaaaactactgtaaatgataagaaaaacaattctgcatagaaagtatacaaggaaagtaagttgttataaggtatgaggttttttttgtagagggaaaataactttgtctagtttagaggttatcaaaaggttgtttcaaaatgaaagaaggaaagatgggggaaaactgaatggacatgaagttgggaagaaagagagcaagagggatcctatagggtcaaactgactaaaatggaatacatttattataacggtttttaaaatgagtcttaatatcaaaagtacactgatgcaaaactagaatttagtcttctcttctaacaacaagggtgttttgtagtcttaataagagatagtgaaattttttttccaccttttgagtgatctgccttaaaaaaaagaggattctgtgttttatcaaaataatttcctgtgcttcatgttttcattattaggtctttgattacttaagaaaac

SEQ ID NO: 175557 - DNA, 1197 bp, Homo sapiens
cgcctgccttagcctcccaaagtgcggagattgcagcctctgcccggccgccaccccgtctgggaagtgaggagcgtctctgcctggccgtccatcgtctgggatgtgaggagcccctctgcccggctgcccagtctgggaagtgaggagcgcctcttcccggccgccatcccatctaggaagtgaggagcgtctctgcccggccgcccatcgtctgagatgtggggagcgtctctgccccgctgccccgtctgggatgtgaggagcacctctgcccggccgccaccccatctgggaggtgaggagcgtctctgcccggctgccccgtctgagaatctacaggtgtaaccagcagctccgaagagacagtaaccatcaagaacaggccataatgaagatggcggttttgtcaaaagaaaagggggaagtgtgaggaaaagaaaaagagatcagattgttactgtgtctatctaggaaaaggaagacaaaagaaactccattttgatctgtactaagaaaaattgttctgctttgagatgctgttaatctgtaactcttgtcccaaccctgtgctcgcaaaaacatgtgctgtattgactcaaggtttaagggagggctgtgcaggatgtgctttgttaaaaatgtgtttgcaggcagtatattggtgaaagtcatcgccattctccattctctgttaaccagggacacaatgcactgtggaagtctgcagggacccctgcccaagaaagcctgggtattgtccaggtttcccccgactgagacagcctgagatatggcctcatgggaagggaaagaacttacagccccccagccctacacccgtaaagggtctgtgctaaggaggattagtgaaagaggaaggcctctatgcggttgagataagagcgtggcatctgtctcctgcacgtccctgggattggatgtctcagcataaaaccgaccatatattctattctgagacaggagaaaaccaccttatggctggaggtgagacatcatggcggcaatactgctctgttactctttactgcactgagttgtttatgtaagcttaaacataaatctagcgattgtgcacatccaggcacagcaccttttcttaaacttatttatgacagagtctttgctcacatgttcctctgctgaccctctccccaccttcaccctatagccccg

SEQ ID NO: 175558 - DNA, 358 bp, Homo sapiens
ttctgataatctggcctttaggaagtccatgggggtttataggctgagggcagtgcgtgggaatgttggtgtccccagtttgagcctaccccagacatttttttctttttccaacttttgccaaatgcataagtgaaaactgatatctcattattttaatcttgctatttttgaaactcaatctattttcatatgtttcttggccactcgcacctcctccttgacaatattgatattttaagttgtttacaaaactgaaaccaccatcaattaaaaaaaatgtagatagacaactgagaaaatattaagggcaaataatgttcattgttgagaacttcattatatcaaatgctgtgac

SEQ ID NO: 175559 - DNA, 850 bp, Homo sapiens
gggaaaaatcctctttgctatttctgtaagaagaataactgagatcagctattatataggtttgcatggatggtgtccacaatacaaatgtaaacttggacaggaataggataaataaattgctttcatcataaaggccaatcatccatttcttagtccaaggagattaaatataaataggacacccctgagatttccagtaaggtatttgaaaggattccactgggagggcagggaatatattttttctcagagcatccagtttgtacccagttttctatatggtttgtgaactgtagcttttaaaaaaaaattttgtagttttcttctaaccttattcattaagtagttccttgttttggcccttctactcttggccttagctaaaagcagtaaatgtgagtgaattttatgttgattatgtcacctggatctcctttccttcccttctttttctcattgaatggtggtaccttaatttgggtaacagctagcttctggcaccttcataaaatacctcagaatagcttagcattgttgcaaaactggttttaaactaaaaaccaaataaaaaaaaaaaaaaaaaaaaaaaattttgcgggcccgcgaccaaaaagttttaaaccctccgtgtggggcgccggacccgatgtaaggaacatgaccaagacggccgcgaggaaaccgcgcgacaaaagggcgtgctttcccaaaaaagcgggggccgcggttcgcaacaccgaaggcttcggcgctcggtccacggcagcactactcccgccgcctcgcgcacacgcacacaccaaacgacaaccaggagccacaacagagcacaccacaggagcacacc

SEQ ID NO: 175560 - DNA, 168 bp, Homo sapiens
cattcttctcccagaccttagctgggctgtgtcctcacttcctttagatggttgctcggttgctcaagagtcctctgactgcatagtacggagaggagggctcctgtgctgagtgtcttttttttgcctctctgcattcacttttcaccttcctccaccctgctttgt

SEQ ID NO: 175561 - DNA, 1751 bp, Homo sapiens
tgcagaagtcagcccgttctcccctctctgagagtgttactgtgcttaataagtctcttgctgctttgctacatgtgtgtgtgtcacttccaattctttgttagacaccaagaacctgggacttcacaacaccagccggtaacaaagatctctgtaagacacaaaagttggatgacagtcgttttgattcttggactttactagagactccaaagacgcatctgaggagaaaagctctgggtccctgggatgactgtgccactcgacatagcctcctggagtggccaaagagagtgtggataagaaaagaaatattggagtgaactttcactcactcccacttctgtaggtttcttaaaatatatgggtttagaagcaagatacttggcgttttcaaatgactcaaaagagatgtagatgaagagaagttcggtcatcccacagatcttccggagtaacctggacacatccctaaatctctagctcctgggtcttcgaaagcctgtttgcctcagggttgggaggaaagggtttggaaagtaccaaggcaagggttggcaaaaagattacctcatcagtgaggaaatgaaatttccagaagttttcgccagatctgggaccagagacaaatgctggatgaatttcctatgcaaacctcttttagaaccaccgcttcaaaggccgtccagagacttcaaattagatctggtgaaactgctcccggtaggggattggtagttcagcggtagaggtttttgtctcccacgccggcgactccggtacgactcccggccatgcaggacttcttactcttccggcaggaagggctactacgtttctacccaacaaagttattatattatacaggctgtactgcatttatggaccttggtcgtggcagctagaagctaacctgaggggcgtgccacctctggagcattctctgtgctcgaactaataatcccggaatttacgttcctgtgctcgaagcctgtccttgaaagtggggagtgtttccggtgggttgctgcagttttaaatactgggaattaaaacctttgctactttcatctagtctcccggcaaacccctgggtaacccaaagcccatcagagggattcgcgtgctgggctttccgctacgttaggccacgtctcactatggagcgaggatcaagaaggtccgggaaggagagaagctgcggggtccagggagactcttcggcggttggtcggagaggtttcagcggcccaaggaaaagggaagcgtgtgggaatctatccgcgtagagatgaggggcgcggcggagacagtcccacgcagaggtatgcccaaacaccgagttacttaacctcctcaaccaccttggcatccgcgccttccgtgggcccgtcggtcttccgggagagattctgtgtccctggtattgtgtgtcaacaggtgttagcctgatagttatatttttaatgagagaaaacgaactacagaatttgcgagttttgctttttttctggttttgctttatacctcttggattctccttccaaaggattccaatctgaggggcattgaggtgtgactatggtagacaaggggtggtgaattttcatccaaaaatctttggcggattcccttgctctcccgctccccagtctaagagcagtttaaaacagaagatcagaaacatttggagagtgtttttttctctgcgttctaatgataaacttgatttattcaattccaaaagtttc

SEQ ID NO: 175562 - DNA, 221 bp, Homo sapiens
ccggtcagaggagatagcaggatattttagctgtgcaacatttttaatttgattggaaatagtgtgattgtttaagattgatgttttaccaaggctttggcatcaatccatgcaccaactagataatgaagtgtaagcattaattgcatgggaaaattgctgaattttctctttctttctaacaccccaccgcataccttgaccccaaccttagatagaaa

SEQ ID NO: 175563 - DNA, 873 bp, Homo sapiens
atctgaaggggtaggaggctaagagattttatggcttggaagctgctgagatgtggtgtaaagaacactggacttagagtccagacacctgagtttaagctggactctaccactgggtagttgaatgactttgagtgagttatataagctctagcatctaagttttctcatctggaaaatggagttaataacatctactgcattgggctgttgtaaagattaaattaacaaagaatgtgaaagcacctgaacaaaagcttgtgagtaaataattagtaatttgtggaatgaacatcaagggaagtcttcaatttgggtgttttcagtgagtttctgttgggtcagagtgaatggatattaaattctgggattttggtgtgtgtgtgtgtgtgtgtgtgtgtgtgtggcgatcaacattggttcttcactgtgaccttaggaaagaaatgcaatagggtttttattgggaaggtgggtagcagggagatgcatgaaccatattaaggggggacctccaaattgaaccttgttttgagtcaactgcaaaccacaaccaaggaggtcctgggagacctggggtgacttggggtgattgggtatgcagcacattcctgttcttgtgtcctgatgcctggcaagtagggacctgcagaaaatactgattctcctccaggcagttcacatgactagcttttaggagtgagtataccgttgcccacccctaaaattcttgatcatgtctccagatgtctactgaccactgatgctgaggtcatgaatcttgggcattctagaggctttgggaaaaaaaattctacttacttcttttgcccagacactctggggtctacctcttggtaaattattcaaatg

SEQ ID NO: 175564 - DNA, 828 bp, Homo sapiens
  misc_feature (680)..(681): n is a, c, g, or t
  misc_feature (683)..(684): n is a, c, g, or t
  misc_feature (711)..(711): n is a, c, g, or t
  misc_feature (714)..(714): n is a, c, g, or t
  misc_feature (717)..(717): n is a, c, g, or t
  misc_feature (732)..(732): n is a, c, g, or t
  misc_feature (734)..(734): n is a, c, g, or t
  misc_feature (736)..(736): n is a, c, g, or t
ggtccatccatcacttgcagaaaacaaaagagagcaagagagaagacagtgggtgaagtcctggttccagactcccctttttgccgggatatgatggatctgtcagctggtgcctagagtcctagagagctagagatggagggaaattcagatcatctaaacccttcagcccttcactggacagaagaggaaactgaggctccatctgcatgacgttcccagagtcacggcacaaattcatggaagaagcagcaggaaactcagttctccagtctgggtccaatgtgtgttttagaaatatctccacagggttaatgactcaatttttcatgcatgattgctagtaatgacaatcatgttatgtttgtttctgtagctttggaaatcactccttccacttgagtttcaggtcccaactgtccacacctgcaggagtgaggttttgctgagactgataaggcactcacattttgtgggagttgaattgtctctgtagcctagaatctagatttttttccctcctctgctctcagtgaacggagaattccatctcggtacaatctgtgaaccattctgcagtaagattgtcatcgtctcattcatactacctggtcggtaacacagaggctgtaattgatgtggttcagagactcacatccagcataaaatgaattctagcnnannaaaaaaaaaaaaaaaaaaatttggggngcnccnccgaaattttaaccntntngggcggccaagagagaatgccaggccagaaacggccgaagggggttcacaaaaccgggacggtgacaccaggggcgcggtcacgcgaagcgg

SEQ ID NO: 175565 - DNA, 877 bp, Homo sapiens
ggtccatccatcacttgcagaaaacaaaagagagcaagagagaagacagtgggtgaagtcctggttccagactcccctttttgccgggatatgatggatctgtcagctggtgcctagagtcctagagagctagagatggagggaaattcagatcatctaaacccttcagcccttcactggacagaagaggaaactgaggctccatctgcatgacgttcccagagtcacggcacaaattcatggaagaagcagcaggaaactcagttctccagtctgggtccaatgtgtgttttagaaatatctccacagggttaatgactcaatttttcatgcatgattgctagtaatgacaatcatgttatgtttgtttctgtagctttggaaatcactccttccacttgagtttcaggtcccaactgtccacacctgcaggagtgaggttttgctgagactgataaggcactcacattttgtgggagttgaattgtctctgtagcctagaatctagatttttttccctcctctgctctcagtgaacggagaattccatctcggtacaatctgtgaaccattctgcagtaagattgtcatcgtctcattcatactacctggtcggtaacacagaggctgtaattgatgtggttcagagactcacatccagcataaaatgatccttatggtggtctgcagcacgcaaaaaaaaaaaagggggcgtctagagtaccctcgggccagctacggtcccggttctgtcaagggccctatgggccgtatagcaggccggcggggttaaacgtcggctggaactgtgtggacttggagaccctcgggggcttgccactcggtaagctgataatggtgggcgttggggtggtta

SEQ ID NO: 175566 - DNA, 348 bp, Homo sapiens
cattagtggcattttacagttaatgaaatatggtataattttacattgctcacaaggagtattggctgtgttagcctgctagtttacattatgtgatctggcagacaaatcagtttttaaaaacattcagaaacagactcagcattcaggtgatttggacaactgattgatgttattccaaaagaaacctctctctaaggtgattcgtgtgaaactagcaacttctttttgtaaaaggtctgccactggataggctgtgtttgcagttgccacaaattctgaatcaaaggcaagtaatcattaggtggaaatcaaagtaacctttctctacccctgtgatttgagggg

SEQ ID NO: 175567 - DNA, 140 bp, Homo sapiens
caggatctcaagccccaccccagatttacaaaatcagaacctacattttaacaagatccgcagataattcatacgcacagtcaagcttaaggagcatcttgcttgtaagcccaacgtggacctcttcagcttcagtactg

SEQ ID NO: 175568 - DNA, 520 bp, Homo sapiens
acctttcaagtgcagactgccaagtgtcatgaattagaaatgaaagaggaaggagggaaggtactaaattatagaatactttgcttcagtagttaaccatagagtaaattgattcaactgtaagaatttcgtttgttgtggaaaccatgttttttttaaattaattcatattagtaacctcctttgggtaagtgctctttatagagccttaaactagacacgcagatcttaagttttaaaggttttcaatccttgtgtataaaagcttcaaaattatgagggggaaattgtgaatgtttttaaccttatggccagcatgttgatgtaattaataccccttttcatttttataaacgggttccccagaattccaacctcttagcttagaaagattaggtattcaatatttgagttttaagaaaactctgggaaaaaaaatgatataatgatcaggtatgcatatcagtctacaagaaatttggactttattttggcttaaaatggttactacttagcacca

SEQ ID NO: 175569 - DNA, 349 bp, Homo sapiens
gactgtgatgtctgagagaagagcaaacaaggggagtcctagcgctgcaccacattgctgccttactggtacatttgttggatgtagctaaagcagaaaaatctacaacatgaaatgtttatattagaaaaaaggttttaaatcaataatctgagcttctcctttaagaaactagaaaaagtagagcaaactaaatccaaagcaagcagaataaaagaaaataatacagataaaagtaaagcaaaaaaaatcaatagaaataaaaaaccccagaaaaacagctctatataattgtggaggtagttacacaacttgcatatctttgccaaaactcatcaaattatatgtt

SEQ ID NO: 175570 - DNA, 682 bp, Homo sapiens
caggtgggctttgtttgtcctacatagtatttttttgagcctaaatgtgaaaatcaggtgatctgacatacaaatccagatttccagcttctcttgagccttccaggtctgtagtcccacaaggcagtgaccactgggctagacggggcttctgcattgtccaatctgccctgccatgagacccctgacatgttcttagcacacctcgggatggttttcttccttgctgacacatgtttcttggaaccttcttctctatcaaacgtgggaaaaccaaaggcagccagagagggtgacagagtttctctttcgcctggcctgctccactgtttgcgttactgggtggtggctgcaggcatctgagtttgtggctcctgctttacagagaggactgtggccccaggacagaggggtccttgcagcagataagaagacggccagcctggctctgtgaggactgtcagcccagaagccagatgggtggcctcgcttgtgaggacacgctcgtctaacagcagtgcagagaggtagatatgccggtcagggcaggacggctgaatgcagcacccattgttgcctggctggagctgcccagccacaactcaagagaggccttgacagcaggccaatggctgcccagcaccagcctttaagcacagtcctccctgtgcccacgcagtcc

SEQ ID NO: 175571 - DNA, 449 bp, Homo sapiens
aactgggattacaggtgcccgccatcacacccagctaattttttgtatttttagtagagacgaggttttaccatgttggccacgctagtctcgaactcctgacctcaggtgatccacccgccttggcctcccaaagtgctgggattacaagcatgagccaccgtgcccagcccacttcataaattttagtcatgctctaatcttttacagtgagtctgtgtgatttctttttcttttttttgagacaaagtcttgctctgtcacccaggctggagtgcagtggcacgatctcggctcactgcaacctctgcctcctggattcaaacgattcttatgcctcagcctcaccaaagtgcatggagtttatagagcatacagccaccagtctggcaacagtaggcattcttgatggacataaggagttcgtatccacattaaccataaatcac

SEQ ID NO: 175572 - DNA, 255 bp, Homo sapiens
ttagaaagataatacaccacaatcagatacaatacattatatcaggaatgtaaggatagttcaacacacacaaatcaataaacatgatatatcacaagaacagaatgaagaataaaaaccatataaccatctcaaaagacattgtaaaagcatttgaaaaacttcaacatctcaacaaatgcacaaaaggaacatacctcaaaataataaaagccatatatgacaaacccaaagtcaacatcatactgaacacag

SEQ ID NO: 175573 - DNA, 499 bp, Homo sapiens
tgcataatccccagaacttgtgaatatcactcccacaggtaggttatggcacagctgtcgtttagaaatggagattgacctgggtggaccttacctcattaagcagtcccttaaaagggaccagactgttcctgaagaaggatatttgacatgtgagagggacacagggagatttttcattgctgactttgaagacagaggtgacctcgtggcttggaaccgtcagtgactttttggagctgagtgcagcctctgacagcgagtaaggagagaaggccctcagtcctacagctgcaaggaattgagtctgcccacatctggaatgagcttggaagagggtatttccccagagccttgagaggacaacctccttagcttggcccacactttgatttcagccgtgtgataacccaggcagaaagtccagctacaccatgcccaaagttgtgacctatgaaactgactgctaataaatggatgttgtttcaagccactaaat

SEQ ID NO: 175574 - DNA, 270 bp, Homo sapiens
cttatacagggaataaaggtagtagtaacctaatctgtaaatgtgactttgtactacattttattattttttcagcacgtctttaaaataacttttctaatgaaaattagtatgtctactatttagtaggcaagcaatgtgaagggaaattgatccacaatgacagttctactcattctgttctcactcatgagctgaatgtgcaaattgttccttgccaccatcccatattccccacacccaccacttgcagcattacaccgccaaaca

SEQ ID NO: 175575 - DNA, 158 bp, Homo sapiens
gtggtgggagaagttgctgcatgtttgcgtgataataggaataatctcctggaaagggtaaaacttgctgatgtagaaagggaagagaattgctgcagcaacgtctgtgtcagtaagagagggtaggccacaatgtgcagtgcggggagtggctttag

SEQ ID NO: 175576 - DNA, 276 bp, Homo sapiens
aggtggtaacctttaaactaaatttagcaggaagaatagcagtatttcaggggatgggaatccaaaggcatgaaagcacaaaaacaatacagcatgttcaaagaatagtgaggattttatctgagtccatccaatgatgcctagggggtaccggtagcaaatgatctgtagaaggtaaatggggaaccccggataagaaaccacatattaaggagtttgaaattttgctgtaggtaatgggagccctgtgaaattttttattgatgtgttttacaa

SEQ ID NO: 175577 - DNA, 233 bp, Homo sapiens
actgaaggctcttttcctgcccatgctgcacatcctccatggctctcctgtgccctgtgccccacatgccctcatcctgccacgagaataaaggagcagcctccatatgggagctgtcagctgctctaagagatgaaggagagagtggcccgtctcaatggctcccaactcttttgcctcgaggtgacacgctctccttcatctcttagagcagctgaggagggcagaagggg

SEQ ID NO: 175578 - DNA, 675 bp, Homo sapiens
ctctgtctcaaaaaaaaaaaagacaaaatagaaaaaccacataaatattcactttattgccaacaggaaaaccatcacttcctgccttattgtttaaaaacacaaattcacccatattcaatcacatgataaactggaggggctgcagtttgcatgtgactgagtgacttgccagtgtgattatgttgcagatgtcagcagacacatgtcaagggttagtcaccagacgttgccaagaaatacgaaaagagaatctgcatgcgatccaggcactaacacagcagtacgcttttattttgctggaagagcctgtggcacagcccatgcattgacatttgatcttgtttcagctaaactaaatgtgtctgttaagattttttttttttaatttgaggtagatttaggtatgaggggaaaagttttcagcccttttcctggcatagaccttacaaaagaactactttctttagctgtgtttgttgaggccgttggtgagggtttgaaatctttttagttggcttgctgctaactggaaattgaggacggttgggggatgcctgactccacgttttaactaagctctctctgaaaagggatctccccagcaaaatctgtagtgcaatcaattaccaagggagcggctgaaagtgcttaatatgcttaagctggcttcag

SEQ ID NO: 175579 - DNA, 214 bp, Homo sapiens
aatgggacaagcaaagaggagggaggtaggaaacttctggctttggggaacagtcagtgattcggtgtagaggaggagggcagggagtgggagatgcgcctgttaccagagggaggggctgagcactgtgaaccacacacatgaaggccagcaagcacgggaaagccacaggaggttctgaggaagagaagtgtggtcagacttgcatgttagg

SEQ ID NO: 175580 - DNA, 185 bp, Homo sapiens
caccccctgtgctaccacacccccaccaggacccagtgcacctccatctctgtgtaatggccttgcccctccaccctccagctgcagcgactccccaccccctccctggccctcaaggcctcagcacagaaaagcctttcttaatacttgttgattgatttgcaaatataacctcacaggcccca

SEQ ID NO: 175581 - DNA, 381 bp, Homo sapiens
gacataggagtttgcttgtgctaacctgtgcactgggatgccgtgggtgctggagcatccttctactgcaggaaggatggccttgggcctgcacactgttggacttcttgggcccaacagaaccagctcctgtggcagactgccctggccacgcagtcacttggtgccccaatgtcccaaggtccagttttcatttgttttgtttttggaacaatgtccattccctgctggggaaggcacagccttgatctgggaccataagattatgcactatgactctctcacgaggcttctgctagaaacaccacctggccctgtctctaccacagctatttctagcaccagggggtgtgctcgattttctgaaccaagcagaaggtt

SEQ ID NO: 175582 - DNA, 521 bp, Homo sapiens
ggaggaaggggggagcgcggggcaggaggagtacctcggccaagaaaattatgcatgcgttagggaagctctgagagaatggctgtggaagctctccactgtggtttgaatccacggggtattgatcaccctgcccatgctgaaggtattaaactgcaaattgaaggtgaaggtgtggaatctcaatccattaaaaataaaaatttccagaaggtgcctgaccagaaaggaactcccaagcgactgcaggcagaagctgagacggctaagggcgagccctgctgagacttactgacaaaaagctcgagcgaatggggattgcccaggagaacctccggcagcacatcttacaacaggtgctccagctgaaggtgcgagaagaagtcagaaatctacagttactcacacaaggatattcaggaatatggagatatccctgactcttccaaaagaatgaccaagatcatgcctaattacctccatgtcctgggaaagccccgctgtaatggagatggcatctt

SEQ ID NO: 175583 - DNA, 571 bp, Homo sapiens
gaagaaacattgtccgaatcagtatcagatctacagtgagtcattcaaacagcatgacataactgggcgagccctgctgagacttactgacaaaaagctcgagcgaatggggattgcccaggagaacctccggcagcacatcttacaacaggtgctccagctgaaggtgcgagaagaagtcagaaatctacagttactcacacaagcatcatctgagggttctccataaacacggttagccttccaagctgctgtcctgccagttgatatgaacatggcctgttcctcacagaaagactaacccatggcactgccagaagatatccttggatcgtggacagattaactggattaactgaaaaaagcacccattcagtcaatattatgggttttggaaaaatcttgctttgctgtggatttaaaatgaggtgcataatataatgccaactcattccaagtggtcattggcagaccattagctggaaaattgcttccagttttcatcactgtgcataactcaagttccctttggggagctgtctgtgcccttcactagaagtcctgttttagc

SEQ ID NO: 175584 - DNA, 512 bp, Homo sapiens
ttatttattcaggataaatttccagatgtaaaattgctagatcaaagcctttgcaagatagtgccaaatttaccttcccaatatcagtgtataagaagtgtccactccttcccctgtcaacaacattgggctggttcttttttttgttctcattcttataaaattattcatatcccagtagctttggctggttcaactaattaatggaatttagtgttcttctcttaaaatcttttaaaagttttccactttgttctagagttaaatagtgcttcttttttcatgttggatgagaaatagagaaaagggatgatttgtgaagaaagcatttatccacataattataaaacacttctagcatgaattgaaatgtttgacagaccagacaagcagatgcttttactacagtgtttcagttttgtgactggcactaacatgtatattacagaagctaacatttgaattctgctaagctgtggtttgggtcatgagaaatgtttgcatctaagttg

SEQ ID NO: 175585 - DNA, 505 bp, Homo sapiens
gccctgctgggattctgggaagaagtctgctacttccctatcctcagagagcttgctgtctcactaaggagatgaggcctacccacaagaaactctctaagacaaacaccaggcagtatatgaaaccagggctcatatagatgatgtggaaatgctcagaaaacagcaccagtgtagagtggtctcatcttggagtaagccctacagacttactttataaataaggaaatcatcagcatacagggaaatgttacccagcctttctttcctgtgtgacatacccaacagacaggaacacattaacacacaaccactaacccaatttaagttcgagaagactgcatgtccgtgtcactccatgttgctaggttttgtctttagggctatgtggccagatggggcagtttcaggctccaccaagaccagcctacagagcatgccccagaccagttatagagcctgacagtgcccagcagccagtatcactggatgcagaatctgcgag

SEQ ID NO: 175586 - DNA, 456 bp, Homo sapiens
  misc_feature (427)..(427): n is a, c, g, or t
cagcaggatattggctctatgtggtgtgtatttcactgaatgcctactatggtcaagtttttctggctctaagttcccttggaaagggctctctactttagctgaataactcagcacctaaatctgtcaaccacacccttcagtaggtaactttgttagaaatatggtctattaaggtaagagccaggatttctgtggttgcaaaagtggatgcgggctctgaacaaaacctctagtgagctgagatactttatcagatgacatatttgaccaccaaacttctgttggagcagggctgatttgccaaacagacagcaaccttgcagacttagttgatggctagaattaagactcaaggtcacttcagggcctgtcactgattgtgggagggcttggtaaaaattgaacctcattaacaccactaaangtgtgaagggatcctctgaacgcgcagca

SEQ ID NO: 175587 - DNA, 510 bp, Homo sapiens
cagcaggatattggctctatgtggtgtgtatttcactgaatgcctactatggtcaagtttttctggctctaagttcccttggaaagggctctctactttagctgaataactcagcacctaaatctgtcaaccacacccttcagtaggtaactttgttagaaatatggtctattaaggtaagagccaggatttctgtggttgcaaaagtggatgcgggctctgaacaaaacctctagtgagctgagatactttatcagatgacatatttgaccaccaaacttctgttggagcagggctgatttgccaaacagacagcaaccttgcagacttagttgatggctagaattaagactcaaggtcacttcagggcctgtcactgattgtgggagggcttggtaaaaattgaacctcattaacaccactgaagaagctgatagacaagaaatgggattaagactcaatactcatcaaaataaggctttccttatccacagcctacctgagcagtgc

SEQ ID NO: 175588 - DNA, 550 bp, Homo sapiens
tcagcaattgataatagggctgccaaggtgttgatatttcagacttatgtcatctttgaggagaagatctagagcatgtaattgtacatgggtcatggggaaggggtggcaagagagttagaattgcgaataatgtggtcaggagccttcaagagtctttgagtcagcaacattatgaaagatgtggttcaggacattctagtaaattttggagtctcctgagaagaaacttagaattctagactcctgaagcagggagagactttcagagagaacctagtccagcacagcatgtttacccaggacaggaaacctctatgctccatgccaacacacaggcatccaggtctgcaaagtgtcttttaaaaggggacatattatgcaacccattctgtttctgaaaagttctgtgcttggaactgaggctcagctgaaatcactgtcgctacttctatccttgggtcctcattttaccttctggacctatttgtatctacttgaaatctaacacctctcctacctaacagtcctgagggtgctcattttaaga

SEQ ID NO: 175589 - DNA, 307 bp, Homo sapiens
aagtgtttgcttttttatattaaatcttatatgttggaaattattgctctccaaacttattttaccctgacttttcccaatctgctttagttacttgtagataattcagctgaagcatctcatggaacctggaacaattaaaagctaagcaaagaatcttgtaaccctaaattatctatttttttctgtcattctagtttccagttacatgattctttccttttggttttccatcaaatctaacccatcatttggttctgccagttgtctttgaatttctcagttcgatttttttccatttctgtag

SEQ ID NO: 175590 - DNA, 416 bp, Homo sapiens
cgttttatacacccaaacacacagacaattaggataatgctgcagatgaagttttgttatgttgctgttttcttttactatattgtgaacatttttagtgaggaacatttagcatgcatgattgataaactatactaagagctgtgcataatatcctgacttaaaccttgaaagtaaattgccactttttgaagttctgatagatatctagagtggcagatacaaatattttttggctcagctggagcaattgtttttagcacctgagaggaacttgtagcttattacttcgcttccaaaatacagtaaaaagtggtagttattttgcctgttatcaaaaccactgctgatttgtctagtgtaactttatcaaggctgactggttgtatcataaaaggtgtaggcatattaatata

SEQ ID NO: 175591 - DNA, 451 bp, Homo sapiens
aagaagcatggtaccagcctctgcttctggcgagggcttcaggggacttctactcatgatggaaggtgaaggagagcaggcatcacagggagagagcaaaagagcaagagagaggggagctgccagactgtttttagcagcgatatcccccgctggaaccaggagtgagaactcaattctgcaggaatggcactaagccattcatgagggatccgcccccatggtccaaatacctcccactaggtcccatctcgaacaccagggatcaaatttcaacaggagattgaaggaacaagtatccaaactatatcacttattaatttcaattttgttttctttttgtattttgaaggcaacgagttttttgggcctcagccatttttgtaggcccttgaacaattcacaggccttaggactataccctatcatgactaatgggtgaagtagcctt

SEQ ID NO: 175592 - DNA, 619 bp, Homo sapiens
taaccgggcctgcgggcgatcgttaccactttggccccgagaaccttcccatacttgctgaaaaggttcttgagatccgtagcgcgtgtgtggaggacagcccgctgacccacaggttccgaccagaaccgctgccgacccgacctggcacgagagggagattcttaggcatcaccccaaggcctaacaggaagcacaaccattcttaagaccgcggccctctttaaaaaccctaacgacgcccaatcccaactgctgacttaagaatttaacacacacacacacacacacacacacattatatgtatatatacacacacatgcatacatatatattttaatagactatctaaatactgaatggtagggatcatttgagttgaatgtggtatattcaggttggtagactatcaagcatccattcaaaattgtatagattttgtggcacccatgcagggctcctgacagaagcagggatgtaccagtgaggcatgtctatcatggacactacggggaggggccaggaaggaaggaaaaaagcttcgttgattggggtggcaggatcacaaattatttcttttacattttggttgctaatgaccttgttataaaactattt

SEQ ID NO: 175593 - DNA, 839 bp, Homo sapiens
cagacctgaagcgagtatattccccagaagtcataaaaattgaaagatacacggccaggcgcagtggctcatgcctgtaatcctagcactttgggaggccgaggtgggtggatcacttgaggtcaagagttcgagaccagcctggccaacatggtaaaccccgtccctcataaaagtacaaaaaaattagccaggcatggtggcgggcgcctgtaatcccagctactgaggaggctgaggcaggagaattgctcgaacccaggcggcggaggttgcagtgagccaagattgcaccacttcactccagtgtgggtgacagggtgagtctcctcaaaaaaaaaaatacaaacttttagccagaagttcaactttaggccttaggtttgggacttagccacccactaaaaacaactataaaaattggtcaaaagatacaaacttagtatttccaggcattgaacagcaggctttccaggactgtcatccttgagaaaatggagatacatgaggtgagccccacgtttctcccacctttctgctcagctttctgcgacagagcacgttcccgttgcagcacaagtggagctgcagtatcagaacctaaggaggcagagagtggaattctgggttgctggcatgactggaatatttgctagagaggaggaactgctccaagaagttctagaagtctctggacattcaaactaggtcctgagaactgtatattttaaatgcttgcattggaactgttttaaaccaatgatctcaagtctttgtcttaagttagaaaaagaagggcaaattaaacgccaagttaatagaaggaataaaatagcaca

SEQ ID NO: 175594 - DNA, 328 bp, Homo sapiens
gtgaggatttattgtaccatgcaaaaacttaggatctttacaggttttattatttgtatttaacactagttccatttcagctggtcagataagaagaaatgtgatagcaaaagatatgcaagatgttaatctgctcttaaaaaaaagaaaccaatatttgacctgaattgatacaagtgttttcttttttttgagccgagacagggtcttgctctgttgcatctagagtgcagtggtgcaatcatagctcactgcagtctcaaactgctgactcaagtgatccttctgcctcagactcccaaagagcttggattacagacatgagcca

SEQ ID NO: 175595 - DNA, 414 bp, Homo sapiens
caagaagtatgtaattttacaaaatatttttacaagtgttatgcaaatataaggcatacacaggaattaaaagagcagcaatgtatgagagggcgtaggagagtagtgtattaagtaggaaggcaaggaagaatgatgttaaaaaaaaaaagctgtgaacattgcagaggtagagaatagcccccgctgcctttctccattgttactattagttactgctcagcactcacttctcaggccaagggatcttggcccaaaattaaaacagtttatccgagatttttcattcccatgttaataagggattgaaaagtttaattaaatagcctctttgttcatctcttctacatagaataagaagtgaacatacataaaggatcaaaagcaaatttatttatgttgcttgtaatttaa

SEQ ID NO: 175596 - DNA, 516 bp, Homo sapiens
agaactaggacagtcaatgagctttaatgccagtttcctcatctttataaaacttgaggtaattagacctctcctgcccaccttagaaagctattcataaggaacggctaaacaaatggctgacccggccacaaagagaccacacgatgttctgtgcagttatgtataccacatatgagaggaaaatgcagccaaggaagattctgagtgactctgataaggcagtctgagagtcaaaacacaaagattcttaactcataccaaaaacttaggccaatttacacagtcttgaatcaaaagtccatgaaggcagccatttctttgccagctaatcaacactaggacctattaacctttccgatttgccagattaaaaatgctgtcttcttgccttcctcttctttccacccctctgatcaattattttaatttgaattgccaatcattaatgacaatgaacatacttccatttgtattttcttactgaaattgtacatctctattgcccattagcca

SEQ ID NO: 175597 - DNA, 524 bp, Homo sapiens
caggaccttgcagttagatataataaaacctggaaactcagtagaagtacgttatttaaaaaacaaaagcaaaaaaatgttaaaagcagttttactggggtagtaggtatatgtacaatttttttttttagtttgttatatacttgctacctctcaaaacacatctttttaagaaaacattgaagtaataaaaaaatcctttagaaatcttataaagtatttttggggacagagatgactattaacagggagtgttttattacattctaaaaagattcatcacaaggttccacacaaaagtcaaatacctggttctaatctataacatatgtttccagtttaaactggcctttaaaagcagtgtcttgcttttgagaaaaaagtagaaattcaccatacacatacacagatgttgatagctaagagggaaaatgcttaaaatttaagtttatatactcttagcagtgcctctgtgttaaatattttatctatttccttaagtatagttcactctaacagttcca

SEQ ID NO: 175598 - DNA, 362 bp, Homo sapiens
gtttctcatggttcagcatccaaatcatggaagtgcgggtctgtgtagagtgagacagcctaagcccacctctgccctggcccccacactctaggtgagcagtcatgcatgcatgcattcatttattcactcaacaaatattcagtgagcacccatgtggcagcctctcttctagaaactggagatacagggttaaaaaaaggacactgttccttcttaccctgtttgcatcttagtatggatgacagtaagcaaacaaaccaacaaacatacatactagtgataaatgccttgagaaaggaagcaggttaagagatggcagtgaggggtgcactattttacacacagtggggtcaggaaga

SEQ ID NO: 175599 - DNA, 478 bp, Homo sapiens
gaaaggcacagcccactgaggaccggacactcccagcctcagtgtcctccggagccaccgtcatctgaaggcgtggggacaggcagtgccctcccacctcaggaagagctgtggggtgagctgcggatggcgtgagcagtgcagggcggccctcgcagcggggtctctgtgccactctctggtgcccctgaggggcatgtgaaacagaggagaacctggtgctgactccgggaagggccctgagaaggtctttgaccagcatcagacctggggctcccaggccaagatagaggcaaagtgaagggacgtggggccccttcttggcaggctctaggacagtgggtgtccccccaaatcccctcgtatccagatgaccaggaggcggctccctcccctgcccccagcccccagcctccagggctgtgccaagtgtggggatctggggtgggcagaggcggcctgagagcctcaggcgctg

SEQ ID NO: 175600 - DNA, 395 bp, Homo sapiens
tctaagcattttacatgtatgaattaattctatgaagaaggtattgttatcactcccattggaggaacagagagagtaaaaattgtttacttaaggttacagagcaagtggcagggctgcgggttcaaaccgaagcagttggccccttgtggtaaactgctcttccagggccccactgttaggcatgactaattaaaacatcatgtggccttgactagcttgtcttccccgacccaatcagatgctgaactttctacacttctcccaagaatacacatttctgtttctgtctttgaacatgatcttctttctgcctggagagctctttctcatcagttgatgagcccaggagttcaacaccagcctgggaaacatggcaagagcccatctctacc

SEQ ID NO: 175601 - DNA, 409 bp, Homo sapiens
agacgtcacctcctcaaaagccttcccagattgcactttcatcttccaggctgggccttgactctcagcactgaaaactcttcattgtaattggctagctacatgactagccccctgccagatggtggcaggcaagctcctagtctgttttgtccctcccccacttcccatcacctcaccccacatgcatgccaggaacatagtgattattaatgcattaattcactagatattgactaagggccttttttaagttctccagcagtgatgaagacaaacgttgtaggctgggcacggtggctcatacctgtcatcccagcactttgggagactgaggcaggaggatcgcttgagcccaggagttcgagactgccctgggcaacaaagtgagacccacccccatctctcc

SEQ ID NO: 175602 - DNA, 539 bp, Homo sapiens
gtgaaatgtaaacttttctatgttcatttttgcctgatgatctatcactgcagacatctcctttagcattcccttaaaacatgactccgctttgccaatacatttccaaagggagttcagggccacatatttgcctgtcatttattttttactcaactaaatttgttcaaaaatttagtaaaatcttcctcctagtaattctgtgtataaaatttagttctgctctgtggagctatccagattaaagctgtcttcatcattttacatctgtggaaacattgcttcctggcatctcttcatctattacttccacttattacaaatatggcctggttttcagaaacattcacactcctttatcctcttctaagcacagtttcacttgccaatacctcaattaacagatgacaactaaatagaaaactcccagaatggctgtgtgaattctatctccagtgaaataaccataactggggaaaattattaaaacaacacttacaactatttaaagtctctgttaattgtcctaagggcacaca

SEQ ID NO: 175603 - DNA, 371 bp, Homo sapiens
cagttacagctgctcttaacggttagatatctttctatacctttttttctacatgtatgaaacgcactgtcactatcaagaacaacagtgctatgcattttgtaagccttcgtgttgtaatcggttataatgtagacagtgagtagatgcccagagtatctgtggtgttgtaatatatttatctatagctgcgtgttttacctttccccaagtttagatatcataatgaagcatttaattcatgcttgttcacttgctcttcatcgcattacacactgggtgatctagaaaagaatgttaattggaaggggcctccttgcagtgaatcctcagcagccaggtagcagaactactccttcttatgtaatagt

SEQ ID NO: 175604 - DNA, 405 bp, Homo sapiens
caaacacagcagtgacctggaattgaggaaggaagagctgggaatccaattagatgagaaatggctgggggatcctggagctggcctgagatggggatgctggagtctccagggccgcaggatccctctcccccagcaccagcttcagagccaggggggccaggggggacagaggtcaagcaggcacgggttcaagcctccctgtctacagacctccccagcctgaacctcggcgtgctgctctgtaacctggggccacagagtactaggttttttttgtaccaacttttgaaaacttttagtacaaaaaaaggtgaaatatctcattgatttttatattgattacatgttaaaaggataaggattttgacatattgggttaaataaaatatatcgttaaaagta

SEQ ID NO: 175605 - DNA, 269 bp, Homo sapiens
gatgattctacttattatgatgagatgcttctaataaaagttacaccagtagaaaatgccaatatttcataaggccaggatgatgacttagatagtactaataatacaacactttaggaaagttcatttcattttatttttaggaaggacactaagtttcaaaaatttaaatttaaatgaaagagggtcttaaaactctattgcaaaaaggactcagctgaataatctgtggcacaggtttaaatcgccttggaccacaccgccatgtt

SEQ ID NO: 175606 - DNA, 730 bp, Homo sapiens
gaatataaatcatttccttgtacagaatcactgccaaactcagtatggttaaaagatttttaacacccagctgcagcattcactctggttagaattggccatttaaatttatttcacatatgtaagtatcatatcctttataatgcattcttaattgttgctcagttcttccagattgaattcctttaaaaaattccttatgtaatcttttaattctagttggaaaacatcacttgacagttgctgtttatacaggcatgcctcgttttattgtgcctggctttattgtactttgcagatactgtgtttttcacaaatggaaggtttgtggcaaccctgcgttaagcaagtctgttggcaccattttctcgacagcatgtgctaactttgtctctgtctcacattttggtaattctctcaatgtttcaaactttttcattatgattacatctgttatgtggagctgtgatcagtgatctttgatgttaacattgtaattgttttggggtgccacaactgtgcccagataagacagtgaacttaattggtaaatgttttatgtgttcagactgttccactgactagcccttcttcaaactctctcactctccttgggcctccctattccctgaaatacaacaatattgatattaagccaattaataaccctacaatgatttccaagtgtttaagtgaaaggaaagacatgtatgtttcaccttaaatcaaa

SEQ ID NO: 175607 - DNA, 626 bp, Homo sapiens
gcaggagaattgcttgaacctgggaggcggaggttgcagtgagccaagattgcgccattgcactccagcctgggcaacaagagcgaaactccatctcaaaacaaaacaaaacaaaacaaaacaacaacaaaaactacaatgggctaaaacacatcaactatgtttaaatccttgatttcaaaataatacccaaataaatttaagtcatcacccttggaggaagctagtaaatgattcattatattgaaagcttatagataaagggaaagaatcaaatgtttttcttgcctttcctacacatgctataccacttgctaaccaaatagtagatatgaagtttctctttaaagaagtagtccagctaataaagacagaatgatagaattagaatatcattattttgcaaatccaatgaattaatgaatgcagggattgattactcaagggtgctaacttcacaaaaaaaagacaatcagacattatgtgcgtttgaagaaagaatatatgacctaagatgctcaagccatacatgtaccacttttaggaaacacagagaacaccaccttgaggatgtaaattggcaaaattcacgccgtcagaaatatgttgcaaacaacctgattcgt

SEQ ID NO: 175608 - DNA, 713 bp, Homo sapiens
aaagtggagctgagttaatctcaagcttccctacatcctgggacacagaactcttctttgaaggaaggaaagaatgctgtctcgcaggatcgttctctacagaatagctcacgggcagggtgttcctggaatcaggggaaacctcaggctggctgattcttaagggccctttcagctttaaaacccactggtgccacctgagatgctgacagcagtgggactgggatcagtgtgttcctttctagagctgtagggttatagaatcttcacagaatttctattaaaattggcttcaaatgatatgtcctttgatttttaggtgatccacggaagtgttcttgaagttgaaagaagcagttgattttacagagtttaaaataaatctataatcagatgttgaggctttatcctgacataatttttctcccgactataaagataatgaaacttctaacaaaaaaaaattagctctaatatgagcaaaagatgaaaagataatgaaacttctaacaaaaaaaattagctctaatatgagcaaaagatgaaaacgcaagctgcccgtaatgccagtgcccacagggtgcccgtgatagtgtgttacctgcgtcccttgagactctttcccgagtctccctttccagaaatgatgccattctgtgcatgttgttacatcagtggccttttttcacctttttagtaaacgcacattttca

SEQ ID NO: 175609 - DNA, 568 bp, Homo sapiens
ctgatgtcccctgtcttttgtacaaagatacagcagtttgaacggtggctccagaaccatttcctcacccccagaactgtgaatgtgaccttatttggaaaagggcctttgaagctataattaagtgaaggattttgagttcatcatgaattacctgggtgggtctaaatatagtaacatgtatccttagacaaaagagatgacacaaaggaggccatataaagagggaagaagaagttggaatgatacagtctgatacagtcacaagccaaggaatgccaccagtggctggaagagataaggaagtatcctcccctagaggcttcagagaatgtatggtcttgccaacactttgattttggacttctggcctccagaactaagagagaatacatttctgttgttttaagccaccaagtttgtggttatttgttaaaacagccacaggaaactaatatacttgtgctgtggtttgattatgtccctcaaaagttcacatgttggaaacttagatcccactgtggtggtgttgatgaggcctttgcagggagcaaacgggtcatgagga

SEQ ID NO: 175610 - DNA, 106 bp, Homo sapiens
cagagatttaggagacctgatgctatgtctggccctgcgattaattgtgtgacttagtgcttgttcccttacctgcgaaaaaagggggccgtagtagattaccctg

SEQ ID NO: 175611 - DNA, 315 bp, Homo sapiens
tagaggatctcggaaggatcctggtggttatagcaaagtatacactagaataatttgagtgtttgagatggatacaggtatctctttttttaaattagtaggtacaaacaaagaacttgaaaaccacatccttttagattctttgttgtttctaggagtgtatttcaaggtggttagtaatttgtgtttcctgggctccctttaatagtgttagcaaatttgctttgtgattaccttgacttataatctccccacacactgagttgcctcttaggatcagaaaattattttctaagccctgaccatcaccaccag

SEQ ID NO: 175612 - DNA, 465 bp, Homo sapiens
accccctcccatcccaatccccagcagtgctgcgtcacttccagagaagcccagaggcgcggagttcggggcaacctcggacccggggtgggatctcagggtgggattcgaagctgggacctgccagggacctccagctccccaaaatgcgatctcaagccgtgagctgctcaggctttcaggcggagcaaagcactggcaccctgggagccggcagcgggtggccagggcgaggccaagccacatacctctgactcacccggtgtgcgccggccgggaagggggcctggttcagccgccgccgccggcgacgagaaccaattctgggaaggagcaagatggggcagaaggtgcgcgcgggggagcaactgagcaaataacacggcggtcgcggcgcgcggcaccttgggctggcgcgtggctgggaggccgcatgggcgacgcgcaccaggctgcccctctcct

SEQ ID NO: 175613 - DNA, 481 bp, Homo sapiens
ataggagttcattttgtgaagctgtcacgagttttccagtagaccatgagcttgctgatggcaggagcctgcctgtccttgatccttgtttctgtggggtctatcccagtgcctggcacagtggctttggagatggaaggaatagagggagagcagatcctcaaacacagcctgcatctctccctgctcccctcccaccctccagttttccagccagaggcatttgctctaaggcccaggctgtggcccacctatcaccgctacccaagtagtacaggaaaaggaaatttgaagaggaaaagaggcaccagggatgaggacacaccgagaaaagaccatgtgaagacatggcgagaagacagccagctgcaagccaaggagtgaggcctcagaagaaaccaaccctgccgacaccttgaccttggacttctagtctctagaattatgcgaaaataaattcctgttgtttaagccacccact

SEQ ID NO: 175614 - DNA, 401 bp, Homo sapiens
cataaataaatagtcctgataaagaatactaaaaattagagatccggccgccacttctaattccagtctcctcttccaagtttccagaaatgtctttggtttacagcttttcagaccttttcctgtgcatatgtatacatgtgtttgtgtgtatatatgtgtactttgtagaaaattttaaaatctcacctgagtattactttgtttctaattgttttgttggcattctccttctttctgatgactcttaacttcctatgctgcctagagagagttaaaagaagaaaatgttttgaaataatttcctttatcagatctcagtcacctgaacattaatttcaaaccaaaagagagttacagaaagagataattaaatgtttgccagtgacttgtaattgcct

SEQ ID NO: 175615 - DNA, 151 bp, Homo sapiens
ccattgaaaggtagagagttcactgtgctgactttccttctgggtatcggccttgtggttgaataactgcacctctcaggcacctttttgagtgctgtgttaatccagggtctgttcctaacaccctggtgttttgaagaaagagccgggg

SEQ ID NO: 175616 - DNA, 478 bp, Homo sapiens
aaacataatttactgagcacttcctaaaccaagtatttttaacttattatatagagtaaaaaatgaacaccatgctgctaacccaagactgacctaggtttgagggcagatctagaagagaagagaaaacaactgcttgttgggatttcaagaataaatatactaagaactataagaaaacttatttaaaaacatcaccacacacctgcagctcagaaacatattaagaaacagaaagcactgtctgtcctgattctggagtgcagactgcctagatggcactccttccaagcctgagaaccaaaagaccagagacgagtcctaaagcctgaaatggcatctcactgaggtctctactgagactgtgggacccggatggtcacagaaccccaagatctaaacgaagagtcaggaaaggagaaataaaggtaacgaggcccaactcttcctccagcacggtggggcgagcccgcggccg

SEQ ID NO: 175617 - DNA, 241 bp, Homo sapiens
ggctatggagctgctcaagcttgtgtttgcacttatcagaattcaaggcagttagaaagagtttccaagtgctgatgtgctggagaagaaagggcatgctgcagtgtagaaaccacgggagaaacaattgcgtcacctagtttcaaactgtgagaaaactactagcgaactagaagaatatttaacttcctaaacctgagagatctacatcttaaagaatatagattctactctaggcaca

SEQ ID NO: 175618 - DNA, 442 bp, Homo sapiens
ggttgtttttctgtgatgccaaagagaaataaggtcaatttgcaatctgtaaagttggacttgggccttatcaaacacagagctgggaggcagattagccagagaagcacctactctctgcccccactgagaagtctctgcccagactgagcgtctggcgtcagcagagccagcctgcccctgcagtgaagctgccagtgctctgggacagcctgactcaggtgctgctctatgcctgggtccggcgggtcacacagggcagcccctcaccctggcctgcagatgcctagctcagcttcagaggtggaggacccgggccgggttccctggccatggctccctttgcactgagaaattggccttcctgggcaaggtctgcacgccctcactgtttggctggggccggcgcagggcctcagttctcactagaggtgagggcact

SEQ ID NO: 175619 - DNA, 783 bp, Homo sapiens
tgggccagattcttccctgcatgtgtgattcatatttggaaatttctgatttatctccccccaattgtgccatgtggcctgcacttaaaatgtaagtaattctgattttattctcaagaacttatttgaagattcaagccaagcaatgctgaaaaaagctaggcctgcaaaactaaaacatagcacgagcctctcaaaatttccaccaaatatacaaaatccagtctgctctgaatgtgcatcagaaactcaactttggttattagccctggaatttggtgccaaaaacaaaaatttggttttgttgtcaagcaatttctaaaggaagaaacaatgtaaatattaatctgtcattttaaatgttgttgaaactgccatgagtgtgcacacagctctctgtttcatacctgtaatcagtattcgcatgctttcagtccactgtttctacttaaagcattattccgtatttcagcacagaatgactttggtgaaactgtagctgttagtgagtaattgcgttacaggcagacccagtcttaaattaacaaatctgggttcccttaactatcaggtttatgttggttttatttgcttctatctggatcccttctctttgcctgggaccttattctgattagctagatttttaagagcttttaaagttacattccccagaaagactttttttctctggactttctcttttatggtctgtaaacatttctcctctgatggtcatgacttagttctaagactggccttcctctagtgtgatggtatgag

SEQ ID NO: 175620 - DNA, 385 bp, Homo sapiens
  misc_feature (44)..(44): n is a, c, g, or t
agggcaagcttgatgcctccccccgaccctagaggaaacccggngcttatggatgccacctcatacatgtgcaggatatctctctcagtcttccaattcttaggagatcagaggcaagagctggtggcctttcaccgcctggctacagtgtactactccctgcacatgtatgagatggctgaggactgctacctgaagaccctgtccctctgtccaccatggctgcagagtcccaaggaggccctgtactatgccaaggtgtattatcgcctgggcagactcaccttctgccagctgaagggcagttgcaggctggcccagggcagacccaactgagggcaatggtccttagagctatggccaccctgacgtggatgcctggtga

SEQ ID NO: 175621 - DNA, 233 bp, Homo sapiens
agctgcagattagcctcgaaggctatgagaaggctttggaatttgccaccctggccgccaggctcagcacagtcacaggtgggtggtcttcactattgggtgtgttgaatgagaggggtgattagtcaaggatagacagcaaagcaataacaccgcaggccctggagtcagactgtgtgggttcaaatcccaggtccaactgtcagagagaccttagttaagcaagttgctta

SEQ ID NO: 175622 - DNA, 1234 bp, Homo sapiens
agctgcagattagcctcgaaggctatgagaaggctttggaatttgccaccctggccgccaggctcagcacagtcacaggagatcagaggcaagagctggtggcctttcaccgcctggctacagtgtactactccctgcacatgtatgagatggctgaggactgctacctgaagaccctgtccctctgtccaccatggctgcagagtcccaaggaggccctgtactatgccaaggtgtattatcgcctgggcagactcaccttctgccagctgaaggatgcccatgatgccactgagtacttccttctggccctggcagcagcggtcctgctgggtgatgaggagcttcaggacaccattaggagcaggctggacaacatctgccagagccccctgtggcacagcaggccctccgggtgctcctcagagagggcgcggtggctgagtggtggtggcctggccctctgaggaaagctgtcctgtctctggacatttggcatggccagactctgaccccactgccctaggctcttaaatactcattgggagggtccgagtccttacctggcctagccccctcatttcacaagaagaagaatgaagtccaggaggagaagggctcattgcaggccacagaaagatttgatggtgcagcgatgagaattcctggttccaggctttgcatctggagcctttaccggttgactgttgccttccacacaaacagcctctgaaaagcactttctccatacataattctggagaagatgagggatcttgccctccaggagccttccttcctcccccaatgaggaaatcagtcactgcactggtgcaaaggcaagcagattggaatttgtgctcttcaccgattttctcagggaaagaccccttccccttgccagcagaggaacctgtagttttttccatttctttcttcagaaccaaagtatgtatcactcctcatgctcacagggattgacaggagagaattcaccaggatcttagctcaaaagacacagcctcagaatggccagatggattgcacgaaacctgacttggattcaccatcttcctcctgccataaggctgtgctcccacataacctcccagaagctccagggaagctttccaagagcaaaggcttggaaattgaatgttaagaaaattatgacataaattacatgtaaatagtgtatatgattaaatattgtccagttacatttacacacaaa

SEQ ID NO: 175623 - DNA, 1400 bp, Homo sapiens
tgcaaatattccaaagacatgattgtaagcctttgttccctgtaaaagattgctctgtattaaaacaaatccaccaaacaacaagtcatagacccgttagaaaccagcattctaaagcatggtttaagtgtgaacaggtgtttgtagcttatctgagactgacagtaggtaaaggggccaaggagagactgctacatggtggtacccaagataattctctgaagagagagacttttgtgtgaggaagacatttattatacagagtgatttattgcaattcttagctactccatcaagctagacttgtcaccatgtcccattaaaagggtttaagaagaattctttctcagaatcctgcattacagtagcatctgcaataaggagaaaattttcttctgggaatcactccaggaaaccttgacccatcctctacttagtcactcttatagagccctgcattttcttttgtagcatttatgacatgtgtaatgttacatttgtttgtgggattatttaaggaatgtctgtcatgtgagacaataagctttatgagtacaggcacctcttctgtcttatttcctatgccccagcacagtccctgacatctagtagaccttcaaaaagttttacggaatgaatgagtgaacaaatgatgcaaagtgttggttgcaggatatctctctcagtcttccaattcttaggagatcagaggcaagagctggtggcctttcaccgcctggctacagtgtactactccctgcacatgtatgagatggctgaggactgctacctgaagaccctgtccctctgtccaccatggctgcagagtcccaaggaggccctgtactatgccaaggtgtattatcgcctgggcagactcaccttctgccagctgaaggatgcccatgatgccactgagtacttccttctggccctggcagcagcggtcctgctgggtgatgaggagcttcaggacaccattaggagcaggctggacaacatctgccagagccccctgtggcacagcaggccctccgggtgctcctcagagagggcgcggtggctgagtggtggtggcctggccctctgaggaaagctgtcctgtctctggacatttggcatggccagactctgaccccactgccctaggctcttaaatactcattgggagggtccgagtccttacctggcctagccccctcatttcacaagaagaagaatgaagtccaggaggagaagggctcattgcaggccacagaaagatttgatggtgcagcgatgagaattcctggttccaggctttgcatctggagcctttaccggttgactgttgccttcggggcacgttaatctcttagaaaacggtctccataaataaatgctgggtcagatgcagtggt

SEQ ID NO: 175624 - DNA, 1857 bp, Homo sapiens
tgcaaatattccaaagacatgattgtaagcctttgttccctgtaaaagattgctctgtattaaaacaaatccaccaaacaacaagtcatagacccgttagaaaccagcattctaaagcatggtttaagtgtgaacaggtgtttgtagcttatctgagactgacagtaggtaaaggggccaaggagagactgctacatggtggtacccaagataattctctgaagagagagacttttgtgtgaggaagacatttattatacagagtgatttattgcaattcttagctactccatcaagctagacttgtcaccatgtcccattaaaagggtttaagaagaattctttctcagaatcctgcattacagtagcatctgcaataaggagaaaattttcttctgggaatcactccaggaaaccttgacccatcctctacttagtcactcttatagagccctgcattttcttttgtagcatttatgacatgtgtaatgttacatttgtttgtgggattatttaaggaatgtctgtcatgtgagacaataagctttatgagtacaggcacctcttctgtcttatttcctatgccccagcacagtccctgacatctagtagaccttcaaaaagttttacggaatgaatgagtgaacaaatgatgcaaagtgttggttgcaggatatctctctcagtcttccaattcttaggagatcagaggcaagagctggtggcctttcaccgcctggctacagtgtactactccctgcacatgtatgagatggctgaggactgctacctgaagaccctgtccctctgtccaccatggctgcagagtcccaaggaggccctgtactatgccaaggtgtattatcgcctgggcagactcaccttctgccagctgaaggatgcccatgatgccactgagtacttccttctggccctggcagcagcggtcctgctgggtgatgaggagcttcaggacaccattaggagcaggctggacaacatctgccagagccccctgtggcacagcaggccctccgggtgctcctcagagagggcgcggtggctgagtggtggtggcctggccctctgaggaaagctgtcctgtctctggacatttggcatggccagactctgaccccactgccctaggctcttaaatactcattgggagggtccgagtccttacctggcctagccccctcatttcacaagaagaagaatgaagtccaggaggagaagggctcattgcaggccacagaaagatttgatggtgcagcgatgagaattcctggttccaggctttgcatctggagcctttaccggttgactgttgccttccacacaaacagcctctgaaaagcactttctccatacataattctggagaagatgagggatcttgccctccaggagccttccttcctcccccaatgaggaaatcagtcactgcactggtgcaaaggcaagcagattggaatttgtgctcttcaccgattttctcagggaaagaccccttccccttgccagcagaggaacctgtagttttttccatttctttcttcagaaccaaagtatgtatcactcctcatgctcacagggattgacaggagagaattcaccaggatcttagctcaaaagacacagcctcagaatggccagatggattgcacgaaacctgacttggattcaccatcttcctcctgccataaggctgtgctcccacataacctcccagaagctccagggaagctttccaagagcaaaggcttggaaattgaatgttaagaaaattatgacataaattacatgtaaatagtgtatatgattaaatattgtccagttacatttacacacaaa

SEQ ID NO: 175625 - DNA, 197 bp, Homo sapiens
gcgttcatcaattcaacagacatccactgagcgccccctatgggtcaagtcggcagctgggtgctctggaaacaaaaatcagtgcgatccagtccctgccctaaaagagctcaacctcgtttagaagagacaggtcctggataattaaaaccactgtgacctgctccctaaaaaaaagcaaggcaggcacagtggga

SEQ ID NO: 175626 - DNA, 433 bp, Homo sapiens
aaggtgatattcacttaaacttctgggcattctatttaatagagaggctgtcatctccgttgtagctccctgccgcctatttttgtctggtacttacattttactgattaaagaactacatttgatttctgatttaaataatttgctgtaatctcatattcactggacacactcctttccatttcctttattattatggggttatttactaatgagacttctatacttctattttacagggtctcagtagggacatgcttagtctgctattttgagccaggagtcactcctttatgtctttcgtgctcaatgtatcgattttgcttcctcaatcaataaattctgtaacaaccaacattgttttaaataatttatcccaaataatttatgcatttcaatgtactctgggtataaaaaaacaaggccgattatg

SEQ ID NO: 175627 - DNA, 1160 bp, Homo sapiens
caaacagttgggtgacccctagtaaactctaaggttaagcttttccatgaatattttttttttccgagtctagggtatggaaggatataaggtgtcttagttaattttaggatttctcttttatgacatgagacctaatcaatacctttgcatttcaatgaggctttttcttatttttcatagtgtacctgatctctctcctcttgtaggaaggagaaaggcatttggcctctccccttcctttagtctaacaccttcctctgtttttttgcccctccctcttatctttgtttccttatcggcctctccctaaagccctgctttctccttttaaggctaggtgaggtgtctttggcaaggttgcacagggatccaggtaagtaactcagtctcttctcaggattagagaaaactcagtgtgaactgtcccagtggagggccttggagaggcacatggataatgggggaggagaaggaggcggcctggcctgagagatcaggacttgttagaccagtcctgtgtgtgcgtcatgcatgctccacagagaagcaggtttttttctttctgtaccctttcagtcctgggccccctcactagctgagagccacacccttccttggcttcaaagccagcccagcactaagccattttagtatgttatggtttagagggggttctcagaatacttgggaggggaaaagagagaaaaagaagaatgttttatttggtctcagaatttaggaggtcatgatggtggaggtgatttttttttttttaagttgcagtaaaaactttaaatattgacaggtagctttgggtaaggattataagactaaagggagtttaaggtaccctgttgatgtatagaggttgccagctcaaattccttttaacaaggagtattatcttgtttatatctttgttttttaaaaaattcttttctctgacgttccaatcagagagaatgtatcactctttcctaagaggagggtggtctgcccagagccttccttaattcatcagagagattcctggtggacacctagtttttcctcatgaaaataagacttctttggtcagccttttaccctcttttaaaataaaatccttaactaaattaaatttaacagtgtttaattgaacaaagaacagttcacta

SEQ ID NO: 175628 - DNA, 242 bp, Homo sapiens
ttttcttggcatgtttaatttgtatttatcttaaggacttagcttatgtgttcctttctcaagaaagttttccctgaccttccatttgcctaaaggtagattagattccctctgaaattattaatagtaatgatggtaacaacaataatagcagcaacctttgagtgtttatgagttgcagagactgttcttagcacttacacataggaagttttttggttttcatagcaaccctatgagtt

SEQ ID NO: 175629 - DNA, 442 bp, Homo sapiens
tttgcaggctcttggtgtcatgaatgctaggaagtgacaatatcagatgagcgtggcattgtagttatctaagaagaaaatattagagccagatgttattggatccggctgatctcttactcacacatctcaaagtagaaatcttgggacttggatcacccatgttgggggtatgagggagcttgagagtaagaggaggctccagctagtgactaggtgtgcaaacttggaagtcaaacctaggtttgcattttggctctgccatttgcaaactttccttgctaagccttgatttcttcatctcataaataaaggatattgctatttacttcctggatgataacccagcctttagtgtatgcaatatgaaaaattagggcttatttgtcatacagattctggttatttttgtggagcaaataaaggtgcataaatatttctt

SEQ ID NO: 175630 - DNA, 542 bp, Homo sapiens
ggaatgttgccttcatttgaaacattacttatctgagataagtaaactgaagctcaaataagtgcccaggtaagtggtagagtctgacttgaacatagatgggttgtctccctgtcttgattgctttgctctcacacaaactccaaccatttgtataacaagtagccaagcatattgtaggcggtacaataaatactggtcatttgattgaggggaagtatctcaaatgctatgtatattaagtaatggccataatgaatctagagacggaaagccaggtttgataagtgaataattcatcaaattattcatcaaataattccacaaagcccccatcaattcacatcccctcctaggagcagtggatgagagtgtctgtttccacacaccttcaccaacagtctgatgttacaccttttgaattttgcccatccgatagatgaaaaatgggcaaattttcagtctcattcattatataagaattaaattatatattataaattgtatataattttaattatatgaaaattaaaaccacactg

SEQ ID NO: 175631 - DNA, 347 bp, Homo sapiens
aaaagagaaccctctgagatgcccccctctcggggtggagcagagctccccaccccttccgtgggctgcacccagtgacttgcttcccgaaagtgcggtgtggacagggcgtgggggacctgacgcgcagcgcctcagccaggtgaggaaggctcactgcagtgaccggcacggtgctagcatgtgccctgggtgaaagggaaggagaaggccactgagcctcagagggccccctccgtgaacccgaaaccccagtccagccacgagaaaaccgtcaaacaaacccaaagagaagggctttccgcagaatacctgacaagcgcttctcaaaaccgccaagctcatca

SEQ ID NO: 175632 - DNA, 288 bp, Homo sapiens
ccagaccagctgcttcccagcacagccaccttcccagagcctctggcagccctgcccatgaacagctgactcctcccagcacagcattccaagcacacctggacagccccagccaaaccttcccagagcaactgagccccaaccctaccaagacttactttgcccaggagggatgcagttttctctatgagaagttgcccccaagtcctagcagccctggtaatggggactgcacgctcttggccctagcccagctccggggccccctctctgtggatgtccccctgg

SEQ ID NO: 175633 - DNA, 3925 bp, Homo sapiens
  misc_feature (780)..(780): n is a, c, g, or t
  misc_feature (1077)..(1077): n is a, c, g, or t
  misc_feature (1968)..(1968): n is a, c, g, or t
  misc_feature (2337)..(2337): n is a, c, g, or t
  misc_feature (2559)..(2559): n is a, c, g, or t
accctgttttctactgatatatgtatgtgtatggctacctgaatccaggtttcttctaggaatatacagaaagtaattgatttctctgtggatctctaacagtgacaagaattttcacctatgcctgtgagaataccttcaaaagtattgggtgctcatcataaacacacatcagtttaacaaactcttatggatgcattgactttcccagttagttgctagatgacttcggatgatttgcataatgggtctcagtttccatatctgttaaatggcaataatcagagaattttaaaaaatttaaggacacctggaaagcttgaaagatccctagaaagcatgtgtttattccacatagtgggaactatgctagattccaaagacacaaagacaactaagacaacttagaataagaaggaaaagagaatgattcgttgcaatgatccccttgaagctccagttgaaagtcagagtattgccctggattggaagtagtctccaaactgacatcattttctttttcgaaccatatctggcctgtctctcttgccagttgcatattaaaggtaacagatttgaaaatgtttggaataaaagctctagttaggtgtggtggcacacacctgccatcccagctactggagagtctgagactcgatgattgtttcagcccaagagttggaggttgtagtgagctatgatggcaccactgcactccagtctgtgtgacagagcgaagaccttgtctctaaggaaaaaaaaaaaagcactatacaaatnccacattgggaaattttcactgaatcaatggttaaaggtttatacaatggatggagtatttggttagtgaggagagatttttgaggatcgatggcaatacttatttctagaaatagccttgtttttgctgattactgttggtagggatcagtttaatgctttttcccctaatgtacctagagatttgtggtagaattagctatgcaaattgaatccttaaaaaaaaaaccctccacaaacctgtatgttatatttataaactttacattgtactaaagtcagcaaatgtcacagaantaaaatcagtaaatgcaaaagtgaaggtttctatagcaacagtaactcacccatattgcacataaaatgaaatgtacattaggatttacatttaatcgcctattagtggagaaaagtcctatgtataacaggtgcaatatgaatacattagggtgaccctagcaactctttatcttttaaactccaggctctagctgccgtaactcttttatatctaccaagttttgactcctttagggaaagtgaggtaggaaaattagaggcagcgttagagcagaggtgtgtacccctagatttaaatgcagtggaatattaccattgcataaattatcaatcaactcagtaggtgtttcagagaaagaaatagacccagaatagtaaatgtttatgaaattgttgcacgtagggtacttaagaagaatttctgtctagcatagtcggtttatccaaaccttgagcgcttctgaaacatgctaatgcaagatgattttgtgactttgagttggttgcggaatggcccaataggagggtggcaggattggagccagggacatgggacatggccccagcccatcactctgcacatatggcctcccttgttgaatttcagtttcttcctataatgcattcctacttcctataatgcattcctacttcctataatgcctgctatccagggttctaagaatcaaataggagtggaaggagaaggatagagggtattttgtggaagctaaagctctctatatggacaatgatgtcgctattgtgaatgtgactttcataaggcaaatatcatccccagcagttataccatgcctttggctggtggtccctggagacggcctatccttggccgtctgcttacataaaggaatgtctcttcgctcngcagcagctcttctggtggagggctctgagtcattgctgagaataaccgtcatgcctcctccagctcagtctacatcagataactctagatagagactcttctattggtcaaaactttcttttataaaattggaagaaatttttctagtgactagacagatgattcactctaaaatgcagttgatttttaaaaataattttaagtaaaattgatcataagttttctttttcttttttcttctccatgagctttaatgttctttagtattccttggcttcactctgaactctttgattcagttggtccggagtaggccacaggatctgctttttatccagtagcatggtaatctttaaaaatttattttncaattgataaattaattttgtatagcttaagacatcaaatgaggttatctgattaccacccagatcagattttgccagccccagaaaccctaccctgatgataacccctttccttgtatagtcttaattgacttttttggtattaattctcttatgtttccccagacactatgtttccccagctgctattgattctcagactggcctgccttgctgtccagngaatacttgttggctgtttttgattccctgattttctggtctatcagatgttctctagcttccttcctgcctagaccctgataacatacatgtctatggctgtagtggtttgttccactggcttgtattttgggatgtcaggtccccttttcttttcaaatataatttttgttttattgaaaaaattgaaagagctttttaaaaacataattggaccaatttttgtcaagtgccactcttgtgcatacataaacaaggctataaatgaaatacattggttaggtattactaagacttacactcagggtctaatggtttagaattgttcttcaactcatggttgtccacgattttccacgtagtataacctttgtgccaccaaggatgttggtgagatggcattcttcaaaataatacttttagaaaacagacatgatgcaggtctctgagcaggctttgcattaggtagagcttgcctaattttgaatttgattttcaggaatgtagcgaatcttgttggatgcgcactctccctgactcttaccctcaactatttgattgagaggagaaagagtgatctatctgtccctccttttcttccaaaccattcgcacccattctgcaaattatgattacagctttgattttaaaaccatttaagaagtagcattcatggtggcaccctgtgttgtctaggatggaattgcattgactcattcattccttaataccttattgagcttttttttattatgtgctcagtgagggaggaccatatataaaccctgccctcaggatgctcacagcctagtggggaaggtagccagctgaacctccagttataactgagggtgccaagagtgagctgttgagagcagcgaggacagaggttttcccagccaggattgcggtactgagacatgcacacacgtgcatacacatgcacagacatgtacactcacaccctaaattgcttgtgctatgtgggaaattttgacccacatattcctatgtttaattgaaggcactgttaacttcttaacaatgctacatctctgatgattttaggaggaattagactgcgtaaacatctcaaaacagggaggtgaagctaggaagcataaatgccccagtgatggctgcaactaggtctcttaacttattgtaatctaaaccttgggtgagggagaaagaaaaaaagagcagctttttaaagtccactgaagacttcagatgtggcaaaaataatcattttttttctggccatgagaaattgtctgagtagagggtggaaaatttcatccttatcaggaagttaatcatagtaatttatgtggaacttccaggtggttacttagtcaatctt

SEQ ID NO: 175634 - DNA, 393 bp, Homo sapiens
aatgatgtgatagtttacactggagagaagtctgcagaacaatttaaccatgttttaagattatgtagttaaccatacaaagaatggagattaatcagtctgcgtatctagagacaacagagaagaggaagtagacttagacagaaagagagatcatacaaaggtttttgggtcaaacataaggggttctctgaaaattacttttatatacctggataggttccagagggagcttatgttatttgaaaatatgaaaaataggacaacatccatatggaactgtttagataggccaatgcctaaaagttggggtcaggctatctgaacaatcacatcatgacaatcacatcatgaacaatcacatcatgaacaatcacatcatgacaatcacat

SEQ ID NO: 175635 - DNA, 471 bp, Homo sapiens
tgggtgggagtgcagatattccttcagtatgactgatttcattttctttgaatatgtgtccagaagtgggattgctggatcatatggtagttctgttttcaattttttgaggaacctctgtactgttttccataatggctatattaatttaccttcctactaatagtgtacaggtgtttccttttctccacatccttaccaatccttgctatcttttgtctttttcttcatagctgttcaaacccctgaatggtagtgtctcactgtggttttaatttgcatttctctaattattagtgatgttgagcattttttccacatccattggccatgtgtatgttttctttggagaaatgtctattcaggtccttagcccatttttttaaaaaaatcaggttgttttcttgccactaagatttttatgtgtttttggcattaacccctaatcagatatatgtttaaaaatatttt

SEQ ID NO: 175636 - DNA, 700 bp, Homo sapiens
agatgatataattgtctacttaaaaaatatctgaaaacttttattataaacaaagcaaaacaaaacccttctggaagtaataagtgattatagcaacgttgaaggctatgaagttaatatatgatagtcaattgcttttttatataccagcaatgaacaagtgaaatttgaagttaaaatttcatgataaggtataaatagaacaaaatttgtattagatttttatgaaaaaaactatcaaattctgatgaaagaaataaaataattattaagtaaatggagagatatttcatgtccacagataggcaaactcaatgacaaaatgttcattttttttcaaattgatccataaattcaatgcaatcccaaccaaaatccaagcaagttatttcatggatattgacacactcattttaaagtttatatcgagaggccaaagatttagaataatcaacacaatatggaagtgaggatggaagtcagagcactacactacctgacttcaagactaactacaggctttagttttagacagtacggcagtggtgaaagattggaataacacatcagtggagcaggatagagagtccagaaatagatccacatgaatatagtcaaagatcaactttgacaaaggagcacaggcaatgcaatggagggaagataaatagtgcaaggacactggacatctacatccaaa

SEQ ID NO: 175637 - DNA, 413 bp, Homo sapiens
agggaggcgttccctggagacagcaagagcatggtcagagaactcattgacaaggtgcggacagtgtttgtggagacgctggacgagctgggctggatggacgaggagtccaagaagaaggcgcaggagaaggccatgagcatccgggagcagatcgggcaccctgactacatcctggaggagatgaacaggcgcctggacgaggagtactccaatctgaacttctcagaggacctgtactttgagaacagtctgcagaacctcaaggtgggcgcccagcggagcctcaggaagcttcgggaaaaggtggacccaaatctctggatcatcggggcggcggtggtcaatgcgttctactccccaaaccgaaaccagattgtattccctgccgggatcctccagccccccttctt

SEQ ID NO: 175638 - DNA, 199 bp, Homo sapiens
atttaaagtccatattaagataaatttgaatccttttatatactgttcttatttatcaattaaagtaaaaaatagtttgatatcaaatttgaaccaaaaaagcagaatactcaaatacaatgaggattccaaattatctgctatatcacatgactaggaaagtaaattataagagaataaatttcctcacttatatctt

SEQ ID NO: 175639 - DNA, 824 bp, Homo sapiens
tttaaaaaattaatacactttattttttagagcagttttaggctcacagaaaaactgaatgttaagtccaagaattcccatacacccactcccagccatccacaccattgacatcccctgtcagtgtggtgcatttgttataatcaatgaaccaacacagacacatctttatcacccaaagtccatagtttattctcttttttcttgagacggtctcactctatcacccaggctggaatgcagtggtgcagtctcagctcactgcaggctccacctctcaggcctagtgagcctgttacttcagcctcctgagtagctgggactacaggcacgtgccaccgcaactggctaatttttgtatttttatagagatgaggtttcaccatgttgcccaagctgatctcaaacttgagagctcaagctatctgcccacctcggcctcgcaaggtgctgggattgcaggggtgagccacagcgcccagcccagagttcatagtttaaattagggttcaccctgtgttgaacattttatgggtttcacaagtgtagaatgtcatatacccactgttacagtatcataaacggtagtttcactgcccaaaaaagcctctgggcttcacctgttcctcccttccccacccctaaccccaggcaaccactgatcttcttactgtccccatagttttgccttttccagaatgtcatctaggtggaatcttacagtatatagtttttttcagattggcttctttcactttgcaatatgcctttgatatggtttggctctgtgtcgtcacccaaatctcatcttgaattgtactccc

SEQ ID NO: 175640 - DNA, 810 bp, Homo sapiens
  misc_feature (566)..(566): n is a, c, g, or t
  misc_feature (659)..(659): n is a, c, g, or t
ggaggataggaagcaggaaagcgggagagctcgagggacaagggggctcggtgtgtttacaccaggcacgggctacgagcgtccatcccggcccctggcttgcgctcccgaagaggagagcaaggctgttctgggatccggccgtcgtgcggcaagaggcttgtctgtccgggttgccggaaccaggagaacccagagggaaaccgagggaaaggagcggcgcgttttactagagagagcgcgagcggaagaggcgagagcaggagcgcgcgagggagcatcgagcgcagcggagacatgaggacctactggctgcacagcgtctgggtgctgggctttttcctgtccctcttctcattgcaaggactgcctgttcgcagcgtggattttaaccgaggcacggacaacatcaccgtgaggcagggggacacagccatcctcaggtgcgttgtagaagacaagaactcaaaggtggcctggttgaaccgttctggcatcattttgctggacatgacaagtggtctctggacccacgggttgagctggagaaacgccattctctggantacagcctccgaatccagaaggtggatgtctatgatgagggttcctacacttgctcagttcagacacagcatgagcccaagacctcccaagtntacttgatcgtacaagtcccacaaagatctccaatatctcctcggatgtcactgtgaattgagggcagcaacgtgactctggtctgcatggccaatggcgtcctgaacctgaatcactggagacacttgacccatggcagcgctcgaggcc

SEQ ID NO: 175641 - DNA, 582 bp, Homo sapiens
tggcatattgcgttggctagagctttcagcactatgttgaataagagtgtgagggtggatattttttgcctcattcctcatcttagagagaagacattcagtcttttactaaagtatgatattactgtaggtgttttgttccttgttaagttgaggatgttctctcttattcctatttttttgagtttttttaaaaatcataaatgggtgttgaattctgtccagtatttttctgtactgattgatatgatcctgtgatttttcttctttagccagttaatatagtggattacagtctttgatgttagaatactgaaccaaccttgcatccctagaataagccccacttgatcatggtgtgtacttcttttattatattgtcgaattctacttgctaatattatgaattattggcttttatattcatgagggttattggtctttagttgtcttttttgtaaagtctttgtctcgttttgtttttcgggtaatagtgtcttcataaaatgagttggaaacagttcttttttattttctagaagagaatgcgtgaattggttttagttctttttaaaatgaatg

SEQ ID NO: 175642 - DNA, 485 bp, Homo sapiens
aataaagggcatccccagaacagccactccctgatgtgagctggtgcagtcacaggggctgccttgccggagctcttcatgggtcaggcatggcccaccagtgcagatgctatggtatgggctcctagggtacctgagactgccctgtaagcagttgtggccagactggatccctgggagaggccagcagaccaaggagtgctcagttggatcagcttcttctgatttgcaagaccatcctgcagaaattaggtccaacagttcccctagggctaaagtctcttatgggagaaagttgaacctatggaaatggccgtcaatggccacactctactacaggtgctcttgcactaaaccctctgggtaccacatgagctgggttgctgccccacctctttgcctgtcttctggttgctgcatctcagagacgtgtaggccagcaatcactcagtgcagtccgaccaggatggaggatctgtgctttt

SEQ ID NO: 175643 - DNA, 575 bp, Homo sapiens
tatatgagtctgcatccagattggaggcctttgtggtgggtggtggactgcaggtggaaccaagcacaggtgtgccctgggcagaggtgggcaagaggaaggaacccaaacagtgctgattccacatggcccttggtcaagaagctgaaggcctagaaaggaggtaacagtgcccagaatccccacctggcacactctttaaatgctttctggaggtgttttagtcagttttgatccatcggtggggacacactgactaccatatatttccaggtttgtttgttttcttaactaacctgtaattatccactgtaactagcagagggttgaaccctgggtaataggcacagaaacatcttgaatcttgacaagcctgcactgtcttatagtaatctgtattactgtcccattttatagttgcagttactaaggttcagagaagttgataggaaatggcatagtgaggagttgaataccaggctcaggtaaaagtgaccccagaaatgtgcagaggagtgtcagggaaagctgaggcctgcttaggggtgtggctgagaaggcaacacccatggagg

SEQ ID NO: 175644 - DNA, 742 bp, Homo sapiens
caaatctttcccaattccagatgatattctacttatgacctcattgctctcatttcctacagactcctgtaaatgaaagtccctgactagaagcccatacctgaactgttaaggaaaatagatgcctcattttacaaacacaaactcattcattcaacaaatggttctagatgcctggctgtgggttagatatggggatacagtggcaaacttgtcaggcaaggaccttgcttttatggagctgacattctagaaggtgagacaaacataaacaggtaaaccaatgaaaaatatcagagaatgagtaatatttgaaaaacgagaaatagggggatgtgatagagagtaacaggtactttacctcctctgctttagagtggctagaaggagtcacatttctgaggaggtaaattttgaactgagatgtcagtggcaggaagaagccagccatgtatagatcttactacaaaaagtaggtcctggctccttttatggggatttttcctacactcactgaggccttttaagacacaagtccaatgaatggtagactgtagatgccttctttatttcctggtgactatttcaaagcagcttaggaagtcttcactgctgtaagtacctttgaaaaatgtgcaaaattgggatccattgtgtatttgaagctgatttcatgtgcttaaatatcttgaaggttgtttactggttagtgctgtgagtagcattgtttccatgaaagaaa

SEQ ID NO: 175645 - DNA, 250 bp, Homo sapiens
gtcctacctcctccactgctatggtttgaaagtttgtcccctccaaaagtcatgttaaaacgtaaatcccattattgagaggtggggccttttagagatgattgggtcataaaggctctggtcataaaaatggattaatagattagagggttcatgaattaataggttatcagaggagaggcactagtggctttataagaagaagaagggggaattgagcaagcacgctcagcctcctcatcatttgatg

SEQ ID NO: 175646 - DNA, 283 bp, Homo sapiens
ttgatacagattaagatttctgaaaaagaccatcctcctaaaccctcatggactctgcagataatatgaggccagaaaatgaataattcccaactcttgctatctcgttactggccagtgtgtctggcttcgctgagtgtgtgccttctgaagcgtaccctataattattcagcaggtatagtccagttcgtcctacttactttagcaagattacctttcttttatttttcctgtgaaaatccttctcttccttctttcctcctttgtctttcctctttgtta

SEQ ID NO: 175647 - DNA, 186 bp, Homo sapiens
ttggaacacacgacatccacagaaacatctttaaacacagaaggtcttctccaagctcatctctggtgataggacaacagtgggcctcaagcttctccagccagtagcaggtgagttgcacccaggcctgtcaatttcatgcacacttgacccagtggctcatgctgccctccaaacctcccttaa

SEQ ID NO: 175648 - DNA, 403 bp, Homo sapiens
agtagctgtgattacaggcatgtgccaccacgcctggctgattttgtatttttagtagagacggggtttctccatgttggtcaggctggtctcgaactccctacctcaggtgatccgtctgcctcggcctcccaaagtgctgggattacaggtgtgagccaccacacccggtcaggaatcccatttttatacccacatgcctttctgtccatgttaccactgtcagagagcctaccttaagcattttcttttctttttttttttttttttgagatgggttgcactctgttgcccaggctggagtgcagtggcatgttcacagcttactgtagtgtcgatctaggctcaagtgatcctcccacctcagcctcctgactagctgggactataggtgcacaccacc

SEQ ID NO: 175649 - DNA, 390 bp, Homo sapiens
taattttcttaatgacaattgagaacttagaagcaacatgaatgtggaattatagattttacaaattttcacccaatactctatacttgttttgccatacctataatttagttagcagattgtttctttctttcttttttttttaattaacaacttgttttaatagaaacttgttttaatagttttaatggaaacaatgatgcgcttatttcataggtttatatagttaagcatgtatgtgtatttatactatatgtgtattgtatgtatgtgcgtatgtgtaataaatgtgtgtatgtaaatttacaatgacaagtacagttggcataagcaggggtttgcagacaaacgtgtttcagcacactgggcaacatatcagtctgtagcatg

SEQ ID NO: 175650 - DNA, 333 bp, Homo sapiens
ctcacttgtgcctacccaaggccatacacattatcttcttaatcttctaacccagactgggccaaaaacacttcccctgtttcaccttagcttcaaaaaataagtggacatgttcacaagaaacgtttctcaaatttaaggggaaagcattagttatcacctgcctccaaagattccaggttcaagaaaatagtttgccaaagattccaggttcaagaaaatagtttgcattttgttgagctcccagttccctcctcccaggctgatgtcctggttccccaagtcgaggggaatgtggtccctacactccagctttcctttccctccctggtt

SEQ ID NO: 175651 - DNA, 528 bp, Homo sapiens
ggcttcaataccatgggatatgaggtatggggtagtggaataaacatgagctttgagaacagaacaaagtaggtataaaacctgtgctgccagtttttagctgcaggacctgaggtggctcactgaagctttctgagcctggagtacttcatctgtaagatggggatgataatacctgttttttaggaagcttgtgaggatgaaatgggatggcgtatttaaagcatgtttgttggttagactctttgatgtcagagccacctgggttaatttgggtttatggtgaagatgctcagggaaggtaacagtcatgagccctagctggaattccttggggctactgtactgtctttgggatgggaggcagtcctggccacccccacatcaggcatcattcattctggtgttctatcataatcatggttcatatactttccatgtcttttctttgactgtggatgaagggtctcttccctgttttattttggaagtccaattagctggacctgctaccctcctgtataggag

SEQ ID NO: 175652 - DNA, 355 bp, Homo sapiens
tgaggctaatacactgagaagggaagatgggagaaaaagcagtatgggaggtcttaaagcctcggtaacttcagaaatgtgctaggatttgtgggcagcagatatttcaaaacattaagtaaagaacactggagttaaaggcatggagcttcagaaagttattagcactgatagccaaccacggtggtgggtgcctgtagtctcagttacttgggaggctggggtgggaggattgctggagcccaggagttcaaggctgcagtgagctatgatcatatcactgcactccagcctgggtgacggagaccccatctttaaaacaaaacaaaacaaagaaaagaagaaaagaaagtta

SEQ ID NO: 175653 - DNA, 337 bp, Homo sapiens
cctttatatgttttaactgagtaatttttgaaaagcaaatttaaggttaaattagggtgaacacggccaggcgcggtggctcacgcctgtaatcccagcactttgggaggctgaagcgggtggatcaggaggtcaggagatccagaccatcctgaccaacacggtgaaacccccgtctgtactaaaaatacaaaaaatcagccaggcgtggtggcaggcgcctgtagtcccagctactcgggaggctgaggcaggagaatggcgtgaacctgggaggcagagcttgcagtgcgccgagatcgcaccactgcactccagcctgggtgagagagcgaga

SEQ ID NO: 175654 - DNA, 796 bp, Homo sapiens
gtgttgcagcttttcaacctgcccccagataacagccacgcccacaacactcacccactgcatattcagagtaacagatgatctgcaggacgactgctgaaactcctgctgccttcactcactccagaaaacctactgaagacctgaggaatggaggactagattgaagaattgggaagtcactgagaaccaaggcagtgcctctgtcattctctgtggagcagcaggccttgtttctgcagtccagatctgtctactacttggctcctctctgcagaatgaagtctgggtgcatgtggcccatcccagcattcccagttatgcaaccagatactcttctgccagccagcctggccccttggagtctctgtgctccagctccaggctgtctgagaagaggagctagttggcccagctctaccttagaatggattcttgtctgggctgggtagtacctcatcagctgtggccaggagcaatactctcaacagcacagacaaaaggggacagatccctattgggtaaaggtgatgtgggctggggtaagtaccctgagaggtgtctgtcacagaaaactgcctgagagaactttgtcaaagttctgggctccactctccaggggttttgttcagtcaataggtataaaatagaaactaagtgtccacttgtttaaaaagctccctggatgagtctgatgcctcttcagatttagaaatcactttactctaatacgtgtaaataaattaatatgtatttgtgtttgcatgaggaaataatggaaagataagcaactaat

SEQ ID NO: 175655 - DNA, 694 bp, Homo sapiens
tccacctctgtggggattgaacccaccatggtgtttaaaaaacgcccctaggagattctgatgcctagcctagccttaagaaccactgtcccagcttggaatgggaagcttctggcatgtccagggcatcccacgtgctgctttgaggcccacaggcctgtctaggcaggtggcattgtttggtgtgggaagtgactgccacactgtcctgcaggacccatcctggcatgtgttgtggctgaaccaggctggtggtcagtgtctcagggcaggtggccccagcccgtggcgggtgtggaaagtatttttggattggcgttacttctgggaataacagcagtacccagggatggggtattgaaagagttggccagtggggcagctttgacctttggggaggcctcagacccacactgtcgtgtgctggagaggtgcagaggagtggctaggcgtcgctctcctcaaactgcactgtgcttggaacgatgaggaggccccttaactcagcctggagggtgggaggctcctggcctgtggcttctgactctgccacgggttatttccctgcagtggtttgataaaggtgagctgactcccagttacgtgaacagaaacaccaaactgctttctggggcgtctgcctttccggactgtgtgctctgccatcccttctctggctgtgtggtgtgttgga

SEQ ID NO: 175656 - DNA, 204 bp, Homo sapiens
tcagggtagaaggaggaggattgcgtgatatatatcagaaagaatgataatgtctgagagatgagagtgaagaatgtggtaatgaaatcttgacacaagcttgaagaaagtaaaagaggaaatcctgtgtgaagatcctgagacatgaatattagcttatttaatattaatgtcatccctccagtttctcatagtactactcct

SEQ ID NO: 175657 - DNA, 153 bp, Homo sapiens
aagcgctcttgagaacagtctgtctttgatatggatttgcatttccacaaaaagtatttgttgaatgaaggaaggttagggtataaagtatgaacagatactacttcaatgaacagcaaactaggataagaaaaggggggctgaagagagtga

SEQ ID NO: 175658 - DNA, 502 bp, Homo sapiens
ccagccagatgctgtgaagtctccataaatctgtcagccgtcccagtgccgcgggcagtcacctgcggcgcccccttcccggcgctagagcggcccgcggagagacgcggagaagcaacgggaatctagcccggcagactgtacccgagggctgccgaagtcagacccaagcactacaggttgtgcggaacgcgaggacccctccctgtatccccaacctggaccgacccccggaagcctgctcctccgggtctacagggatgaaggtcagagtgtcaaattgcagattttggatcctcaataatgggccgctgtatttaacctcttcaacttcttttctccacttataagaaggaacaaaataaaatgttttgtggaagtttatattgaaatgaggtcaggtaaactaatgactgcttggtattttatgacaagttttataaccttggagttgccataactttcaaacgatcatcaataaagttttattgcaaaagggtcg

SEQ ID NO: 175659 - DNA, 405 bp, Homo sapiens
aaactctgaaaatactaaaaactattgaattgtacactttaaataaatgagtggctgtatggtatacgaattgtatctcaataataaagcaccctaagtaaagctctaatttaccccaatatccttctttgatacacacagttaacaatccatctataatggggctgggtgtggtggctcacatctgtaatcccagtactttgggaggccaaggcaggaaaatcacttgaggccaggagtttgagactagcctgggcaacatagcaagaccctgtctctacaaaaaaattaaaaactagccagatgtgacagcgcgtatctatagtcccagctactcaagaggctggggcaggaggattacttgaggccaggagtttgaggctgtagtgagctatgatcatgcca

SEQ ID NO: 175660 - DNA, 343 bp, Homo sapiens
ttggtacattttggaatgagatttatcaaagtaaaggaacgtttacaaacaaataagagagccccacattcctcagatagcaatggttctaaggattggatatacattatgagttccagtactgaactatttagccactgaagactatcttctgtttatataaatccacctaatgccactacatatttttgcattttctaagcttcattcatagccattgcttttgtttttaaaaacttcttcatttctacctttttactcgtaagatatatacctcctccaccacctccaggaattgttttctccaggcctcagggcagtgtctcctcctctacccactcca

SEQ ID NO: 175661 - DNA, 685 bp, Homo sapiens
ggagctttggggagcgcagccagaggaggcccagaggaggggactgagccggtgaaggacaggcagggaggagaagagacagcagggcagagggagcagatcaggggccagggcacactttcccaggctctctttccagaatttgtctgcactggcaaagtctttctcacctaaatcaaagcaagagaatagcaggccttggctttggggatgagatgtgagggacaataggaaactgtgatacctgaggccaaagcctgcctgagcctctgtacctgtgtcatgaaatccctgctccctgggtttggatattgtcagtcttcaccagcctctttcctttatccctttctctccttcccatctctcccacgcagcagctaagaatataaaccatgggggattaaaaatagcaaggctggagagtgttatttctgaagcatttagcaaaagccctccccttctgtgtgcccacagtttagtaaaatccccaagggcaaaggaggagtgtatgttctctctctcttttatataatattaagaaacagggtctcgcttggatgcacaggctggggtgcagtggtgcagtcatagctcacggtggaactcaaactccgggctcaagtgatccttctgccttagactcctgagtaactgggactacagacctgcaccaccacacccagca

SEQ ID NO: 175662 - DNA, 463 bp, Homo sapiens
tgaggtgtttaacttttaaaacacataacatgaccctcatataatgctggtaagattataaaatggtgcagccattaaaaaaaatctgggagttcctcaaaaggttaaatagagagttaccagatgacccagtaattccactcctaggtatatacccaagataatagaaaacatatgtccacacacaaacttatatgtgaatgttcatagcagcaatatttataagtcaaaaagtagaaataaccctagtatctatgagctaatgaatatatcaataaaatgcaatatactcacacaatggaatattattcagctctaaaatgaaagtgctagtatacactacaacatggttaaagcttcaaaatatactgcatggttccatttatataacacgttcaaagaggcaaatctatagagacagaaagtggattagtggctgcctctcctaacaggaggttagaga

SEQ ID NO: 175663 - DNA, 205 bp, Homo sapiens
catccccatcacatgctgcctagatatatccaatatgcaccctcagatcactctgaactttgttcctgtagcacccacaacaatcataaatatatcatctatgtaattacccgcttaaatattaatctctctctaatctatattccccatgagggcaagacaaggattgtatctttcttaaccactggatccctagcatcccagc

SEQ ID NO: 175664 - DNA, 253 bp, Homo sapiens
ggtgcttagtcctaaggagagagagaaagctggggaggagtggagaggcctgggctgtgtttgtctctgcaagcacctgtttatgtctctgaggtgttatctctgagggtttgtgtgtctacctgggtatggccacctatatgtgcagtgacaaagtgtgagtgattttgtatgtctgatggggagacagaggctgtgtttgtatgccctttaaaatctggaatgcttttatttcattttcttgcctgattgc

SEQ ID NO: 175665 - DNA, 1860 bp, Homo sapiens
  misc_feature (3)..(3): n is a, c, g, or t
  misc_feature (5)..(5): n is a, c, g, or t
  misc_feature (1111)..(1111): n is a, c, g, or t
ggncnggagagagcagagcaccatggcggtgttcccttcggccagcacagccatcggcttggctcccaggctgccgcggtggagtccgcacagggtcacacgcttgtggggcctctcaccagagctcccgcaaagatgtcaggtattgtctaagatgccagcgcctgcctagcgtaagcccgttcctctagccactcaatgctctggaaagattgcgctcctgtagcttgaaaacagggaagacgatggaaccagccgacagggccccagactcttcaggcagcagcaggtaggagcttctacctggccattatggggtctttctggggcccaagaggacttgccaccaggcacgagccaggcccccatccccttttccttcagggggcgcacctggcggagatctggaggaggtgttctggtggaggagcaatggggaacaggcaccttgccccccagagggaccacgggctgccgacgggacatcgtccactcatgcctcggctgccccacccctggccggagcaccatgggctgagaccgcctcccttgaagccccaggttcctcaaacccaggtggggctcactgccttccctctgcacagcctccctggaggaaagacgctgactggtggttcccaggttccagcccaggggtgtcaaccccattctcacaaatcgcttggacagaatcgggttacgtgtttttggagaaggtttaaaaaatcttgcagtttcctctacctcctgccccaggcccctcactgccccccaccccaccccatcttgttctgaacaaacttgatatatatgacaattctggcctgcagaagataacgtgaggcccgtgtgtgggctgcacagaggaagcctttgttacagaaaacgattcaccgtagggcccctccacacacaaggccccgtatactcagggaagtttccggttccagcccaggattcctatgtactcggggaacgttccggttccagcccaggattcccactttcacgactctcccgcaagcagatttcgcatgaaagaatgtcagctgtcctcctcccaagcagctgccttcagacaggaacgcagccaatccaaaccctgtcaacngcggtcctgggacaggggacctggctggggcataaatgatgtccatcgtggtggagacagcctgcctgctgcctctgccctgggccccacggaggggcctgtgagccctccaactcgtccacacaacatccgtggggccaggggactgtccccaagcctccatgtccaccgcccttccctgcccaagagagagaccaagaagggaaggccgggcagggctgctccaggtcaaagaagctgaaaccgcgtgacagccatgtgcaatgagaaaaaaccagccacactcactgggaccagtgacgagccttaaatgcaggctgtgaaatggacagcggtgtcctgagagtcggacaccctggctaagttgaaggtcctcattccagaggatatacacgggctttatacggagaaacggtcatactgcctccaacttactctcaaatgactcaggataaaaacaaagcaggctgagtgcagtggttcatgcctataatctcagcactttgggttggccgaggtgggaggattgtttgaactcaggagtttaagaccagcctaggtaacatggcaaaaccctatctctacaaaaaatacaaaaattagcggggcatggtggcacgcacccacagtcccagctgctcaggaggctgaagtgggaacacttgaggccaggaggccgaggctgcagtgagccgtgagtatgccactactctccaacctgggcaacacagcaagaccctctctctctc

SEQ ID NO: 175666 - DNA, 283 bp, Homo sapiens
ataatgtgatttgttaactcaaataaagtgaccttgcattttatcccaatatggcagagttaactcttaaagtattttatgggcaaacattaagagtcgagaaatactaaactagtaaaagaaatggcaatttgggttttatgttggagaaaccacaagaggtcactggagcactttcttttatcattaaaagcaaagtacaagatttatgaactgcttcccgcagctgagcaagaatacttggtataaatggtagctaaacaactaaatttaaagccttatt

SEQ ID NO: 175667 - DNA, 422 bp, Homo sapiens
tctccctcctcatccttcagaaagagcccttgcagtatatctgagaagagcgaacagtcagtcccatcatgggccgtggaggattctcctccagttggccactttgccactcactgcaagtgaggacttaagcgctctttgggggccttaatttctcagtagatccagtgaaaatcataacacataacaatacctgtcctctcttcctctctggggagttgtgcagatcaaatgagataatgtgtgtgaaagcatttcaaaaatgccaaaaccctctgccaggattgctgtgactgcgttattgatctctgtccatacagcagccccagcaggggtctctcttcaatccaccatcagctgtgtgtgtaaatgagtgtcagatcttttcttgaaaacaggtttggattgggggaaagagaaga

SEQ ID NO: 175668 - DNA, 178 bp, Homo sapiens
tatgtatccattctactgttgatgggcatgtgggcgatttccatttagaagctattaagaatatatcttttggtagaatcttagacttttaataaaacttgggcagggaaagggaagccatctggtctcttaaggtttagagtaaattacaggcattcttatccttgatgctttggaa

SEQ ID NO: 175669 - DNA, 499 bp, Homo sapiens
tttcaaggtaactttccaagttgaactcaaacatcataattctttttttcctttttctttttacagagacatgcctcgccatcttgcctaggctagtcttgaactcctgacctcaagtgatccacctgcctcagccccacaaagtgctgggattacaggcatgagccaccgcgcccgacccctggtcctgtttagcttctctaaatcttttctgtatataaaggcccagtccaattcttagcttttgtgtctgtgccttctcctttggcacattatttaggtttcctctgcactggaatgtagaccactcatccgggacctactaccttatactgctgttccactcaccaggtgtaggcatctgacatggaaagcaaacttctttagcctcatgggtcttggccattcctcgtctgccaggcttgtttccatttaataagcctgaaccagggcctcacgggagggtaggtgtgtggcattactaccacatgcctgttgc

SEQ ID NO: 175670 - DNA, 557 bp, Homo sapiens
aaaggacttcaaggttccaatacttcaaaccacaaaaagcacatctttatttcttctgatacaagtgaaaacaataattttatacagccgtgcatgaaatagcccaaactttctacttttctacactaattctatataaatgctaactaccataacaatgaaaatgaagacttctgtgtgttactgtgtagacggtggcaattagataacttcagaataaaactgaaggcaataaaattggcattgaacaaaataaagacaagaacaagagaaaaaaaaagaaagaaaaagtagtatagaatagtacttgagctgggcacggtagttcacacctgtaatgtcaacactttgggaggccaaggcaggtggatagcttgagcccaggagtttgagaccagcctgggcaacatggcaaaacactgtctctactaaatacatacatacatacatacatacaaacagtagccgggcatggtggcccgtgcctgtagccccagctactccgggtgctgaggcaggaggatggcttgagcccaggaggtcgaggctgcagtaag

SEQ ID NO: 175671 - DNA, 249 bp, Homo sapiens
catctcctgaagttgagaccacagctcttaagatcttcttcctctccagctggacgtcccagagcagtgctcacagagttctctccatcccctttctcagcatcctctaacatcccatctttctctgttatttaaattaattctaacacactatagttattatctaaataataagcatctgttggccgcgagccactgcacctggcctctaccttaatttaacttattcaaatttttgtataaccagct

SEQ ID NO: 175672 - DNA, 927 bp, Homo sapiens
gtttttgccaggagccagggattaatagtctagaggaagggactaattgtacacaggaacaatatttacttttataatgggaatagtttgagacagtgcatcttctagacacaaacattcagtaggaagggttatgcattaattctttcatttaatgagcattttaagcacctattatgtgccaaatatcttttcgtagctctacaacagtgttcacttctcaatcttttgctacaccagagcgttgggaccatgctcccattaatcaccctgtctcaaacaacatgctttaccttcattcgttgatttactcatccattccttctcatagtttttaacctcaagagctctgaggttcagggtggaataatatggagggcctttgagaggctaacttttgaaccaaatcttcgaggatgaactagggtagtggcaggtagaaaactgcctttatatttagccttctttggtacctggtcatggatttcttcttcaagcatgaatggcatcagttgtctgggagtgagatacagtgttcgtatgctgagaaacagattaggccattaaaaaaaaagttgtggccacgtgtggtggctcacgcctatagtcccagcactttgggaggccgaggcagggggatcacgaggtcaggagatcgagaccatcctggctaatatggcgaaaccccgtctctagtaaatatacaaaaaattagccaggtatggtggtgggcgcctgtagtcctagctactcgggaggctgaggcaggacaatcgcttgaacctgggtgacagagcaagactccgtctcaagaaaaaaaaaaaataagaaacttgtaactccctctctctacttgatgaagtagacatcaggaaagactttcttattctgctttccattaaaagccataacttggaaattattatt

SEQ ID NO: 175673 - DNA, 707 bp, Homo sapiens
ccctgaagtacactggaagaagccataacttaagttcattgaaatttttgcagtgtcccagagtcgatgtattctacctttgtcgaccagaacttctccatcatacagtccaaacttgtgggtctggaaagcacaaactctgtaaatgagaaactggtgatgatgttaagtaagttatttatattttaagtccctgattttagactcatgtattttacctactcggaaaaaatcatattatggttgttgatttagaatacacatcctaaaaagtgacatcccatctttgtatggtctcatgtctgagctaggcatcccactgaaatctttaacttaacatgccattgttccactacgcaccacccagcagctaattggtctccacgcagaatggtgctattagggggactcagtgattgtcttgtatgtatggacatcatgcagtaacaggagataaatttgtgttggagacagggaacccatgctactgaatttatgcatagtcttccttacatcaccatggttaccatgtctacatgcacctcatgctcacacttgggttgcgtgatggttaatattgagtgtcaacttgattggattgaaggatgcaaagcatcgttcctaggtgtgtctgtgagggtattgccaaaggagattaacatttgagtccgtggactgagaaagccagatccacaatcaatccgggt

SEQ ID NO: 175674 - DNA, 230 bp, Homo sapiens
caaactccgcgcgtagcactttacggattcgatttgacaatgagatgtttgaacttgagattttagaggtaggatcatccagagtatgatgatagtggtgggtgactacagcagtgaagtaaaaggacattaataacgaagaaaccaagaaatgcatgattgctgtttagtcctctcagtggtccattgagaaaggactcttaagctgattttacagatgaggaagctga

SEQ ID NO: 175675 - DNA, 1294 bp, Homo sapiens
gccgagaaatgtataaaataatcgagaccggcggaggcaggtcagagccgtctggaatgcgcgcaccttcaacggtatttggagattattcgcactgaattttctgcccgccaagaacgaataggattgccaagccacaccactttttggagcccgcttattcgcgcctatccaccctctcctgtgccccaggttccctgagcacgggaatcctttccgggcatggccaagtttgttcggtggctcagagcgggaagggaagtgcagttcgacacctgtccagctgctccgcttggagatcaaaggccggctatgggctgagcgacagatttacgggacggtggtacagattaaggcgagaaccctgccggtcctggactcgagttcgcacccaaggaaagcgtacaggtccctggaagcgggtggatgtcggagaggccgaggcagcctgcgctgtggccaggcaggcttggtgggctttagtctcagtatgtgttctttaaagtcttgacaggttattagtaaaggaaggggcaccccagggtcatgaagatgcttctcgctctggcccaagcatgctgaggctcgcttattcctcggcaggcccagtaaaacagctcaagcacagcctggagtcttcccgcatctgcgcgggagtagagtctggctttgggccccgcgtaccccgcagtcgtcggggacccagttcgaggccacgggaagggtttccgcggcagggcgcggagtaaagaggggaagaaggaatcctctccgcgtgatcagtagggcgggcttgtgatactctcacacccaggttccagctcagcccccaaactgctgccccaagaaaacaagttggggagtgtggatttagacataacaacgggtgtgagctgatgtccttacaaccaaaaatattgagactagaaattcagctccgaatccacgaccctcagattgatgcttaatcgcaccctcgactccagaaaagctgccggggacagacatggacaggttttgccaagggttcattaaaatagtctgcactggaataaccggggtgcaagagatcacgtcttcactcagggctttggggatcccctcgtcgccccaggtcagtgggtggggaggagggcaaacttctgtcttttgtttgtgggtgagggatgcgaattgtggcagcagccgagaaaaggggggaaattaattgcagccaattaataattaatcccctttaaacagctttattatctcttctgggcgacagagatttgtctgataaccccctgaagac

SEQ ID NO: 175676 - DNA, 1571 bp, Homo sapiens
ttagcgatggtttgggaacccgggcgctggaaaggcgcgggtgcggagggcggctgagccgcgcggctgcggcaccgtgggcgcgagacccctgccgagaggagcgcgcggacgccgggggaagcgcctcggggcggctggaggcgcagcaccctgggggagccggggcgcgggagagacaaaactgttcgaaccttctctcccttccccacccccagcgcccaaacccggggcgggtgagcgcgacccttgcagcgaccccttgccgagccctgcccgcgcgattactaaggagacgcggcctccggcactgccgtccccgcgccgtttgaaaacggatccatcagcggggtatttggagattattcgcactgaattttctgcccgccaagaacgaataggattgccaagccacaccactttttggagcccgcttattcgcgcctatccaccctctcctgtgccccaggttccctgagcacgggaatcctttccgggcatggccaagtttgttcggtggctcagagcgggaagggaagtgcagttcgacacctgtccagctgctccgcttggagatcaaaggccggctatgggctgagcgacagatttacgggacggtggtacagattaaggcgagaaccctgccggtcctggactcgagttcgcacccaaggaaagcgtacaggtccctggaagcgggtggatgtcggagaggccgaggcagcctgcgctgtggccaggcaggcttggtgggctttagtctcagtatgtgttctttaaagtcttgacaggttattagtaaaggaaggggcaccccagggtcatgaagatgcttctcgctctggcccaagcatgctgaggctcgcttattcctcggcaggcccagtaaaacagctcaagcacagcctggagtcttcccgcatctgcgcgggagtagagtctggctttgggccccgcgtaccccgcagtcgtcggggacccagttcgaggccacgggaagggtttccgcggcagggcgcggagtaaagaggggaagaaggaatcctctccgcgtgatcagtagggcgggcttgtgatactctcacacccaggttccagctcagcccccaaactgctgccccaagaaaacaagttggggagtgtggatttagacataacaacgggtgtgagctgatgtccttacaaccaaaaatattgagactagaaattcagctccgaatccacgaccctcagattgatgcttaatcgcaccctcgactccagaaaagctgccggggacagacatggacaggttttgccaagggttcattaaaatagtctgcactggaataaccggggtgcaagagatcacgtcttcactcagggctttggggatcccctcgtcgccccaggtcagtgggtggggaggagggcaaacttctgtcttttgtttgtgggtgagggatgcgaattgtggcagcagccgagaaaaggggggaaattaattgcagccaattaataattaatcccctttaaacagctttattatctcttctgggcgacagagatttgtctgataaccccctgaagac

SEQ ID NO: 175677 - DNA, 1244 bp, Homo sapiens
gttgtggtcgggtgcggtggctcatgcctgtaatcccagcacttgggagactgaggcatgtgagtcgcctgaacccgggaggcagaggttgaagtgagccgagatcgtgccactgcactccagcctgggcgacagagcgagactccgtctcaaaagtaacaagaggattcagaatctgagagatactgcttaaaaggaaaatgtcctggagggatgccaaactgcactctcaaaggtttcggctggatgtgtgatattgatggggaaacccatttcagtgtctctaagaagggggtagtgctcctctttccaggatgtctctggggaatctagagcaccccaaagtgtggtatgcatagaaacattgctgcttaaggtctgaatatttgttcctcatcaattcatgtgttgaaattctaacctctcctgaatgggattagtgctcttacacgagaggcctgacagagactcctcacccttcccaccatgcgaagacacagtgagaaggctcagtctatgaaccaaaatgttgactgtcaccatttactcaatctgctgtcgccttgagcttggacttcccagcctccagaactgtgagaaataaatttctgttgcttataagacaaccagtttatgacatttcgttatagcagcctgaatggactaagacacccttcccaccatgtgaagacagagtgagaaggttcggtctatgaaccaaaaactgaccctcaccagtcattgaatctgctggtgccttgatcttggacttcccagcctccagaactgtgagaaataaatttctgtcgtttataagccacctagtttatgatactttgttatagcagcctgaatggactgagacacccaccttaaaaagacagtacctcaaaaccataaggcaggataactgctagcctgatattaatagtttttaatttactgctagcttcattttgccaactgagtcagatattttttaaaagttctgtttgcaattattttaacttaggagaggagaaaaagagcaggcatcagcctgcatatgggatatttctgaaaggattttgctatgattagcttgccctcagggagagtaaaatgtgagttatacaaccatgcttatatttagatgttgttgatgttctggcttataatatatgatgagttagaaataattttgtactgatcagcccaaccagaaaataaacatgctttaacttgtatttattactaaacttggt

SEQ ID NO: 175678 - DNA, 471 bp, Homo sapiens
ttcagcacagccacaccaggtcattcccactctgtacgctgaagtggagggaacttccagtggtgggggattgaggaaccacatggcagatatgcctcaatgtggtgccagctggaagcacagttggctttcaaggccagcagctgggactgtccacctagccccaggcacagctgtttatggtttctcctcacgttggcagtttgagtttgatttacaagggtctaagaggaaactgaatcttttcaaaaggaaaacaactttgcagaagctgcctgttttccaaggaaccacttttgacgatgttttgctcctcttggttacaggtaacaagaggattcagaatctgagagatactgcttaaaaggaaaatgtcctggagggatgccaaactgcactctcaaaggtttcggctggatgtgtgatattgatggggaaacccatttcagtgtctctaagaagggggtagtg

SEQ ID NO: 175679 - DNA, 190 bp, Homo sapiens
ctgacagagactcctcacccttcccaccatgcgaagacacagtgagaaggctcagtctatgaaccaaaatgttgactgtcaccatttactcaatctgctgtcgccttgagcttggacttcccagcctccagaactgtgagaaataaatttctgttgcttataagacaaccagtttatgacatttcgttat

SEQ ID NO: 175680 - DNA, 352 bp, Homo sapiens
gaagatgtggatgtgcttgacgtgtggctcacagaaacagtcgtgataagttcccatcccctgcggactcccctctgcagtaacacggctgctgtgaaacctcaaatgagcacatccttattgtcggtttcactgtactgataagcatcaatattatttgactttgttagaaactcagccttcacatacttttgaagtatgttcccacccttgggaaaagaaaaacaaagtagaaatacttgtttccctggccattttaaaacatgtacagaaagcttgaagtttttcccttttacagaccaagcggaggcattttatctaaatccatcatggttttatcttgtatgaaata

SEQ ID NO: 175681 - DNA, 621 bp, Homo sapiens
gggatcttggtaaccagagcagaatggcagtttttcagctcttacaatgcctttgtttagaagtcttgtatgtgtatatctgctccatcacttaaaagttctcctaatgcaatttggaagggtttaatatggaacaagagcagggactttgggatggagtctaatgataacttgtcacatgttcttttagaagctgaattaggtagtttttgccttactggtgcgctctcatttaactgtgaggtatcctggcacttcaaacaggtaccatatggtaactgttttgtgttttaagcctggtactgtttagaacacatgcttcagagagtggtcattgtttcgctgccacccagttaaggcatgtgttacctcttgttatggatggaatgcctgtgagccctaggttcctatgttgaagccctaacccccagtgtgatggtatttggagatgaggcatttgggaggtgggtaaggttagattagctcatgatggtgggaccctcttgatgggattcatggccttcacccgctttatgatggggttggtcggtttactcttgtaaatgtgtctgagttcattcgagattctggatattagccctttgtcagatgagtagattg

SEQ ID NO: 175682 - DNA, 135 bp, Homo sapiens
cacttactactaagtaaatatcacagattttttctatgcatagagacatagatacatacataaaaaggataattagagaaaaattattaaattgagtgaaacctactgatgttttaaacaccaaaggcagattta

SEQ ID NO: 175683 - DNA, 394 bp, Homo sapiens
tttcacctaagggtttaagcagatactaatgattgatgcttacatctattatttcactgagagttataaatgatgccttctcattcctttgcatttatcagctgaaatatatctaaaaaacttaccttgatcagctatttgattatcttgaaatataatttatactagaaagtagaaaatgtttgcttctcccctttaccaattttcagaacttgattctgcagcaacctccaaaagtaacaccaatttctaaaattttgtttagtattagtatgagctcataaattatttttactttaatattgatataaataaatttttatatattcaatcaattacactttttccttttgatatgtgaattgtctcacctttggcaagtagggtccccctt

SEQ ID NO: 175684 - DNA, 389 bp, Homo sapiens
acaggtgaaggccaacctacacaccaggaggaacacactgtaatagatcatccagctcaacagtgaacagtatttgacagaggtgtaagtacataaaagctacctgttttagcaaaaaattacaatagaactatattaggggatagagggcatggaaaaataggaaagtggtgggatgcaagagctaaatacaaatctatcacaacaagaaatcaacaggccaaacatgaggggaaaaccaagaaagaataacaaaccaactatttagcaacaagaagatacagcagactctcaaaaaaagtctttttgttcaacatcgttttttcataacattgatgagagaataagtgattcctggctgaggctacccgtttgtgtggagttggcat

SEQ ID NO: 175685 - DNA, 479 bp, Homo sapiens
tgaattctaaggatcttattatttctgcatattctggtcactttggatctcgatgggagatggataaaggaaaatcttaagataatgcctcaaaatctagggtgagaggctcatttcatggaagaaaaacaaccacccatggaatataaagtaactattttgggtcccagtggtagggagtctagtgggagagactttgtggggaggaatggggaggggatggaaatgcgcaactggcctggaggtaaatttctctttcctggacagtggcaatatggcgccaggatgatgtcattattgtcccacagagatctcttctcccaaggccaactttaattttctgggctcaccacattctgggagtgtgcttcattcctctttgctcaggctgataaggttttatttttactttctctaattaattcaaatgacctaataaaagaatactatttggaagatgcctcaagaactagcatcaa

SEQ ID NO: 175686 - DNA, 586 bp, Homo sapiens
tgtccaaacatgaggcttctggacttataaaattgctagacctcaagaagtatatcagttcccatcaatgagtaaaatgtataaaatcttaatggtttggagtttttctttgaatccctatgatattcaaattgcatcattcatctccccctaattttctccttagacaaattcattacacacaagaaagagttcagagcaaagcaatccaacatttgcaatttacttgtgtacatgttgccccaacagtagatactgaataatggttgaatttaacagattagtccttttgagactagatcatttcctatagccaaaaataagatactagattttatgtagcccagttgtggagatgcagttaaaaccaactcttcctcaaatacatgaagctgtagttgcatggtatttttattggccaacatatagttttgtagtggattacatctgaactgaattttcagtgctgctgtgtgcatattaaatgtttcccttacttcctgctttaggatcctaattagcattatgcataaccttgaaaataatctagtccagtatcattctacacttttatcatatatatgct

SEQ ID NO: 175687 - DNA, 434 bp, Homo sapiens
cctaaccacagaccccgctggtctgagtctctcagtcacctggaggctcaagattcctttcatttccaaagaaggaaagtcagcttggagagggggtaagacaacaactgcagctgccataacccagcacctactttgtgcagggcacagtgttaagcatttcagagatgatctcattcaatcttccaggagttttttggaagcagatgttatcatcgccccattttgcagatgaggaaactgaggttcagaggggttctgttaattttccaaagtcaccgagctagcaggtggggtagcccagatttgattcccaatgtatctgactccagggtctatgttctatggccttggtgccaggactgccccctcggtacccctgaggggtgagtactgcagagatctgcatggagaagggggtacggaacacagct

SEQ ID NO: 175688 - DNA, 385 bp, Homo sapiens
cttattcctcatgctttgaatcactagacttcaagataaatggacagttaactatgcagcttccagaatcacatggtagtttctgttactttttataaaatgttcctggtatgctttgcaacattaacagacattgaaactgccatgtttttcaaatgggaacgtcattaacccccaagtaagggctgaggatcaactcacaggacccacacttatgccagaggaaatcaagtttatttctgattttttcagtgggaataaaagctaattcaaatctattctcagttaactcttatctaatttctacatcctcctatgagaatagcaagtactactacttctaatgttttgtggggttttttggagacgaggcctcactatgttg

SEQ ID NO: 175689 - DNA, 471 bp, Homo sapiens
gggaaagttcatagttctgggtctctagcagagatgaaagttcatagtttcaaactgtacagataaaatcttttatttagctttgcaaatgtattggatttaatacctaaatctaaattatatgtatagtgttcattttgttctcaggaatgaaattggaaaggaagttgaactagataaattcacaggacctttccaactttttagtcaagatgcttagatactaaaagcacattaaaaaaggatttcaataatacatgcttatttgttccttgtaatgaaattatgatgtaatcccactttgctttctcattttgcttttgtacatctacaaacgttcattgccaacatcaactgcatactagtgtgtatgtacttcccagatatagatgctgaggcttcttttttgcacacgagatgagccttggagaatttccaaattccaaatatacagttgagaaacaacattga

SEQ ID NO: 175690 - DNA, 477 bp, Homo sapiens
cctctcaaagtgttaggattacaggcgtgagccgctgtgcccaggctgtttttacatttcttaacaatatggatccaatctttgaaagtgctcaatattaaaaagtcagaaaggccatatgcattgatttccatgttcacaggatattttagtctaatatatttggatcacattggatattcattcctgggcccattatttcataaacacgaaaacttgatttcaaaaagaatctggatatattaaggtggtaaacaatgcttgtgcttttctaaaacaatctttttactgggttctcactagttttgttttcttttggaaataacacaaatgtatgagtccttttctttttctgacttcttttcaattctgttcccttataaaatctcttccttcaaagcagttcaataaaaataaattgcccctttaacatttttttaaaaataaagttttaacatctgaaaaaaattaactggg

SEQ ID NO: 175691 - DNA, 327 bp, Homo sapiens
aaaataataatcaggagaaaagcagagtatggggcagctgtaaggttaataaggattgtgtgatgggggtgatgaccagaacatggtattattacacagcctctgccgtcagactcccgcacttacaggccaagtcactttctcttctctacctctcagttttcttccctgtacaatcgggatattattgcttaccttgaagaaaaaacacacaactcaaccgtacccagaactctgtgatgtttctgcccctacaaaaggaaatgtaatcctaggccgggtgcggcggctcatgcctgtaatcccagacctttaggaggccaagca

SEQ ID NO: 175692 - DNA, 509 bp, Homo sapiens
gggattagctgctggggggtggggtgctcgcagatgggaccagaagtgatgctggtgaatgtcacgtccaggcagagagtggaggagggggcccgcccagtgttgaatccagcttggggaagagaagagaagggggctagggggcagactagcctggcctataggaggcccatgggggaaatgatggcccagttgggttatttggttccccatttgagggttggagggtagagctggcagccaagctcagctgtgtctacagtggagtgggcaccagaaggatttccacctgggaggggctttgggggattgattggattgcaggggtgggtattgactcttcatttgcaaaacactttatgtatgatggaggtggggaccctaagaatggggaggtggcaggctttgagagatgtgtctagagaatctgccaccaccagccaccccttggcagggccaccagtctaaggccaaagactatgcccttccccagccagcaccatgaaagt

SEQ ID NO: 175693 - DNA, 354 bp, Homo sapiens
cccaccttaatgagtaactatttaaaagtaatttttgttttgcttcatccttccattgtttttcttaacataaaaacataagtatacatatttatattcttctgtttcttaggtaaattgtaatctgctatatttacttttttctactttgctttttttattttacaagccattcaggagattactgcatagtagtacgacagtagtaatatggcatagtgtgggattttgctttgctagccaatctgaatttttttttttaaattttaacacataaattaagcccatttaaatgtattggtatagccaatatgtttggccttggctctgtcattgtttcatattacatatgta

SEQ ID NO: 175694 - DNA, 672 bp, Homo sapiens
tcctttaaaaagtctttcgttgccagctcatcttttccagtccaaatgacacactaatcaactatatctcatcgttgactacatatatatgcctaagttactgccaaaagctcaaaacagattttaccaagtacaacttctcacccttctacccatcttgcacactgttaactaaccttccttaaaaaaaaccttacatatcacccccctctgctcaagaacctaaacgatataatggatcaaacctttaactcattactatgttttacgttctatcctcaatgaaagacctctgttccaatcaattcaggctcaccgctccagcagagatgaagttattgcaaactctgcctttgttcactactcctttcttccaaatgctactccacctttcctcttcacttatctacttattaactattaattcttttgttgttgttgttgggggattagggacagggtctcactatgttgccaaggctggtctcaaactcctggtctcaggcgatcctcctgcctcaaccacccaatgtgctggggccaggttcagtggctcatgcttgaaattccaccatttggggaggccaaggcaggcagatcgcttgaactcaggggttcaagattagcctgggcaacatggcaaaacctagtatctacaaaaataaaaaacaa

SEQ ID NO: 175695 - DNA, 556 bp, Homo sapiens
acgtcgtgactgggcatgacctggcgcaccttctacccatcttgcacactgttaactaaccttccttaaaaaaaaccttacatatcacccccctctgctcaagaacctaaacgatataatggatcaaacctttaactcattactatgttttacgttctatcctcaatgaaagacctctgttccaatcaattcaggctcaccgctccagcagagatgaagttattgcaaactctgcctttgttcactactcctttcttccaaatgctactccacctttcctcttcacttatctacttattaactattaattcttttgttgttgttgttgggggattagggacagggtctcactatgttgccaaggctggtctcaaactcctggtctcaggcgatcctcctgcctcaaccacccaatgtgctggggccaggttcagtggctcatgcttgaaattccaccatttggggaggccaaggcaggcagatcgcttgaactcaggggttcaagattagcctgggcaacatggcaaaacctagtatctacaaaaataaaaaacaa

SEQ ID NO: 175696 - DNA, 386 bp, Homo sapiens
ctgatttttttttttcctgaggctgtaaacttttcatgtgcgttggattcaaataatgtaaacaaaatttaggctgtccttaccaaataccttataatctagaaatggacagttatttttaatatgaaccttcatttatgaaattaggtataccagaggaacattctgagaaggattgaaatgtttaatgtgtatttctaccttctcctcttcacagaagaatttttttggcccagggaaggcagaactagaggcagttggttcctgtaaaaagaggcttacaggccgggcgcggtggctcacgcccagttttattatttttagaatggtgagtgttgaatgctttgtggactgaggagaagcaaacaataaacaatcacatcatg

SEQ ID NO: 175697 - DNA, 188 bp, Homo sapiens
tctagatgatcccatactgacctatctatactacctatctatactacctatctatactggacctatctatactaccacccccggggtccgggctgacctgactccacctttggggtctcacctgagccagctcctccctggccccagaatctcacctcagagaccaccttccctccttccagcagcgt

SEQ ID NO: 175698 - DNA, 503 bp, Homo sapiens
agttcacagtgttctgagaaggaagcaaggtcaaaagaatgacctaccaaggccagcaagcctgcatttcctccccatcctttctcccggcttctcttttcttttgcccctctcctgcctgggatgcagattctcccctagagaaagagcaggctcctgccccaaggattggctgtcccctgacactggggaagcacacgtacagcgcaccttgatggagcctagtgaactgagcaaccctggtgtggtttcctccgccagctgcttgagtaggtggggtcaggcctaaggaaggtgagcacccagccactgccttgccttgccagccgtaggagcctactcagactctctgagcattaggctcattgtccatgagaaaaggaatcatagtacctgccttggaaatggatctcctaaactttaaagagactatatgtgtaagtgcctcgcatgcattaggtacatagatgacatctgccgtttggtactttgtaattttcaag

SEQ ID NO: 175699 - DNA, 227 bp, Homo sapiens
tatactgacctatctatactgacttatctatactacctatctatactgacttatctatactgacgcattactaggggctaggaacacagtgttagaacagacaagtacctgccctcaaggaacttgagtggaaggacattaaataatgccacagatacccgtatgatgaacgcagaggtgagtgttcctcagctgcagcttaaagggggacagcctgggtttggggt

SEQ ID NO: 175700 - DNA, 648 bp, Homo sapiens
aagggatagataccagaagagaaattttgtgtacattttaatttgggttgtggaaaattgtattctctattaaagggtttagaggagtgcattcaaataatactcctaacagttggataaactgtcatgagggcatttggctgtgaagttgcaatgagtggagaggcattgacattgttgctgatggtgacgttcctggttgatgacatagaagacttaatttcctcctcatgattaatctctcagttggagagtatacacactcttacacagaatccaggacgaaagccctcatcagatgcttacatcatgatcttggacttcccagcctccagactgatgctatggaagatcagaaaatataaatttatgaactgctataaactgttattttcttcgtgaagatcagcacaacaagatgttccagacttattcaacatattgtccagccagtcctggaaacaatcagttccctgaggacagaattaaagtttagagacctgaatctgggccccaggggtggtcattactactggtttgccactgcttctgtagcttttcagtgaagaggtagttatgtaatatgtatctaaaaaaataaattcaagttatgtattttaaaaataaattcaaggtctatatatttta

SEQ ID NO: 175701 - DNA, 530 bp, Homo sapiens
gcctgaagttttctgcctccagactctactctcctgcctcaattctactctctacttttataagctcgactcacatgacgaaagccctcatcagatgcttacatcatgatcttggacttcccagcctccagactgatgctatggaagatcagaaaatataaatttatgaactgctataaactgttattttcttcgtgaagatcagcctccaggttcatcacatgactcagctaagagaaaatatccagtggctcatcgttacctgtgggaggaggtctgaactccatggctttgcattcatgttcttgtttgtctcacttcaaccttcattccctccaagtcctcgttgtcctcccagggttcctctgctacagccgggggagtctgatccctgcttcctaaatttctctgaagcttatctacacctatgtttttgctccactcttctttctcctttatacaccaattattctcctgttttatccaaattattcccttctgcaagactcacatcaagtacgatttctttc

SEQ ID NO: 175702 - DNA, 515 bp, Homo sapiens
acttgtgaagcttatattttgcacttctaaaggcagcagaatcctgaagtgtaaacaatctcttcttacccatgttttttcctcctgtgtgttttgtcttgcctattttttttattgtgttatgaaaacagaaaaccagggcaatatatttggtaggaactcaaagacagaacaaactcataatcttgttttatgttttgtttcagatgctatggaagatcagaaaatataaatttatgaactgctataaactgttattttcttcgtgaagatcagcacaacaagatgttccagacttattcaacatattgtccagccagtcctggaaacaatcagttccctgaggacagaattaaagtttagagacctgaatctgggccccaggggtggtcattactactggtttgccactgcttctgtagcttttcagtgaagaggtagttatgtaatatgtatctaaaaaaataaattcaagttatgtattttaaaaataaattcaaggtctatatatttta

SEQ ID NO: 175703 - DNA, 444 bp, Homo sapiens
gcctgaagttttctgcctccagactctactctcctgcctcaattctactctctacttttataagctcgactcacatgacgaaagccctcatcagatgcttacatcatgatcttggacttcccagcctccagactgatgctatggaagatcagaaaatataaatttatgaactgctataaactgttattttcttcgtgaagatcagcacaacaagatgttccagacttattcaacatattgtccagccagtcctggaaacaatcagttccctgaggacagaattaaagtttagagacctgaatctgggccccaggggtggtcattactactggtttgccactgcttctgtagcttttcagtgaagaggtagttatgtaatatgtatctaaaaaaataaattcaagttatgtattttaaaaataaattcaaggtctatatatttta

SEQ ID NO: 175704 - DNA, 542 bp, Homo sapiens
cctacctcagaatatcttgttttgtaagatagtactttatcttcattattttatttgggtattctattattatagctgaaaatattttaatggatattacttggtagaaaagctagagcaaaagacctggattcaaattctcccatggctccctagatgatattacttcaactaaagtatttattcccattcatgtattcaacaaatgtttataaatgaacttcaatgtgccaacaaggtactgtttaagacagtaagaatgcaacagtgagtaaaaccggcagagatccctgtcctcatgtagctaacaattgactatgtgttctgtgggactgtctgtgtgtgagggaggtggtggtatggagtggcaagaaataaaccaggtaaataattaagatgatgttgagtggtgaggagtgctatggaggaagataaagcaggacagggtgacagtgtgactagggaggtcctcatgcacaaggtgacatttgagtaaggacttgaaggagacccagtgtgtattaggaacacttctagtggga

SEQ ID NO: 175705 - DNA, 485 bp, Homo sapiens
cttgagacttttggcttaaaaggccgagccaggtatatttttaaaaagctactttgaataaataacttttaatttcagtaatgatgttgctttcaaaacaaaacaaaacaaaatccagacattcatgttcattcttagagctttttttctttcattcaacaaataattgctcaggtgtgcctaggggaccccagtaaaatggaaacagcgcctacctgctctcgtagcttacaatgtagggagagataaacatttatttgtgtaaattatttgtttaacgtggaaattagaattgtgacagatactaagaaggaagtattgggggaccttgcctagtcagtgttagggcaggcttctttaattgaatatcatttgaaaagaaaacttaaaaggtcctcctattttttgcttacatttgtaattattacttttaatacgcttttttgaattatgttcaagagcagtttatattttcaagttaccca

SEQ ID NO: 175706 - DNA, 439 bp, Homo sapiens
tggacaggtgaatcccgtggacatttgtagacaccgtccaagtgctcagatagcatatgtgaataaaccctccccattttagcatggtccctgggcaatttcaatttttgtccatcagcattaagtttttccgatctacctcagtgatgggccctttcagatggaattttagagggcaggactgacacccagttgagtgacttcactttaaaccaaggagaatgaatcaagtgttgacactcaccttatcacttgtgcctagaggttttgccaatattccagtaaccaaaaggaaaggccagaaaggtaagaaaaccactaggtgtcacggaagccagagaagaagctatgggcagctgtgctaaatgctgtagaaagagcagtaaggacgactgactctgaggtcatggtgaccactggcagatgcagttgctctagg

SEQ ID NO: 175707 - DNA, 372 bp, Homo sapiens
cctagctgcacaactcactagttacgtgaccgtatgcaaatcccttaaacttcagcttcctcatctataaaataaggctgtaacccatttcacaggacagttaagagggttaaatgaaatgtaaagcccacaactgaaatatagttttgctcctcatagataggctatgtttttatgtgaatttttcccacagttagccttgggtcattctcaaaaatttgtgaagttatgaaagactgttatcaattaagtcagaacactcccttcaatcttttaacatgaggaagatcaactccatcctcccacaaaatatctgttgggcatggtgagacaccaaatgctacatgacatgaccaggcttgatggagaatt

SEQ ID NO: 175708 - DNA, 248 bp, Homo sapiens
actccagaaatcactgtgcaatttcacgaatggcttaaagcaatggacataaaaggaaaaatcacttcagaaaaaaaagaaagcaatggtaaaagacctagagacgttattcagcttcactcacagtgacagtggggtgtgttttcctatccctaagacaaccattgccttttaagcatcaaaatttaaaaaacaaacaaacaaacaaacaaaaaagctattataaagacatgtagaatatcactgat

SEQ ID NO: 175709 - DNA, 493 bp, Homo sapiens
tgtaaccccatctctactaaaaaatacaaaaatgagctgggtgtggtggcgggtgcctgtaatcccagctgctcaggaggctgaggtacaagaattgcctaaacccaggaggcagaaggtttcagtgagccgagatcacaccactgcactccaacgtgtacaacagagcaagactctgtctaaaaatataaattaaataaataaataaaagagattgttaaaaccttttacaagctgggtatagtggctcatgcctctaattctagcactttgggtgatagaggtaggaacattacttggaggagttggagaccaccctgggcaacatagcaagacactgcctcaaaaacaaacaaacaaacattgtctgctggctgggtgcgtggctcacgatgaggccggcaaatttcttgagctcaggagttcgacaccagcctgggcaacatggtgaaacccagcctctacaaaaaatacgaaaattagttcgagcatg

SEQ ID NO: 175710 - DNA, 490 bp, Homo sapiens
caaagagcaggcttttttattaaagaaaaagaaagcccaccgcccccactgcatgtggaccttaatgaaactaatctaataaacactagaaagaaggtgtgcaaatgggccagcatttgccgtctatccacctgtgtcacccaggtaataaaggtcatcctggttgtaaacccctgtgacagcgtgccgggttcgcccccacgccggacccccgactccgatccacagatcctctccgtgaggggttcctctgggcttagaacgcccccgcgcgcgcgtgcaggcacacacgcgcacacactcacacgcttgctcgcacaccgccagtgcctctccttcccacctgggacccccgggcagccgggctggatgaacaagttgcagctggccgcggcgctccgctagggggacgagggtggggagggggagcccagcggggcgcagggccgtggccagggcctggggacctgcccgcttccctccgcggccg

SEQ ID NO: 175711 - DNA, 857 bp, Homo sapiens
aagatggcggcgcgctgggagcgtatcatctgcgtttctaggagcttcgctatgcggctgctttaagattctagggttgtacaggcccacgccagacacgacgtctggcaggaacctcggcctcagagatggctctgagtaaatcaatgcatgcaagaaatagatacaaggacaaacctcctgactttgcatatctggcatccaaatatccagattttaagcagcatgttcagataaatctgaatggaagagtgagccttaattttaaagaccccgaagcagtcagagctctgacgtgtactctcctaagggaagattttggactttctattgatattccattggagagactaattcccacagttcccttgagactcaactatattcactgggtagaagatctgatcggtcaccaggattctgacaaaagtactctccgaagaggaattgacataggcacgggggcatcttgcatctaccccttacttggagcaaccttgaatggctggtatttcctcgcaacagaagtggatgatatgtgtttcaactatgcaaagaaaaatgtggaacagaataacttatctgatctcataaaagtggtgaaagtgccacagaagacactcctgatggatgctcttaaagaagaatctgagataatctatgacttttgcatgtgcaaccctcccttttttgccaatcaattggaagccaagggagtaaactcacgaaatcctcgaagacctccgcctagttctgttaatacaggagactcgcttgaacctgggaggtggaggttgcagtgagccgagaatgccactgcactacagcctgggcgacaaagtgggactgtctcaaaa

SEQ ID NO: 175712 - DNA, 733 bp, Homo sapiens
aagatggcggcgcgctgggagcgtatcatctgcgtttctaggagcttcgctatgcggctgctttaagattctagggttgtacaggcccacgccagacacgacgtctggcaggaacctcggcctcagagatggctctgagtaaatcaatgcatgcaagaaatagatacaaggacaaacctcctgactttgcatatctggcatccaaatatccagattttaagcagcatgttcagataaatctgaatggaagagtgagccttaattttaaagaccccgaagcagtcagagctctgacgtgtactctcctaagggaagattttggactttctattgatattccattggagagactaattcccacagttcccttgagactcaactatattcactgggtagaagatctgatcggtcaccaggattctgacaaaagtactctccgaagaggaattgacataggtatatcattttaaattcttttttggctaaacagttttcataagttttgcgagatcaaattctttgtaaacttttctactgggtatttgttgttgtacaaaagaagctggctacagatacaggttgagcatccttaatccgaaaatccgaaatgcttcaaaatctgcaacctttgagcactgatgtgttgctcaaaggcaatgtgcgttggagcgttccagatttgggggttagggatgttcagcctgtaaatatagtgcacatatttcaaaatctg

SEQ ID NO: 175713 - DNA, 445 bp, Homo sapiens
aagatggcggcgcgctgggagcgtatcatctgcgtttctaggagcttcgctatgcggctgctttaagattctagggttgtacaggcccacgccagacacgacgtctggcaggaacctcggcctcagaggtgggtcacttatatctctcacgcagatttactatcatgggtcacttaacccgtggatcacacgggttcctcattcttgagttttgggctagtgaggtgccgacttcggggtctaggaggggagacctgatgtggctgtgtgtgcgcacgcgggggtgttgagagtggatgagtgggaggagttggcgaatagaatagagactaggactgaagtaggaaagactccccggtgtttaggaggtttagagagatccaaaactgaggcagaccacaggacggggtcgacgcggccgcgaatttagtagtagtagtcgacc

SEQ ID NO: 175714 - DNA, 353 bp, Homo sapiens
accttgaatggctggtatttcctcgcaacagaagtggatgatatgtgtttcaactatgcaaagaaaaatgtggaacagaataacttatctgatctcataaaaggttagcgccacagaatgaatgcctccaaactttgtgtcttcacctgcctttttagtttaacgcatttcattacctttttctttaatacacagacttcggtaatttaaaaaaatctggcactttgtaattgggtttgctgtcttgataccagaattaactcagaaaatagtaactacagttgatccttatgatttgtggattctttttttgtgaatttgcctatttgcctaaatttatttatttatccatt

SEQ ID NO: 175715 - DNA, 3372 bp, Homo sapiens
aagatggcggcgcgctgggagcgtatcatctgcgtttctaggagcttcgctatgcggctgctttaagattctagggttgtacaggcccacgccagacacgacgtctggcaggaacctcggcctcagagatggctctgagtaaatcaatgcatgcaagaaatagatacaaggacaaacctcctgactttgcatatctggcatccaaatatccagattttaagcagcatgttcagataaatctgaatggaagagtgagccttaattttaaagaccccgaagcagtcagagctctgacgtgtactctcctaagggaagattttggactttctattgatattccattggagagactaattcccacagttcccttgagactcaactatattcactgggtagaagatctgatcggtcaccaggattctgacaaaagtactctccgaagaggaattgacataggcacgggggcatcttgcatctaccccttacttggagcaaccttgaatggctggtatttcctcgcaacagaagtggatgatatgtgtttcaactatgcaaagaaaaatgtggaacagaataacttatctgatctcataaaagtggtgaaagtgccacagaagacactcctgatggatgctcttaaagaagaatctgagataatctatgacttttgcatgtgcaaccctcccttttttgccaatcaattggaagccaagggagtaaactcacgaaatcctcgaagacctccgcctagttctgttaatacaggaggcatcacagagatcatggcagaaggaggtgaattagagtttgttaaaaggatcatccatgacagtctacaacttaaaaaaagattaagatggtatagctgcatgctgggaaagaaatgcagcctggcgcccctgaaggaggagcttcgcatacaaggggttcccaaagtaacgtacactgaattctgtcaaggtcggacaatgagatgggccttagcttggagtttttatgatgatgtcacagtaccatcaccaccaagtaagcgaagaaaattagagaaaccgagaaaacccataacattcgtggtgctggcgtccgtgatgaaggaattatccctcaaagcatcacctctgcgctcggagacggcggaaggcatagtcgttgtcacgacatggattgaaaaaattctcactgatttgaaggtccagcataaacgagttccctgtggaaaagaggaagtcagccttttcctaacggccatagaaaactcctggattcatttaaggagaaagaaaagagagcgtgtgagacagctgagagaagttccccgagctcctgaggacgtcattcaggccttggaagagaaaaagcccacccccaaagagtctggcaataggcaagaactggccaggggcccccaggagaggaccccctgtgggcctgctctgcgggaaggcgaggctgccgctgtggagggcccgtgcccgagccaggagtccctgtcccaggaggaaaacccggaacccacggaggatgaaaggagtgaggaaaagggaggggtggaggttttggaaagttgtcaaggctctagcaacggagcccaggaccaagaggcttctgagcagttcggcagcccagtggctgaaagggggtaacgtctcccaggagtggccggacagtacctgtttaagtgtttgataaacgttaagaaggaggtggacgatgccttagtggagatgcactgggttgagggccagaacagggatctgatgaaccagctttgcacctacatacgtaaccaaattttcaggcttgttgcagttaactagaaacctcctgcacagttggaaacgtgttgatagtaacttgctttggagtggcctgtggggtggcaagaggaatcctaccagcggcccattagtagcacgatgtggaattatcttcgaaaacaaaaacctatgaatctgtcccccacctccccccgcctccttcccgctttttgagttacagggagtcgtagtgtggtcatttacaaggaggaattgtggtcatcagtaacaacagaaagccctcagtaaactcccgagggattgcaagctggctcaagctggcccctcagctctggactgcctctgcaaggtcagaagggttgtttgtggagtctgggctgggcagcactgcctagaatatcatgctgtctctgtcacccaagggtgtttcttgaggaggggtggctctctctgcctccagctggaggccctggtaccctgttctaggtcactcttcaagatggggcctaccttgcatcaatcccacaaagggagctgtatggtgggtggtggggaatctgggagagaaaccttagtaatgctgggaaggagcagcagagtctggggaccacccggtaaatggcacattcctgacacctggctgttttgatgttgcttatttcagaagcagaattaggtaagcaaaactccccggtgtgactgaggcacacagaaggcacccatacccccacctccagcctgttgacagtaccattttgtagcagttttactactgtgtgatttttgtttggacatctgaagtagagcttgttttgtttttaaataagaatattcacaaattaaaaaccagcggtcctatttgaatcctggggttagctgagtgagcggctgatgatagaaatgagaaatagaacaaaatagtatgtgccgtaggtagcttaagaaggtctcagatattttgttgctgatcaaatactgtttttttgtggcttcacttgtaatcccccctgtacttacctactcacattggagagttctgaggccggagtaactgtgtccttgaaacacgtttctaattggaatgccagggttcagtagccgtccccccggaaaggggtgaccttttgctgtgcttgatgttgcatcagcagcctagggttctgtttagactaaaatcttggccagagctccttgccatctgctaagaagactggggctgagtagttaagccagccttctgagaggtggctgttggtcaggacgggaagctggtgaccttggcatgtcttggcagcagctagatcaggccctcggcagagacacaggaagcggaactgctgtgccttaacttggctgcggagctggagctggagaaggcagcatactgaccagtggctttttgattgattgtttgttatgaggtggagttttactcttgttgtctaggctggagtgccgtggtgcgatcttagctcactgcaacccccgcctcccgggttcaggagactcgcttgaacctgggaggtggaggttgcagtgagccgagaatgccactgcactacagcctgggcgacaaagtgggactgtctcaaaa

SEQ ID NO: 175716 - DNA, 901 bp, Homo sapiens
aagatggcggcgcgctgggagcgtatcatctgcgtttctaggagcttcgctatgcggctgctttaagattctagggttgtacaggcccacgccagacacgacgtctggcaggaacctcggcctcagagatggctctgagtaaatcaatgcatgcaagaaatagatacaaggacaaacctcctgactttgcatatctggcatccaaatatccagattttaagcagcatgttcagataaatctgaatggaagagtgagccttaattttaaagaccccgaagcagtcagagctctgacgtgtactctcctaagggaagattttggactttctattgatattccattggagagactaattcccacagttcccttgagactcaactatattcactgggtagaagatctgatcggtcaccaggattctgacaaaagtactctccgaagaggaattgacataggtacccaaggacgtgcttgtccagtagcactggagccaggataccctcgggcaaaaatggcacgggggcatcttgcatctaccccttacttggagcaaccttgaatggctggtatttcctcgcaacagaagtggatgatatgtgtttcaactatgcaaagaaaaatgtggaacagaataacttatctgatctcataaaagggagtaaactcacgaaatcctcgaagacctccgcctagttctgttaatacaggaggcatcacagagatcatggcagaaggaggtgaattagagtttgttaaaaggatcatccatgacagtctacaacttaaaaaaagattaagctggagtgcagtggtgtgatctcggctcgctgcgacccccgcttcctggattcagcgattgtcctgcctccctcgagagtctccgtcgaactggggatcctc

SEQ ID NO: 175717 - DNA, 184 bp, Homo sapiens
tacaacataagtaggctatgaaacatgtaaaataaataatcaaggtttaaggactttcattttggaaagctgataaatgaccagatttttttaaaaaagggataaaccccaaattcctgggaaagcagtcggttaatagaaaagcttgaagtaggtctggtataaaacaataggtactatctgc

SEQ ID NO: 175718 - DNA, 398 bp, Homo sapiens
tatcttccccagatagtactttgctgttcaaaatatagtaattaaaatcatgcactagaagaacactagaaactttgtaagaactcaaattaattgtgatttctttttgtctggtagattttttttggaaaacatacctttgcttttactatttatgataatatattagtattttaatttctaattggctgttgtgcaataaaaaatacacatattggtctctgccccccagtccctggcacagagttcttaaaactcttgtagtttcctgagcaataggagtgctaggagaatctttcattctaatgtttggtttctgctctggttcttgaaacagagttcttaatactctgttagataggggtgctaggagaatcttttgttctaatatttggtct

SEQ ID NO: 175719 - DNA, 169 bp, Homo sapiens
tgatgtgtcagtaatatctaaagacaattggcccccatcctggcccttgcaattaacttctgcgtacttactgggagtagaaacagctcaaagtgttcaacaaagtgctgagattttaccttgtcttggtccggatggacagtcttgtacttttcagccttatgtcgca

SEQ ID NO: 175720 - DNA, 387 bp, Homo sapiens
ggcctccccaagctcatgtcccttgacaccacgcaagccagggctggcagaaggattgcaggtgcactgctggacaactgcacccggtcccactctgtcactgaccagcagcgtgacgtgggcagtgtcttcatctctcgtgcctcagtttcctcctctgttagatgggggtagtgctgctacctccctccctcctggaagggcgctgacaagggagctgaggttcaggaatctctcatggtgacccagagaggagctggcgtccaacagcacgtgtgtccactttttgtgacacttacctgtgccactgcaggtcaggggcttggccccgtgcacagtaagtgcttacagttagcatcattattcagggtggactatgagtgctct

SEQ ID NO: 175721 - DNA, 337 bp, Homo sapiens
ccaccattcggacatggtctcaataatcttcccgagctcggccagctcacaggagctcaagcttacaagtagttggtgtgtaatttgcatggtcagtagagacaaagaaaggcttcaaagccactgcacactcctgctgctctccagagataaagcgaggagagggtgacgatagccaatcagggcccacgccagtttcccagataggaaccatggccgataaacccgagaccacaggtgttccatccctgctactcagcccaaagcaacaaggaagcctgaggtgacaccacaaaatgcaaatttatctccaacgctgtcacttgttaagatagca

SEQ ID NO: 175722 - DNA, 258 bp, Homo sapiens
tcacaggacttttattcttccagagacttaatcttatatggttatgagatttaccaatttactgggcaggatgtaggtctttggggatcttctgatctcacttggttctgttctgagtattactgctttgcttcttgttcatttttaatgaacacattggaacattgttttccttttttttttgaggcagggtcttgctctgttgcccaagctggagtacagtggcatgatctaaatgcactgcaacctctgcctcca

SEQ ID NO: 175723 - DNA, 556 bp, Homo sapiens
gtatcaagaaactcagaggtacaataaggattgtccacagtgatccaacatttaaaccagcagagctaaaagcggaatcctgagttttgtcctgtaagcattataccacatttgtatttatatgtgtatatatatatgtatacatgcacatataaataaaatatttttattatttatgtatttatatatagaaaataaacatatgtatatatttgcttctaaatgtaaatatatatctggattatgcgtatatataggaacagagagatagttttggccgggcgcggtggctcacacctgcaatcccagcactttgggaggctgaggtgggcagatcacgaggtcaggaaatcgagaccatcctggctaacacgatgaaaccccgtctctactaaaaatacaaaaaattagctgggtgttgtggcgggcgcctgtagtcccagctacgggggaggctgaggcaggagaatggcgtgaaccaggaggcagagcttgcagtgagccgagatcgcgccactgcactccagcctgggtgacactgtgagactccatctca

SEQ ID NO: 175724 - DNA, 642 bp, Homo sapiens
gcctgtgacctattattatcagtgccattgcaggataatgttatagaaatgtgatattgaaaatactcatctgtttaatagatatattcaaaacttcccgtggtagacagaataatgccccctcccaaaaaaatgtccatgccctaatcttcagaacctcttaatatggtagattacatggtgaggagaattaaagttgcagatgaaattaaggctattaatcagctgaccttgagatgaggagatgattctagattatccaggtgggcccagtgtcatcacaatgtccttataagtgaaggagagattcagaagaagggcaggagttacagtgatgcagtgtggcgcagactctaccagccattgctggcattgaaatggaactccacaaaccaagaaatgaggacagcctctagaagcagaaaaaggcttgaaatgtattcttccctggcatctccagaagggagtcagccctgatgataactttgttttagctcagggaaacctatttcagacttctaaactccagacctataagataataagtttatggtgtcttaagccgagtttgtgaataatttgttacagcagccattaggaatgaatacgatggaaatatttatgtaataagatctttggaga

SEQ ID NO: 175725 - DNA, 352 bp, Homo sapiens
gcttatgctcctctgcagaaccactggtcttgagctgaaaggggatcaggccaggtgctgagtgggatgactttgtgattttgagaccgagcatgtgtctgtgtgtgttgtgggggggatgctttgtggatgtgcatacataccagcaccttcaagaatgcgacttcttctccccctaagttccaggagatcctcacaggttctggctttgtgcctgaaaattttgggattatggaattataaaattttatgtcttgcctgaccatatagtcagatcttcagcattctcaggggcagtgtttctgattttctcagccattgcccttgccttcccaaataatcaagattatta

SEQ ID NO: 175726 - DNA, 368 bp, Homo sapiens
tggccctcacacctggctgtcatagtgtcaaaggaagcggatttaacacagaaaatatattggaaaaatttttcagaagtgggaaatagtaggctgcaaattatgagaaaagatatgaattgatggcgatctggcccaaggtgacatgactaagcacagcacatctctgaccttgctggtttctggccaccttctctgagagctgggcagtgtgactcctaacctactgataggactccaagggctctttaaattacttcaagctagacccacaatgctgggtagaggatggatggtcgggtagtgaccctggtggagatctcaggtatgcagccagccatctgattagtaactggctgggtatctat

SEQ ID NO: 175727 - DNA, 446 bp, Homo sapiens
ctgtctctgtctgtcttggagcacatcctgccgttcttctgcaatagcatcctgctataggggaagaccctgctcccccgcattcaaacagtggactttcagtggggctgctcatcccagaatcctcacaccctgaaaacaggccaaggcctgggatccagtcccacgctggccacagcgacaggtctagggataactgcaggacccacaagggccagccacagtccttcctcaggatttttctaggtggattgttcttaaaggttctattcctcttttgactgtgtgaggctgtgtccccagaaaggcagtctagactgccctctgccatggggagcagctgagggatggaggcaacatcccagggcactggagccaagaagcagaggggccctgaaggagcaccaggtacctaaggctactctgagttcagtttcagttcctga

SEQ ID NO: 175728 - DNA, 397 bp, Homo sapiens
ggaattaggctggttcaggtgaggagaggagaggaatgaagagagggtatggatagctttgtgatatggacactgagtaggcacttgaaggagtagaagacttaccaaggtaggtactggtggtggcaagataactctagaccccattcagaggagtttagattggagggagggagatactcggaagcgtttgtgttggttccttgaattccatcctatatctttgatttcttgaatttaatttctaccaggtactctgcctagatcagttcctgttggcagttttgatttgactggatgttttaacaagtcctcttaactttgctttattctaatctggttataatattatggaatcttaaaaatcttaaggttagaagggcccatattcacaacc

SEQ ID NO: 175729 - DNA, 629 bp, Homo sapiens
ctattggctccattcatcaagaagtagaggtgattcctgctcttcctctttgaacttgggccagccttgtgatttgccttgaccaactggacatggaggaagtgatactgtgccggtgcttagcccggccttttagaggcctggcatcttcagctctctctcaggagaatacttgtacctggatcttcactaggggtaagtccttgttctcgattttaaacatttatttagccaactaagtgctctattaattctagttgaaggggagatgcagagacagtgttctagttgctaatgctgtgtgagaaagcaccccagaaggtcgtaggtgaaacaactatcttaagatgctggctgatcggggctggggcattcagaagggccaaagcaagagtggcttgtccctgctctatggttcttggataactcaaagggctgggggctgagagagtggaggaaggaggacacacttccagatggcttgcttgttcatgcacgtggttatgcaccgggcaggaacagggacagccagagggccaagctcaaactgacagctaaagagcccagaggggcagtccttgggggaggcggtgcccactgcctgccttatagaccgtatccctaccatc

SEQ ID NO: 175730 - DNA, 652 bp, Homo sapiens
cttggcctcctactcaccaagtccaaaggttgttgacaggcctaattcccatgccccttgtagagtttgactttcttgaccagtttcccattctcagaacctcatcttggcttgatgttctggtctctcccctcccctccatctgtttgtctccagtttggtttctctccctcctctgaatttctgtagctcatgatctccatgctctgacagcatttgttactttctgtatcgtgccttggtttacattggtgatttatatccatgtcttaactcctgtgctagatagactctcagggtaagatccaattcttgattctcttctttattcctccaagtacctaggataggcatatagtgggcagacagacattggaatgaatgaatgaatgagcaaacaattttggggcatttgttataagttaattgcttagcagtgttctctaagtgtgatccacaggccatctgcatcagattcatgtgtgtataatagagtgttttgttacaaatgcagatttcagggccatacccagatttattgaaccagaatctctgagagtttacaattttcagtcacaccgctccctccccatgttgttcactttaaaatctgagaactcctggtttcatggacaataaaccaacattataa

SEQ ID NO: 175731 - DNA, 182 bp, Homo sapiens
acctcattgtaaaaaaaaaaaaaaacaaaacacacaaagataatgttagatacttctggctttcatgtgattgaggctctgggctgagagaatgttcagccctttcctataatatgtgcttctgtattacaactcatcaaccaaaggtgtatgttccaaatttccacttgttgccattaaca

SEQ ID NO: 175732 - DNA, 159 bp, Homo sapiens
cagggcgggggccagaattgacacacacaccaccacccattccatcactgtgttgctgccatagctgaggtaggagtcgaggcccatctgattcctgagcccacattcctcctcccagcagataggacagagaatacaaatcagaggagcctgcagagc

SEQ ID NO: 175733 - DNA, 516 bp, Homo sapiens
gtgttttgtgttaagatgagctttaaagcaactctgaaaaagaagagggtgcctataagtaattcatagactgtttaaacaatagtagaggatctaagcatagatcccaagaggtaaagggaatctttatcactttgggaacttttactgataaatagaaattactgtcagtacagtccacaaatatgttgtttatcagccatctttcctccctgtcttcatctagcactgtagcctgtgttccacagaaaatatagtcaataaaattcaacattctttactagcttactctaatttgtggttggccataaagtattcctggtagagataatagagataatatttaactggccatgagaaaggaaacactatcgtatatgatacacccctttttctactcattccaacaacgatgatacagcacgtttccttttgaagcacgtgttttttccttgagtgaccagttcaaaagatgatgacagttaatatcttgttactacagaatttgtactcaaa

SEQ ID NO: 175734 - DNA, 393 bp, Homo sapiens
ggattccaggcatgcaccaccactcccagctaatttttgtatttttagtagagacggggtttcaccatgttggccaggctggtctctctcctgaccttgtgatccacccacccttgcctcccagagtgctgggattacaggcgtgaggcactgcgcccggcctgcttatattttttcattgtccagaactcatctcgtggccttctctggagcaaaggggtggcaagtgtagtctgcagtatgtccaggaaagaggaatgtggaacaggatttgggaacacatagtactgttgctgccaccagcagttacaagctatgaactgaatgaatctatacatacagccatgaagacatgtctttaaaacatagttttgagttttaaaaaaaggtagg

SEQ ID NO: 175735 - DNA, 157 bp, Homo sapiens
gcgacttggctcttttgttgttgtcgttaaaaaatattgaggcaaaatttacataacataaagttaagcatttaaaagtgaacacttggccaggcgtggtggctcacacctgtaatcccagcactttgggaggcctaggcgggcagatcacgaggtc

SEQ ID NO: 175736 - DNA, 523 bp, Homo sapiens
agtcagctttggctgaagggcagggctggcacacagctggcagagccaccccatccaaaatccagccactgtgcctcagcagggctgtggtttgggggtcggggggcgctccccacaggataaggagcagccagggcaggcagatgacactaccactactagctgcatctggatctattcacttattcaacaaaggtttattacacccatattctatgccaactactgtactagacttggaataatggagaaaattcaggcacagtccttgctcttagggagctcacatgattactcattgatgaatatctctctcccctgatagactgcaaatccatgaggacagggactctgtcttgttctgtgccatagttccacagcattccagcatgatgtctggtactcagcatgcaaacagtgcgtattggttgaatgaataatagtacagctaatagcagctgagagcttcctctgtgctagacacgattctaggtgccttccacactttgacaaccttatgcag

SEQ ID NO: 175737 - DNA, 160 bp, Homo sapiens
ccaggttggtcttgaattcctgacttctagtgatctacctgcctcaacccccaaagtgctgggattacaggcgtgaaccactgcgtctggctgagctttctatgtttttaatactcaacaaagcttccatcataaattatgaacgtatgactttcaggca

SEQ ID NO: 175738 - DNA, 521 bp, Homo sapiens
gggcctggtagggggtgattggatcttggggtggatttccaacttctgttctctcaatagtgagtgagtgagtgagttaccgtgagatctggttgtttgaaagtgtgtggcacctctccgcttctcttgctcctgctcccatcatgtgagctgcctcgctcctcctttgccgtccccatgaatgtaagtttcctgaggctttcccagaagctgagcagatgccagcaacatgcttcttcctgtacagtctgtggaaccgtgagccaatgaaacttttttctttatagattacccagtctcaggtatttctttgtagcaatgtgaggacagactaatacatatattgtaggatttttgtgaaaattaatacaatgataaagggtctggcatgcagcaagaacttacaaatgcagggtctttgcagtcacttggaaagcacttctctccacactaggaaattacaaaatggctttcactcccaagaattcatagttctatgtctttacctgatcaaacatgaa

SEQ ID NO: 175739 - DNA, 515 bp, Homo sapiens
gatggagtgtgtacccttagacctggagtccagcacgcaggcccctgcgggtgtgagatgggctggaagcttgaagagaattcgacccggagggagaagcatgccatcttattaactgcaactttacttcaagaaatcacgcatttgacctgagatcagtatgtcctgtatctggctgcaatctgcctcctcccctggagcctagggaatggctgactctcatgcttcttgccctggatgaccaaaggcccttggctaatattttttctgtgaagcgacagggttcacctgtgcaagagaggacagaggcatctaagaagatttccaatcccgcctgcacatggcccttctcctgcctggaggccggtgtgcagccctgcctggggggagaggaggcatcagagggatgctgaaggttcctttggatcctttgaccttttcccacatagactctttttttgataccaagactaatgatctggtaaccctccagaaaggcatccaggaacaggggc

SEQ ID NO: 175740 - DNA, 322 bp, Homo sapiens
cagcgttagctattccctgcctatcctgaccactgctgtcccctgcacctatcctcatgcttgtcctgccacccggaacccactgttcagctgcagacctggacaggcaggcataggaaggcataaggacacagttgacagatagcaacaattctagattgagacaggcagtgcctctgacagagaacctgggaccagctgctggtcctggaggaataatgagcttggatgggggacatagagtctgagatactgaaagtgaacgcatccacatactctgggctggagacagggaggggcagatcggcagagcagagccaaa

SEQ ID NO: 175741 - DNA, 294 bp, Homo sapiens
caaatactagtcatttgaaattattcagtaaaagaaataaaaaggaatgaaaaatgcttatgcgattgatgcaacaccatgaagagtagtcatatatgcactatgggagtctcagaaaaagaaagagataaaggggaagaaaactaacttaaagaactagatcagtctctccttatctgtagttttgctttccttggtttcaggtacagtacaatgatatgttttaagagacagacaatgaaagagaacatgcaaatattgacataatttttattacagtatattgtcatagtt

SEQ ID NO: 175742 - DNA, 1028 bp, Homo sapiens
atgctgaacatatttaaatgcaaatctaaataaaatagtaaaagcggaattatggtagccagcatcctggatggccccaaaggtacccagtatgtggtattcacaacactgtgtagctgcctcctatactgaataggattaacttgtatagcaataaggtactgcggaaatgatagagtatgagatagatataaaagacactgtggcttccagcttatgcgttcttgctgtccttttgctctggagaaaaccagttgacgtatcacagggacacttaagaaaccccatggagaggtctacatggtgagaaactgaagtctattgccaatagccatgtgagagccacgttggaaggtgatcctctagtccctgttatgccttcaaatgatagcagccctggccaagagtgtgactgcaacctcaagagaccccaagccagaacttcccagctaagccactcctgaactcctggtccacagaaaatggtgttaagataataaatatttatttctgttttagggtaatatgttttacagcaatagataactaatatagaaatgaaggttagagaatagaaaatagactagctcattgattgcctcatttgtgataactgagagataaagggtgtcatttcaagctgaaaatcaaggggaagaaatttagaaatgtttaggactacagccaaggcaggaggactgccttgaggccaggagtttgaggccagattaagcaaaagaatgagaccttctctaaaaaaaaaaaaaaaatgaatacaaatgtaagtcaaacagggcaaaatgtcaattaaatttcaacatacaagcaaaaagtaggaaatttaaaatgacagcacttagcaggaaaaattcaaattcctataaataaatctaacaatatatgtaacatacaatatcttttgtttgttggtttgtttttgagacagagtctcgctctgtcacccaggctggagtgcagtggcacaatctcggctcactgcaacttccgcctcccgggttcaagtaatt

SEQ ID NO: 175743 - DNA, 224 bp, Homo sapiens
tcttcccagttaaaagtgtacaaacccctacaagtcactttatctttctcggtcttagtttcttatgtgccatatgagagaaataagatgatgggtaagatttcttctaattcctagactacatgatattacagaacaggatccctgcctagtttgagaagatatacatacatacatacatacatacatacatacatacatacatgcttaaacaagtgccagtg

SEQ ID NO: 175744 - DNA, 787 bp, Homo sapiens
gcatagaatcttcaccctacgtttggtatactttcccaaacctctctcattcagtttttctctgcttaagtctagttctttcttcaggtttcaacttagattcttctgggaagcagaagaatctggccatcttccattcccatatgttaaccctttatatgtgctcatataaaaatgcatattagttacttaaataatttgacaaaatcttttctatttatattgtgttattttccaccatgcagactgccttctattctttatcttcttttaaaattgtaaatatgcaaatgcaacctattttaaaatatctatttctttcatagtcctactataatctgccttccacagtctcaagagtaaaggaacacctactatatgccaggcactgtgctagactatctcatttaattctaaaaaacaaaaaagacggtaagacctgtaccttcaatttgtaaataaggagaccaaggctggtggagtgttgtgtggtggtcaaaataacatagtgtggatccaggcacggtggctcacgcctgtaatcccaacactttgggaggcagaggtgggctgatcacttcaggccaggagttcgagaccagtctggctaacatggtgaaaccctgcagatcacttgaggccaggagttccagatcagcctggccaacacggtgaaaccccatccctaataaaaatacaaaaattagctgggcgtggtggggggagggtgcctgtaatcccagttactcgggaggctgaggcaggagaatcgcttgaacctgggagg

SEQ ID NO: 175745 - DNA, 639 bp, Homo sapiens
gcttgaaccatggcacctggcctttttttcattttttaaataaaaagctgccaggagcagctagcagtgctgttcagggaaaagaacttggaaaaagcacaggaggaaggaaggttagaagcaaacacagaaaagctacagagtaatgggacatgctacagaggttatgtgagaaagatgggggaattttaagtgggcaagtagaacaattagacatattttagaaaaatcaccctaaatggtgacaaacatttgtcctctgaaggagaatttgatgggggttattagctctgatttatagatgagaaaataaagctgctagaggttaaatgatctgcccaagattatagtgccatcaagaggcagagttaagatttgaactcaatggtgagactcaaaaccaagcttttattacagcaaagaaaactgtatgactatcacaaatgagctgtaaaaggccttgtccaaagacacttcaaaaaatgttttaaataatggaccaagagttaacctcttgaagttttattttatttctttttatttattttttaccataaggcttttttgcactgttgaaattttctgatacaaaacttctggcatctttttatttttatttttttttgagacagggctgga

SEQ ID NO: 175746 - DNA, 253 bp, Homo sapiens
gtaacaaagcctgttccctgggcaggttaaacttgcatgcagcaacccttcaactgaaatgctttcctcatcaacctcttttgatccctaaaatgttgagctgtctctttttgggtttgttttccccaccctccatctgcctctgctgttccctgctttcttccaccattacagtctcagtcagccacagtcagcatccgagaaaaaattatttctgggctgataattttctagtagtcacacccatactcta

SEQ ID NO: 175747 - DNA, 577 bp, Homo sapiens
gagtagctgacaccacaggcacgtaccaccacactaggctaatttttgtatttttagtagagacagggtttcaccaggctggtctcaaactcctgggctcaagtgatccgcccaactcggcctcccaaagtgctgggattataggcatgagccactatgcccatcccatgtaacaaacatttatgcctggaatcttccctcgatcttctttctgcctggcagccaatttgtcattggaagtccatttctcaagcctccctgttgctgctgggcacagtgttcccccagcttattgaacttgcttctgttattggcaacaatccagttatccttgaattatcatccacactagactgaaagcctgctgaggacaggagtctgatgggttcatttttatatttccagtgtccagctcaaggtctggcacagaggacagccaatggctattaattgaatagaatttcttaatcagtaggtatttattaagcttctgttacggacttaattggtgccaggctctttgatatgtaagataaagacctcacacagttgacatcctgagcaaatactctgtgag

SEQ ID NO: 175748 - DNA, 307 bp, Homo sapiens
ataaaaagaaaggagctatcaagtcaccaaaaggcacggcggaatcttaactgtatattactcagtgaaagaagctagtctgcaaaagttacatactatttgattccaactctatgaccttttggaaaaggcaaaaactacagagatagtaaaaaaaaccaaacagttgttgccaggggtttcgggggagggaggaatgaacaggtggagcacaaggaatttttagagcagtgaaactagtttgtatggtgctgtgatggtatatacatgacatgcatttgtcaaaacccaagaactggccaggcac

SEQ ID NO: 175749 - DNA, 371 bp, Homo sapiens
tggcgttgtggaccatccgcctcgtgtagatcggctgtgatttagacttcttggccagaagtgctgtatttcatggctttgaacatccggatgaggccagatgtttggtgtggacagcatggtttttagtcaaatggaagagaatctgtgagcagcagccgtgctacaaagctgcacccggccctgcccatcagttccatgagctgtaaccgccatcggccgtgaactttctgttgtttgaaaatatcgccatggaaacatccctttgtggagcagaatcaagaatgtattttgacgtcttcgagttttacggtgggacgcaggagttgcacattttcctatgttgacagtatcgtggcctgtgtctccta

SEQ ID NO: 175750 - DNA, 462 bp, Homo sapiens
gcaggagacaacccagagtccacgcaggggtacactgacaccatgtgaggttcacgagctccaccccattcaccagactcgacgtgctcacgggaggagtggaaagccaacccccttagcaaaccagcaccccagcacagtctgctccaagttccagaacccctgctcctgtctgcagcactctgctcacacaatcctccaaatgtcagccctgccagaggctgggcgtctgcagcgctccgctcatacaatccttcaaacgtcagccttgccagaggttgggggggtttcatccctgcttaccaggaagtcattcgccctttgaccaccctgtgctagaggttagtgggggtccccgatgctcgtcctcactgcatagcacatgcttgggggcctctcgcaaccttgacctttcttgtaggtctgaggtaccactctgatttggttttgagagaaactgca

SEQ ID NO: 175751 - DNA, 481 bp, Homo sapiens
caaacagtgaggaaatgcaaaaaaagattgtaagaattttagaagagtcccagccacacagggagtcgaggggagtgtagagttccacccacccagccagtcacacacacacacatacactggaagctgggcattctcactctcacgtacacacccaggggcttggcacacacacagatgcaccttctggggcacaacactttatagtttgcaaagggccttctcatttttcatctcattgatactgaggggtggagagtttccctgaatatgacccattctagagctggcaagagatgagagtcccaaatatcttcaagaggccggggctgaacgcatgggctgggctgcctgttttctctgtgtcggtgtcagcagagctgaatggcaatagaaactctggaaaagttttaacccagctctcccagataggccctttcacccttaacaagtcacacctggactcagggacttttttttt

SEQ ID NO: 175752 - DNA, 264 bp, Homo sapiens
tattctagaggatcagggcaggtgctatgatgccaggctgctcaagggatccacctgcctcagcctctcaaagtgctgtgatcacaggtgtgagccaccactcccagcctaatttttgcttttttaggtgactttcttagaaaggaatttcagaagaggacaaagggttataaacattttgtgtatcttggaacatattgtcaattatcattctaatgacttaaactactgccagcagtaaataatggaaccatttttattaca

SEQ ID NO: 175753 - DNA, 513 bp, Homo sapiens
cttggggggcctgggtcaggtgcctgaggccagcctgcatcagaagctggctccgcctctttactgtatgtggccctgggcctcagtttcttcctctatacaatggggacaataacataccagcctcctgggaactggctgggttacaggagagcaagtctttggagctgggccggcaggcatgggggcccaaagagggtcctcagctttggatctggacgcctcttctggagatctcacttccggagcacccgccatctctgcgtggacatcccattgggccacttccctcagggggccccaagctgcagcctcctcctccccccacagccctgcctgccctccctgacccagacgccccgtgctcaagcttcctctgcctggacgctgttgacattggggatgtcccgtgcatggcaggatgctgagctacgcctttggcctttcctgctagatactactgtgacaaccaaaatgtccccgtcagcctcgggatcaacaccgtctgtcctc

SEQ ID NO: 175754 - DNA, 236 bp, Homo sapiens
aggtaagcttagtcagggctgtattccatcccaagcacatgctgtccaccttcccaggagggtatattaaatattattattactaatgataattaataccaatcattcccttgagatctcaggttagtgatacataactaagtctgtgtcatttcaagacatctcccaggtgagggggtggtttaagaaacaaaaggaagtgaactgtgtctggtttcattatgagactgggactt

SEQ ID NO: 175755 - DNA, 950 bp, Homo sapiens
atttcctcccaccccagtgaccacactgtcacctgcgacacttctgataacaggagcgggtaggtgagaggccagcagagggaccaccactctgagacttggatctgagtgtgcaagaaaccctcgacaggcctccctccatccctgctggcctacctggggaggggctcctggcttggggcctgtgaagctaaggctctgtacccaaaggttggcagacaagtcccagtgggcaaagtcctgtcggctgccaggacccccaaggctggcaggtggaacccatccctcctagcagtgccatgcgcaggtctcactgttccacactgatcctgattgaagccacatctcctcatctgcttttgtccctttgaccaagagttgattcactagcccaactaaacatgactgaggaccaggctctggcagtcccacaggggccagacatgaagcccatatttcagtggaggagggatcgtaccagcagctaaacatgcctaccgtagatagcaccagatgctaggaaggaaggaccataatgtactgggagagatgggaaaggagaggccggggacagccctgaggtgacatgtgagtggaaagagcggagtgcaaaggcctcagctatgatgagtcctacagggagagcaattcaggtagaggggttggcaaagacccaagccctacagaaagcaaacaagctggggcagcgaccatcaggggcacatggcagagaggtgggctttgtgtcccaacacagtgggaatcactggagactttgaagcatggtcatattttcaagtcacttgcagctgtgtaggagtggaagtagaagctgagtaccctgcaggtctcggcagctttgatgagaacaaggccgcttagccagggctgggtgcagaagcagtggcaaggatcccccagacctgggagacctcactgccaaccaagca

SEQ ID NO: 175756 - DNA, 397 bp, Homo sapiens
ggtgatagctgactcttgaggatccccagtgacatgtgagtggaaagagcggagtgcaaaggcctcagctatgatgagtcctacagggagagcaattcaggtagaggggttggcaaagacccaagccctacagaaagcaaacaagctggggcagcgaccatcaggggcacatggcagagaggtgggctttgtgtcccaacacagtgggaatcactggagactttgaagcatggtcatattttcaagtcacttgcagctgtgtaggagtggaagtagaagctgagtaccctgcaggtctcggcagctttgatgagaacaaggccgcttagccagggctgggtgcagaagcagtggcaaggatcccccagacctgggagacctcactgccaaccaagca

SEQ ID NO: 175757 - DNA, 567 bp, Homo sapiens
agatgaggagagtgggttggatggaggccaggtggaaagcaccaagatcatttaagaaagaatatgtttgggttttagttttagtttaggagaccagttgtgagatgatggtggtaaaaactcagatagtggcagtagggaaagagactggaggatttattggaaagtcattaaagaagaagagtgaacaggatttgatgattgatttactatggaggtggagagagagggagaagataaggctgatgcttaggtttctgacatggacaagtcagttgattttgtgccattcactgagataagcagtgctgaaggagagcaagttggaggaaaaagatgatcagttcaggtcaacagattgagtttgagacatctggatgtacacctggatgtatatgtctaattagcaaatagttatatgtagtggcgttaggaacaggcaggaaagtaagatggggatagagatttaggagtcattggcacctagagaataactgaagataggacattaacaagatgagtcaggcaaagggactagaagagggctttggccatggctcaaggaac

SEQ ID NO: 175758 - DNA, 298 bp, Homo sapiens
ctagggtgcttctcactgatcatgcctccttgaatctactctgccaccatgattcgcgccccaacacctctcggcctgctttggatgaggagggccagctatgggcctacctcacagctcctcacctcagggtagggtgttctgaatagatccccacatcagacagagctgctagagaggcagaccccatctccctattgtctcataaacacacacactcactcacacactcacacacactcatactcactcacactcacatactcttcatccagctccatctgccgtaagtccgttt

SEQ ID NO: 175759 - DNA, 2225 bp, Homo sapiens
taaatgaaagcaacaggagctgctccggggactgcttttgccagcacccagaatcagtgctcaggctcagaaatcctggatagaaagagcattttataaaagagaatgtgtccacatcatacccagcaccaaagacccccataggtgttgctgtgggcgtctgataggccagcatgttggcctcacccccagtatctccgtgcttcagaatgagaaaaatgaaagtcgcctctcccgaaatgacatccagtctgaaaagtggtccatcagcaaacacactcaactcagccctacggatgcttttgggaccattgagttccaaggaggtggccattccaacaaagccatgtatgtgcgagtatcttttgatacaaaacctgatctcctcttacacctgatgaccaaggaatggcagttggagcttcccaagcttctcatctctgtccatgggggcctgcagaactttgaactccagccaaaactcaagcaagtctttgggaaagggctcatcaaagcagctatgacaactggagcgtggatattcactggaggggttaacacaggtgttattcgtcatgttggcgatgccttgaaggatcatgcctctaagtctcgaggaaagatatgcaccataggtattgccccctggggaattgtggaaaaccaggaggacctcattggaagagatgttgtccggccataccagaccatgtccaatcccatgagcaagctcactgttctcaacagcatgcattcccacttcattctggctgacaacgggaccactggaaaatatggagcagaggtgaaacttcgaagacaactggaaaagcatatttcactccagaagataaacacaagttttcatagttacaaaacagctcatgtggaccttcaggataaaagacaggtgaagactgccttagagcaagcagagtggcagccgggaagaggactgtttgatcatgataatctcatgcaaagtacataaaggggtatatatatgtatgtatatatgtatgtatgtttatatgtgtttatatgcatacatatacatatgtgttttatatatatatatgtatatatttttttttttttttgagacaaagcctcactctgtcactgaggctttggtgcaatggcaccctcagggctcactgcagcctcgacttcccaggctcaagtgattctcctacctcagggtcctgagtagctgggatacaggcacatgcatcaaaccccactaatttttaaaaatatttttgtagagacaggttcttgctatatttcccaggctgatcctgaattcctgggctcaaatgatcctcccgcctctgtccctcttttattctctcttcctctctttcacagatgccctctctctgctttctttcattctcttttattctctctctctctccttcctcccccataccacttccttccctcttcctggggccatgtgatctctcccctccatggtaccctctgctcctttgttttctacctgcatatggcttttttgttcattggcttaccttcctcacatggttggtctggaggaccaccactaacagaggcttcattccccaagtatgcatgccctggaagcccatctcccagttactggccttgggctcaggatctccacttcaatcccaggaaagcaaatctggctcactgcaggtctgacatccatgtaagtccagccagctttgaaaaaagtcaagcagggctgcgccttctatgcagtggatgggtctgttctctgacaggggagaggggatagggcggacaccatgagagttttcagtacacatgccacagtgacctctttggccagcttaaaggatttcccattcaatctactcatccactgcccagcttctgtcctttgtcctccgattactagatagaaaagcaaagcaagaaggcaatgccccaaaagaaggccagtcgatgggcattaatacaggattgctgtgaaaatgcctcgagcactgagaatgcacaaaatagatttgtttagctgtattgaaaacaaacagaaaaaaatacagtttgccatattaatttaatatattctgcattctcagtccctaggaaaagatacactatgcaccatcagttttcaattttttatcactgtgtgagggaggcattctaattaatccaaactctatattttcagtgtcttgacatccccatatctccaccaaattagc

SEQ ID NO: 175760 - DNA, 1288 bp, Homo sapiens
taaatgaaagcaacaggagctgctccggggactgcttttgccagcacccagaatcagtgctcaggctcagaaatcctggatagaaagagcattttataaaagagaatgtgtccacatcatacccagcaccaaagacccccataggtgttgctgtgggcgtctgataggccagcatgttggcctcacccccagtatctccgtgcttcagaatgagaaaaatgaaagtcgcctctcccgaaatgacatccagtctgaaaagtggtccatcagcaaacacactcaactcagccctacggatgcttttgggaccattgagttccaaggaggtggccattccaacaaagccatgtatgtgcgagtatcttttgatacaaaacctgatctcctcttacacctgatgaccaaggaatggcagttggagcttcccaagcttctcatctctgtccatgggggcctgcagaactttgaactccagccaaaactcaagcaagtctttgggaaagggctcatcaaagcagctatgacaactggagcgtggatattcactggaggggttaacacaggtgttattcgtcatgttggcgatgccttgaaggatcatgcctctaagtctcgaggaaagatatgcaccataggtattgccccctggggaattgtggaaaaccaggaggacctcattggaagagatgttgtccggccataccagaccatgtccaatcccatgagcaagctcactgttctcaacagcatgcattcccacttcattctggctgacaacgggaccactggaaaatatggagcagaggtgaaacttcgaagacaactggaaaagcatatttcactccagaagataaacacaagaatcggtcaaggtgttcctgtggtggcactcatagtggaaggaggacccaatgtgatctcgattgttttggagtaccttcgagacacccctcccgtgccagtggttgtctgtgatgggagtggacgggcatcggacatcctggcctttgggcataaatactcagaagaaggcgggtaggtaactttccaggccccatggaagaaccctaaagcctgtttggaaacgagggtatgagtggattatgttttcagtagctcaaccaagacctcaaatcaaaacaagctatgaacaaattgtctaaaaaatgtctgtcatgggagggctgtggtgaagaacagagaaacatattctaaatgtcctgtgaagtgggaaattctatgaaagctacacggataataaaaagggtgaggaaaagagaggaaatca

SEQ ID NO: 175761 - DNA, 933 bp, Homo sapiens
taaatgaaagcaacaggagctgctccggggactgcttttgccagcacccagaatcagtgctcaggctcagaaatcctggatagaaagagcattttataaaagagaatgtgtccacatcatacccagcaccaaagacccccataggtgttgctgtgggcgtctgataggccagcatgttggcctcacccccagtatctccgtgcttcagaatgagaaaaatgaaagtcgcctctcccgaaatgacatccagtctgaaaagtggtccatcagcaaacacactcaactcagccctacggatgcttttgggaccattgagttccaaggaggtggccattccaacaaagccatgtatgtgcgagtatcttttgatacaaaacctgatctcctcttacacctgatgaccaaggaatggcagttggagcttcccaagcttctcatctctgtccatgggggcctgcagaactttgaactccagccaaaactcaagcaagtctttgggaaagggctcatcaaagcagctatgacaactggagcgtggatattcactggaggggttaacacaggtgttattcgtcatgttggcgatgccttgaaggatcatgcctctaagtctcgaggaaagatatgcaccataggtattgccccctggggaattgtggaaaaccaggaggacctcattggaagagatgttgtccggccataccagaccatgtccaatcccatgagcaagctcactgttctcaacagcatgcattcccacttcattctggctgacaacgggaccactggaaaatatggagcagaggtgaaacttcgaagacaactggaaaagcatatttcactccagaagataaacacaagatgcctgccgtttttctctcttgactcccgcttgttttattcattttggggtagttgccagttagactcagt

SEQ ID NO: 175762 - DNA, 442 bp, Homo sapiens
acataccattatacatggtgcttttaacatgacacagtcaagctattggctcctaatcatactaacaaattattatgcttataagaaaaagagtttctagttaaaaaaaattgtatttattctttttatagacattggatgctttttgttttttcatatgaattggagtaagaaatgcaatgctagaattcatatacaaatctggccaatgcatctggcattacagccatgagtttatgttttctcctaaatacaagtagtttgtatagaaatgtgtcaaaattttatattcaatttatttaacctcgggagaaaccattaccacagttttctttagaatgatgaaaaggtatttgctttaaaagaaaaaatcaatgcttctcttttttttttaggtgttattcgtcatgttggcgatgccttgaaggatcatgcctctaag

SEQ ID NO: 175763 - DNA, 171 bp, Homo sapiens
gttctctctctctctctctctctctctgtctttctgtctctccacctctttctctctctcctgtctccctttgtttcccctcccttctctcttcctctgtccctcttttattctctcttcctctctttcacagatgccctctctctgctttctttcattctcttttattct

SEQ ID NO: 175764 - DNA, 4452 bp, Homo sapiens
  misc_feature (1)..(1): n is a, c, g, or t
ngcccgcggcgaggagccagcgagagcgctcggcgctgggctgtttcccggccgagggaggcgaacttctcatggggaagaagtggagggatgcggcggaaatggagcggggctgctccgaccgcgaggacaacgcggagagccgcagacgcagccggagcgccagccggggcaggtttgccgagtcgtggaaaaggttaagttccaagcaggggtccaccaaacgctcgggactcccgtcgcagcagacgccggctcagaaatcctggatagaaagagcattttataaaagagaatgtgtccacatcatacccagcaccaaagacccccataggtgttgctgtgggcgtctgataggccagcatgttggcctcacccccagtatctccgtgcttcagaatgagaaaaatgaaagtcgcctctcccgaaatgacatccagtctgaaaagtggtccatcagcaaacacactcaactcagccctacggatgcttttgggaccattgagttccaaggaggtggccattccaacaaagccatgtatgtgcgagtatcttttgatacaaaacctgatctcctcttacacctgatgaccaaggaatggcagttggagcttcccaagcttctcatctctgtccatgggggcctgcagaactttgaactccagccaaaactcaagcaagtctttgggaaagggctcatcaaagcagctatgacaactggagcgtggatattcactggaggggttaacacaggtgttattcgtcatgttggcgatgccttgaaggatcatgcctctaagtctcgaggaaagatatgcaccataggtattgccccctggggaattgtggaaaaccaggaggacctcattggaagagatgttgtccggccataccagaccatgtccaatcccatgagcaagctcactgttctcaacagcatgcattcccacttcattctggctgacaacgggaccactggaaaatatggagcagaggtgaaacttcgaagacaactggaaaagcatatttcactccagaagataaacacaagtaagtagcggttgttcccactggcatggctcgtaggaggtatgctgaaagtgaataactttaagtacaccatgcagcaatgtaataaaaacttgagcaagttttaaacatgaaccattatttctaccgggccagagcttagaatgagaggaagccatccagaggagaacaattggaggcgtaagaagtaattacacaattagtgactccagcttatgtatcatgtgtgaaaaattcaactccatctggggtatgtgtatgcagataagctttctcttcagacttttccttcatcatctgcatggtactccaaggagaaaagtttctatttattaagctctttttggtggctaaacagaaaagcaaaagaatcagattttgatcttagcaccgatctggctgtgcaaaggcatttcaaagaaattgaacattcactctctaagctaaagcatcatgtgaaaatgtttctatttattaagctttttttggtggctaaacagaaatgtttctatttattaagagacaatgtttctatttattaagctttttttggtggctaaacagaaaagcaaaagaatcagattttgaacttagcaacgatctagctgtgcaaaggcatttcaaagaaattgaacattcactctctaagctaaagcatcatgtgaaactatcttcatgaaattttaattgtctgaattttaagtatgtactcattgtctctagatacatatggatttagatatagatagatgtatatgtgaaccacatagtacatagttacgctaatattatctcttaagcgcataggaatctctatttgctgtatttattgtgtaaacatttgttttaactgtgaaaggtagcatcatcaaaacagcaatgctccccagatcactaagtggcttgcatttaaatgcaatttaggtatgaaagcaatctaccgtcccgcctcacaaaataaaattctatttgtttttataaagtaacaggtgaggatgcatggcaagctcaaactttgtggtaattagatgtcccatcagggaaactttgatctaattgattgaaattccaaagtctacagttccaaagaacaaaagattccctttggctagatgagttttcagaggttctatgtactgtgattcaacttttccaaatgacttttcccttctctagatttttctctgcacctgtcccaaatgggtcttcattgccatcgccaccttcctccaaaaacagggatgttagatttatcagaccacagcttctccttcctacactctcttttctggtcccaccttttagggactgctactgtttaagtgtcatgtttcatggtttcatatttttcacagtgaaacctgaaataataaattttgtcctaggtctgaaataaaaattatattacgaaatttccttcccaaactgtctttggaaagaagaaacacaagtgttattatcccaaggtgaacatcttctggaaacaaaaagagtagaaaagactagaaaatatacagagaccagcagagatcaaatgtaacaaagcactgtgatcaatgggtggtaggttttactgtaaatactaaaattgagttccattacagtacttgatagaatgggcaaatgttatgtaatcagtgttatctatttaggtttttataagctgcagcatgactttctgtacaccatcaagttaagaacgagagcttaaataggactgagctagaagctgaagaggataagagcaaggaaacaaggaataaattcagggtcaagttcagtacttggtaataagacaaaatcggtccagagaggcaaagcatgtcattgtggcaggccctggtggcagctgggctggttagccagtagtgtgggtagcaggcctagggatgtgttcgtgtaagttacacacccagcaaaggggatgggagctggagttaaaaccccagccagagcctaggttttagtcaaactttggcaccttccagaatgcctagaggaagggggttcctttttctaattgatcatcccagagggagtacccttttgcaatgtacgtgcctgaaggggtgactttcttcagaaatgggagagctgctgcatatatggatggcactgcaggggaagtccagggaggctcatggacagtggcctggcctccctgaggagcagaggccaacagcacgcagctgaagagcagggcacggtggatggtcagcatgtcaggaatgctggaggagtcaccacccgatactagtccttgggtagatcatcagggacacatcacattccatttatggaaacaccaaacctttgctagattatcaaggcaggtagtggcacatgggcacttgacaagcaggggcccgtcaggagtctagagtacaaaggaggggagaggcacggatccaggtaccacgggacttacttttgggactgtatttgtggcttcatagagacccacaggctcctcttccagtgaatatattaataattaaatggtaagaggagagttataaaagcccaagagaaattctgaagtcacaggaagtaaaaaggcccaaggtaaggaatttgtgcatgagctgtagtgaatgtcaagagttagctcctatagcagttctacccctgaacttaatagtggtagggtgaccaacttgtctcagtttgcctgggactttgttaggtttagccgtgaaagtcccaaatccctgggccccctcagtctgggcaaactgagataatgggtcgccctacaagagagtgactcataagtcattaggtcaacttccctcattactgtactcagcccccaaagtcggatggagcagcaagctccttagagggtagggagtgacccaggctctttgaagtaggtaaagcaggacctttgaggtctccattcaattaacagcaaaaaatgctcactgagaacacaaaggcctctagaacagcactgacaaagacacaaagacaggcaaaaagcggacctggtcttaacatgaaaaacggcagaagaatacaaacctttaatgcaatcctcagtcagcaatttagaacagcaaatctactttctaacatggacactttgtggttcttccttttaaaaataaaattttatggccgggcacagtggctcacacctgtaatcccagcactttgggaggccgaggcaggtggatcacgatgtcaggagttcgagaccagcctggccaacatggtgaaaccccgtctctactaaaaatacaaaaattagctgggcatggtggcgggtgcctgtaatcccagctactcgggagactgaggcaggagaattgtttgaaccctggaggcggaagttgcagtgagccgagaccatgccattgcactccagcctgggcgacagagcaggactccatctca

SEQ ID NO: 175765 - DNA, 770 bp, Homo sapiens
taaatgaaagcaacaggagctgctccggggactgcttttgccagcacccagaatcagtgctcaggctcagaaatcctggatagaaagagcattttataaaagagaatgtgtccacatcatacccagcaccaaagacccccataggtgttgctgtgggcgtctgataggccagcatgttggcctcacccccagtatctccgtgcttcagaatgagaaaaatgaaagtcgcctctcccgaaatgacatccagtctgaaaagtggtccatcagcaaacacactcaactcagccctacggatgcttttgggaccattgagttccaaggaggtggccattccaacaaagccatgtatgtgcgagtatcttttgatacaaaacctgatctcctcttacacctgatgaccaaggaatggcagttggagcttcccaagcttctcatctctgtccatgggggcctgcagaactttgaactccagccaaaactcaagcaagtctttgggaaagggctcatcaaagcagctatgacaactggagcgtggatattcactggaggggttaacacaggtgttattcgtcatgttggcgatgccttgaaggatcatgcctctaagtctcgaggaaagatatgcaccataggtattgccccctggggaattgtggaaaaccaggaggacctcattggaagagatgtaagtcctgagtgctgtcgctttccatgacttctcctagaggggatatcagaaaagtataataaaattagtattcaaaatg

SEQ ID NO: 175766 - DNA, 476 bp, Homo sapiens
ctcccgtagacgttcaggggagcctgcattccccgtgagaaacgctgagagaggaccacgggtgtgtcgagccttgaaggagggaaaaggcggtgtaggaccggagcgagtggttgcctggggagcatcttgttggggagacagtgaacagatgagcttgactgaattgcaggactcccctgagggagtaatgtggataatgtacaccgcgcgatcacttagtctggagaggctccccgcgggttttcctcccctggaccatcatttgtagcaataaaggggttccccagccgataggaggggcttggaatgcaggaggcttgtgatgcggctccaaacagtctgcaaaactacaaagcacagataatacacaatggagaaagccgatttcatggtagacccccgaagatcattttgaaaataactctccatttaatttgctgcccttacccccctttttttaacttactgctttt

SEQ ID NO: 175767 - DNA, 305 bp, Homo sapiens
ctcccgtagacgttcaggggagcctgcattccccgtgagaaacgctgagagaggaccacgggtgtgtcgagccttgaaggagggaaaaggcggtgtaggaccggagcgagtggttgcctggggagcatcttgttggggagacagtgaacagatgagcttgactgaattgcaggactcccctgagggagtaatgtggataatgtacaccgcgcgccacaccaagcgccccacaaagcgccacgcaaagacacccgccgacccacacgaagagccaccctaagtgtccggtaccgagctcgatcatc

SEQ ID NO: 175768 - DNA, 335 bp, Homo sapiens
catggggaaaatgcagtgaatataggctttgccataggtaagacgttgcagttaggaaagtggaagtgacttagggtggagaaatgggaagagaaattggtttagtgtgtggagagaggaggcagtaagacttaactcttcccaggggtagacattaaatggctcatatttctggtcactgactgagttattttgtacctggacaacttcagaagtcagcatgtcagaatgcataaatgaagagggccatatgatgtgactctatctgacacagttttatctatttattttgaaaatggtgccaggtgtggtggctcacgcttgtaatcgcagca

SEQ ID NO: 175769 - DNA, 514 bp, Homo sapiens
ctgatcccaccagtggcagagccaagagcaggagccttcgcactgcgggtccacagctgccattgctccatcagcctccccagccctggtccctgccctacactgcagagtcctgggcacatgccccccggcacctggagcctcctctccttgcaaagttctcttggcctgcttgtggccaatttggtcatactcaggtgtaaatgactacggcaccttcaagagtcctttccggtgggcacctgcatataaagggaatccagaattttaaggaagaggcaggcacatgcctgggagcgggagaaagaggcagaggggttctcaggaccctcagggcctcagagatctgaccacagaggcaaggaccacccaggccaccaggtgaagctcatctgccataccatctacaagcctgatgatgacgatgatgatgatgatggtaactcacatttatttagcttgatctttacactttggatccaagaaccggtgactcaggcactaagtgggaaag

SEQ ID NO: 175770 - DNA, 103 bp, Homo sapiens
ggactcccccatcatcccccttcctaatcactctgtgttcccaagggtaaccacttccagaaattcacttagcctgtttaataaattgcataaagttagaatc

SEQ ID NO: 175771 - DNA, 473 bp, Homo sapiens
caatagagcaagttgaacaaagagaagggacattcattgattgcagagattactagcttctacccaatatctatctatctctttttcctgatgattagaacatcattttatcctgctaggcaatatttctagctaaagggctacatttcccagactcccttgtagctagcaatgaataatgggatataaatacaagtttacagggtttcttggaaggagttctgactcaactaggagacacaaccaagttcctctatttttctgcctggaatgtggacttgatggctggagtgccagcagctattttgtgtcataaagcaaacttgagatagaaaccaactataaagtatggtagagcagaaagttaagaagagcttgcatcctgacaactgtgaagctgctatatcagccctggagagccacccttctggcttctttcacatgccaaataaataaatgtcagatttaaacta

SEQ ID NO: 175772 - DNA, 780 bp, Homo sapiens
ttggataagttatttaacctggcttttgggtgcttctgctgtgaaagaaggggattaggttaaataattttctctgttttctactagctcaataaattatctgattctgtaccaagattacaagttaagaccaacttctttgtctggtcatctataacctattgttacaaatgaaataagaaagtatggatagaaagtattcgcttgcactgggctctttgttattttaaatatttgaaaaacttacaccaggcgactaacttttgccatggtaaagtgtatgtgtgtgtgctcaattttaagggctgagactgttcccagaaggcctgtgctggtcacaaacaaaatggaacactcaaggaccaagcactaaaaatatctcataaaaatgcttcctccatgcagtcattgaatcaggtaattactgtggcaacaacaaactaatttgaagtgttagctgttaattaaaacattgcagaggtgtatagttgttttttggtgtaagcagagcctccattcaaacttcattaatcactttacaattaatgtgttgaggaaggtcaagacaattgagatgtagtatctgttgaaagtaaacaaattccttttctctaagtaaataccatttggaaagttaagggacacactcgactcatgcctggcattgcctttgtcatccagttctccttgatgattaaatgttaaattggtactgtcattgcactgtaaaccaaaccacatagcatctttattcctcgaaatcgaacccaaacttccacg

SEQ ID NO: 175773 - DNA, 369 bp, Homo sapiens
cctagctgagaaaagtggcagcaaaatcagggctctaactggattgttcaaatggagcacataatcggagagtaaactgaggaacatcccctgacagagacataaacttgaatttaaaataatcaaaacttttctaaggaaaagtagaagttacctctgtcctaatctgattaaactctaataaaacaagggaaaaaacactaagaggagcagccagaacaaatccccacaggtattctccagttagcaaaggagacagtgcacaaatgaaatcttcagaaaaaaagatttggaaagaaatctgcatggcttttaaactcattgtccgaacttagagaatgcctcttcatcctggaaatcagaaccctc

SEQ ID NO: 175774 - DNA, 456 bp, Homo sapiens
taaagaaatacaagttaagcaattaccagttagcttttcattaggtgtcaacaacactcttagtgtcactgtaaatggttgtcaattcaattcacacccctaatgtttgtattcctttacttatggtaacatgtcaaagaaatcattcaaaggggaaaataacttatttgaatgtagcgtttcatatggaaaacctgtaagtaatccaaatgctcacaactggaaaaatggctaaccaggaaatagtatgtcgatttcgtgaaacaacagaaccccattagaaaaagccatgggcagaatttcaatgaaaagagctatggctggcatggtggctcctgcctataatcccagcactttgggaggctgaggcaggaggactgcttgagcccaggagtttgaaacccacctggacaacatagggagaccctgtctctatttaaaaaaaagaagaagaac

SEQ ID NO: 175775 - DNA, 209 bp, Homo sapiens
gggtttcaggaaaaactgatgagaattgtttgtttagactgtcagtctctctgtgcctcagtttcttttttctagaatgaaggggcaatcaccagagtgtcttgaaggtcccattcagtattccattttccctacattccctgttatgttatgttatgttatgttgtgttgtgttgtgttgtgttgtgttgtgttgtgttatgttatgt

SEQ ID NO: 175776 - DNA, 462 bp, Homo sapiens
tttgatggggcttaacttgaaagggagcccttgtctgatcaaatgacatcagacagaagggagccagtgagtgtggaaattactaataaaaatgaagaaacgtgtcttcacccttttgtgccaatttctcaaaataccacagattgagtaatttataaaaaagagaaatttaggccaggcccagtggcttatgcctgtaatcccagcattttgagagtctgaggcaggcggatcacctgaggtcaggagtttgagaccatcctggccaacatggtgaatctctactaaatatacaaaaacttagccaggcatggtgtcatgcgcctgtagtcctaggtacttgggaggctgaggccaggcatgagaaccacttgaacccaggagtcagcggttgcagtgagccaagatggcaccactgcatgccagcctggatgacagagtgagactttgcctcaaagcaaa

SEQ ID NO: 175777 - DNA, 610 bp, Homo sapiens
tttaaaaaaaattgtgagtgtcactgtcaaaagctgctagggagttagttaaaataagagcaggaaggtttcaagtgaatgtagtatcacagaattaatttctgatcttgacaagagaagtctcagctgagtggaagaaaattattccaaatgaatactactgagggaagcatgtgaggtgaggaaatagaaagtgatactataggcaactcttccaagaaatttaatttagacaacattttcaataaatttaaaaacacatttattttcaatagagacaggagtcttactgtgttgcccaggctgatctggaacccctggcctcgggcggtcttcccacctcggccttccaaagtattgagattacaggtgtgagccactggaccccgccccaagaagtttaatggtgaggagaaacagagaaataggtcattagcttcaagatcatgtgaagttaagaaggatttcgaggaatgaggtgggggtggggattgttttcaagagaagcagatacttgaggatattttcgggggatgaaaatgatccagtagagagggaaaaatgacagtagatagttctgattttagttatttaaggaacacacagaaga

SEQ ID NO: 175778 - DNA, 590 bp, Homo sapiens
agctctgtcttacttgctgttttctcgtcaccttctttgtgacaaaagtaactgtttaaggtgtctgaggagctccacaaaggtgtcttaagagacactgcaaagaaacaagagtctagctccatcgcccaagctggagtgcaatggtataatcatagctcactgcagcctcaaccctctgggctcaagcaatcctcctgtctcagcctcccaagtagctagaactacagagaggaaaaaagaactggaattggaaggacagtgagattgaagggtagcaagagaggctggagaagagaatgaagagactgcttacccgatttgaaatcagtgagatgttccttgggctggtctgaggacctgaggtcataggtggatctcctcacggagtgagggcgaagacaggggaccggtctcccgaaggagtccttctgtcccaggtctttggcaccaaatgttacacgtgtccgtgtgaagaggctttgtgtgagcaataaagctttttaatcacctgggtgcaggtggactgagtccaaaaaaggagtcagcaaagggagataggagtgggacagttttgtaggatttgggta

SEQ ID NO: 175779 - DNA, 561 bp, Homo sapiens
  misc_feature (19)..(19): n is a, c, g, or t
  misc_feature (26)..(26): n is a, c, g, or t
  misc_feature (29)..(30): n is a, c, g, or t
ggtgagtggtgggcaagtnagcgaanctnnctgtgcggcctggttcctaacagtccgtggacaggtattggtccatggcccagggatcagggacccctgttctaggtaatcagccatgtcatctatgagccaagttctttcctcctcttccctgcatccagaaaatcagcttcatcctaaggtggattctttttgagtacgctcatagggcactggatagtggaaatgtgggatacatgttacttcactgacatcctcaaaaaagaaatgttcccagaaatctttacctcattgtaccattgacctgaattaagacacatgacattccatgcagactagttttggccaaggattctgatcactagcaaagagtatgggactatcgtgattggtttagactgctcaggggacatccctagagtgaagtcggatgtgtgggagatggacagaacagagggggatggaaaaaagagaaattgagaataattcctaagttttggagtcaaataaatggatagatattgaagctatatgagaagtcttggaggaaagacccgttag

SEQ ID NO: 175780 - DNA, 337 bp, Homo sapiens
ttttagatttaaaaaaagagcgatactttctgacttctcagctaagatttttatagtggtagtggttgttgatatttggtgtgtaaaacctctttatgctgctttagctatatattttttaagctgactttactatcaaaagcacttgaaatttaaaaattatgtccatgattaaaaacttgcagaagttgcccagcaactattttcattccccagaggcagagagtataatggaaaggaggaatttggggtgagatgtctttcttgtgtttaaattttctactctgaacttggacaagtcacttatcttcctaaatcccaattcctcatgtattta

SEQ ID NO: 175781 - DNA, 633 bp, Homo sapiens
aggttcaagcgattctcctgccccagcctcctgagtagctgggattacagatgctgtgaaacatacgctaatttttcatatttttagtagagacgggttttcaccacgttagccaggctggtctcaatctcttgacctcgtgatccacccacttcggcctcccaaagtgctgagattacaggcatgagccaccatgcctggaaaatccagaaattctttttttttttctttgagacagagtcttgctctgtcagccaggctggagtgcagtggcatgatctcggctcactgcaacctccgtctcctgggctcaagcgattctcctgccttagcctcccaagtagctgggattacaggcgtgtgtcaccatgcccggctaatttttgtatttttagtagagatggggtttcgccatgctggccagggtggtctcaaactccttacctcaggtaatccacccacctcggcctcccaaagtgctgggattatacgtgtgagccaccgcgcctggtgggaaaaggcatttcaaacagaagaaacaatatacaaaagcagaggtgtacaaaagcaatgtgcacttggcacactggaatcattctgtatggctagatcatgtggtttggagggcttgtg

SEQ ID NO: 175782 - DNA, 903 bp, Homo sapiens
  misc_feature (14)..(14): n is a, c, g, or t
  misc_feature (27)..(28): n is a, c, g, or t
gttacggctaggtncgaggctgggtgnngaaaaagttctggagacacctggttgggagcaggctaaggaaacaaatggggaggaattagccacaaatcctcaaatagacagctactcaaaggcatcttcacggacaatttccaagcattggatgcagtggtgcattcttgcattgggcagtgattgtgtgcacacatctctttaagggagagtggaaatggggtgaggaggaaaatgggagtaggatagagtgtagcgttgacatttattttctttaaaggaagacccgagcatacctgagagctcagtgaagaaagtagttctggcgaatcggattaatatggtatgatcagcctttagcaagattctatcacttttcccactgatgatgtgagacggtgtccgcgtgtgtaagtgcacacacgtgtgtgtgtgtgttgcatcttctgagtatttttcaaggagaagctttttagtgatctgaaaaagtcaattcagttagccactagagttcaatcaaaaacttcggaagagtgcatcatcttaaagtacataagagagaatcatgacctccagctcagaattcaagaataggcaggtttgtgaaatagtaagctcagaaagttgagggccagtgaactcctatttcaagttcttgcgggtgtttgtacttttttcccagcaccactgaaacttgaccttcggcggcgcggtggctcacgcctgtaatcccagcacttgggaggccgagatgggcggatcacgaggtcagaagatcgagaccatcctggctaacacggtgaaaccccgtctctactaaaaatacaaaaaaattagccgagcgtggtggcgggctcctgtagtcccagctacttgggaggctgaggcaggagaatggcgtga

SEQ ID NO: 175783 - DNA, 517 bp, Homo sapiens
cctcagtgtgtgtatgtgtactctagcgttgtcccacgatgagaccccgagccatggttcctcaggatgcatccacatcattaggcagcacatgactattttagtatatcatgattttgttttcattcatctcaaataatttactaatttcccttccatcacctgttggttgtttaatttgtaaacacttcagtttgccgtgttgctagcttccctctgctgtggttggaggagacacctgctgtggatccatctctctaggcttgttgagggctgcctcccagtccgtggcccatctcccagcctgtggcccatggaggcatctggtacagaggagaatgggctcctgcggttgtaggtggagctctctgcactggtctcctgggccatgggtttatagtgctgtgcaggctgcctgttcctgtttctgtatggatcctctgcttagctgttctgttcattttgacacgtttgctagcctttaaatgtggtcagcaggtattacgcagtcttggtt

SEQ ID NO: 175784 - DNA, 276 bp, Homo sapiens
ttaaagtgcacttaagcagactttgtggatgaaatcattttgtctggatacttcatgtgaaatgtgtaatgtatcgcttgggtgaagggcaaagctcaggagttgtggctgcttatgatgctcagacacatgccaggaatacttttggagtgtccttggataatagccagacctgtctccaagtgtcttgtctgtgggcaaggaagccttgctcagaccctaaaatattcattgttacatgcgtacctccctttaagcaatgaatgaatgtttgag

SEQ ID NO: 175785 - DNA, 508 bp, Homo sapiens
ccgcgtccgagagacttagcagggcgtcaaactggagagcggaaggatggaaccttttattctcaggtggagaggattaagctttgcggtgttagcagaaaatgatcgagctccagaaaatgatttggaggtcagattcgattttaaagtagtactaacaggccgggcgcggtgcctcacgcctgtaatcctagcactttgggaggccgaggtgggcggatcacctgaggttaggagttcgagaccagcctgaccaacatggtgaaaccccgtctctactaaaaatacaaatattagccgggcgtggtggcgggcgtttgtaatcccaattacttgggaggctgaggcaggagaatcgcttgaaccctgcaggcggaggttgcagtgagccgaaatcgcgccactgcactccagcctgggtgacaggacgagactttgtcgcgaaaaataaaataaaacggtaccaatggtattacgatgtgtcacttggcctgtggaagagagagac

SEQ ID NO: 175786 - DNA, 142 bp, Homo sapiens
ctaagattctgggccatttgttactggagaataacttatcctgcacagaatgatacagatcagggttcgaatgactcgatccagttcctactgtattggccactcagctaggtgtcggtacagagagatgatgaagacagga

SEQ ID NO: 175787 - DNA, 751 bp, Homo sapiens
ctggaatctgtggtcattacacccgtataaataattttggcctcactccacattgtccctcctcttgtaactgtcattagatctattcccatatgtattttccatttttctgccaaaatatattaaagattctgtaattgctttgcaattccttctttgttagatttttaactctccagagatctggcaatttgagtgtagcaatgagtatggaagtaattaaatggtgggagaggttgttgaaaaggatcatctcattgagaagaggactacctcaagtgaagggacactgatttcctcagacaaggtagaaaaaggctgttgcttccaggaaggaaggtttggtgggatttggaggcacagctgggacatgtctcaaagccttgccttccttagtcactggtttttcaaacaactacaagtgtgtactgttatgccatgtactgccctggttttccagtgttctattttgcactggcactgaggtcattactgctttcagatcagagaattaatctcagtttccatgttttatgggatttttttttcctctagagtcatttttttgtatcaggattgagcttataaaacaaccacttttaaatatttcaggattaaagggattaatactagatttagagtttacatgaatgttgggagaactaggagactggatagtaatctggtgaaggccaagagatctataatagaaagtcatctgaagcaccaaagttggtggcttaggaaactg

SEQ ID NO: 175788 - DNA, 280 bp, Homo sapiens
gccaggctcattgaggccaggcattgccttttgttcaagcatctcagagtagtttagaaaataaaatgcatttctctgacaaccttgtgaggttttctgggcattattacccgaagctcggggctttgcaattcccatttctcagcaatctaaggataaagaaggagaaatcaaccaaccctcactgtcctagggacccctcgtgtttcctggccaccttcagatttatgtatttgtttatccccactatgtgcctctcagtagctattcaatcagtaat

SEQ ID NO: 175789 - DNA, 397 bp, Homo sapiens
tcaaataagtcacattgtttatgttggttctgcattaaaacacaagaagcacctcttttgtcctgtcatcttttgaaaaagtggttaatgagcacctatgtactgtgtaagaaagggttaaatgcttaaagttactttgagttaagtagtcaggaagcaaacacttggttaccagaagttagaatggagaaagcaactttctgtgcagtctgatacaataggaggtacctttcctttttggactatccgagacctaatcttgtcttaccgtaggtaaaaaaaaagcctttcctttttatgttttgtaagtatttgctgtaagttgttggtttgtggtagccagactaacaaagaattttgggaaaaaagtattcaggtgctagaataatacctggtg

SEQ ID NO: 175790 - DNA, 363 bp, Homo sapiens
atcacccagttctgctataatgttcattttgaaaatgagaatttgtttcattgccataaatacataaacgaacaatttgggcataacacaaactttgcctttccttatgtgtgattttgtttacaagaaacaccaggtaacacagagaactgcatccagttgaatcaagctgcacaggaatacacaaagcatacacacgcacacaccccaaacatctacagctaccccagttcaccacaggatcatgttaggagccaggcctatccacatctgctgttacaactgtccagcaaacgttttttttttgtttttgagttttgctcgttgcccaggctggagtgcaatggtgcgatcttggctcac

SEQ ID NO: 175791 - DNA, 431 bp, Homo sapiens
ccaaaaaaaaaaaaaaaaaaaaaagtctggatcaatgtacacacttttcatagcagcttctgaaagagcctgtttcttgttactgttatgatataggctgtgtctttatcagttgcaactatactttctcttgccttaggctaattccagggtcccctgggtttgggagcctatgacaccttcattagttaaataggaacatgtggggttagggttagagcatctgaatcagtgatggctaatttgaagtagaagagtgacttattttaattcagtatttattgaacagtggtgttctaggaacttttgggctgtgtcagtgaataagacaacaatccctacccacatggagctaatattctaaagaggggagacaggcaaccaatcagtaaattgtctagtatgttgaaaggtggtgctaagtgttatgg

SEQ ID NO: 175792 - DNA, 502 bp, Homo sapiens
ttgagacagagttttaccccatcccccaagatggttggagtacagtggtgagattatagctcactgcagccccaaacttctgggctcaagtaatcttactgcctcagcctcctgagtagctagtactacaggaatgtgctaccacatccccgctaatttttgttgttgttgttgttaattttttgtagagacagggtctcactttgttgaccaaactgatctcgagctcctgggctgaagcagtcctccagcctcagcctctcaaagtgctgggattatagccatgagtccctgtgcctggcctatagactttctgtttcctgccgctattggtgattgggctgaatggactagacttccttttggaaattttttatgtgcctttgtaagtatttgagcactaattctggttggtaccctactaagcattaatccactcagacatttgagtgcctctaatgttccagtctctacagaatgcagtgaagaatatgatatacct

SEQ ID NO: 175793 - DNA, 110 bp, Homo sapiens
ggacacggaaaatgagcgttcagataggtaaagggaaaaccagagactagtgtgacatgacagcatagttaagataacatattgagaagaaaaaagtcacaatgttaaat

SEQ ID NO: 175794 - DNA, 268 bp, Homo sapiens
atacagagtaggaatttccacttgagatttcacaactttgaatggatgctgtttctaatgccagttctgtgatgcttaaactagcaaaaccaaactgttcccaccagaacggtgaattcctgagggaggaaagttggagggacaaataaccggacacccagcccttgcctttcctcctgaaccacatcctatcccgagtgtcccgcccacagcccaccgaaactgatcctcgagaccaagggtcttttctagcctgatacaaggcctg

SEQ ID NO: 175795 - DNA, 411 bp, Homo sapiens
caagtagctgagaccacaggcatgcactaccatgcctggctaattttttatttttatttttgtacagattgaggggtgtccctatgttgcccaggctagtcttgaactcctgaactcaagcgaccctccccccttggccttccaaagtgtataggcatgagccactgcctcagctatacacactaatttttaaatgtaaaaaccattacacttaattttacctgattttaactggagaaaactaagtgagaattaaggaattactgaactttgaacaaacattttttcacataaaaatgttattttttccccctctatggttaagtaaagagataagaacttgctggttttcattttgtgtttttttttccaattatgtttttgtggtaggcactgttgctgttcacccag

SEQ ID NO: 175796 - DNA, 1077 bp, Homo sapiens
agcgtgcactgggcgctcctcggcgcgtctgcccggcccgtctcggctttccttctccttcctctagtcccagcgtcacaactccgccgacctcctctgccctgagagcgcgtccggtgcgggcggagtcggacggactctggcttcacgcctcggcgcgggcacaccttctcccgggcactgaggcccagttattaggggaggcagagtccttctggagtttgacccttggattccatccagagcagcctccaaaatgacacctttgaagttgtgtatcgagctgggggatgtaaagggaggagaagaaagaagatgaagagataccagccagccttaaggagtggacatcctgcctggtgaaactgaacaagacacctaccgcatatggagtttcgctctgtcgcccaggctggagtgcagtggtgccatctcggctcaccgcaacctccacctccaggttcaagtgattctcctgcctcagcctctcaagtagctgggattacaggagccctctcccaccgctcctacactgctggtaaaaggcagccgcactgcctgctggaagacctgccagcttgggcttcagagcacttctgcctcagatccacgacgatcccttctgtcatcgtgggacctttcctgggatttgatttagggcgacgcttcctcctgtctgtgtcctgagtcctgccttccctggctggtcctctttgcttagtcacccagatcattcccagacagctgcgccctggatatggctcctctcatgtgctgcctggaaatgtctcctctcttctcacctgctgagaggtccttctgggcagggactcgggcagattcattcctgcctgccccacatttccctagcccagggcctggcccgttgcagtgctgaaggatgattctggtaagaaacaaggtactccagctcacatcttgcaatgattatgcctcccccactctcccttctccttgcagttctctctcttcactgatgattttggatgcaatttaaaataaaaatattgattaaaaatggaaactatataaataaaaataaaaacacttaacatc

SEQ ID NO: 175797 - DNA, 258 bp, Homo sapiens
ggatctcctactatgtgatagaatgatggaacactctggaggtgctttgaagaccaaatgcccacaaggataactaaagcagcttttgctgtcttcttgaatcccaggattctagtttctccgaccaatgccagaggtgaacttatggtcttaagctcattcacaccctggtttaaccagctcagatttttccaatattggttagcacacatctctccttaaagttacatgctttccttcatgataagtttcatattt

SEQ ID NO: 175798 - DNA, 398 bp, Homo sapiens
agaggagaggaaacacctacagtaggtgaagaggggttggaatctggaaattagatgctggaatttgtgaagttattgtggctgtatccatttcctcttctggtgatggaaggagacctcacccagctaggtgaatttagtggacacatgcatgccttggaaaaggaaaaggaaatggttcaggtttctagagctcaacacaaggcttagatgcagaaaatgtacaggtagagagctcatctaagggaactgtggcagtagataatgaggtcctagccataggggatactctaaagctgggggttccaggaatatcttgaccctcctggaattccacaagtgtgatttgctcctctagtgcaatgttcctttttccttttgctgctcctattttggtg

SEQ ID NO: 175799 - DNA, 582 bp, Homo sapiens
cctggtgggaggatcatggccgttttagtcgttagtgctactgtaacaaaataccgcaggctggggggcttgcaagcaacagaggttcatttatgcagttctgcacgctggcaagtcggagatcaagagcatcagccgatttggtgcctggtgagggttttgaatcagccgattcggtaactcgtgagggttttgaaggtgtcctgcaaatcgctggaggacaatagtaagaacagcctgggccccaccttgacccgaggctggcgtcggaggcaccgccgctcacagtggcagcaccatctcgcattcccacccgcaatgactgagattcctgttgctccacgtcctcacctgcaatgactgagattcctgttgctccacgtcctcacctgcaatgactgaggttcctgttcctctacgtcctcacctgcaatgactgaggttcctgttcctctacgtcctcacctgcaatgactgaggttcctgctccacgtcctcacctgcaatgactgaggttcctgctccacgtcctcacctgcaatgactgaggttcctgctccacgtcctcacctgcaatgactg

SEQ ID NO: 175800 - DNA, 175 bp, Homo sapiens
aatcctcccccagtttccccaacatgtcggcccgactccctctaatcctccgaaggtgccagggcttccacctctgtgcccttagaagagaggcaggacagcacacgcagtatgtcccccacccgtccgtggtaatatttatttaacacctttactaaatcagcttgacattaaa

SEQ ID NO: 175801 - DNA, 327 bp, Homo sapiens
ggaggacccacgaggactcacccggatgggagggacggccgggaggtggaaaaacacaaccgtgagcggtgactcaggcggtttgccccgcctcgcacataaatgcagggtacctttccttcccgttattgcccttgggtgtctggctgcttaggatgcccatttgccagatggggagagtgaggcctgtagaaggtgccctactttgccgtactcaaacccaccattagtggttaaatccagggaccgcctcaaggttttctgatgagcctagtggggcctaagtgccttaaatgggccttgtaataataaacgaggtcctacagg

SEQ ID NO: 175802 - DNA, 487 bp, Homo sapiens
ccagcaagcagaaagcgccatgggactaggtcttgagagaacttgatgggaattgaaagtctttggctctatagattctctgattcagtcagcccaccttgattggttttggcacatcccccacccgcaagctggcttagatattcatggaccttagtacagaatccaaatgtcctctgtatctccaagtcagatcttccttgtctttacagcaggagtgcctgtcaaccatgtcattcagctaggcctcactggctcttcctcacacagccctcataagacatgagcaccacactagacacttggggatggcggttggagagtagtatcacggagctcacaatcgaattgtccagtgtgtagtcttaaaggcagatgcagacagaaagagctgagcgatggcccagaactgtgtccacacctggaaaatgcctttggtgttgttatatcacaacatggaaatacagttatttagtaggaggcagga

SEQ ID NO: 175803 - DNA, 301 bp, Homo sapiens
ggtagcgattgttatttagatgcaaagatgatgaaaacaggaatttaaaattcagtctctaaaatggtataaacatttatagatcaagttggattccgatttgcctcaaacttgggggcattaagaactgccaaatgggtatcataaaatttagtccacattgaatgtatcattcttaaagttgtctgccaaaggacaaagtgtaaaaaaagaggggaaaatattaattagctaacatcctgtttacatttttgttgtcagttttagtcatttgcttcactaaattctgctgtttcattgg

SEQ ID NO: 175804 - DNA, 372 bp, Homo sapiens
aaagggcaacctccctttcactgctccagtggcagccatggggaaggcagtttgtgagggcttggggcacagacctggggcaggaggcagctcttcacgttcatccctgtctctcccgggctgcccccgccagctctggctgtttagcttgagggcagcacagaggcccctgggacacctacaggccagaaagatcaacctctgtgaagtgtctagaagtatctagtgcagatggtggcggaggcagaatcgaccatcagcaaacatgagcactcttccctttctccccttccacctgctgcgggctgggctggttttctcaatacaaaattgtaagaggatccttgtcaccccagccaggtatccccaagg

SEQ ID NO: 175805 - DNA, 251 bp, Homo sapiens
gtacgctgctttctgatttttcttaagaaagcagacagcagaacactttttaaagttaattttaaatgggtatttttaaaatggtagtacattctcacagagttcaaattataaaaggatacagtgtaaattctcactctcaccccgcctcccaactattagacttgaacctcagccttactccacaagcaattctccacttttattagtgtctcgtgtatccttccagacatacttgaacaaatattcat

SEQ ID NO: 175806 - DNA, 510 bp, Homo sapiens
aaccaaccatagatttaaaatatttgagggatcctggcatggtggcacacaactgtaatgtcagcactttgggaggctaaagcaggaggatcacttaagcccgggagttcgagaccacccagggcaatgaagtgagtccctgtctctacaaaaaaaaaataaaaattaacgaggcacagtggcttgtgcctgtagtcccacctacttgggaggctgaggtaggaggatctgtggatctcataagttcaaggttgcaataagttacaaacatgccactacactccagcctaggtgacagagcaacactgtataaaaaaagaaaaaaaatatctgggggagaaaagttcaatgaagttccaaaaagtaaaacttgaatttgccatgtacagagtactacattgaattcatgtgaatgaagttatgtgtaggcattctattaggtattataagtaacccagagattatttaaagtgaatatacatatgttacatgcaaatatatatgcaatat

SEQ ID NO: 175807 - DNA, 397 bp, Homo sapiens
attaagaggtgcacttccaaatacattgtgcactgttactttaataattatttatcaaagtctgtaatacgagttgtgttgttttggtcaactctatgctgcaatgataaaacaagctttctaaccaagttaatgcttcttaaggtagaagggaaaaacatttcacaatattcacatttctaatgcagagatacacattaaggaaataaaagattgcagatattaaaaaaaaaatactacattagggccaagcactagtggtaaatgcatactaaattgtgatttataattctattggatacagatacttttacatcttttttttttttttttttttttttttttttttttttttttttttttgtgtgttttttttttttatttttttttttatttt

SEQ ID NO: 175808 - DNA, 465 bp, Homo sapiens
ttttgcagtgtgactgaaagaacaggcatcatctagtaggggccatcctacctggagaggcaacgcacaccaaagacaaactaaatggcatcaggatcacatatccaaaatgactgtgatgatatctccaaatctgctgtcaatatcttccctggtaacatatctttcaaaaacccaatacatacctatcatccaattttcccttcttgtggcatggtatttttcaataatccaatgcatacctatagtccaattttcccttgctgtggcatagtatttttcaagaacccaacacatacctattgtccaattctcccctgctgtggcacagtatgcatagtatacaagaaaattaccaaatactagttatagtataccttcacaaaatcaaaactgaaattatcatcccatttccaggaattcgcaggagggatgggggagtgtcctcttagtggtcactttata

SEQ ID NO: 175809 - DNA, 642 bp, Homo sapiens
aggtgacggtgccctgtcagcgctggatgcttactaggggtggggtcctgcttgagatcctgagttagctgcaggagatgggtccagcatgcagttgggcatcagaaagtcttggttcctccaggctcctgactgtccctatcaacccagatgtcctagcctcataggctttggcgagttaccttgcagttctaaagcttctgtttggtcatcttttaaatgatgataataactacttttcagggtgaaaagcttaaagtatgtgaaagtatctagcaaatagatggcgctttataattaggtgactaaaaacagcaatttgtaaaaaccccaaataagataaccttatccgaaagaggggctcaaaaaactgacatttgtgtgtgaatgacattgcataggacatactgtcctttaatccttaacaacctcattttacagatacagagataccaggaagttcccagggtcacaacacctggaaacaatggagttgagcttcaagtcttctgattggaaacttgtgttccttttacaatatactaccaatacaccaatatagttagtacattttatagttaaatttctgatgattctggaaagggaaataaatgatcaaaatggtaatagtacctgttttga

SEQ ID NO: 175810 - DNA, 411 bp, Homo sapiens
gtcctatgcagtacccctgttatattgcagtaaaatacacatagcataaaattgaccattttaagtgtcactgaactcagtggcattaagtacatgcacattattgtgcaaccttcaccaccatccatttccagaactttttaatcttcccagattgacactgtatacagtagtcccctcttatccacatcccaagactcccagtggataccttgaaactgccgatagtactgaaccctgtatatactgtttattcaatctgataaccaagatggttatcaaatgtcaaactggtgggtaggggtagtgtatgtatatagcatgaagatggtagacagagggatgagtgacatcccaggcaggagggagcaggatggcatgagacttcatcatactactcagaatggtcca

SEQ ID NO: 175811 - DNA, 872 bp, Homo sapiens
atccaaaccagaacaccaatactggtccaagacaattattaatcaagctatagactgcattagaatttcacattttcacaggtgttacttttcatggcggtggtgtacagattaatgtaaccaccacaatagagaaacagaactgtcctatcaccccaagacacttcctctcccatacatcacaccccccttctaccctaacacctgacaatgaacttttttttggttgatatttatgtaaacaacatttaatggtggttcacatttgtcaatttcaatctaccacgcttgatctctcaatcaaaactctgaagatccaacctctcttccctcttttatttccacacacaggggataaaggaatcaatatttgtgaagtgcttaatatgggctggcactgtgcaaggtgctctttcatggattttatttaatttcacctaattgtcctggaaggcagtgtgtgataggatactatttgcagttggggcttggaaaggtaaatgattcaccaggatctcaaccagtctgtacgctgaggagctggggcggccccgagttggtttggtttccaccacactggtctggcatttgtgcccatggtccaggggctgtgggcctgctgctggtaaaaaggcctgatacaaaactgctaaaatcactctgctgccggtgtggggtgaaacagggccggaacttggctccagttcccgtctcgattttggaaggtccgacctaactttgagtatgttacagcctttattattactatttttaaagtaggtacagactctggaagataccctgaagcttaaatgcacacaagtcattagaatccaagagacatgcccatgttgagaggcaacatgatgaag

SEQ ID NO: 175812 - DNA, 233 bp, Homo sapiens
gacccttctgggctctgttcagatgaatgaactgataaactattttaattgaatatcttattctcacagtacataatgtaaacaaaggccaaaaagcatttatagagcatgtaatgtgtggagcacagaccaggtgcattggaggcgttgaagatgactgaatgctgacctcctgaggtgttcctgaaggcagtgccacttgtagtctttaagagaatgggcaggagaggtgg

SEQ ID NO: 175813 - DNA, 700 bp, Homo sapiens
gtgagaacatgtggtgtttggttttctgttcatgcgttagtttgctgaggataatggcctccagctccattcgtgcccctgcaaaggacatgatctcattcctttttatggctgcatagtattccatgatattaagggatttttaaacattggtgactccattgtgattctaacaaccttcacacattccataaacacatatggtaacaggttctgaagctactcactactttctcttctggtacatttcattaacgatacgccaggatttttctttggcatccatgaaaagcataaagtcatttccatgaactcagccatgtaccagagtgatagaggattgtacaacttttccaaaaccaatactgctttcaaaaaatatggtgcataatgttagaattttcttaatttttgagataagcagaggaaatcagaacatttagaatctcagtgaattttgttaatctcaaatttgtgattcctttacattctgttcttagtagcttttattcaccatattaactgataaatcttagtgatgaatttaagtattaaaaactcaaatttaataaaatgtaaacataaagtacctgcatgtgtaattggcaagaacgattttcccctctttattaatgggaaaaaaacttctaaattgaataagtatacctcttcctctccatcaggtaattgaaggtaagtt

SEQ ID NO: 175814 - DNA, 432 bp, Homo sapiens
gtggattaaatatacgtctctatccttaatctcttgaaaatcgactgaaaggatatttaagggattaagaagaggcaataaccacaaaacataggagagaagaaatgacaataaggttttggaagctgcagtgcagaaggaagagaggtaaacaatttgatctacttgagagagttgaatcccaagctggcagtgtggctaagaaacaacctgacagaaaggctaaggaatgggtggtagggcccaaattaggaggactctttagcatctgttcaaaaagcagtcagacctccaaatccatcctgcacccctaaactctatgcagcctagtaactgtgtctgactcccttcatcctaacagaaaactgggaatgtattctgcaagtctctgagggatatcatgcaagattaaggatagaggggtactgagaa

SEQ ID NO: 175815 - DNA, 603 bp, Homo sapiens
tgagtgtcctgagcctgcttggccagtcagattgtccagcccagaccccatcccgttgtgctgtgcagggcctgggttccctgaggaagctggggtgggggtacaggtgctcaggacccagccgagggtgcagcccgctcagcacacccagcctgagcttttgggaagacaggcatgacctgctggcccaggattgtggggtttcactgctgagtcccacgccaggccaggctcctctctttctcagggggtcaccccaggagcgacacccccaccagaggtcccctgctccctgaggcattctatggctgggccttggagcctgagtggctctgaacacactccctaccaggatgttgaaggcctgaggcctgcagaacagagcccagggtcctggctctgattgccccaacgcagaactgcaggtctggcccaggtggtccccaggttacaggcattagaagcttgccaccccccatggctggctgtgtccccgcgggcctgcagcatgtccattcctgggtgggggtggcctggccgcctgccctggtcactgacgcgccaccgttcccttgtgtcttcctgtgttgctgccacagcgtg

SEQ ID NO: 175816 - DNA, 480 bp, Homo sapiens
ctcgtttatcctatttggaaaaagtttgggtctaagccaaccgggatcagcttagattgtgcggtctgaccccagccaataggggaaggacacaaaaacaaaaactacgttggggttaaaaacccattcctggtcgggcgcggtggctcacgcctgtaatcccagcattttgagagacctaggcgggaggatcttgtggtcaggagttctagaccatcctggccaacaccgtgaaccccgtctctactaaaaatacaaaaattagccaggtgtggtggcaggcacctgtaatcccagctacttgggaggctgaggcacgagaatcactcgaaggtgaaggttgcagttggtcaagattacgctactgcaatccagtctgggcaacaagagcacaactctctctcaaaaaaaaaaaagtaggcaaacgctaggtgcagtggctcacccttgtaatcccaacatttggggaggcagaggccg

SEQ ID NO: 175817 - DNA, 457 bp, Homo sapiens
ggtattgctattcaatcagtgtaattctaataccacattcttccagttttaatcacatctacaaatattaaaatattgagacaaattcttacatgtctcaacttccccccccccttcccacaaaattgtttggtctatcagtgtttctttaaaaatcctttgctcctttatgggaatgtccctccatgttagcacagatgtccaataaaaactcaacctgttggtctcttacttcttgtgtattctgctacatacggatgcagtattaacagcctccaaatctagagttgcctttaaaccagcgaactcagtccatacttacacccattctcattctcttatccacttacccaaaacaaaaaacccttaaaaaaaaaaaaaacccaatcaataacaatacttaagtctaaccatactcttcttcagagaaattaccttacaaagcattggaaagagg

SEQ ID NO: 175818 - DNA, 409 bp, Homo sapiens
ggccatgcctttaggagtcctgtttgctggttctttccctgtatcccaatctccaaacatcagtagggctaggactcagttcttggacagcatctcacttctgtctacactcacaccccagtgatcttatccagagatccaggggttaagtatcttctatatgttgttgacttcccaaattacagttcagccacagatctctctcctggagaggttcattccttattacatactcaacatctccacctggatgtttaataggcacttcaaacttaaaggtctcagatggctttcctgatcctcctgccctgacacccgttcctctcacagacttccccatatccataaatgacaattcccctcttgccatcgtttaggacaattgccttggaaaatgccctacctctct

SEQ ID NO: 175819 - DNA, 159 bp, Homo sapiens
gatccggggcctgcgattctgcttcttggtcctttctctcctagaaacccctcacggcctccccaccatgggttatgcttcaaagggggtgccatggacagaattctcccccatgacaggacggaagaacactgagaccagagaagtcagacctgtgca

SEQ ID NO: 175820 - DNA, 316 bp, Homo sapiens
aggaagcagtggatgctcagagaggttaggtaacgtgggtcagggacacacagccaggaaggggcagaggctgggagtgcctgactccaaattcatgcaatttctaccccaccatcttctccccaaggaaaatagtccctaatgcatgtgtgcaatgcttagagggcagtagatgctcaacagatgctgagagagtgagggagtaaatgagatatgccatgaaaaggagcccctgtggacttatgcgtgcgtttgtttaacttgtgggcaagtacttatagacaggtgcaaacaataaatctccttttgcaactga

SEQ ID NO: 175821 - DNA, 556 bp, Homo sapiens
tattgagtgcagtgtggttgggcaggtttgacttgttaactgacataatcttgccttatctaatgcatcatcactgctcactgcagcctgggcaatatgatgaaaccctgtctctaaaaaaacatacaaaaaattagccaggcatggtagtatgcacctgtagtctcagctatttgggagacagaggtgggaggattgcttgagcccaggaatttgaggctgcagtcagctgtgatcacactactgcactccagcctgagtgacagagtgagaccctgtctcaaataaataaataaatagggatagcagtatgcatctttataggattgttatgggaattacatgagtaataatacacttacattaagcctgacacctgctaagcatgcaataaatgttaactgctattattgtgcttattactgttatcaaatatgagaagcccatataagcaaactccaagatgggctgaaacatatatgtgacacaactgcttaatctaccctcatctacttccattaggtagaaggggatgggaagtgaggaaaaagtatta

SEQ ID NO: 175822 - DNA, 638 bp, Homo sapiens
atctcagttacttgggagcctgaggcaggaaatcgcttgaacccaggaggcggaggttgcagtgaaccaagatcgcaccactgcatcccagcctgggtgacagagcgagactctgtctctaaaaaatttttaaaaattgaaaatcaacaaatccaaaagtttgtcctataaaaagattgaataaaattgtaaactcatatcgaaactgttgggcaaaaaaagaaaaaaacacaaattaccaacactgggaataaaaaagggaaaatgactatagccatcaaaaagatacaaagatattatgaacggcattatgcaatatatttgacaatttggacataatggacaagtttccccaaaattaaaacttatcaaaaataacctaaaaagaggctgggcatggtagctaatgcctgtaatcccagcactttggaggccgaggcaggaagatcacttgaggccaggaatttgagaccagcctggccaacatgacaaagccccttctctgctaaaaaatacaaaaattagctgggtatggtggtgcacgcctgtaatcccagctacttgagaggctgaggcaggaaaatcgtttgaacccgcgaagcagaggttgcagcgagccaagattgcgcactgcactc

SEQ ID NO: 175823 - DNA, 624 bp, Homo sapiens
atctcagttacttgggagcctgaggcaggaaatcgcttgaacccaggaggcggaggttgcagtgaaccaagatcgcaccactgcatcccagcctgggtgacagagcgagactctgtctctaaaaaatttttaaaaattgaaaatcaacaaatccaaaagtttgtcctataaaaagattgaataaaattgtaaactcatatcgaaactgttgggcaaaaaaagaaaaaaacacaaattaccaacactgggaataaaaaagggaaaatgactatagccatcaaaaagatacaaagatattatgaacggcattatgcaatatatttgacaatttggacataatggacaagtttccccaaaattaaaacttatcaaaaataacctaaaaagaggctgggcatggtagctaatgcctgtaatcccagcactttggaggccgaggcaggaagatcacttgaggccaggaatttgagaccagcctggccaacatgacaaagccccttctctgctaaaaaatacaaaaattagctgggtatggtggtgcacgcctgtaatcccagctgcactctgtcccaaaaaaaaagaaagaaaaagaaaagaagaaaatcttaactagcccagtgctta

SEQ ID NO: 175824 - DNA, 412 bp, Homo sapiens
agcacaggtgactcgcctgaaatagctagtaagtcggggagggaaagtttgaagccacagtcccagactgcagagctgggtggctcaggccaggcgcagtacacctgctgtggcccagcctcttatctgctgcctacaggggtcagggcttggtgccctcagcacccactgctgttgcccaggtaaagagcacctttgggtgctgcccatgccacctcctatggctcccctgactcctgcggtaggtaacagggcctggtcccctggaatgggtggggtgtgtgtgccctggtcccctcactcaagcaggcccagctgaggcagggacagacccaagccacagaagacgctggcccagaaaaggcaaacactccagcagagcccctaattacggggccaatgagcgcggccg

SEQ ID NO: 175825 - DNA, 192 bp, Homo sapiens
ccaggctggtttcgaactcctgacctcaagtgatccacccacctcggtcccccaaagtgctgggattacaggcatgagccacccatgcacggcccctcccagttttttttgctaatttatctttacttcatagcttgcttccagctcccaagggtgaggattttgtgttttgctctgtgctgtgcctcaggg

SEQ ID NO: 175826 - DNA, 321 bp, Homo sapiens
cactttactgcaaggtagactgaagttcagaagaaatactgaatttctgctcccagaagaatagtttctctggctcacaggcccaagttctcaatgaaatcgttttttaactttcacattcctaagctggcttcccggcacagaagccatggatttcccctctctcccttccccctcctcaaggaaatagtcttcctttatggattttcattggactctttcctcagcgattgtcctggctgtttattgatagtccttcccataagaaaatggggttaaacatggggtaggtattttgtctttcaaactacaaatggaatg

SEQ ID NO: 175827 - DNA, 287 bp, Homo sapiens
gtgcatgtcttacgtcagtattctcataacttagctcttagctgaccatgactggtcagcctcccagaaaagacttggtagaacttattcctagaggttacaaagacctagttgccacctctctacaaaaagaaatagggggtacagggaaaagaaggtggggtggtggtgtttcatcattcaattgatatatgtggtcacttaatactaacgtagctattagagtaagtcattcctgtctacagctgatgcattccattacggagactgaagcttggatcttcaga

SEQ ID NO: 175828 - DNA, 540 bp, Homo sapiens
cagagaaacagaatcaatacgaaatatctacctatctgcctgcctgcctgcctgtctatcctgtctgtctgtctgtcctgcctgtctgtctattataaggaattggtacatgattatggaagctgagaagtcgaaaggtctgcagtcagcaagtaagaggccaggagagcccatggtgtagttccagtccaagcccaaaggcatgagaactaggagagctgatggagtaaatttccagctgagtccaggtccgagtctgaaagcaggagaccagtgtcccagctggacacagagcaaattcccccttactcagccaatttgttttattcaatggattggatgaggtccacccacattggagagagcaatctgcttgactcagtctaccgattcacatgttaatctcatccagaaacgacccacagacacaatagaataatgtttaaccaaatgtctcagcaccctgtggcccagtcatgttgacacataaaattatcacaagtactctgctcctgattattttatgtgataaggttatta

SEQ ID NO: 175829 - DNA, 384 bp, Homo sapiens
ccgcgtcccctatcacttccttacccctacaccttccttccctccttatttctttttttcaaaattaagaagctataaaaggacacagtcaaattagtagctctgctactccaattctaggttgaaatagctcctacaggacaatcatgcatctgccacgtttatattaggtacagaaagataaaaggatgatttagaagcatattctacttctatttagatacctgaatggtaatgctttcctcatggtagtgagggaattttttttcttttgtcttcaaaatccaaagtcttttactagcaactatgtgatggggtttgttttaaacttataggttctactgagtaataacagaaatataatttaacttttcttaccataaa

SEQ ID NO: 175830 - DNA, 307 bp, Homo sapiens
ctaaacaagttgcaagagtaacagaaagaaccccgcattccctttacccatagtcgcctcttctgaacattctgctacgttcactttatcatccctctctccctcctccaagggaatacggtttttcccataaccattcaagagttagtggcagataccacttcccaagcaaggatgttattttacataaccatagtacaatcgagaatcaggaagtttcacattgatatagtacaccctctaaaacatagtccacattcagatttcaccagttgtcccagtgatgtccttgatagcattttccccc

SEQ ID NO: 175831 - DNA, 839 bp, Homo sapiens
caatttaaacttaatcaatacctcttttcattacaaatcagaaagaaaaaaaaacgttataagcaatcattcctcagtatgatcatggaaatgggttccttcattactcctatgagtataaattagcaggactctttggcattttgcatctagatcctcaaaaatgttatccttgactctttatttttacactcataattcatgagtataaaagaatcatatgaaagcttatacacaagcatgttcctccagcattattttccatcacaaaaaataggggaatggttaaccatagaatgaacacccattggacagatcctaactggatatcatataatatagtattaccttttgtaagcctcaatttcctcatcttatggagtgaaaattaattgagataaagcctataaagtgtttttcacacctgcctggcacggagtaagcactcacataatagctattaactttgattcctgaatgaatgccatagaaaccatttgaggctccctcattgttaccagtgctcattttaacaatcctgttgtccaagagtgccaggttttcttctctctatgcttagcaacagtcccagtgggttccggctagctttctgcatttcgtaaagtggtcacaataaatacaaaagccatgctatgttccacatagaagtcgaagtagaaagactcccatgccatcccattcattaccacattttaccacgtaagtaataaaaatccacagtgtcggggtgggagtgccaaggcttcataggttccatttgaaaactttactctgcaaaaggagatcagccccaggaactagtacctaagacagacact

SEQ ID NO: 175832 - DNA, 435 bp, Homo sapiens
gccaccgccaacactccctctgtcccttgcgtcaaaaccacttcccttttccccacatcatggcaaagccgcaggagaaatccctgctaatttcaggttgcttgagagatggaacctccaagtctcttgggaatgttcccttctctggtcttaggtgaaatccatgagtttcttctccttgttacggcaagatctacctgccgagtgtctctttccagccctacttggcagctctcttcctgtctgcagagatagccagggtagctggggaaacagaggaagatgtaggactgtgactatgatgtcatacatcccctgggctccgtgggggctctcccccgccatgtctcactgtgcatatcctgttacatgtcttgtgctgtttgacaaatggcctcttgacctttgcccaatcctcttgcttcttgcagctga

SEQ ID NO: 175833 - DNA, 475 bp, Homo sapiens
ctgttacttgccagcctaggagaggggaggcagactagagggttctgtgttgtcctatccagcttcagtcttaggcaggctttatctcctcagttctcagagatgggcttgcccaacttccgggagtaggagtgctctaatgatcagggtcacagaaggtttccagcctcagcctctctctcaggggtagggttttttttttttttttttttttctttaaaaaaactctcagttaacggtttctggaatacaacgcttgtgatttatgcttactcataaggggaaactcaggttggttttgaaaactttagggccaacgcagtcgtcgcaaccgggaagtgacaaacgcatttacctgatgagagattgtggcaatagatgtgcagttgggaattatgtgggtgtgaattggccagaggcccattgcttgcttggagaaggggacgaggactttgggggccaagcagtcgggttc

SEQ ID NO: 175834 - DNA, 266 bp, Homo sapiens
tttggagagtagtgtaggatgataccttatcacaatgacctaccatgcctttgccttgtcacaagaccactcagcttctcagtcattcaatttatagaagaaatccatgtcctcctgaaagagattcttcacagagcatctgacttctggttctaattcagactgatggctttctaggcctgcctcaaggttgtcatcctggaattatatttcattacaatcttgggtgagatccactgttccttagaggccatggcttcctccaa

SEQ ID NO: 175835 - DNA, 783 bp, Homo sapiens
gggctgactctcttttcggactcagcccgcctgcacccaggtgaaataaacagccttgttgctcacacaaagcctgtttggtggtctcttcacacaaacgcgcatgaaatttggtgccatgactcggatcggggtacctcccttgggagatcaatccccagtcctcctgctctttgctccgtgagaaagatctacctaggacctcaggtcctcagactgaccagcccaaggaacatctcaccaatttcaaatctggaccccactgaaaatcggactgttcaactcatctggcagccactcccagagcccctggaactctggcccaagcctctctgactgactccttcccagatcttctcggcttagcagctgaagactgacactgcccaatcgccttggaagccccctagaccatcacggatgccgagcttcgagtaactctcacagtggagggaacgcgcatgaaaaaacaaacaaacaaaaaaatttctttggtagcagaataaaaacacaaaaaaaggacttttcttctggactgaactatatttaaatctcaaaggatggacatctcacaaccttcctacagccaagtactgtgaggtaataattgatatatttacttattaaaattattgaagctggaactcagatttccattttatatttacatatataattattctattaatggtctacttagattaagagaagcgacatgagtccttggtcattggggcaaggggtgagatcgatgacctctggagattgatcccagtgttctga

SEQ ID NO: 175836 - DNA, 533 bp, Homo sapiens
caatacacttgctgaagcagaggtcaagacaaagtgcaagcatctgtcctcacagcgccacttataagacccctccatgcttaataggaggaaaactcatgtcaatgaaacacatggcatccagggataggggaacgtggacccttggatagagttggaggaatttaaactcacggcaaagagtgagatgatgtggggctacacttgcatggtaaagtactggggcttcccagagtgtagtgatgcaagaaactgtggagcagggctttctctcactagtacagttacagccagtgaaaactgactaaatgtctgttctacttgttattgttacttcacaaaaagaggccttgtcttggacttggtggtttttatgagttgggttgcactattagcaaatctgacagcctgctgcctcaagtgctttttctgtcccttgctgccaccaagcagggttgggtgttctcagagataataggaacaggaggcttcacatcagcgagagtagtaagcagggtcaagatcagagtata

SEQ ID NO: 175837 - DNA, 354 bp, Homo sapiens
ataatgcacataaaattcctgtcatgaagtagatgttcaataattgcaaccatcattttaatggccagagaacaaattaagatcccttggtaagaatttctgtacaggaagatggctcaagaggaatccagtgctctaaaagatgaaattctgggaattacaatttcaaatgattctgatgagaaagaaaagtagttactgaaggaactgatgtggccgcatagggatgttttcaaaaaatgtatattgaaagataggagagaactgttatgacagggaatgaatacaaaacaggaacaccaaactgaaggaacagaatcagaaggactgaggtactgaaataatttgaactga

SEQ ID NO: 175838 - DNA, 524 bp, Homo sapiens
gagagatagaccctgtgagcgaaacacctggcggtgcctcagcccctctttcctcccaaggaagcgcattgttattaactgggaattctttatagccgggctggaggaagttttggctgtaaactgtcatgcactgcagccttcgctgaaaaggcggagggagtgggcctggtcctgggaaccgaggaacaaagatcagaaaatcagccacagaaaggggaggaaaaataaacgttagaaagtgaagacaggtgacactacacaagtgctggccaaagtcggtgacttccaacctctacctcctccgacgtgggtggttcaattcctgggtcgtactcttcaatgcttcagacattctctctggagagtagaaattttattacgcgtgttagaaacggaatattctttcctgctgaagttgtattcttatttggccgtgcccctcctgttcggaacagttttagagcgatctgttaaaccctccagtcttctttggcgcttcccgactgtgggaaaagcggccg

SEQ ID NO: 175839 - DNA, 293 bp, Homo sapiens
aaaactctgcgtatttggaagttattctatgctaatttaaaaattaattaatataggcaaatagtattaaatgtctttatattttaagttctctttaagtaaattgaatattgatttcagcttctgatgccagatattattttgttagtaatccttaataaagctagatacttggctggttgtggtagctcacacctgtaatcccagcactttgggaggccaaggcaggaggattgtttgaggctagtagtttgagagcagctggggcaacatagtgagacctcatctctacc

SEQ ID NO: 175840 - DNA, 678 bp, Homo sapiens
tacctctaaataaactgtaacttctgaattgtactctaaaattcagaattaggaaatatacaataaaagttcggaaacctttgccatcatctacttccttgaatgtgaaagagaatgtaatcagagaaaaggataaagaagttgtcaaacctgaaatcccctgaacagaaaggagctgccacggctaggctgcagccctagaactctgtacacaaattcagcccagtaccttgtcccctgcctactcccattcctagaagaatggtataataaacgggcagcccggcccacatttcagtaaattgaactgtcacggggagaataaggcaccccaaacagttgcagcgacagtggttaacaggaagtctctctgtcctccaaaccaataatcaaagggatacataaggaactcactgctttcttagaaggccacatgcaccccgggatgtttgctcatcacgtcactctggcctttaaccagggagcaaagagacagttgtgggtaaaaccctatttccaagctaacaattatccttccttatggtagactggggggtgcacggtacactcttgattacacaagcagtcttcttcccccctagaacaaatgacagaccaacaaaaaggagaaaatgatatgctgttgtttatctcttctgccagcctgaactcaagctc

SEQ ID NO: 175841 - DNA, 260 bp, Homo sapiens
tataaatcaagtaggagttatcagccttaaatgctccaaagtccttaactggttaactttagattttaagaatgcatgctgaaatttctaaggtatccatttaaacaagcccagaactataatgtgtaacttccaaactaataaagggtaaaaacctgattaaaataaataaataaaatcattcctttttttttttttttttttttttgacagtgtctcgctttgtcacccaagctgaagtgcagtggtgtgatctgggc

SEQ ID NO: 175842 - DNA, 290 bp, Homo sapiens
attacaggcatgagccaccatgcccggcctaagaggtgcagattttttctctttaatttaaattctctgggaacacatgttttaggtaatgtgtattcttcctcatccctgtggagacttctgggctatgcttaacttttgagagagagagggaatgttttttttttaaagagatggaagtctcacaacgtttctcaggctgacctcaaactcccagattcaagcgattttctcgcctcaccctcctgagtagctgggaccacaggcatgcaccacctcacctggctaag

SEQ ID NO: 175843 - DNA, 185 bp, Homo sapiens
tccgccctttagaaaggtaattctggcttgattttgaaggataacacaatggttagtttgggtgcagggttaggaacagaaggcctctctccactcattgacgggatgtggaagggtaaaccttccttactgattggggtcatgcctctgtgtgtttgttgggactgagttataagggataggaa

SEQ ID NO: 175844 - DNA, 450 bp, Homo sapiens
cccactctacccctgccccaggtaaccacagttttgatttttttcacctcgatgttttatttgctccaatacttcaagttagtaggaattttacagcagctcttctcttgtgtctattctttggttcagcgtaatgtctgtaagattcgtccatgttgttgctcaatcttgatgagtagtatttcatgctatgaacatatcataatcggtttatttgttcattttgttgggggggggggaatttccccccagattggggccattatgaataaagctgcgatgaacattcatctacaaattatcctatggatgtatattttcatttcctttttgtaaatggagatagaattactgcatctttagagtaagtacatgtttaattttacacaaaattgtcaaatcgttttatagttagttgtattatttttacattcacaccagccacatata

SEQ ID NO: 175845 - DNA, 470 bp, Homo sapiens
tggtatgtgggtggaacacacagacggcgtcagcctgcaggatgtcccagtcagtgaatacacttcagagcaacatggccacatctcaagagctctgcttccctttttgtagcctgttgctggtgtttctaagagtaggtggtctccagagaacagaagccagcttctaaaaaagccttaggcagtccaggctccgtggctcacgcctgtaatcccagcactttgggaggccgagccagtcggatcacctgaggtcaggagtttcagaccagcctgaccactatggtgaaaccccatctctattaaaaatacgaaaattagctaggcatggtggtggatgcctgtaatcccagctacttgggaggctgaggcaggagaattgcttgaaccttggaggcagaggttgcagtgagccaagatcgtgccactgcacttcagccttggtgacagagtgagactgtctcaaaaaa

SEQ ID NO: 175846 - DNA, 449 bp, Homo sapiens
catgtacctcataaatatatacacctactatgtacccacaaaaattttaaaagataataaaatttttgtaattgtcaccaaaaacaaacgaacaaaaaagacactgacattaagatatttctgattgggcttcattgattccttaagatccagactcatgaggagctcctagaaatcgctcggacctaacacaactgacaaatgggaaacaaccattcttgaacacagagaaagttgagcgtcaacctccagcctgggcgacagagcgagactccgtatcaaaacaaaattgcaagtctttagtgcaagggcgtaacagggaatgcctggtatggaccagttgttaaggctctgcacagcaacaatggccaagtgttctttatgttgtgagtaggttgtgaatttcattacagtgtgatgaggtttgttctgttcgtggtttttgcata

SEQ ID NO: 175847 - DNA, 476 bp, Homo sapiens
tatcagatgtctcaatagtagtgatccttatttcctaggactcactcacatccttgcccactgacttccccattagagccttttaaaccccctgggaatctaaagctatattatgacccagagtttagatctaacagtaacaaagcttgctaggtttgtgcttgcttcttggttttttaaaaaacaacatttgttttagtaatacaaacacaggtggttaaactgtacagaaaagtaagagaacgatgaacacaaaagtcaggataatcattatgtctggtgaggaggaaagggggtatgatttcagggcagagagtagacaaacagcttctaggatacaaataatgttccatctgataaattggatggcaaattcacaattttctttcttttattttttgagacagcatctcactattttgcccaggctggtcttgaactcctggcctcaagaaatcctccaacctcagccacct

SEQ ID NO: 175848 - DNA, 481 bp, Homo sapiens
gctagtgttttttgtatcctgcataagaaatcttcccttacaccaggtcacaaagatttttttcctacattttctcctatatctaaaagttttatgatttcagcttttacatttaggtcttttatgtctatgatccattttgatcgcatgcttaattttgttctcactgcacaaaagacacagtaggaaaggaagaatctggaataaagatgactgcctctttcaaaagacaggttgtagaatagaaatattaaacttttgttctgtgtattatattatcttcatctaatattgattaagtagtaactgttcagtagtaaaatatatatagattacctactctgagtcaggcactggagatacagtaatgaaaacactagacaatgtccttgctcccttggagtttatatttgagtgggtgaaattgtgtttttattataatgagcctccattgtatatacagtaaagtcaagaaaaatgt

SEQ ID NO: 175849 - DNA, 467 bp, Homo sapiens
ggtcacattttgatggtcagtcaataacttaagcagttaccaaaatactaggtatccaaggagcgagaggtgggcgagcataagaaacacatttctcatggcacagctctgccaaagccctgcagaatcatttacacataggtctttggttagtagcccctggcacagaattctgatcttaaacaaatattgtctataatcaagtagagcaatgcaattaaaaaaaaaaagcacaggttttggggccatgctgaaatcccagccttgctatttgctggctgtgtgaccgtggttccttggtctcattatgctttggttcccgtatctataaaacggacgtaataatgtctccctctcattattgtgaagtcgaaatgatgtctgtaaagtgcccaacacagtactaaagggctatttttttcttccctatgaagatgagatttaataaaagtgatattacaaatgta

SEQ ID NO: 175850 - DNA, 1052 bp, Homo sapiens
gtcctgtgctgctcgagaggacctgggacgtgcgagggaaacgtgggtgacggtgcctaggctgcggcccttcactgctgtgctgggttcctgcagcctgctacgtttcccttggcaatgtaaatgaagatggaggggtcgtttcgtgatttcctgctgctgagaataaatgtcttgttaaaaacgtggcaacggttactcttaggtgccatggatcgatgtcagggtggtcagctctggactaagccacccacctccaatttgtacaacagtattgatacatagggctacactcattactgttcaagtgttctatgttaagagttgtgtttaatttctaaagattaaaaaaagcaaaaaaattggtgctaaaccttcacccctgagcacgctcagtgagactggtcatgcaagcatttacagtgccatgctcctcaagccgattttttcttgtagaaatgttgccctatttgtcttctccaatgtatggtatgttattttattttattattttattttattttattttattttatcgagggggggtacgatacctgccatttaagaaaatgaatagaaaattttaaaacccgagaaatgggggaaaaaaaatcagtgcacaagaattgggctggttaggcccagcaccacactgaagtgggctcagtggtttttggagtgaagaagccttactccctgcacattccctcatgctcccacacaagtccagcaatggaaatgcttgggttcctcttgctttgtcaggggactcaggagtcgaccaagggaaaccatttggccccgtgaggaatgggcattgtcagtatccgtcctgaacggggcctagtcaggaagcggtctagaagtgtacggtcacggtcgcctcatgaaagtgtgtagcaggtggctctcaggaaaaataccaagtctggatcatccatgtggcagctttgcatagggagaggatagctccgaactggaactgaactgccttctctgcacgcttgaccaaagcagtgatgaaggcgctggtggtggcgcgcggcgcggcg

SEQ ID NO: 175851 - DNA, 651 bp, Homo sapiens
  misc_feature (14)..(15): n is a, c, g, or t
acttcgagctcggnncccctcgcgtgccggatcatttgagagttagacgcagacatgatgcccttttgtccctaagtacttcagggtgtatttcctcaaaacaagcacagtatcatgattgaaatcaggatatcaacactgatacagttctgttatctaatatgcaaacttcaagtctcaccaattttcccactactgctctttacctttagcaaaatcaagaacaacatttagagtgattcaaggtttcatccaggctcacaagcctttcatctagtgtgtcctcaatctttgctgcctctcatggcctttgtatttttgaaaagtgcaggcactgatttttttttaaacattttttttcaaaagtttaaaatgcgataaaaatgtgtgacacaaaatctaccatcttaatcatttttaaatgtgtacagttcagtagtgttagatgtattcacgccattgtgcaatagatctctagaaccttttcatcttataaaactgaaactctgcacccaataaacaacaattcctaatttcccccaccgcctgcccctgacgtcccccgttctgctttctgtttctgtgaatctcttgtagtgaccttgtgtaagtggaatcatacggtgtttttctttctatatctggcctgct

SEQ ID NO: 175852 - DNA, 388 bp, Homo sapiens
aataaggattcaagggttttcctctccacggtaaggagattgttcttggcaagttatgctgagaagcctgttgtgtgccttgtcctccctcagtcatttcagccttagaattgaattaactgcaggcccaaggacataaatgaaccacgtgagtcatttttcaaaagtgaacgacagggcacctgtcttctggaattggtgaatccattcagcggagactcttgacaaggctttgtgtgagatgatataaataggccctgacctgcagggcttttgttgtctttgggtgagatagagacatttgtacacaaataatcacaaactggctaaactgtgccacgtgattagcaaacatgcgcatgcccaatcagcgagatcttcacggtca

SEQ ID NO: 175853 - DNA, 528 bp, Homo sapiens
aggctgacccagcgttttgttaatttgtgttcagcatttgctgggagctttgtaacccctgagcaatgaaacaggagcatattggttggactgtaggcattttaattagaggtcctgggaataactctgtgctgtggcagctggataagacctggcccctcaaagtttacccatggcgagcttccctcctggccctcagcggccattaaaaggtcttgctagaggaagggacctgggggagggagtgcaaaatttctaaggagaggaggaagatgcctggtgggctggcgtccaacagcaattagctactcagctgtcagtgcccagagcccttgctttaacaaagtggtggcaaagattgacagaaatggcttgaccccatgatggatcccaaagcattttgtaaaagggtctttttactcttgctaccttttcatcatctggcttaaatacaatgcaacaataaaggcatcataaatcaaaagctgttagcacacatggcccctgcaatttatgggtattaagcca

SEQ ID NO: 175854 - DNA, 287 bp, Homo sapiens
gagcacttactagcagctgccacatttgccagtgtgaattatgtctattgggctttctttgtccctggtttcccaggcagtctacccagatctctgcaaagttaactgtgctttgctattttactttatgtttctggttattttcttttacactatattcaattatatagctctggtgttacccaagtctttgacttgaatccaatataattaaaaatgtacattaattatgagtaagtaccacatcaattatgccacctaatttaatgaaattcagtttttaagat

SEQ ID NO: 175855 - DNA, 193 bp, Homo sapiens
cttaccctggttgttaatgtttcttgtaacttgtagttgttggttgtttgccaatactaataaaatgagctccttgatcactaaatattattatacagactttctattatgatgaattttctcattgctgcttttttcatgcttcactatttgttttcagatttttagtgatatttctatttggtgactgttg

SEQ ID NO: 175856 - DNA, 355 bp, Homo sapiens
catgtgggcatgtgaatgaggcaaagcgtttaaccttcctgtgctttacttccccatttagtaaaaccaataaaacaacactacctaccttgtggggttttgtgagttttaaatgagatatcatcagtaaaatgcttaggttaggcttgatatataaaaaagcactcaacgaatgtcagctgcctttgagacgatgatgatgatcacaatgatattacatgaggttgaaaaattaggcaaaagctacagattctgtgctaaggagttttgacataatactgttggctggggaaattgtgaaggatgttaaaaaaaaatacaattcacagctctatagatttataaactccgtgtc

SEQ ID NO: 175857 - DNA, 435 bp, Homo sapiens
cacccacacaccttcccacacagacctacacccacacaccaggatttgaaggctctgctaagaggctacaacaactgtagcatacaactagcacacttgttgctattatgtgtaggggactagatggaaagagtgcagataggactacctaccattcacccctaccagcgaagtggaagcactcatcttctttcccttcttaccctttcaaagcaagttgttgagggatgaagaggagagtgactttaatcgtggctttaagtagagattttctttaggagtaattgtttctctcgacagagtggataggcttccatagttgtcttaataccttttgtccaccccaaggattgacccaggcaaggaggatgaaccctcctcaatttgggaaagttaaattttaggcacagcaggtcaaagagtagggaagagctg

SEQ ID NO: 175858 - DNA, 318 bp, Homo sapiens
tgctatacaggcttaagccaccgtgcccagccttctttccttcattttagtaactcgtttgtcatctttgctagactgcaagttctgtgaaagctgggtctgtgattatcttcttttggatcagaccttcaacttctggatacatatttgggaactgaatgacttgcagtatatttcagccctttttgcctgctcagaagagatgcccgattatcatttagaaaaacaattggctggtatttcaaactgaaaacagcagaagggtgataatgggataagaagttgaccagcagctcatagacaacaggcaaattgtca

SEQ ID NO: 175859 - DNA, 268 bp, Homo sapiens
tagactgtctccctcctccagactactttggaatttgtctcagaattgcttttaaccagccgcctcaccccagagaccagccaggccctgagtgctggtcatatgtcacccaaccttatggcacattcactaacatttgctcacaatttgtttggttttcctttgatatcagtggcttcaatttcattatatatttcatcctatttagaggaattattggcttaaaaggtcaatatttgtgatcccctatatactacatatatactaa

SEQ ID NO: 175860 - DNA, 308 bp, Homo sapiens
tttcaattttaaggtaaaacttacataacataaaattagccattttaaagtctataattcatgtctacccagttcttgagcccatcaggcccgaggcagcttatatactgggagccccatctccaccagccttaacctgcatgtctctgtgttccaagttgcatagacataggtgcccacaaatacagccttcctctaaagccggtccctgccgtgtttagctctcttcctgccttggtcactgattcgggtctggttggcacttcattttccccttgctgggtcttgagtgctgcctgatctgagct

SEQ ID NO: 175861 - DNA, 435 bp, Homo sapiens
ttcccttctctgaatcctctcccagtgaatggtaccatcaaccacccatgccagcaacttgagtgattccctctccttcagcctccacagtgacaccgcccaagtcccagctcttggagccacctctccactgcctctacctcagttccgagcccaggatcctccaccacagaacagaaccacctactacctggcctccctgccttcagggtgccctgcctccttctcttacagctggcgaaataacctttctaaaacccaaaggtgatcgtgccttcccagcttgtagcccttgtgatcactgaaatgtggttcacagctttggctcagggcattgagcccttctcaatccacctcctcccacattctgtatatacctcacgcttccttttcatcccccaccctgcttgcagttccatgaacacatgtgcagcc

SEQ ID NO: 175862 - DNA, 428 bp, Homo sapiens
gcagctaccttgtataactgtgccattgaagaaactaccccaaattccctttttacaatacagtaaattttatttaataaaagtttgatgaatcaacaataaacaaataaaataatatggctattattaatatgttgaagagaatatgagatgaaaatagagatgagagatgaaaagatgcagatagaaaaaactagaaatattagaagtaaatacatatgtctaaaattaatattcaatagaattataaaagcatgaaatactctacctgaagttaacagctaatagtttgggattgacggaatgttagatccagtagacgatcggattacttgcttgaatatgagttaataaaaaatatttaaagagaagaaacataattggaaggtacaacacgtaagataaaaaccatagtgaaaagttctagc

SEQ ID NO: 175863 - DNA, 418 bp, Homo sapiens
atgctcaattgatgcaagattttagaaaagtctgaattagttgccaatatttaccaatcaggagatttcataggtaaaaaatacaaatttgtggcttctgttgaaaaatcaggaaaagtggccatctgggcccacagttctacctgggcctgatctgccccttttggacagacaccttctccaccgtctccaccactccctattgtccacacactcctggcttgctaccctctttcagtgactgcctgttctctagtgactttaacctgggaagtcacagtaggcagggcccaggactggtggcagtggggatgggaaaagagaaagagggatggatttggcagctggtctggggaaagaatgtaccagctgtggggggatgtcagagctgactctgaggattcagatggggcaggaa

SEQ ID NO: 175864 - DNA, 590 bp, Homo sapiens
cggtcgtcccgaatccgggttcatccgacaccagccgcctccaccatgccgccgaagttcgaccccaacgagatcaaagtcgtatacctgaggtgcaccggaggtgaagtcggtgccacttctgccctggcccccaagatcggccccctgtgtctgtctccaaaaaaggttggtgatgacattgccaaggcaacggtgactggaagggcctgaggattacagtgaaactgaccattcagaacagacaggcccagattgaggtggtgccttctgcctctgccctgatcatcaaagccctcaaggaaccaccaagagacagaaagaaacagaaaaacattaaacacagtgggaatatcacttttgatgagatcgtcaacattgctcgacagatgcggcaccgatccttagccagagaactctctggaaccattaaagagatcctggggactgcccagtctgtgggctgtaatgttgatggccgccaccctcatgacatcatagatgacatcaacagtggtgctgtggaatgcccagccagttaagcacaaaggaaaatatttcagtaaaggatcatttgacacacacacaca

SEQ ID NO: 175865 - DNA, 351 bp, Homo sapiens
ctctccttgccatttggtccagttgcagcagaataaaaaaagctccacttctggttgagggatctcacatgacaagtatgcaagagctgtttaataccaccacccctggccagtgacaggggcacggcatcctggttagtaatgaaagtggagtgagaaagctgcaggagcctgagatggatggaacagggaaggagcaaagtttccacagaggaaacagaggaggaggaagcgggggacagaataccccacgactctagcggcacacgtacacaagcgaggcagcacgcagagttgacgggcacagatggactggtcacgtagcctggagttagggcaacagatggacaa

SEQ ID NO: 175866 - DNA, 151 bp, Homo sapiens
ccctcagaccccactcatcccttctgctcaagtcacatttgcaataccagcaatagcgtaagttatgaaaatcatacccaaaaaccacatttcatttaacaaatttttacccaacaccatgctaggtatggtcaacatggggcccctaagg

SEQ ID NO: 175867 - DNA, 495 bp, Homo sapiens
cgacctagaggatccccccagtagactaacattggtgaacaaaaaaataaccatagttcccactatcatgtagcttgccatctagtaagggagctagacataaataattgggtaaacaagcattatatcaaatatatagcttcaaattgtgacaggtacataattggcataaagggaaagaatagaatagtataagggagaataacatgagggaaacgtacgttaggtctacctggccaggtagacctaacccaggtagggattattatccccattgtacagatgaggaaactgactcagagtgagatcaataacttgtttaggatcacacacttaggaagtgatggaaccaggatttgaatccaggacccaggcactttgggccctagtccaaagctccttgctcctaattactgagctccaagggcatttgaggcagatggctttggatgctctggtcccacatcaacgcagggcttttcatgtacccttctc

SEQ ID NO: 175868 - DNA, 304 bp, Homo sapiens
  misc_feature (23)..(23): n is a, c, g, or t
ctaacccagctagactaacccanggtagacaacccaggtagacctccaggtagacctaacccaggtagggattattatccccattgtacagatgaggaaactgactcagagtgagatcaataacttgtttaggatcacacacttaggaagtgatggaaccaggatttgaatccaggacccaggcactttgggccctagtccaaagctccttgctcctaattactgagctccaagggcatttgaggcagatggctttggatgctctggtcccacatcaacgcagggcttttcatgtacccttctc

SEQ ID NO: 175869 - DNA, 239 bp, Homo sapiens
tgccggtctgactctagtaggatccccttcgatgtgtgactcagagtgagatcaataacttgtttaggatcacacacttaggaagtgatggaaccaggatttgaatccaggacccaggcactttgggccctagtccaaagctccttgctcctaattactgagctccaagggcatttgaggcagatggctttggatgctctggtcccacatcaacgcagggcttttcatgtacccttctc

SEQ ID NO: 175870 - DNA, 340 bp, Homo sapiens
actctcacacactcatatacactctcccactcagtcccaactcatactcacacacttatacacacacactcatacacacacactcacataatcacacttccacacagtcccccactcttacacactcatacacacactctcccactcagtccccactcacacacactcatacacacactcatacactctcacacacaatcacactcccacacactcagtcccccttacactctcacatactcatacacacactctcccacacacttgcactccacacacttcccactcgcacactcatatacacactcatacactcacacactcatatgcactcccatgt

SEQ ID NO: 175871 - DNA, 867 bp, Homo sapiens
agcgggcgaccccggaagtccccgccgggtgcagcttggtcggttcgatcgccgccgggacctgacaccgcccggagttggcgtcccttctccctctccgagtgctgctcctgtcattgtggccatggacgataccctgttccagttgaagttcacggcgaagcagctggagaagctggccaagaaggcggagaaggactccaaggcggagcaggccaaagtgaagaaggcccttctgcagaaaaatgtagagtgtgcccgtgtgtatgccgagaacgccatccgcaagaagaacgaaggtgtgaactggcttcggatggcgtcccgcgtagacgcagtggcctccaaggtgcagacagctgtgactatgaagggggtgaccaagaatatggcccaggtgaccaaagccctggacaaggccctgagcaccatggacctgcagaaggtctcctcagtgatggacaggttcgagcagcaggtgcagaacctggacgtccatacatcggtgatggaggactccatgagctcggccaccaccctgaccacgccgcaggagcaggtggacagcctcatcatgcagatcgccgaggagaatggcctggaggtgctggaccagctcagccagctgcccgagggcgcctctgccgtgggcgagagctctgtgcgcagccaggaggaccagctgtcacggaggttggccgccttgaggaactagccgtgccccgccggtgtgcaccgcctctgccccgtgatgtgctggaaggctcctgtcctctccccaccgggtcttgcctttgtgctgaccccgcggggctgcggccggcagccactctgcgtctctcacctgccaggcctgcgtggcttagg

SEQ ID NO: 175872 - DNA, 214 bp, Homo sapiens
tggccaatctaattgaaactaagtccaaaagggactttcaaagggaaaagaaactatataaacctgtctagtttgggtggcctaagtctccagtcaggcccaacttctagggttaattatttgaaaccaaaaacgattcttcaactgatttcaggtagataacccaacagcacaaccttccccatttaactatttctcacatactgagttcagg

SEQ ID NO: 175873 - DNA, 247 bp, Homo sapiens
cactgggaaaaaatggaagtttttttcaagaaagagcttagggcgtattgccttttgtcagaggtcaatggtatagagactgtggactaaaatttaggtctgaatatctccagagctcatctgggtggacaaaacacccattttctgctaaaactggatacagtgtattttcctatgacttggtcttgagatttctgcctggggagtggctgtaaactgtagtcctgccctgatgggcctattgaga

SEQ ID NO: 175874 - DNA, 361 bp, Homo sapiens
gagatcaaagggccccccgggttgggtggtccatgagtgagcatgtgataccgcaggagtcttcctcctgccctgacaacttgccttgtactaccagtgctgctcaggatgtctgcagccacgaagcttcattataaatgcaggagctcaggctccaggcccactgaatctgaatctgagtctacagaccgctcctgcactcttagaagtttgagaaacccccctgggctggggtctctttcccatatacagctagggaagcttgctggagggaggactgaaaagaacaagtgcctgatctaccttcccctctgccctttcacaggtgggtggatgcgtgggaagagggtggggcatttcc

SEQ ID NO: 175875 - DNA, 314 bp, Homo sapiens
tggagatgtagggcccagagaggctgaaaagccaacaaggagtctctccgcactcctctgtcacctaagactgaacagggggaactcgcattcctctgccggtacacatttctatttagaacacaaagcaataaacatgatgcatctggccgaagaattgatttgaaaggaagatatgagaaaggattacataataaattaaattgagggtaaaatctcaattaattttagtctgtcaatgaatttttggacagaaccaacatttaatggcacttcctgcatccagtctcctaggtgagttggccttcattctg

SEQ ID NO: 175876 - DNA, 504 bp, Homo sapiens
catcattttctctagctttgaagcaagttgtttttcccctgttctgttatagtcctttttaaggatccagcttttaccttatgttaatcctgtgtagatttttgtcatcccagctatactgtttgggtcttaaaggcaaactttcttgcttagccttttatctgttatcaacaaattcttgtccagtgccttacatgtagtaggtgctcaataaaatacttaagcggcttaaagaacacttagatggctgatgctaaagtagtgtcttttaagaaaattagctatgactggaaataactttctgtatgacacaagatgtttagattggcttttaggatagaagaactcctatgaccaggtgttttgctttctgatgaatggatgctctggcattgcaggttataaaacacatcagtttgatttttggaacgcaaaatgcattcctttatacttgttcataaaattcagtccacatatggggcagtttgattgttgatattctaa

SEQ ID NO: 175877 - DNA, 538 bp, Homo sapiens
gacagtgagtgaattctcatgagagctgatggttttataagtgtctggcatttcccctactggcacttctctctcttgccaccatgtgaagaaggtccttgcttcccctttgccttatgccgtgagtgtatgtttactgaggcctccccagccataaagaaccgtaattcaattaaacctctttactttataaattacccagtcttgtgcagttctttataaaccagtgtgaaaacagactaatacactatgtcattccatctgtcaaaaattcaaggccaggcatgctggctcacacctgtaatcctagtactctgggaggccgaggcgggaggatcacttaagcccagttgtttgagaccagcctggccaacatagtgaaaccccatctctacaaaaaatagaaaaattagccaggcgtggtggcgtgtgcttgtaatcacagctactcaggaggctgaggtgagagaattaccagagcctgggaggcggaggtcgcagtaagccaagatcgcgtcactgcactctagcctgggtg

SEQ ID NO: 175878 - DNA, 208 bp, Homo sapiens
tgtctgcgtgtaaaggcagtgtagatgaagcaggagtggattcagagtgcacaccttgggatcagacagataagagcccaactcctatgtaggaagctgaataatggcctcccaaaaacatcctcatcctaatcccccaaacctcagaatatgttagtttgcacagcaaaaggaactttgcagatgtaattaagttcatgactttgag

SEQ ID NO: 175879 - DNA, 233 bp, Homo sapiens
agaccaagtaaatattgtgataacttcagatctgggaacagtaaacccccaggtcagggaatttgcaaacagtgaattctggaggaagcaaatatgtttgtggaattattctggggagactgcttcattcttaccacaaatgggaaatgactacttctacggcagctgtgatattccattcaggagaggtttgtttcagaggtgtcattgtttgttttagttggcccttatat

SEQ ID NO: 175880 - DNA, 396 bp, Homo sapiens
acacacacatctgcagagtttggcagctcacaatcttcacgtgacagagaggaatgagcctgacactgtggccatggggaggggtgagtgggagcagtggacatgaccatagcatccacatgaccctaaacagtaggtcatctatatgacttcgagggctgagacttccacatgctggtagccagtaatggccaggtgagggaagaatccatgtgagcaacagggttcaggagtccaccatactgtagtgactggaagagctgggcccatcacatgaccataggagcaacatgacaagagaggccacatgacctcaaagttttagagcccttggtgctgatatgaccagtagggccctatcagtagggctcataattgtagtgttcacatgatggt

SEQ ID NO: 175881 - DNA, 326 bp, Homo sapiens
ctttacctgcactttctattaagatgaacatgtattattttaataatcaaagaaaaaaaaaattaggtgccctataaagctcatcacaactgacagggacactctctgtgagaatagctgtcctgggctagtccacagcccttgatgcagtagatgaaatgatgagaacagggatgacttaactactttgggccaggtaaatctaataccctgaactctgacccttgctcctgatgaggcatgaatggtcaacaggcaggtaaggggtacaggaaggttgctaggggtacaggaaggttgctaggggtacaggaaggttgctaggg

SEQ ID NO: 175882 - DNA, 771 bp, Homo sapiens
tgagtacctgagattacaggcgcgcaccaccacgcccggctaatttttttaatttttagtagagatggggtttcaccatattggtcaggctggtctcgaactcctgacctcaaatgatccacccgcctcggcctcccaaagtgccgggattacaggcatgagccactacacccagccaaaaaccttttcctattagaaggatttagcattgattctttcaaaatgatttgtcacgtcatcccttcaaacagcccatccctttaatgcacatcattttttgtgcattaaaaattaagactattgagttcctgctggcaaggattttttaaaaattgagtgattcctaaaattgtgatttgatacaactcttctagaaaacatagcttgtttgaagttttgtttcaatctgttagagagtgatttggtgaaagaaaggtagggctatctgtaggataatggggtattgctttagtttattcccctagggactgctttagtggccttacattctagatatttttccagcaagtgtgagtgagtcatggagtcttgaccaaagcttgatcattgcttattggcaattaataagatcagggtctggatctaccaaaaaacccacagaatctactaattctgttttcttaacttgtgtcctactctcctctatacctcttctcccatttgagagcctctgctcttaaattctctgctatactacctcccttttaatgtccctcagctagaattcagtatgaaaaggaagggatagga

SEQ ID NO: 175883 - DNA, 451 bp, Homo sapiens
tattaagtaggtgttgaggatgtaagggtgaataatgtgttgaagagcttaatttataaaggggaagatataatttaacagtgttaatgtaatatggtaagcagacaacaatatgccatagcaattatgagaacaaagttccaagaacttcacagtgctatctctgttaaaaaaaaaaaaaaagacatcatattcacgtattattaagataaccaagaaaggaagataaatgctttatcttgaaccttactgttgaggatgtaggggtgaataatgtgttgaagagcttaatttataaaggggaagatataatttaacagtgttaatgtaatatggtaagcagacaacaatatgccatagcaattatgagaacaaagttccaagaacttcacagtgctatctctgttaaaaaaaaaaaaggacttctttttcccctctttattgataaagg

SEQ ID NO: 175884 - DNA, 218 bp, Homo sapiens
gttcattgtctggtgaagctgctctctgtttccaagatggcatcgtgatggtgcatcctctggaggggagaaatgctctgtcctcacatggcagaaggcaaaaaggcaaatatgacaaattgtcttcctcaagttttttttataaggacctcttaccccatttataaaggaggagcccttatagcctcatcacctcttaagggcctcacctcttaata

SEQ ID NO: 175885 - DNA, 732 bp, Homo sapiens
ttgcggaagaagaggttcagtgaaagtgacagcagtttaaaatggtccaatggttttaagtccaaagtcctatactatttatgatacatactagatccatttgagttaaggttttgtatctggtgtgaggtagaggtccaaattcatcttttgcatgtgaatatccagttgttccagcagcatttgttgagaccactactttgccttttgaattattctcaaaaaaagcaattgcccatagtgcatgggttagtttgtggtctctctcttttaagtggcaaggtcttgctgtcgactaggctggagtacagtggtgcaatcatagcttactgcaacctcaaactcctgtattaagtgatcctcccacctcaacctcccaagtacctgggaccacaggcacgtgccacccactctcagctggttaaattttcttcttcttcttcttcttttttttctttttgtagagatgaggtttcagtatgttgcccgagctgatctcaaactcctgggctcaagtgatcctcctgccacagcctcccaaagtgctgggattacaggtgtgagtcaccatacctgggctatttttggtttcttaattctgttgatctgtgtctcaaaggccagttccacagtcttgatcacaataggttttcagtaagttttgaaattggggattatgaatttcccagctttgttgttttttaaaattgttgcagctcttctcggttcctt

SEQ ID NO: 175886 - DNA, 462 bp, Homo sapiens
tgagttgaaggtgtgtgtaagaagccattagatctctatttcccacccccaacccggcacagtcaagttttctcaacccgggcagaaaactaatttattttctatagtggctgatccccacttgcttctggactcagggttaccactcgtaggataaggttatcatcctgaaattggggaattcaggcgaagtcctcacggagaatggtaaaactgtttttcccttttcctccactcagctctgacaaccctggctactagctttataccaaccagatggcagactgaaggacatccctctggggatactgcctgggccaaaagaaaatatctgtgtgtattaggaaggggagggaagaatctctcagtgaaacagccctcttagatcatcctacggttaatcccactggtcaaaaagtcatcctctacacacacacacacacacacacacacacacacaca

SEQ ID NO: 175887 - DNA, 632 bp, Homo sapiens
gtaggcagtgatcgagctcggtaccgttggagtgctgttggagatgccaggtcgctgctcccgagattatggaaggagtggttttcaggaatgataaggcctagggcaacttctcgaactatgtgaatttataatgtgcatttccaggggctcttgaagaaatgtagattatggttttagtggtctggagtggacccctgattctgcatttctaacaagctgagatgggaaggggtggaggaagatactgatttttttgtttgtttgtttgtttgtttgtttgaaacggagtctctctgtgtcacccaggctggagtgcagtggtgcagtctcggctcactacaacctctgcctgtcgggttcaagcaattgtcctccctgagcctcccaagtagatggaattacaggcgcctgccaccacgccaggctaatctttgtatttttagtagagatggggcttcaccatgttggccaggctgatctcgaactcctgacttcaggtgatccacccacctcggtctcccaaagtgctgggattacaggcgtgagccactgcatcctgccagatactgatgttattctgattattggcatgataccaaaacctcaataaatgcaacacacaaaaaaga

SEQ ID NO: 175888 - DNA, 508 bp, Homo sapiens
gtcactaaaatgaaaaaatggggtagcggtctctccctccatttcgttccctcatttctctacccattttctgtgcctgtgcaacgtcccctgccttctgctatcggaagtcattcacctgggacgtgctgcccatctccactgccctttcccaggccctctactcagctgaaatgggaagaaaggagacccgggacagagagtacgtattgcgctgtgtgcctggtccatgagggaatcctccacgtcctcatcctcctgcccacctttgctaagaggtgctggtgagcagtcgggaccagctggctggtgagggaggtgtgcgtgagcacacactgcacacattcgtttgaacctgggcttggcaggcagggtggaaagcagtggatcagaggatttgtaagaagatctcagcagggaggcctttaatcttttaggcaactgcttgtacggagaccatgttgtcagagatgaccttggaggcaaaagcagtcagaactattgggag

SEQ ID NO: 175889 - DNA, 354 bp, Homo sapiens
atcttaaatttgttccttgcctcatctagcttctgttggttgccctggcattcctgggcctatgaccacattactccaatctctgccatcattttcatattattttctcttgtctgtgtctgtctccttctcttacaaggatatctgtgccactctcttacaaggatatttgttattggatttagggcctacctggataatccaggatgatcacatctcaagatccttaatttgattatgtctgcaaagaccttttttccccaaataagatacattcacaatccctaattcagggattaggacacaggtgtattttttggggggcccaccatttagccactactggagagtttt

SEQ ID NO: 175890 - DNA, 895 bp, Homo sapiens
gcagagtcagccccagtggtaaaactgaagtcaagggctttgaaggaactctggggaggtggggagggcctgtggaaatggcgggtgacattcaccaagagatagggatgttcagcagaaacagggacacttcagtaaaagacagaatgaagatgctgcaaatgaaaaatacagtatataaatgatctttagatgggtttaacagcagactggacatcacagaggaatggatcagttaacttgaagattggtcactaaagaagatccaaacacagagaggggagggaagacgacagagggtccaagatctgtgggccaaagtcagatggcctaactgggtgtaactggagtcccagagcaggaacaggagagaataaagaagaaatattccaagaccgaatcactaagaactttctgaaattcatgaaagaaaataatccacaaatccaagaatctctgtaactgcaaggaggtgacgtggagaaaaccgtacctgaacacatcctacaggccttaaaggcagctaggatggaaacaggagattcatatagagaagcaacgataggaacaatggctcacttcccaccagaaggccacgcacgcacccacatctgcggtgctgaagggaaaaggaaggtcaacttagaagttcacatacattgaaatattctttaggctggtcacaggggctcacacctgtaatcccagcactttgggaggctgatgcaggtggatcacctgagatcaggagtttgagaccagcctggccaacacggagaaaccccatctctactaaaagtacaaaaattagccaggcgtggtggcgcatgcctgtaatcccagctacttgggaggctgagacaagagacttacttgaacctgggaggggaaggtt

SEQ ID NO: 175891 - DNA, 120 bp, Homo sapiens
caccctgccagtacagagcctttgaagacattagaaaatgtgtgcctttctggatggacacagtccctggcttggtgagtggaccgtgcatgggacttcagctcttatgtgccaccttag

SEQ ID NO: 175892 - DNA, 1826 bp, Homo sapiens
  misc_feature (1432)..(1432): n is a, c, g, or t
  misc_feature (1438)..(1438): n is a, c, g, or t
  misc_feature (1529)..(1529): n is a, c, g, or t
agaaggtgtcttgcttacccttcgcccttctccgtgattgtaaatttcctgaggcctccccagtcacgctgaactagtcttgctttctcacccaatctggagtagagtggtacagtcttggctcactgcaacctccacttcccgggttcaagcaattctcctgcctcagcctcctgagtagctgggattgcaggcgcccaccaacataccaggctcagctcatcatgaagaatgtccatgtgactttggttaataaaataatagatccagtggactgtagtctgtttaactgagacctcacacataatgtcatggttgacagttactggttgaaggaaatccatgttgggcttctgtggatgctggattctttccttctgagaagaaatataacacactgactttgaggtgatggtggagaaaaagtacaagcagaagacttttcccaacttctccatagcctacatgcgtgtggaaacacttcaggttaaccacttgaagcttcagagactgcagtgaggccctggcataggaacatgctcatcacgggcatgttcacagagcaaagcagccagcgtgactgcagcacagagtaggaagggtgtggaaggagatgagagagaatgaagagggaatctttgaacttgattaccaaggagatgggatgataaatccatccagccactccaagaagccaagttaagggatggaagcactgatgaagagcacagacagaatcaagtgtacatgcagaacatatggtaaccatataaagggatgatgtcaaaattctcagcctccttgctcttcagtatcttcttcccctttacctcgtctggatggtgtataatgaagaggcacctagcggtgcctcctgcctctagagtaagattcaagggaggatatataggctcctccatagggtcaagaggttttcaaaggctgtgttgtcccatccagctaccaaaacaagagacaaaattgtgacctggagttgaaactctagtgagtgataaagaggggaagtttcctaaagcagaagttctcagtctgggggctatctgtgtgttgtgtactgaattttgtgtcctcccaaaattcagacgttgaagccctagtccccattgtggttgtatttggaggtggggctttgggagatgattagaattagattagttcatgaaggtgaagcccttctgatgggattagtacccatacaagaagagacacaagatccctctaccaattatgctagctctcctctctttctctctccaccgtctgggatacttcaggaagatgtctgtctgcaaaccaggaagaggtccctcaagcactaaatctgctggcaccttgatcttgggcttcccagcctttaggactgtgagaaatctttgctgtttaagcaatcccatctatggtattttgttanagcagnccaagctgactaagacactgtggataccttgcatgcctgggaggcttgcacatccttggacattataagtaatatttttctgaaaaggggncataactctcatcggagagtcaaaagaccaagtctatgactcccaaaagattatataccactgacggagtggcccttgtgttcttatcctgtagaaccacaagaaacttgaggattggggatcctagtcctggccttcattccgtacttgcatgaccaacatctaagagtactaacaaatatgatgaaataagaaagattcaagaggatacacatattttctttgtccaatgttgctaatatccacctgagagtttattatccataataaaatgtggaatccagtctgtacaccatg

SEQ ID NO: 175893 - DNA, 228 bp, Homo sapiens
caccatgcctggccgaatttaatattttaactaatagtgtccttctaaattgaattctgatcctaattgtagtacttatatttattgtattatcttaatgagtatataaataccactgtgggttctacttaatttctctagtatttttagttcacaaatctctgtagtaatattatccatatattcacagtatgaccaaaacaaaagattctaaaagccagtcatggt

SEQ ID NO: 175894 - DNA, 251 bp, Homo sapiens
gctgtccagtgcacttagaataaaatccaacttgtttcctaaaatataatgctccaggtgacttggccattgcaactgtagcctgtgctcctgccgtgcctcctacctctgccatccagctgctgtgccacaaccacactgaccctcttgtacctgcaacatgccagctaaatatgttcccacctcagcctccaagtcagctggtcaactgcttggaatgctgtttccttctaattttcttgttgcgggtt

SEQ ID NO: 175895 - DNA, 441 bp, Homo sapiens
agtattctgtgcagtgtctattcttccctgtattccttttgattttgttttcattcctctgattttattttcttccagcttacatttcatctctttctgagttcttacatttctctgctttgtagcttttcctcaaagatatggttacttcattaagtatttcccaatttacagcaaaatgtatatttgaaaatttcatcttttccaggccaacatggtttctggagcatgtatcctatctatgttttgctgttcttcattttttcctataaattgagcttgtgctagttccctttatactattcatcactgaataagtaagtttcttagattagctatgtgggagacatgaagatggggtgagcaaggctgttttctgaaggctggacggttttcataacaaaaggccctcttttcttctgctactgcacagatagtcta

SEQ ID NO: 175896 - DNA, 533 bp, Homo sapiens
cagtgtgtgtgtgtgttgtgtgtgtgtgtgtgtgtaaagttagtgatcttacaaacctagctgagtaccctctgctctggcccgtgagcctgatatttttttcagtgtgtgtgtgtgtgtgtgtgtgtgtgtgtgttctgggactctgcatttcaagtaagctttctagtgattctagtgttgacccaaggctggagggcctctgttttaatgtgagctctttagctgtccccttgaattcccagaaagcgtggcagggcctgcctagttctgggtgctcatcccgaccccgcctgagggtttacagtgtgtgaattactgcagtaggaaatatggagaagtgattctcctccctttactacggtatgggtgaactctttagttttccctgatgatgttaagtgaacgtgcccagtggggtacctgtcacatatacagggggtgtatgtgagtgcttctctttccccgggtgctctccctaatagcgcatcagtggttatctccaggcagagatgtaggccaagcagtcgtcg

SEQ ID NO: 175897 - DNA, 717 bp, Homo sapiens
attaggtaccagaaattttagaaagaccacattctatgtgataactccttctaaaaactgataaataatgccttggtttatacggtatttttccttagggacctctcagattcttctttttcttttcattttcccccctctatcctttctaattttatgaagaaagttttacagtattctagaggtcaaaatacagacacgttagattctgcacttcttctttgatggggctaagacttaggaattgatccaaagaaccagagaagtaaatctgctacaattcaaaaattcaaattcttattactcccaagcactgttttattaaagtcgcaatggaaaccaaaaaagccagatggaggtcattttgtctcactgatggtaaagcagcagcagtatctaatgagtcatactacaataaaactacgggcggcattgggatccaaagatataccggttctcaaatcacaagcatctctttagagtaggatttgggggtaaagataagaatggccatttttttaaaagagttaatcagctttagaaagccgatgctgcaagggcattagcaggaacatggtttgaatacaaggttcacagagggaatctgtataagaatgggtcgggagtggcagaatgggactaattaataagggctgacccagaataaaatctgtgctataagaacttaaatctgtacaaacatatgggcaggaatga

SEQ ID NO: 175898 - DNA, 354 bp, Homo sapiens
ggaaacaacagacttacaagttagtaacaataatacaaggtgataaggtcacagatacttactgtgtacctgctatcctagtcactcagaacacaaagactgtcaattccaaagactgtccatgcccttaaggaatgcattgtctggaagaaatgacagatacataaataattacagtgcagtctggtaagtgctgcaatcagaataagacagccacaattaacaggagaggaactaatatttcaccactatcactggaaaaacaattcagagaattgaatcctaccattcgttacataacttattactcagaataaattatagtttttcttttacttagttttataaatctga

SEQ ID NO: 175899 - DNA, 127 bp, Homo sapiens
tgctggactgcgggctggcggcgctcacccagctcctcacccgtcccgcatcttcctgtttttcttccctttctggttgggcagcaagagttgagaggaggcagatggcttccatcccagaaatcgc

SEQ ID NO: 175900 - DNA, 382 bp, Homo sapiens
tcagctatcattagtgtatgttatgtgtgcccaagacaattcttccaatgtggcccagggaagccaaaagattggacacccctgcatatcattgttcctatgggaggtatttgtacaaattcatacacacaaaagattatttcattctcaacctacatcaagaaaaagataatggctttcatactttcacaaattaacttctgaaacaaagctagggattgcatgcaatttcttctgaattcagcagaatctatggaggactaaaaaaaacctacaaattcctttttaagtggaacggcatgaaaggaaacaacttggttgcagtaagaggtctagggttttcagaactgacacaagtgaaatcttagtgcttttcatctgt

SEQ ID NO: 175901 - DNA, 166 bp, Homo sapiens
ccagcgaatttgtggtaatttattatatagcaatagacaactaatacaatcaatccaccatagattaccataagtgagatccaaatctcctgagaattagtcttggcaatttgaaagggtagaaggaggcagaaactagctcactggatagcaaagggtgtaagta

SEQ ID NO: 175902 - DNA, 309 bp, Homo sapiens
aacccaagctacaccccactgggtctgggatagttttttacatagccatagaaggctagaacatgcaccatcttgaactgggcttgtttactaggctcagccaatggaaattaggcttgcccttctctggcctggtcatctcgtgccttattcagtatttgcgtcctcagaaactcaactccacaggagtaaggacaatgaataaccctggaaccccaagagttagggaccaggactgcaaagtgtagtgactgatcaagactgggagaaggagagcactagttgatcctcttagttttcatcattgac

SEQ ID NO: 175903 - DNA, 577 bp, Homo sapiens
tgccctcacagacaagacaggtcccccaaatgagagatgcaggcagggtgtaaagtaacaagagacggtaatgaccatggttacatggggggcacatgcttcatctagccaccaacctccagataatggccactgtgtaggaggtatgatgcagttatgccaaatctggtatttttgttttctgagagagaagccagaaatctggatttttgggtaaaaatctccaaaatgttaaatatcagtaactaattaaaacaaaatactgtacagccaaacaaagcatattcttgtgccagattttccctatggcctaccattttgtaacttctgatgtacagaaattctaagcttattggacaaaattaataccttgtcataaatataagaggaacaaaattcacatcaataatagtgtataggacctcatgaatgtggcagcaatgtaaatggtgtgtggagaccaattaaaataatttaaggtaacatatttagtgagtcacattatttcctggctcttaagtaaatgtatttgtaacttggatgccaatgaattgacttattctaaaacttctcacac

SEQ ID NO: 175904 - DNA, 210 bp, Homo sapiens
caccgtgcccggcctcataactgagcttctaaccctcaagaatctggggttattcttggttacaagcgtacactagccttctgctggggtactgagctgtcagaaacaatgagaactgtgtttacaattgagcagatgagggtccagaatataggaataggacctgctcaaaggcccagggcaagaaagaccacaatattctccttgggg

SEQ ID NO: 175905 - DNA, 954 bp, Homo sapiens
ggggcatgccaggttgggggtggggactgcaatgctggatagcatcaccaggcaggtcgccctgagaaggtgacctctgaggtgagggagggacttttattagttgaaaatccctttttcttttgtttaaaaattcattggttaaaaacattacattctataaggtgttaattataaacagaactccacatacatcaccctgtctaggctttcataataagattttacaatctagtaaatttagaaatgatctaaaacagagctaatgggaagccactgtctcatgacagtgggcagatctgtatttctttgcaaggtaaacattttttttcttgatcatcacaattcaagtttgttttagatgctgattttatttacttactgtggaacatcatctatattcttttaacatcaataaaataatttatctcttttaagaaccaatatgttccagccacagttctaaatactcaaattatctcatgcaaatcatcacgacaactctgtgaggtaggtacattgattgtccagatttcagagataaggctgggttacagagattaagtaacttacccgaagtcacttagagggtaaataggacaactgggatttaagaccaggcctttctcaaaacacaaagtccatgatcttaaccacaacactgcattgcctcaaagataagagcggttatgtcatacagcatttcaatatgcctgcttactaactgttcaaatataaacttaataagaaagtgacctaacaaaagttttttcttctaattcaaacattaagcaatatgaactcataggagcaaaatacagctcctatttttaaagaccatcttgggaatctattacataaacactgagtagtgatgccagggtctttacgatagggaaaaggaaataaaatgtactgataaaagtaaaccacatccttctgtctctaagaatg

SEQ ID NO: 175906 - DNA, 190 bp, Homo sapiens
aaaataatttcaaaggaggtccaatatataatatacttagcctagctttaagagtggtagcagagggaaccactgtttccacatcagcttcctgaagtccagtgttaaaagattgattaaatgaaatctgttaggtaaaatgcatttcagttcataaaagtcatgaggcttcttgaataggcccttagaa

SEQ ID NO: 175907 - DNA, 486 bp, Homo sapiens
taagctatgtggtggatgtgtgtctcctccaaatctcattgtgaagtatgatcccactgttggaaattcaaggaacgcagcattgtcaaaaccatctggaaaagtaagaaccaatttgggtcactcacacgtcccagtttcaaagccacagtaatcagggtggcatggtgctggcttaaggacggacacacggaaaaacggaacagagtagggtccagagacaaaccttcacacttgtagtccgttgattttcagcaagggtgatgcacattcaatgggagagaaagtctatttgacaaacggtggggggtcaactgcatagtcatgtgcaaaagcatggatttatgttccacctcacaccagatgcagaaattaacttagatgaatcaatgacctaaacctcatagaaaacacagaggcagccatcatcaggaccttggattaggtaatggttcattagcaatgacatcaaaagcacaagctaca

SEQ ID NO: 175908 - DNA, 555 bp, Homo sapiens
agaatccgactatcttcaaaacatcagtaaagccagtcactgtctaatatttccatatgggtctttcccagatgctcagggaaggggtacaagagggtcctttagctctttagttactccattctgctttatctgctaacatacctcagaggaataagatgactccaaccccacagtaagagaaggattttattcaacccaaacaaaaccatgaggggcttccctcagtggatgtgcagtagtctgtcctaagtgctggtcagattgccatgtgttaacagtaaaacagcatttttccccctaataggttaaatttttacaaaaaccaaagctctaaagcaagcatggtccagtgacaaactcattatttttatcattacaagtgtggttactgtcactattatcaatgtttaaatatgatggaactaacacagtacagagctcagtggaaggaaaagtccatctcagtgaactgtgctatagtagtttggatgtatacactatgcatcttaacctcaattccttggtatccagctgtatgttacaagaggaact

SEQ ID NO: 175909 - DNA, 684 bp, Homo sapiens
gtcacccaggctggagtgcagtggtgtgatgttggctcactgcaacctctgcctcccaggttcaagcgattctcctgcaacagcttcccgagcagctgggactgtaggcgctttaagtgcttttaatgtattcataaagttgtacagctatcacaactctctaattctagaacatgtttatcatttcaaaaagaaactccatacttactagcagttactccccatttcccccttttcccagcccctggcaaccactagtctattctctgtctctatggactagcatatgccaaataccagaaaaaacagaatcatatgtgaccttttgtgtttggcttcatttatttaccatgttgtcctgattcatccatgttgtatcttgtctcagcacttcattgctttatatgcctgaatcccattgcatgagtatactgttttgtttatccatttattagttgatggatatttgagttgtgttcattttttgactatcattaataatgtactgtgatgagattcatgtactcgtttttgtgtggacgtatttttacaattttctttatgtatctaggagtgggcgtatggtaaatctatgtttaaatttttgaaaaacttcaaaactgtgttccaaagtctctgtaccattttatattattaccagcagcgtacggaggttccattttt

SEQ ID NO: 175910 - DNA, 389 bp, Homo sapiens
cttaaacccagccacatcaatagtaacagtaaattaaaatgggctaaaaattccaattaaaaaaacccattagactggataacaagaagacccaactacatctacattctgtgtacaagaaactcaccttaaacataaacacacagaccagtaaaaaatacaagaaaacaacagagcaagctgacactggtcatgacaaagctgagtgactctgttagcaccaatgagaccgcgtcaactttaagacaatgagcatcgctagagagaaaaagggactgctgtctgtgctttgtgggtcacctccatcacaaaccatgactcccgtactcccccgaaccctgtaccccatgctaagtcactgaaataaatgactcatttaagcctcacaa

SEQ ID NO: 175911 - DNA, 744 bp, Homo sapiens
tcctgcctcagccccccgaatagctgggaccacaggcgcacgccaccatgcccagctaatttttgtattttttagtagatatgaggtttcaccatattggccaggctggtctcaaactcctgacttcatgatccgcccacctcggcctcccaaagtgctgggattacaggtgtgagccaccgtgcccagcctgttcctgttttaaggtgaagaaacaatggcttagggtaaactgatacatctgaagtcacaacaacaagaattagagctgagacttaactgtaggtcttttggttctgagttcaatgattctggtgggaaagagtatcctctgagaggggatgctaaaatgacttccctgtgggaatgaaggtaccaagagaagcaaggaaaacagaagcccctttatagagagaaagagggagtcctctgtgaacatcaagtccctctcatttttccctccccattcattttcctggattatcctactaatccttaattttatttgagatgagacctttacacagaagcctttccagaccatccaaggttaagtgcccttccataagactcaagttttaacattattatagtgtttatcactctctgtcttagtctgtttgggctgctataccaaaatgttataaactgggtcatctataaacaacagaaatttatttctcacagttcttgaggctgggaagtccaagatcaaggtagcagcagacttgttgtctggtgagg

SEQ ID NO: 175912 - DNA, 309 bp, Homo sapiens
tttttaaaatatctaattagactattgtttatttaatttccatagaaaatgggaaattcctgatttgaatactctatcaagcatagtttagtctctacaaatataagactcacaattactctttttaaaaatataaaatctgaagacttcataatggcctgccaaaaaggactttgtttttcaagggagctaaataacatttaaattatgcacttaggagtattttaaacccctggaaaattttaaatattataattaagaaaccattcttttatagcatgtcactttgcccaatgttggggccctata

SEQ ID NO: 175913 - DNA, 791 bp, Homo sapiens
caaatggtatacagaaaaggtaagtctatctcccatctcttttcccctgttaccacctgctcattcacccctacctccttcatttgtcattactgggttaatatcctttaaaaactaacaggacctccgcttctgggaagatggagtagatgtacttttctctattctttctgtcaagtacaactaaaaaccctggatattacataaattataaataatttagtaagtatgtaatatataaaaagcctcttaaaaggcagagagaagaaggcagaccagctaaggacctcaggacccaagaaatggtgcagtgatgagttctctaggttttctttttgtttcttatgtcccagacttggagttgaagcagccggcaacccagaaataccagtaagctcagacgcaaaaagccccaacaaaaatttgctctctctagccaaatgaccagtgcagtaggacagaacaagtgggtttgttccagggatataaggatggttcattatttgaaaattaatctcatccaccaaattaatgaactaaaagaagaaaacttacatgatgctctctatcaatgcagaagatgcaaaatttagcacacatttatgattttaaaaatctcaggaaaaatagacatagagggggattttcctgaacttgataaagggtaaacaccataagccttcagctaacatacttaagggtgagactgaatgctttgtccctaagatggggaacaaaccaaggatattagttctcaccgcttatccaacatagtgctgtaattttctagc

SEQ ID NO: 175914 - DNA, 310 bp, Homo sapiens
tgtggtgccggcatctgcttctggtgagggcctcaaaaagcttaaaatcatggtgttttattttttgctactgaaattaacttaattatttttcagaagaataacagtatactttcctgtattctgataatcgatgtgatattttaagtagcttacaattacattgacaaggcttctgctttctcacacttagtagctgggactgtcaaacagatgcagaacgaacaggtgaataatttgtttagttagttatttttcatttccttttcaactagattgaaaagtagggatatataatcctacattttag

SEQ ID NO: 175915 - DNA, 470 bp, Homo sapiens
gatatgtcaggaacagccaagagtggcaccaagataaaatatgacagtagcgactgccagcttcagcaggcacaattcatactgagtccaaagctctatcctcacacagactagctctgcagaggcacactcctcttagagcacaacaggcaaagtcatagctagctctgagtcatccaaatgcttcaacatgactatcctacggttccttcatccagaaaccaaatctgaccagtacacacttagagaagtccagaaagccaattttcccaactatatttaagaaagtctgtctgctccatgcttccttgttttctcagcagaatatctcattctcttacttgcagagataaagacagagtggaggctctcccttcctccatctaaccaaacaaaattcaactcatattggggtgaatgagatgttatgcctaatgggaagaaaaagaagaggaaaaaactgcattcaa

SEQ ID NO: 175916 - DNA, 257 bp, Homo sapiens
tgaagagaatatggccaacaggaagctaggtcagtctcctaggggttcagaatcagctgtcacaccaatgtcaggaacttctgagataaagactgggagaactttatagaatagaatgcgagtttgcccagagggtggattgctattagagaagcaacccacagataccagactgtacttctggtgccattttccccttcttagtccacttgatagcttaaccaaccctctgcctttgtaccacttgtcccatcaaa

SEQ ID NO: 175917 - DNA, 454 bp, Homo sapiens
gagttctgtattcctttatggccaataagagctgaaactagagattcagagtttcataaatgatctatttttaattttaattctttaagatctgaatactatatatgtaaagatatgctagggtgatttgaataacacgataaaataacagccactaatttagagtaaggcagagagaagaatccattctacgtttaattttatagttaaaatagcctataatgtttaaaaaataaagggttctataaatcaattattataaaagaaagcttaaccacaccaataggcaactacttgcctcacagaagcgaggcctgaattggctgcttctgaaaatatcacactaaaatgccaaaggtaaccaactcatcagtccccgtccccacagctagtcccagctgacctttcctccctgagtctctaattttatctcagcacttctgtgccttgctat

SEQ ID NO: 175918 - DNA, 588 bp, Homo sapiens
tactcagctggtaccaccagagtgactgcagctgctcttggatcaaagatacaaacatttttaattaactccatgcagatctgattccttctttccaagttacaactctttctttctttgaagatgcttagataattagactttttttctaaaaaaaatatttttctggggtttatatttgctttccttgaaagatgtttgttaggaaatcagttctttactacagaaatgggaattatgcattgatttaaaaaatatatatctaaaggcaatatggtctcactgtaaaagagttttaggctatttgaatgtgatatttaaatataactcaatttttgttgtaaaacatttctaggattgcttaagtattcccgatagaggccaatgctatagcaaatgaggtgtttacctaaaacaaccatctccttaatactggtggttgttcaagtaattttttcaaagacatacatagttttataatgaagaaaataaacatgatgtgtcctgatttttctccatagctttatgtcagcctcttcttacttgaagttacatttagtaatttaaaataataataaaatccattta

SEQ ID NO: 175919 - DNA, 471 bp, Homo sapiens
tttcagtgaggtgtctgccatcatgttatctgcttccactgtgtcagcattttaacgtcaaattatctggcgaatttgagcttggttgtagctcataatggtctttagattcttttctcctaatttaaaaatatacgtattttacacaatttctctttattaaaaaaatatgaacaggtgatgcagtctcctttggaaagccctctcaatcccattcctttccccaggggtcaccgtgttatcattttgatgtatatcttttaaaatattttcctgaaaaaataaagaaacaaaaatgcatatttggcccagtgccatggctcacgcctgttatcccagccagttgggaggctgaggtgagtagatcccttgagcctaggagttcaagaccagccacctgggcaacacagtaaaaccctgtctctacaaaaaatataaaaattaggcgagcgtggtgacatgcatttgtcc

SEQ ID NO: 175920 - DNA, 467 bp, Homo sapiens
aagaagccatacatgtagcaaaatagagctagttagaacacagcagtcttggaagcaaggagatctaaagaagatgtttttaaagtttctactgtgaagtctttaatgcagacaaaggtaaacaagctagcatgctgaactcccatgtacccatcaccagcttcagcactgaccaactcaagcccatctggtttcctctatcccccttcccctccaccttggcgcccttcaggtgcgggcagccaagaagttgtgtatggtctttcggcgtgtgcaacgccgaatctccaaaccaaatgtcctcagggggggaaaattgccccagttgagaaccagtgctctagtcataaaagccaagaagagatatgaaaatgttcctaattgaagaagatgaaagagatataacaactaaacgcaatacttgatcctggactgaatcctgtcctggagggtaaagaatgctataa

SEQ ID NO: 175921 - DNA, 1037 bp, Homo sapiens
agacaggagaatcgcttgaacccaggaggcggaggttgcagtgagctgagatcgcgcctctgcactctagcctgggcaacaagggcgaaacgccatctcaaaaaaaaaaggtttagtaacttgctcaagatcaccaacaggtgttgcatccaggactggagcccacctagctggattcttgcatctacactcatactagctgtagcctggtctggctctgtcctggcttgttaatccatctcagggccccagagtgccctgttgacagctgggcttgagagttaccatttattcttaaaatgggtgaacctgatgtggatctcagggagagactttgctaaggagccttaaccagagaagccggtgagatcctcatggcagcttaggagattgtttgtctttgtatcactaacagtgagaacaataactggcacctggtgataatggtgataaataatcatgattgtctttaaagatccttatccattgtctgtcacgtgccaaacactattgctcatcatatttttatggcattttgcaaatgaggaaactgaggccgagagacaagtcaagtgacaagctcatttttccactatggaaaaaaatgtgtatgtgtttgttgttccacccaaacatgggattgcataccacacgattcacgattccctgtagtagataagctctccataaagatcattagaggacactgagtcaagtctggctttgtcactttaaaatagtaagtgggactgggtgcagtggctgacacctgtaattccagcactttgggaggccaaggtgggtggatcacctgaggtcagaagttcaagaccaccctggtcaacatggtgaaacaccatctctactaaatatacaaaaaaattagccaggcgtggtagcaggcgcctgtaatcccagctactcgggaggctgaggcaggagagtcgcttgaacctgggagacggaggttgcagtgagtcgagattgtgctattgcactccagcctgggcaacaagagcaaaacttcgtctcaaaaa

SEQ ID NO: 175922 - DNA, 292 bp, Homo sapiens
cccttcgtttttttgcatcaggtcactacagttcatctggagtttaaaatcattatcactgtcagttaaaagctttgcttgaaggtgacaaagttcttcttggagttgggctgccccatgctgcacccactgtggtcgccagctgctctttccatttttttcttccttccttccttccttccttccttccttccttcctgcttctgccggttccttgtcttcctgcttctgcctcctgcttgcttcctgcttctgccgcttcctgcttcctgcttctgccgcttcctgcttc

SEQ ID NO: 175923 - DNA, 523 bp, Homo sapiens
gcatcctggagccacattctggctctgatcccagtctgagacccttgggctttggcttctgccaggagtttctttggcaaggagatggaggcccagaggaggtggaggcccctcctctctggtcctgccatggctgctcctctctgctgagggctatggggctctagggagagtctgggtcacccctgggatttctccactgctcagtgtgaggcctaaaccatggggtcccagctcagccttcctcactggctctcaactccaccccacccctctattcaggcagggggacatggctctggagtgaagtggggtggggcgtgccatgagctgtgtttctacaggtgggatatgaaggaagacaaggaggagctggaaggtcaggaggtaggtacttgggtataggatggggcaggctggggacgcgagccctggattcatcagccaccggggctattctcttgtttcagggaagccaaagcaccagagagactcccagtgaggaggagcaagcccagaagca

SEQ ID NO: 175924 - DNA, 680 bp, Homo sapiens
agcgattctcctgcctcagcctcccaagtagctgggattacaggcgcccgccaccacgcctagccaatttttgtatttttagtagagacaaggtttcaccacattggtcaggctggtctcgaactcctgacctcaggtgatccacccgcctcgtcctcttaaagtgctgggattacaggcatgagccaccgcacccagcctcacggtaaatggctttctgacctcaacctatgctgaattctaaaatatttacatgcaaatatttacatggctggaagccccacctctggagccccagagacattttctaccatggaaaatgtcaggctgaggcagccagagatgcaacccctccaaagtcagctccagctctccggggagacaggtgcgctttctagcggggagtgagctgctgtgggcagctgtctccactgtgctcaagccaaaactcagatgtgcagtgctggctaacttcagccctgcgcctctcccacttgattaagagaccagagaaagttctcaaaagtgattcccattttgcactctgccctattaaactaggaccttcccataaatcgcttacaggaagaaatctatgacagtctcctctctgagtggctatgatggatctcatgagaagtgaagctacggagattctgccaccacctacgcgaaaccac

SEQ ID NO: 175925 - DNA, 291 bp, Homo sapiens
tgacgacggcaggaatcgagctcggtacctgttggagtgttgttgtgtggatccaaggtgataatcattcatgagtgcaataattgccatacttgtcataataatccagcaaccattgtcctgcagtcgtccaacatgcttcatccatgtaaagggcttcgcccagtgcctgaaatctatgactctcattattatgattctctatcagggataatctcagagagtcagatgatcagttaagaggtcagtgatttaggccaggcatggtggctcacgccggtaatcccagcg

SEQ ID NO: 175926 - DNA, 525 bp, Homo sapiens
tctcatgtacctcataaatacgtacacctactacatacccacaacattttttttttaatttttgaatggccaacttagtagaaaactaacgaggaaaacccagtcagaaatttaaaagagagatcctataactgaaatagtaatagaagggccaaataagcactccacacatccctggctgactgggaaactaggcacatgtgcagggaagaccagtgagggcctggtggaaggtgaaattgaaggtggactgagaactggctataactttgaaggtgctcccaacccacacacagagcaactggcagagggtagaagccctatagactcaaggtgtttaagcacaagctctgacctaatcactgattgagcactaagctatgtagacacagggacaaccagcaggaagtgaggctaataactacaaataagagttaaaaaactgagtggagacatcgacagctacataccacagagaagatctattcggcagtataagttaggacagttacttttgattttaaa

SEQ ID NO: 175927 - DNA, 463 bp, Homo sapiens
gggtttactatactattttatctaatctgcacaggatgaagctttccataatttttcttaaaacagtatcttttaaagattttttttcaatatattaagaatacattctccaatttggttttttcttcagaggttgagtatctaaatcaacctatttgttgttgggttatgtttttttgaagacatccaggccaaaaggcagccctgatgatatttggaattatatttgaaaaagtacatgaaatgataatcaggatttaatagagtcctgagaactgattctattttatttattccagcatagctgaactaagaaggtaggatttcagcagcttcttgaaggaaggatgcaagtcctatttataataatttgccttcctatttgtccattgcactcctagctaataccattatcaatttcatttagaaaacatatattctggtaatttttaaaatacaagca

SEQ ID NO: 175928 - DNA, 2546 bp, Homo sapiens
  misc_feature (21)..(21): n is a, c, g, or t
  misc_feature (40)..(40): n is a, c, g, or t
  misc_feature (42)..(44): n is a, c, g, or t
  misc_feature (88)..(88): n is a, c, g, or t
  misc_feature (119)..(121): n is a, c, g, or t
  misc_feature (168)..(168): n is a, c, g, or t
  misc_feature (355)..(355): n is a, c, g, or t
  misc_feature (419)..(419): n is a, c, g, or t
  misc_feature (424)..(424): n is a, c, g, or t
  misc_feature (479)..(479): n is a, c, g, or t
  misc_feature (494)..(496): n is a, c, g, or t
  misc_feature (593)..(593): n is a, c, g, or t
  misc_feature (611)..(611): n is a, c, g, or t
  misc_feature (645)..(645): n is a, c, g, or t
  misc_feature (1221)..(1221): n is a, c, g, or t
  misc_feature (1361)..(1361): n is a, c, g, or t
  misc_feature (2064)..(2064): n is a, c, g, or t
atggagagaggaacgggaganctagaggggcggaagggangnnnggagggaggcagggaggcagggaggcagggaggaacggaggganagacagagcgacgcagggactgggggcgggnnngagggagccggggacggggggaggaaggcagggaggaaaagcggtcntcggcctccgggagtagcgggacccccgcctccgggaaaacggtcagcgtccggcgcgggctgagggctgggcccacagccgccgcgccggccggcggggcaccacccattcgccccggttccggggcccagggagtgggcggtttcctccgggacaaaagaccgggactcgggttgccgtcgggtnttcacccgcgcggttcacagaccgcacatccccaggctgagccctgcaacgcggcgcgaggccnacagncccggccacggaggagccacacgcaggacgacggaggcgtgattttggtttccgngtggctttgccctcnnnaaggcggcctgttgctcacgtctctccggcccccgaaaggctggccatgccgactgtttgctcccggagctctgcggcacccggaaacatgcagggnagggtgcaagcccggcanggtgccttcgctctccttgccaggttccaaaccngccacactgcagactccccacgttgccgcacgcgggaatccatcgtcaggccatcacgccggggaggcatctcctctctggggtctcgctctggtcttctacgtggaaatgaacgagagccacacgcctgcgtgtgcgagaccgtcccggcaacggcgacgcccacaggcattgcctccttcacggagagagggcctggcacactcaagactcccacggaggttcagttccacactcccctccaccctcccaggctggtttctccctgctgccgacgcgtgggagcccagagagcggcttcccgttcccgcgggatccctggagaggtccggagagccggcccccgaaacgcgcccccctcccccctcccccctctcccccttcctcttcgtctctccggccccaccaccaccaccgccaccacgcctcccccaccaccccccccccccaccaccaccaccaccaccaccccgccggccggccccaggcctcgacgccctgggtcccttccggggtggggcgggctgtcccaggggggctcaccgccattcatgaaggggtggagcctgcctgccngtgggcctttacaagggcggctggctggctggctggctgtccgggcaggcctcctggctgcacctgccgcagtgcacagtccggctgaggtgcacgggagcccgccggcctctctctgcccgcgtccgtccgtgaaattncggccggggctcaccgcgatggccctcccgacaccttcggacagcaccctccccgcggaagcccggggacgaggacggcgacggagactcgtttggaccccgagccaaagcgaggccctgcgagcctgctttgagcggaacccgtacccgggcatcgccaccagagaacggctggcccaggccatcggcattccggagcccagggtccagatttggtttcagaatgagaggtcacgccagctgaggcagcaccggcgggaatctcggccctggcccgggagacgcggcccgccagaaggccggcgaaagcggaccgccgtcaccggatcccagaccgccctgctcctccgagcctttgagaaggatcgctttccaggcatcgccgcccgggaggagctggccagagagacgggcctcccggagtccaggattcagatctggtttcagaatcgaagggccaggcacccgggacagggtggcagggcgcccgcgcaggcaggcggcctgtgcagcgcggcccccggcgggggtcaccctgctccctcgtgggtcgccttcgcccacaccggcgcgtggggaacggggcttcccgcaccccacgtgccctgcgcgcctggggctctcccacagggggctttcgtgagccaggcagcgagggccgcccccgcgctgcagcccagccaggccgcgccggcagaggggntctcccaacctgccccggcgcgcggggatttcgcctacgccgccccggctcctccggacggggcgctctcccaccctcaggctcctcggtggcctccgcacccgggcaaaagccgggaggaccgggacccgcagcgcgacggcctgccgggcccctgcgcggtggcacagcctgggcccgctcaagcggggccgcaggccaaggggtgcttgcgccacccacgtcccaggggagtccgtggtggggctggggccggggtccccaggtcgccggggcggcgtgggaaccccaagccggggcagctccacctccccagcccgcgcccccggacgcctccgcgcggcaggggcagatgcaaggcatcccggcgccctcccaggcgctccaggagccggcgccctggtctgcactcccctgcggcctgctgctggatgagctcctggcgagcccggagtttctgcagcaggcgcaacctctcctag

SEQ ID NO: 175929 - DNA, 1101 bp, Homo sapiens
gaacaagagaatcttgcccaggctccaatgctgctttaggtgacctttaagatcccttcttactccaagacattcatattgaagcccttcacgtaggcataacatgtcatagagtattctctccaaaaggaagaatacaattggcaagtttagcttgctcattcaaaccattatctcctttataaccaaagaacaacttattttagtgagggtcggggtggaaagtaggtatcattagataactgtactccctgaagtgttaagttttcttagatgtaagtttttctctatcttgttttttaaatgggcttcacagaatcaagaaacaccatgattaacaaaggaaaagatgtttctttagggcagaacttcagagcctttcattgtgaatcccgaaaaggggcaaaatataaggtaccatcctcaaacttctttgaccattatatgtacttgtaaagatcaggggttctaccaaacacactctgggaaataatgtgatggagatcagtcctagtcaatctgctgaagttcatagcactgcaaagcaggctcatcatgattaagagaaactaggatcagagacgacgagagagagagagtgagtgagtcagctgggtcctgctttctctggttaacatgccacccaactttctctcttggaaagagcagggacattcagtgtacgcacttaactttcttgagtataagtggaagaaaacgaggtaaaattcaatggccttaaataaggaaaagccataatacatcagcagcagtaagcagaatttctattcatatataagagagggtatataacacaactggtaaatcactgcaaatgtgccacaattagacacctgccaagataaaagggttatatatatattagatgtagattgcctttcttaaggatgttgtccatttcagtataaaagatatgatgcttacaatttcttttactggtatttaggaaaaggaaatatttgaaatataaattcgtgtgccccaaactaatacaactcaattcatttaaattcacagatgaatcatatattgaccaagtgaccaaacgtaaagaaattaaagtttagatttttccttttg

SEQ ID NO: 175930 - DNA, 599 bp, Homo sapiens
cccctccggtggcgaagcactgctctgcgcagtcaagtagcttctgattgggtcaactaattttggtccagtaatcatttcatttggggtgaatggatttttcccccctaaatacgggtacctggaaagttgaagcagtgaatctggtgaaacttaatcagtgatttcgtaagggttaacaaatgtttctgggtgggattcctaatgtccagcttcctctgtgtagctcagtaagtcttctttggagacactagcctgcattgtaagactgtcacatgggagcatctttttattttattttacttttttttaaaaaaatgaggtctttattatcctggctggagtgcagtggtgtgatcatggctcactgtaaccttgaactcctgggctcaagtgatcctcttgcctcaacctcccaagtagttgggctgatagacatgagctactgtgccacgtagcattcttggggattattgtagggtccttttggaccacacatggttttatactctgtagctgattgatgtactggcatgtcagtgacattgtgtgtatcattacactatttggttaattgatgtactggtggaatagccatc

SEQ ID NO: 175931 - DNA, 730 bp, Homo sapiens
aaaaaaaaaaaaaaaaaaaaagtgtaggttagcaaaagtgcctacagttcaatgcttccatgctaaacgttgtatttcttccggtctcatttgtgatgagagtcataagattttgagaaatacaaaacctttccagctttataggatgataatggcttgccactcaagtagcttctgattgggtcaactaattttggtccagtaatcatttcatttggggtgaatggatttttcccccctaaatacgggtacctggaaagttgaagcagtgaatctggtgaaacttaatcagtgatttcgtaagggttaacaaatgtttctgggtgggattcctaatgtccagcttcctctgtgtagctcagtaagtcttctttggagacactagcctgcattgtaagactgtcacatgggagcatctttttattttattttacttttttttaaaaaaatgaggtctttattatcctggctggagtgcagtggtgtgatcatggctcactgtaaccttgaactcctgggctcaagtgatcctcttgcctcaacctcccaagtagttgggctgatagacatgagctactgtgccacgtagcattcttggggattattgtagggtccttttggaccacacatggttttatactctgtagctgattgatgtactggcatgtcagtgacattgtgtgtatcattacactatttggttaattgatgtactggtggaatagccatc

SEQ ID NO: 175932 - DNA, 416 bp, Homo sapiens
gaggccctttccatattccgcttcattctcccctcctggcgtgcctcaaggaacgaccactgtccccaggttacaggtgcttcttcaccccaacaaggctcaatcaagtgtgttcttctctgggaagctgcagacatctgaccccaggccacagagtcatacccagtctggctcccacagccctcccaggctgtctggtgtcagtgcagtgctgtggatgggaacacacctctaccatgttgagctgctctgaggtttaaatgcgttactgctaattgggatcttggaacaactcctggtgcatagacacacacaggacagactggaataaatactggtggtttatcacaggaaggctggcctcagcttgggagagtaagcgtgcatgcatacacagccagctgatttattgtgac

SEQ ID NO: 175933 - DNA, 665 bp, Homo sapiens
tcctgaccttgtgatccacctgccttggcctcccaaagtgctggggttacaggcatgagccaccatgcctggccctggccagctatttattactaattcaattttggagcttgttactggtctattcagggattcaatttcttatttgttcagtctttgcaggatgtatcattgttccaaggttacaatcctcaagcttggccctgacgaactctctaattatattcatgtttcctcagttttttccttttaggtagacatattaatagaatgggctagaggagcctctatgaagggatctctcctttgattgtactctgcttgctgtaacacccaagaatgcagagtcaggctaaccccacttagaatctgcacatagggtcaggcctctgcctgggatttacaagacagggccagactttcaattgtgaatgtaatgaaaaccaacaaaatgcattttctgcattgtgagatgtcaacatagacatcttaaagcccccctttgagagtgtggctttttaagcttttcagatcttgtttagtgacctgctacagttatatgagaggctccaggtataaatagaatctgatgacagaatctataagtgtaaacaagcatcttaagagtgagggataaggccacaaagtatccagagctatgacca

SEQ ID NO: 175934 - DNA, 547 bp, Homo sapiens
aagtagaaatacaatgttataaggctctcacattatatgtgaagtggcatcattttctatgaagataaactgtggtaagttaaggatacatattgtaagccccctagcaaccatcagtaaaataaaacaaagaagtatagctcataagccaaaacaggatgttaagtggattacaaccaaatatactatatattcaattagatttatcacttttagctaaaatctttcttatgagtaacatgatgaacttctacagaaggatgtaatatacaccagcgctttgcctatttcttttcactcaaacattaattatacagttttgccatgtacaaaaactaaagcacctcagaatactgacattccaaaaattcagtaattaccattctgccaaaaaaagcaatagattcttacttagataaaatataaaatttttgacaaatctaaatgatagttttcagcagtcagattggactatatcaaaagaatggtaattctaaaatttaaattaagattaagaggtataaatcttttctcaaagtgtgagtta

SEQ ID NO: 175935 - DNA, 425 bp, Homo sapiens
tttgctgttcttgttgttgttgatcttgatggagtctcactctgttgccaggctggagtgcagtggctgatattggctcactgcaacctccacctcctgggtttaaatgattctccttcctcagcctcctgagtagctaggactacaggcatacgccaccaagcccagctaatttttgtatttttagtagagacgggatttcaccatgttggccaggatggccttgatttcttgacctcgtgatctgcctgccttgacctcccaaagtgctgggattacaggcatgagccaccacgcccagcctctgtttttttttttttttaacccacttttagtttgtttccacagtaacagtacttagagtgatttgcttttgtttttcttctttgttcttttctctattttcctacattccttcctgcaca

SEQ ID NO: 175936 - DNA, 842 bp, Homo sapiens
gtccgaggaggccgcctaccaggggaaggagtctcatctccatcctagacaaaaaaaggatcttttgagatgcattaagcaggggagtcacagattggatttgtgttttgagaatctcctgcttacctagagaagaagggcatctcctgggccctcactgttgccttaaatgatttttattgtgtattacttaaacatgtgcaagcataaaatgagatataaactccttgtagctcttatacaagcatcagaccaagacaaattgacccatcacgtacaaaatcgattcaaatcagattaattttatgtgacatgttattatgccttttgtctgaaaccctgccaccacccacagtgcaattatggcccaaccactgtggtgttctgaatttgtgggacagagaatattggccttttaaacacgtgcatgcatgcatttgcgtgtgcgcacacacacacatcccaaatgattttttcccactatatatgaagaactcctacaaaccaaaaagaaaaaggcagacaattcaagagaaaaatgggggagggcttgcattaaagtacttcataacaagagtacttaggaggccaacaaatacacgaaaagctgctagcttcatgactcatgggggtggcttggtcagttcaggatactgtaacaaaataccttagactgggaaatttataaacaacggaatttattgctcacagttctggaggctgggaagtccaagatcaaggcagcagtagatccggtgcctgagcccgttccctgcttcaaacatggcaccttcttgctgtatcctcacatggtggaagggggaagacagttctctggggcc

SEQ ID NO: 175937 - DNA, 1146 bp, Homo sapiens
taagaaccaatgataatcccactaccctttgatgactctctttttggactcagcccgcctgcacccaggtgaaataaacagcctcgttgctcacacaaagcctgtttggtggtctcttcacacggacgcatgagacatttggtgccgaagacccgggtcagcgggactccttcgggacagcagtcccctgtcctcaccttcactccctgaagagatccacctacaacctcaggtccgcagaccaaccagcccaaggaacatctcactgattttaaattggactctcttcacacgggcgagtgtgacatttggtgccgaagacccaggacaggaggactcctttgggagaccggtctcctgtcctcgccctcactccgtgaggagatccacctgcaacctcaggtcctcagaccaaccagccgaaggaacatctcaccaatttcaaatgggcttagcggctgaagactgatgctgcctggtcgcctcggaagccccctggaccatcatggacgccgagcttcgggtaactctcacagtggaggcctgtttggtgactttcttcgcaccgacgtgcgtgacacaatgtttgcagaatatgaaggtggctgtcacgtggtctgggcttcctggaggtttgagctgggagctgaagccccgtaggagttctgtaagtcaaaagggaagagaagagcattccacgtagagaaaagaatctgtgctccaggcgcggtggctcacgattgtaatctcagcacttggtgtcaggcctctgagcccaggctaagccattgtatatcccccgtgacctgcatgtatacatccagatggcctgaagcagctgaagaaccacaagagaagtgaaaatagccagttcctgccttaactgatgtcattccaccattgtgatttgttcctgtcccacctttactgatcaattaactttgtgacatttcttctcctggacaatgagtctcatgatctccctacccagcaccttgtgacccctgcccctgcccgcaagagataaccatctttaactgtaactttccactacctacctaaatcctgtaaaaactgacccaccccctatctccctttgctgactcctttttcggactcagcccgcctgcacccaggtgattaaaa

SEQ ID NO: 175938 - DNA, 140 bp, Homo sapiens
gacttgaagcaggtcacagagtcaactaaaagccaagcagagtctccgtgggtcttggcaagggctcctgcagactggtcctgcattcatttgaataatctgatactggaagctactctttattttctgtcctattaggt

SEQ ID NO: 175939 - DNA, 399 bp, Homo sapiens
tggctggtggggactcgggagcctttgttcctgtgcttcttagcctctttgagtccttgatctttttgaggctctgaaaaagctacacacaatcttcccaggcaaatgcactgactcacgcaatctcacaggcaatttcggagggttcacaaagcccctgaaacccagctacagactccaagctcagaatctctgctccagtccaataccacccttctccctgctgtgacttgctccaggctggggatctggaaacagggacctgacccgggtgcatgtgtggcagttcacggtgggctgaaggattgtggctgctggtgccacttcttctgaatgcccctcttcagcatctaagatttggagggcgtctctccagcttgtcacttgctggagaggtat

SEQ ID NO: 175940 - DNA, 970 bp, Homo sapiens
ggctaaatgaatgactattattttaaagtgacctctgttcctattttggttaagtgttttaaacctttgatgtatttgacaggcttttcaaaattaaatttcaagttcaaaattaagtctttttgacctcaaaccaactttgggatgttacagagggcccttgcagcatccaaaagagagataataaactttcttgtcaattgtgtctttaaccatgaccattttgagtcatttccacagtgagttgcctaattttgatgcatttctgaaaactctttataagcaagtaaaatcctagagaattgtgccttcaaggagactcatggaaaggatggaaagaactcttgaatacatgtttctgatagctttatgatcatatcatttggactgggtaagaattcccagaactcatgaagagactgactatttattaatccaagcaggaaaagaattaattgaataccaaggaaatactgtgccagagattttcatgctaaatcagtcagcaccgaaatcgttaagatgtgtagtttgaatgaactccatgatcctagtcaaatttcctatgatgacccatttaataaacagtgctatgcacctgaattggagaaacagaattgatacttaaatccaatgttaatcatagattcatggaaagcctaaatggctgcttgggtcttcctgagcccttaaagcttccattattaaaggctctgcactttataagttatcactgaagagagaaaatgatccagatttaaaatacacatattggtgtggtgaatgttctaaattgcgaaaatggtttatgaccaacatttggtttgtcatgctcacaatcctggaaatacattcaaaacttcaggtacatttctgctacctgatgggctatttgaatatatagagagggatttcattcaattgccattttcattgcatgttttttggttgtatagaagctttcccatgc

SEQ ID NO: 175941 - DNA, 1069 bp, Homo sapiens
gcctgcgctacctcatggccggcatcagcgacgaggacagcctggctcgccgccagcgcaccagggaccaattggctgaagcagacgtttgacgaggccgacaagaacggggatggcagcctgagcattggcgaggtcctgcagctgctgcacaagctcaacgtgaacctgccccggcagagggtgaagcagatgttcagggaagcggacacggatgaccaccaagggacgctgggttttgaagagttctgtgccttctacaagatgatgtccacccgccgggacctctacctgctcatgctgacctacagcaaccacaaggaccacctggatgccgccagcctgcagcgcttcctgcaggtggagcagaagatggcgggtgtgaccctcgagagctgccaggacatcatcgagcagtttgagccatgcccagaaaacaagagtaaggggctgctgggcattgatggcttcaccaactacaccaggagccctgctggtgacatcttcaaccctgagcaccaccatgtgcaccaggacatgacgcagccgctgagccactacttcatcacctcgtcccacaacacctacctcgtgggtgaccagctcatgtcccagtcacgggtggacatgtatgcttgggtcctgcaggctggctgccgctgcgtggaggtggactgctgggatgggcccgacggggagcccattgtgcaccatggctacactctgacttccaagatcctcttcaaagacgtcattgaaaccatcaacaaatatgccttcatcaagaatgagtacccagtgatcctgtccatcgaaaaccactgcagtgtcatccagcagaagaaaatggcccagtatctgactgacatccttggggacaagctggacctgtcatcagtgagcagtgaagatgccaccacactcccctctccacagatgctcaagggcaagatcctcgtgaaggggaagaagctcccagccaacatcagcgaggatgcggaggaaggcgaggtgtctgatgaggacagtgctgatgagattgacgatgactgcaagctcctcaatgggg

SEQ ID NO: 175942 - DNA, 229 bp, Homo sapiens
tgcagcttctcagcagggtccatcaccacctgcacagtaattcagtgcaggccatgcagcttctcagcggggtccatcaccacctgcgcagtaattcagtgcggcccatgcagcttcccagcggggtccatcaccacctgcgcagtaattcagtgcagcacgtgcagcttcccagcggggtccatcaccacctgcgcagtaattcagtgcggcccatgcagcttcccag

SEQ ID NO: 175943 - DNA, 289 bp, Homo sapiens
tctacacaccctcgggctggcgggactcactcaaaaaggcttggtatcccaggcttgcttaacagttccagggacggctccaggtggcttgctttatttttgagacagagtctctgctgcccaggctggagtgcaatggcgccatctcggcttactgcaacctccacctcccgggttgaagcgtttctcctgcctcagcctcccaaatacctgagattacaagcacccaccaccatgtccagcaaatttttttatttttagtagagatgggatttcaccatgctggcca

SEQ ID NO: 175944 - DNA, 444 bp, Homo sapiens
cctcatctccatcatatacaatcagttaacaggttacagtccggtccatttgtcatgataccactgcttctctttttaaatgtgtattgaaaaaaagaaaaaccaaactctttgagtggaatgctttaaaaaagataattacaaagaaaaatgcctggtagctaaaatgcaaactaattgaaataaccaagtcaagtaatccaaaatacagcccatttcagaagaaaactgttgctttatgtgattagggaaaagactagatcaactctagaatacttgatttttattaccaaaatcagctaagtacatcaatggcactcacagatatgaacatccagtttttcaacagaagggactaaccagaaaagagcaacatgtaaagaagaagtctaaagacaagtaggttaggctagtttgagatgagactacaggcaagaaaacagc

SEQ ID NO: 175945 - DNA, 543 bp, Homo sapiens
accaatcaaaacctgtacccaatacatataaaaatgcctatgaatcaataaaagataactcaatgggaaaatgaaccaaagacttactgaaacaacttgaatagaaatgtcataaaggagaaaagtccaatactcaaacatatggagaagtgtttaacctcactggtaatcagagaaacaccaaaccaaagtcacagtcagatatcactttccatcaacaaactaacagaaatgttaaagtctgacaattccaggtgtgggcaagaatgtgaagcaacaggaatgctcacacgctgttggtgagcatatcagctggcatgacacattggaaagaagacatgcatagcatctaacccagcaattcgacttctatgtatatacccttcaaaaacatatgcacatgtgcaaccagagacagatacaaggttagcagcaattctttaacagcacaaaactagaaacaacttgactgtacatcaatagcagaatggatagattgtggtctactcatccaatggagtatcatattgcaaagaaaatgaa

SEQ ID NO: 175946 - DNA, 384 bp, Homo sapiens
aggcgtggtggctcacgcctgtagtcccggctactcgggtggctgaggcaggagaatgatgtgaacccaggaggcagaggttgcagtgagctgagatcacagaactgcactccagcctggcgacagagcaagattgtgtctcaaaaaagaggaaaatttaaaaaacaataataataaaaacatctagacttgccctcaaacacacctttaaggccaagtgaagccctttgtgtaaacagtattgttcttggcttaactgggtgggatttaaaatattaacagttcttttctcctacatattaaacagtgcatgttcattatatagacaatacactctctagagagcccagcaccaaaacagacacacaaggcaccacagtggct

SEQ ID NO: 175947 - DNA, 143 bp, Homo sapiens
agaaaagccaatcttgtccatataatggcatgaggaaacaggaagcgctgcagcatgactttattatccttcctctgagcagggccaccgttcagctgggaggaccttacctttgttcctacaggtttctacaggttacacac

SEQ ID NO: 175948 - DNA, 831 bp, Homo sapiens
gcttaacagagaagccaccaaagtctccttgggtccatcacatggatgggcctcctgggcccctcagaccctgggcttcccttgaggtcctggagctatgtgggctccagctctgggaaggtggacccccatgcatgtgtcctgccgtcactgtctctatggagtctggctcacactaagtgagccataaggccttcttcaaggtcatctgtcccactgatttcagactcagggcggagtgtgaaatcatctgtcccccacagtgcactcagaaccctgtctggactagggcacacacacatgcatgcgcatatgaacacacatatgcatatgcacgcacacatgcaaggctgcaagtctcatgcacacacacatgcacacacatgcacatgcatgctcacatgcacaggcactcaggcacctagagccttctcatcctgcactttgagtcccccctccccttgcccatccttgcccatccttcaaggcctcagtcaaaagccatcttttacaaattgtctctggttgactttcctttttttccctcttagaagaagcgatgctgtcctcagtcatcaagcgttcactaggcgcttggtgtgtgccaggccccgatgtgggtcttgggcatgttccagttctcacgtcctcagggctccttggtgagtcgagggtgaggaggacacagaggccaggaggcctggggccggtctgggtggccctcaggctccagaagctcagcctccctgctgagtcagggcgagcaggatacacctgtccggagctcgcggggagtgggcccttcggggtcccccgggtgggcacacaagg

SEQ ID NO: 175949 - DNA, 444 bp, Homo sapiens
atgaacacccttcctatacttcgtgtatctacccttctctggtgtcgcacatggtatttatctactttggctcctataaaccctaccattctttctgggctcagttctgaaggcgtcctaaactttgctgatccagtgtttgggaaactcttaactgttcatacttagtctttactgtcaattgctgcattttgctccccccattcaccttgtagcattttgttttgttttttatttttctgctctaaaattgtcttggcaattacctaagtaacatcagttgttcctcttcaacttctctgtatcttttctcataggcaactattatgtcagaaagtcaaattattgaacatctactgagtgccaggttcttttccagttgctcagagtatagcagcaaataaaacaagattgtgtccacatggggtttacatagtagaatgt

SEQ ID NO: 175950 - DNA, 372 bp, Homo sapiens
cagtttcggacattcggtggaaaagcgaccagggacagaaggcgccgccataaaggtcacctggcccgagcagacgccaggtcgctgcttcttccttggctgctgacattttaacagcgcccaggcagtctgtttccgctttccccaaacaagcaccctggagaccctccacctggcggctcttgaggcgagaaaaagggcctagcccaggagccggtggccgcgacctcgggtctgcagtggcgcactctgcatcttgggaagggcccgacgcacaggacagggaccgggcaggaggcaggggcggccccaggagaccgggcagcggacgggggagaccgcgggggacccgccaggggacgggggcggccg

SEQ ID NO: 175951 - DNA, 794 bp, Homo sapiens
tttagaacctattatcagtggtgtctcagagaaaagaacatagagagatctctctatatatagatgtatccatatatagaggatatatatggatctctatatatctatatatggatatagacatatctctctatataggtatagatatctatatagatatatagatatatctctctatataggtatatatatatatatcaatatatatctctatatatcgatatataaagatttgttataaggaattggctcacacaattataaaggctgactagtccaaaggtatgcagttggcaaactgtagacccaggatagcttctagttctagtctaaagacgggcaggctcaagacccaggaaaagccaatgttttaattgaagtcaaaaggcagaaaaaaaattccagtgtctcagcttgaaggcagtcaggcaggaagagatctctgtcactcacggaggggtttgcccttttgatctattcattcccacagctattgaatgaggcccatccacattagggaaggcaatctattttattcagtctactgatttaaatactaatctcattcagaaacacccacagaggcacacccaggataatgcttgacaaaatctctgggcaacttatggctcagtcaaattgacatataaaattaactatcaggcttatttttaaaaagaggcctggccacacagggtgtctcacacctgtaatcccagcacattcagaggcataggcaggtagattgcttgagcccagaagtttgagaccagcctgggtaatatgatgaaacc

SEQ ID NO: 175952 - DNA, 524 bp, Homo sapiens
aatatactagttgtatattaaaatgagggtggcggaggataggctggactattacctaagatccagtcctttctgaatgcaagacattgcctcatcatttaaactcttcacatgatggaaaaggttcagcagttgtccactatgactatcttaatgcacctggattaattaattcttttctttaattagttattaatttgttcatcaaactactattcaatccatatccctagcccttcattcaacaaacaagtaccatgagcacctactgtgtgccagatgcaagactaggcatggtaggcattgcagtacactagacccatgtggctcttcactttatgggtctgaccatctcgcctagcttgagtgagttggatccaactgtcagagctttcaaaactcaaacaagaccatttgtccttaaaaatttaaagtgtaagacatgtatgacataactgaacaccagttttaaaataactgcatatagtttcagccctgacacaagaatccctgtgctaaatgga

SEQ ID NO: 175953 - DNA, 355 bp, Homo sapiens
tggaacaaaacttacgacagatcatggcagcaatgtgttttcagaattaatttggcagatacatcataatccattacaacaacacaagttattcgcaaatcacacctaagcgtaagtgtcatcttaatttggttgagtatagaaaaatactatacatacaatatatagtacatactatgtctatgtctgcattagtttaaacagctacctactatcacttccttcttccacctcttcccttcagaattgtgttactgaattgtttcagctttgtttgtagtattaacattatacaaaaatagcttcacagattgcaggaagatgtggccaataacagtggaaattaaatagaaaa

SEQ ID NO: 175954 - DNA, 178 bp, Homo sapiens
ggacattgtgcagaaaactgccttgtttccatgcacagaaactagctagcctttctcctggtctggcccttggcagaagacatgactttatccatgctttcatccagccatccattcatccgctcacccacccattcatccatccacctacccacccatccatccatccatccatcca

SEQ ID NO: 175955 - DNA, 473 bp, Homo sapiens
aaaaaaacccctcagcccctttagggccatgtgttttctctgagtaattgtcacaattaattaaaatacatgtgtatgcctttttagataaattccatcagaccagtttctgtctggttggaaagtaataactgcctatttgctaagtgcccctgcccccatactatgttccagtgaactaaagacctctggcaatcatagatttacaactcagcaagattaaacaatttattgttatttatgacatccaagctggatcttctgtattatattccacattaacatctatcactttacatttgggagatcctgtccaaaaaaagattatgcctcctaaccaaacattcagcagggctgcaggaacaagccccctgaacaaacatcctgccaaagtactttaaagcaccgtgagctcccacagctgtgcattttcagacgactcagcagattagcgtggagtctcctagcctctg

SEQ ID NO: 175956 - DNA, 444 bp, Homo sapiens
tcagttcaaaagcatcaaccaaggcaagaggaccagtgttgctgactccatgctgtggttgctggagaaatattcccagaacctggaggacctgattcaggagcagactgaggaactggagctgaagagagagaagacagaaaggctgctctgtcagatgattcccccgtctgtggctgaagctcggaaaatgggggcaactgtggaaccagggtattttgaccaggttaccatatacttcagtgacattgtgggtttcaccatcatctcagccctgagtgaacccattgaggcggtgggcttgctcaacgatctctacatgctgtttgatgctgttctgggcagccatgacctgtataaggtgagaataccaggaggctggcattccattcctccctttactactgtgccttgatggtacaattacttccattcatttattta

SEQ ID NO: 175957 - DNA, 1425 bp, Homo sapiens
gccccagtctgagaacaagaaagaagaacttctgtctcgagggtctcactgtcaaccaggccagagtgcagtgaagatcatacctcactacatccgtgaactcccgggctcctcccacctaagtctcttgagtagctgggacttcaggagactgaagccaaggataccagcagagccaacatttgcttcaagttcctgggcctgctgacagcgtgcaggatgctgttggaacccggcagaggctgctgtgccctggccatcctgctggcaattgtggacatccagtctggtggatgcattaacatcaccagctcagcttcccaggaaggaacgcgactaaacttaatctgtactgtatggcataagaaagaagaggctgaggggtttgtagtgtttttgtgcaaggacaggtctggagactgttctcctgagaccagtttaaaacagctgagacttaaaagggatcctgggatagatggtgttggtgaaatatcatctcagttgatgttcaccataagccaagtcacaccgttgcacagtgggacctaccagtgttgtgccagaagccagaagtcaggtatccgccttcagggccattttttctccattctattcacagagacagggaactacacagtgacgggattgaaacaaagacaacaccttgagttcagccataatgaaggcactctcagttcaggcttcctacaagaaaaggtctgggtaatgctggtcaccagccttgtggcccttcaagctttgtaagccttgtgccaaaagaaacttttaaaacagctacagcaagatgagtctgactatggcttagtatctttctcattacaataggcacagagaagaatgcaacagggcacaggggaagagatgctaaatataccaagaatctgtggaaatataagctggggcaaatcagtgtaatccttgactttgctcctcaccatcagggcaaacttgccttcttccctcctaagctccagtaaataaacagaacagctttcaccaaagtgggtagtatagtcctcaaatatcggataaatatatgcgtttttgtaccccagaaaaacttttcctccctcttcatcaacatagtaaaataagtcaaacaaaatgagaacaccaaattttgggggaataaatttttatttaacactgcaaaggaaagagagagaaaacaagcaaagataggtaggacagaaaggaagacagccagatccagtgattgacttggcatgaaaatgagaaaatgcagacagacctcaacattcaacaacatccatacagcactgctggaggaagaggaagatttgtgcagaccaagagcaccacagactacaactgcccagcttcatctaaatacttgttaacctctttggtcatttctctttttaaataaatgcccatagcagt

SEQ ID NO: 175958 - DNA, 779 bp, Homo sapiens
cgttgttaaacggcgggccagtgaattgtaatacgctccactatagggccaattggggtcccgggcccccccctcaagtttttttttatttttatttgggggaataaatttttatttaacactgcaaaggaaagagagagaaaacaagcaaagataggtaggacagaaaggaagacagccagatccagtgattgacttggcatgaaaatgagaaaatgcagacagacctcaacattcaacaacatccatacagcactgctggaggaagaggaagatttgtgcagaccaagagcaccacagactacaactgcccagcttcatctaaatacttgttaacctctttggtcatttctctttttaaataaatgcccatagcagtatttggagtcttttcttttctcctaaatccacaaactctcttctttctctttggacagatgacctcttgtcatagttaagcagagagtgggcaggatattcctgataggaggaactacatgaataaaggggtaagagcacagaaatttagctacagctccatggtgagccattaaaaggaaagagacactttacctgtgctccttggcaaggacctgccaaatgtgggagctaaggtttgtgggaacggaaagagatatggctgaagtagatgagtaagactcttattagtgatagtcttgaacctcaaactaaggattttagactgtatcccatggagataaaaggactagccatggaggcaaaaagacctggattcaaattctggctctgcaacatac

SEQ ID NO: 175959 - DNA, 1611 bp, Homo sapiens
gccccagtctgagaacaagaaagaagaacttctgtctcgagggtctcactgtcaaccaggccagagtgcagtgaagatcatacctcactacatccgtgaactcccgggctcctcccacctaagtctcttgagtagctgggacttcaggagactgaagccaaggataccagcagagccaacatttgcttcaagttcctgggcctgctgacagcgtgcaggatgctgttggaacccggcagaggctgctgtgccctggccatcctgctggcaattgtggacatccagtctggtggatgcattaacatcaccagctcagcttcccaggaaggaacgcgactaaacttaatctgtactgtatggcataagaaagaagaggctgaggggtttgtagtgtttttgtgcaaggacaggtctggagactgttctcctgagaccagtttaaaacagctgagacttaaaagggatcctgggatagatggtgttggtgaaatatcatctcagttgatgttcaccataagccaagtcacaccgttgcacagtgggacctaccagtgttgtgccagaagccagaagtcaggtatccgccttcagggccattttttctccattctattcacagagacagggaactacacagtgacgggattgaaacaaagacaacaccttgagttcagccataatgaaggcactctcagttcaggcttcctacaagaaaaggtctgggtaatgctggtcaccagccttgtggcccttcaagctttgtaagccttgtgccaaaagaaacttttaaaacagctacagcaagatgagtctgactatggcttagtatctttctcattacaataggcacagagaagaatgcaacagggcacaggggaagagatgctaaatataccaagaatctgtggaaatataagctggggcaaatcagtgtaatccttgactttgctcctcaccatcagggcaaacttgccttcttccctcctaagctccagtaaataaacagaacagctttcaccaaagtgggtagtatagtcctcaaatatcggataaatatatgcgtttttgtaccccagaaaaacttttcctccctcttcatcaacatagtaaaataagtcaaacaaaatgagaacaccaaattttgggggaataaatttttatttaacactgcaaaggaaagagagagaaaacaagcaaagataggtaggacagaaaggaagacagccagatccagtgattgacttggcatgaaaatgagaaaatgcagacagacctcaacattcaacaacatccatacagcactgctggaggaagaggaagatttgtgcagaccaagagcaccacagactacaactgcccagcttcatctaaatacttgttaacctctttggtcatttctctttttaaataaatgcccatagcagtatttggagtcttttcttttctcctaaatccacaaactctcttctttctctttggacagatgacctcttgtcatagttaagcagagagtgggcaggatattcctgataggaggaactacatgaataaaggggtaagagcacagaaatttagctacagctcctgtcggctagtcggtagggtcctcta

SEQ ID NO: 175960 - DNA, 1589 bp, Homo sapiens
gccccagtctgagaacaagaaagaagaacttctgtctcgagggtctcactgtcaaccaggccagagtgcagtgaagatcatacctcactacatccgtgaactcccgggctcctcccacctaagtctcttgagtagctgggacttcaggagactgaagccaaggataccagcagagccaacatttgcttcaagttcctgggcctgctgacagcgtgcaggatgctgttggaacccggcagaggctgctgtgccctggccatcctgctggcaattgtggacatccagtctggtggatgcattaacatcaccagctcagcttcccaggaaggaacgcgactaaacttaatctgtactgtatggcataagaaagaagaggctgagggagacagggaactacacagtgacgggattgaaacaaagacaacaccttgagttcagccataatgaaggcactctcagttcaggcttcctacaagaaaaggtctgggtaatgctggtcaccagccttgtggcccttcaagctttgtaagccttgtgccaaaagaaacttttaaaacagctacagcaagatgagtctgactatggcttagtatctttctcattacaataggcacagagaagaatgcaacagggcacaggggaagagatgctaaatataccaagaatctgtggaaatataagctggggcaaatcagtgtaatccttgactttgctcctcaccatcagggcaaacttgccttcttccctcctaagctccagtaaataaacagaacagctttcaccaaagtgggtagtatagtcctcaaatatcggataaatatatgcgtttttgtaccccagaaaaacttttcctccctcttcatcaacatagtaaaataagtcaaacaaaatgagaacaccaaattttgggggaataaatttttatttaacactgcaaaggaaagagagagaaaacaagcaaagataggtaggacagaaaggaagacagccagatccagtgattgacttggcatgaaaatgagaaaatgcagacagacctcaacattcaacaacatccatacagcactgctggaggaagaggaagatttgtgcagaccaagagcaccacagactacaactgcccagcttcatctaaatacttgttaacctctttggtcatttctctttttaaataaatgcccatagcagtatttggagtcttttcttttctcctaaatccacaaactctcttctttctctttggacagatgacctcttgtcatagttaagcagagagtgggcaggatattcctgataggaggaactacatgaataaaggggtaagagcacagaaatttagctacagctccatggtgagccattaaaaggaaagagacactttacctgtgctccttggcaaggacctgccaaatgtgggagctaaggtttgtgggaacggaaagagatatggctgaagtagatgagtaagactcttattagtgatagtcttgaacctcaaactaaggattttagactgtatcccatggagataaaaggactagccatggaggcaaaaagacctggattcaaattctggctctgcaacatac

SEQ ID NO: 175961 - DNA, 1825 bp, Homo sapiens
gccccagtctgagaacaagaaagaagaacttctgtctcgagggtctcactgtcaaccaggccagagtgcagtgaagatcatacctcactacatccgtgaactcccgggctcctcccacctaagtctcttgagtagctgggacttcaggagactgaagccaaggataccagcagagccaacatttgcttcaagttcctgggcctgctgacagcgtgcaggatgctgttggaacccggcagaggctgctgtgccctggccatcctgctggcaattgtggacatccagtctggtggatgcattaacatcaccagctcagcttcccaggaaggaacgcgactaaacttaatctgtactgtatggcataagaaagaagaggctgaggggtttgtagtgtttttgtgcaaggacaggtctggagactgttctcctgagaccagtttaaaacagctgagacttaaaagggatcctgggatagatggtgttggtgaaatatcatctcagttgatgttcaccataagccaagtcacaccgttgcacagtgggacctaccagtgttgtgccagaagccagaagtcaggtatccgccttcagggccattttttctccattctattcacagagacagggaactacacagtgacgggattgaaacaaagacaacaccttgagttcagccataatgaaggcactctcagttcaggcttcctacaagaaaaggtctgggtaatgctggtcaccagccttgtggcccttcaagctttgtaagccttgtgccaaaagaaacttttaaaacagctacagcaagatgagtctgactatggcttagtatctttctcattacaataggcacagagaagaatgcaacagggcacaggggaagagatgctaaatataccaagaatctgtggaaatataagctggggcaaatcagtgtaatccttgactttgctcctcaccatcagggcaaacttgccttcttccctcctaagctccagtaaataaacagaacagctttcaccaaagtgggtagtatagtcctcaaatatcggataaatatatgcgtttttgtaccccagaaaaacttttcctccctcttcatcaacatagtaaaataagtcaaacaaaatgagaacaccaaattttgggggaataaatttttatttaacactgcaaaggaaagagagagaaaacaagcaaagataggtaggacagaaaggaagacagccagatccagtgattgacttggcatgaaaatgagaaaatgcagacagacctcaacattcaacaacatccatacagcactgctggaggaagaggaagatttgtgcagaccaagagcaccacagactacaactgcccagcttcatctaaatacttgttaacctctttggtcatttctctttttaaataaatgcccatagcagtatttggagtcttttcttttctcctaaatccacaaactctcttctttctctttggacagatgacctcttgtcatagttaagcagagagtgggcaggatattcctgataggaggaactacatgaataaaggggtaagagcacagaaatttagctacagctccatggtgagccattaaaaggaaagagacactttacctgtgctccttggcaaggacctgccaaatgtgggagctaaggtttgtgggaacggaaagagatatggctgaagtagatgagtaagactcttattagtgatagtcttgaacctcaaactaaggattttagactgtatcccatggagataaaaggactagccatggaggcaaaaagacctggattcaaattctggctctgcaacatac

SEQ ID NO: 175962 - DNA, 653 bp, Homo sapiens
cagattcccagcctgccagggcctgagaccctgtgtccacatgacctcagggagtcccccacctgctgcagggggtccagcaccccacaggggggcagtcccagagctgtggggaccggcacgacctttgcccagcctccctacccaaccaagcactttagactaagccacttcctcctcggggagcccaggcctccgtgggttgggctgggtggggggggggtctcaggttgcccctgaaggtctctgcactcctcctgcccttcccctgacacatgaacagatgccttaacttcctggagccaccagcctggtgagccattggcctctgcctgccaccaaggtcctgtggtcttggccagctccgcctgggccccactggggctgcctgcacccagagacgatgccggcgggatctcagagggcctgaggcccaagccctgtgtcctccagcagtggtacggcctgcggcagggtggcactccggccagcccttctccgtcacagggtccctgtccctgggtccaccctgggctgtggctctacatctcccatttggggacgagaaagccacaaaaccattctctattgttcttaagggtacccctgctaattaattccccaaataaaatttttggtgttgatcagctctg

SEQ ID NO: 175963 - DNA, 326 bp, Homo sapiens
aggtaacataggaagtcaaggagttcgcttcaccgcccctccccccaccccaccctttttttttcctgcaagtttctattcttcccgcagctcctacctcaaagcagcatggattcataaccacaggctcccctcattagggcttggggagggagggtgttggaatccacactgccagagtaatccagactaaaacatcaacaaatggtcccagctggttcaccaaggaacacttggcaaaacaaagaaatcctgtctggagcgacacggacacagccacaaaccagtcaccaaattcccagcaagtatgtgctaagaagccaaaa

SEQ ID NO: 175964 - DNA, 150 bp, Homo sapiens
ctgccggcgactctatgaggatcccatgtgatggtctggaaagacaattacattcattgagcactcaagcaagcagacataagtgcgatgcagaatgcaaaggaagattcttgatctcctttatattaaacaaattttatagttttatca

SEQ ID NO: 175965 - DNA, 782 bp, Homo sapiens
gggcgcgaggggcggcgggctagtaaccatagcggctcgcgtgggtcggctggcaagtaaccatagcggcgagcgtggggcggagtgtggctcggtagtcctctgcgtgccctcctgggagctgggtgctgtgagtcctcccctagcgggctggtctcggcgcggagtcggcgccgaacccgagctgctgctctggggcgtgtgcctagggcgcagggctggagcgcgggggctgcgcggttgctcgcggctccgctgaggtctctaggaaagggggcgatttgagggttccgccgtgaccgcttccaacggcggacacgcgcgctctggaccagagccgttgcccgctgtctcgtcacccgaagcctcctcctgacgccgtgctagtgcgagggtctccaggggaattcggggcacaagtcgggccggagcatccgggcggccgcttgagatcggcgctttgagaactgagcgcatgtggagttcggaggaaaagggctcagaatagagggttacattctcagtacttttctcagattaatgtaatgctgaatgcatttggtaaactggcactaatggtgaaactcactctagggctggtccctcgagggactgtcatgggctcgcttttgggaaaggtgctgtgtttacagttgagcctggatgatcatgttgttgccgtgtgtgctggaaacaaaatattcatgctggatattgaggtaagattgaaattcacgtggatttcacggaagggtttagctgatggggcctcccaggttctg

SEQ ID NO: 175966 - DNA, 544 bp, Homo sapiens
tgggacatgagcacatgtgtctctcacaggctctgggtggagtatatctgcattttgctggtgataggtccatggtacacactaggaccagatgaccttgcctgccattttttctttcacctgtgtggatttgcatgacgggctctgcatcaggctgcagctgctgcacatgtccgggtcttgggaacctcctggctgcttgtgggtgtcctgtcattgcttagtccctggaggcctgggttggataggctcctactcctttccttccaatcaatgttagctgaacctatacatgagggtggacatggggttggatgtgggtgagaagcatcgaaacatgcagtttgatgtgcatgattctcactgcacaggtactgcagcctccagagaaaggcatcttcgtgtttcgatgctgagagagtctctgcagggaagtgctgcattccccaggttttcagaagacttctgtatatccagtatttttgatattcttaaagaatcaaaatcacatcaaagctcattgtcattctctcagtaattttag

SEQ ID NO: 175967 - DNA, 1091 bp, Homo sapiens
gggcgcgaggggcggcgggctagtaaccatagcggctcgcgtgggtcggctggcaagtaaccatagcggcgagcgtggggcggagtgtggctcggtagtcctctgcgtgccctcctgggagctgggtgctgtgagtcctcccctagcgggctggtctcggcgcggagtcggcgccgaacccgagctgctgctctggggcgtgtgcctagggcgcagggctggagcgcgggggctgcgcggttgctcgcggctccgctgaggtctctaggaaagggggcgatttgagggttccgccgtgaccgcttccaacggcggacacgcgcgctctggaccagagccgttgcccgctgtctcgtcacccgaagcctcctcctgacgccgtgctagtgcgagggtctccaggggaattcggggcacaagtcgggccggagcatccgggcggccgcttgagatcggcgctttgagaactgagcgcatgtggagttcggaggaaaagggctcagattgaagatggaaaatccccaagacattttctcaagtaatggtggctgtctaagtgatatagttatagaaaaatacctggttgaatccaaggagtctgtgtctcatgttcagcttgcttgcagcatgcaggactgtgctttccctttggatggaactgaactttgtatatggaacactaaggatccttctcatcagcttctaatcctacgaggacaccatcagccaattactgctatggcttttggaaataaagtgaacccacttctaatctgctcagcatcactggattatgttataatgtggaacctggatgaatgtagagagaaagtacttcaagggctggtccctcgagggactgtcatgggctcgcttttgggaaaggtgctgtgtttacagttgagcctggatgatcatgttgttgccgtgtgtgctggaaacaaaatattcatgctggatattgagcagcgattttctgtgacatacatagaacgtcctgatgttaataaccgccacaaagtcccaccaccgaccttcctgcacacattctctcagactcaggctgttcgggccgagctgcagggccacct

SEQ ID NO: 175968 - DNA, 1211 bp, Homo sapiens
gggcgcgaggggcggcgggctagtaaccatagcggctcgcgtgggtcggctggcaagtaaccatagcggcgagcgtggggcggagtgtggctcggtagtcctctgcgtgccctcctgggagctgggtgctgtgagtcctcccctagcgggctggtctcggcgcggagtcggcgccgaacccgagctgctgctctggggcgtgtgcctagggcgcagggctggagcgcgggggctgcgcggttgctcgcggctccgctgaggtctctaggaaagggggcgatttgagggttccgccgtgaccgcttccaacggcggacacgcgcgctctggaccagagccgttgcccgctgtctcgtcacccgaagcctcctcctgacgccgtgctagtgcgagggtctccaggggaattcggggcacaagtcgggccggagcatccgggcggccgcttgagatcggcgctttgagaactgagcgcatgtggagttcggaggaaaagggctcagttgtggaagctgatcgaggaagcctaagcaggctctgtgaagtgggaatagtggtatttgagtcaaggtttgcttaactggaaagcccgtgagaagaatggagcagttgagaatgtggaagctccagagttttcggcaatttctcttcttttttcttgggatgaggagaggtgaataaatagattgaagatggaaaatccccaagacattttctcaagtaatggtggctgtctaagtgatatagttatagaaaaatacctggttgaatccaaggagtctgtgtctcatgttcagcttgcttgcagcatgcaggactgtgctttccctttggatggaactgaactttgtatatggaacactaaggatccttctcatcagcttctaatcctacgaggacaccatcagccaattactgctatggcttttggaaataaagtgaacccacttctaatctgctcagcatcactggattatgttataatgtggaacctggatgaatgtagagagaaagtacttcaagggctggtccctcgagggactgtcatgggctcgcttttgggaaaggtgctgtgtttacagttgagcctggatgatcatgttgttgccgtgtgtgctggaaacaaaatattcatgctggatattgaggtaagattgaaattcacgtggatttcacggaagggtttagctgatggggcctcccaggttctg

SEQ ID NO: 175969 - DNA, 204 bp, Homo sapiens
agtgagcgtagggtggatgagtgacaggataaggtagaaggaactgacccatcatagatggatgtcacataaatagcagcccagaatcaccaccagcgacaagtcctcctaccgctctaggctgaaggatggacaaggttggtgccaggactggctgggcccccaaataccaatgatgctcattacatcatcctaccccacact

SEQ ID NO: 175970 - DNA, 650 bp, Homo sapiens
atggtggcatgcgcagaggtgaggcatcctgttcaaactcaggagtcagggaagactgcctaggtcatgttgcagctgattttttaagttgggtgaagaagaagaaagggctccaggaacagcacttgtaagggaatgaagagctgagctagcatgatgcacgtgggaatcaatagtggggctgtttttcagggggaccagcctgagttttcatttccctaggcattctcctaccacttgggtatgtctgttgtgttgcattggtggggaaaatgtggcttcccgaaagaggattaagtgacgggattatgaattattttgagtgtacttaatacacatgcatgcgtgcttgtagtctcgtaaagtgaatggcaggatttgacttttccctttgtctctatgcttctctaccacaaacacacgctgtaattgttccaagcacggtatttccatagtttggatttgtgtggtggtccattttctgtaacctcattttgaggtgactggcctcaaaatccagttttagcatttatgctgtttttagctcattatcattttgaatattggcagtgctgcattgtgattttttgtactccccttgagaaagagtccatgtaggtcagcctttgcaggtaaagagggcgatatcc

SEQ ID NO: 175971 - DNA, 354 bp, Homo sapiens
atcttgaatctcctctccctgagagaatggcagagaaaaattctgttgtgaatattcaaacaccaggattaaagacgcttcaggagttcctgttgtaagtgtaatgtcttaagctgcaactagcacacaatggtccaggtcttgatggctttggtcaagcagctccctgggtcacgggacactgaggctgtttgaactgcaagggctgcaagttcccagagaaggagccaggcccagccacagtgaagaagcctgcctctccctctactggctgttggacaacaacactgcctgtagcgtttgctcttggcagtcatggaaccaagtaattaatgaaagggttgaggttaaaag

SEQ ID NO: 175972 - DNA, 306 bp, Homo sapiens
  misc_feature (1)..(1): n is a, c, g, or t
ngctagagtatcccctatctatactgacgcttcaggagttcctgttgtaagtgtaatgtcttaagctgcaactagcacacaatggtccaggtcttgatggctttggtcaagcagctccctgggtcacgggacactgaggctgtttgaactgcaagggctgcaagttcccagagaaggagccaggcccagccacagtgaagaagcctgcctctccctctactggctgttggacaacaacactgcctgtagcgtttgctcttggcagtcatggaaccaagtaattaatgaaagggttgaggttaaaag

SEQ ID NO: 175973 - DNA, 261 bp, Homo sapiens
ctgaaattgtagaagagaaaactgtaaatggctggcatagcaaaaattaaatcattaataaaattctgtttgcagtttctgctggatggtaacctttttttaaaaaaaaattcaacttatatagtagagggtacatgtgtagatttgttacatgggtaaattgatgccgatgcttggggtcccaattatcccatcacacaggccataagcatagtacacaacaggtggtctttcagcccatgctccccttggcctagtgat

SEQ ID NO: 175974 - DNA, 468 bp, Homo sapiens
tataaatgggcaattcacaaaagacgaaactcagacggccactgagtacagaagagacactcaatcacactagaacgcagagaaatgcaatataaaacaatgagatacaattctgtgccaatcggattagcaaaaattaaaaatctgataactaagaggatatgggaaaccaccaatggaagcataattacaactgctttggagagcaatttggtaatgtccactaagttaaaatgtgcacgttctagaacctagccatttttcctctgagtactggctctagacaacctctagtacatatttctagatagatatgcacacagttactactgtatcactatttgtaataacaaaaaaggtgaaagcatctgaactttctctcaggtgaacagatgaagactcttgatttattcgtatatactggaatcctatggagcagttgctatagtttggtttgcttgtcctctc

SEQ ID NO: 175975 - DNA, 222 bp, Homo sapiens
agagggtttcctgcatgcctacgctttgcagggttcacttactgttcaggtgttcatgattagttcttttgaagtaatatacttttccattatactgatgataattttttctaaaaattacagacatgaattaataagcttcagttagaatctataattgatatttctccatgattatttgtggtcatacagtgtaaacatttgttaattgtatgaacaatc

SEQ ID NO: 175976 - DNA, 381 bp, Homo sapiens
acttttcctatactaatccttgtttgtaaccacattttcattgtgtgattaacaactgattattgtctgtctcccctaaacgccgggaaacatgtctgttttgcttatgggtttaaaactatatacccagtgtgagggacagtggctgccacacaggtacccaaatatttgctgagtaaacgagtgagcaaagtctcaaagaatttaaaaatctattaggcacaacatccaaataagcaaatagttataatgattaccaaaatacaacagatgctattataagaataatacaagtaaggatttaaacacgaacgctggtttaaagttcaagtatcggtcacgttaaatatagacattcctatgtaaggatggatgctaaat

SEQ ID NO: 175977 - DNA, 394 bp, Homo sapiens
actagttagaaaggaattagataaccctactctatagttatccctactttttaaaaaattgcctctattttataatgtcacaaaattaggactagaagtagtgtcctagataagtatcatttatgccagttacactgtgaatttgaattatctgatatactgtgtaagcaatttaagatcagtttcttttcttcatgttacagaatctgacagttcctagttatttcttagaaatgttgatccttaaaaggaatctaacagatttcccagtacttctacgtattacttggttctttctcttttcttcatgtctgtgatgtataattaatcatagattacttcattttgtttcatttcatttacaacatttatgagcttcactttgtcagtatga

SEQ ID NO: 175978 - DNA, 434 bp, Homo sapiens
cctatgtggacaagcatctcagggtctgagcatggtgaaaacaaccctccttatattcccagtgactatattatgcctactcccaacttgctcatctcagctgatacagcttctatcactgctgctgctaaggccaaaaaccctagggttgccaggcacggtggctcgagtctgtaatcccagcactttggaaggctgaggtgggtggatcacctgaggtcaggagttcaagaccagcctgaccaatacggtgaaaaactctgtctctactaaaattacaaaaattagccgggcgtgatgccgtgtgcctcctgtggtcccagctactcaggaggctgaggcaggagaattgcttgaacctgggaggcagaggttgcagtgagcagagatcatgctactgcactccagcctggtgacagaacaagactccacct

SEQ ID NO: 175979 - DNA, 187 bp, Homo sapiens
caacttttgctttatccttgacaggagaataactattctgtggtacaatgcttacaaatttaaatatcacctaccaatagccactgcagtgagattaccattttaacacaaaggaaaaaactgacaagtttacctctacacggtacaaaagtttaacacattccaaacaggtaaattcaaatccttc

SEQ ID NO: 175980 - DNA, 252 bp, Homo sapiens
taagtggagtgattaaagatttacatgaaggctgggcactgacgctcacacctgtaatgccagcactttgggaggccaaggcaggagaatcacttgagcccagagaatagcctaagcaacatagtgaaaccctgtctcttcaaaaaatataaaaacgatctgggcatagcccatgacttatagtcccagctactcggggatgcttaggtaggaggatcctttttttttttttttttttttttttttgagatg

SEQ ID NO: 175981 - DNA, 220 bp, Homo sapiens
acagcacctctgtgatttgatgtggttctgtttcatgtttatgcatggtactgctgggaatacagcatatcttctcggggtgtcaggagtgaaaaaggcctgaggatcacgatccagcccaatccctattctacagaagagggggaaagtacagttgctatagcctgatcctctaagtactgcccaatacaacatacgagggagttttgattaatttcct

SEQ ID NO: 175982 - DNA, 340 bp, Homo sapiens
gaccaagatgtgagtggagaaagggcaggggaggggacgagggccacagacaggtgggtcccacaccagaccctcccagggacacacaaagttgtggagttgacttggttggccagagtcttaaactccagggatgtgatcaggaatccaaaatgtttatttccatatggatggaataactgtgctctctaagtcagcccaatgcaggcccctgccccactcccactccaccaggcccagattccagctggaactccagatggtccctgagagtctgcaaagaccaaaggtcaattcagagccctgtccccaaaataaactgagcaaaagtggatgggga

SEQ ID NO: 175983 - DNA, 588 bp, Homo sapiens
tcttttatttcttttttcttttttctttttttttgagatggggtctcgttctgtcgccaggctggagtgcggtggcgatcttggttcactgcaacttccaactcctgggttcaggcgattctcctgcctcagcctcccgagtagctgagattacaggcacgtgccaccacgcccggctaatttttgtatttttaggggagacagggtttcaccgtgttggccaggatggtctcgatctcctgaccttgtgatctgcctgcctcggcttcccaaagtgctgggattacaggcgtgagccaccgtgcctggccaacattcttatttctaatgctgcatagaggagtggttaggagccagggtgctagagccacattatctgtatttgagctgtgtctctatgggcaaattacttctctgtacttctctttagtgccctgttcccttcagtcatgaaagcaatgaaggaagacagaacttctaatattatggtttctgaatcatccttaatgagcctgtcatcaataaaatgagaaactgcaacctatttaaacactgtttatcagattataacacacattagagaattta

SEQ ID NO: 175984 - DNA, 233 bp, Homo sapiens
cagtcagtagccccaataccagccttgtatatcacagaccaccgtccaatttaagtaattttttttaaaggagtgctttgagattatagaatctgagcttatggcagaacccgcataggagatcatgaaaacaggcatggagataagccaacattatgctagccactgtccatgaaattcttgaggcttcttgtataaaataaagtcttttcttttctttttttttttttttt

SEQ ID NO: 175985 - DNA, 635 bp, Homo sapiens
agtagagacagggtttcaccatattggccaggctggtcttgaattcctgacctcaggtgatctgcctgccccggtctcccaaagtgctgggattacaggtgtgagccactgcgctcggcctattcaatccattttaattctcataacattatatgggtacctacggatgttatccttattttgctagaaatggaggctcagagaggttacttgcccacagtcactgagctagtacttgtggagctggtgtgatatggctccggggtccagacccttcactttggtgctgcatcgctaactggtgggcagaatgaggcgggagtgtcagaaccaggatcccaaaagatctcaacagcctagcataaaaaataacatgtcagctgtcagaactgcccagagagcaccggactcccctggggctgggattcatgtgcaagtgctccaccaccatcagaaggcttggacacctccatcatcgctgatgagtactgaatgttgggttcctgcggtccagagctgtctgcttctgacagaggggatggccgcacggacgtgactttcaaacaggagccggggtggggctgggcaaatgccctggtcccttgcccacccatcctgttctatctactctgggt

SEQ ID NO: 175986 - DNA, 417 bp, Homo sapiens
atgccttgaatttaaacagccctaatttcttcaagaaataaacacatttcattaaaaacaataacattactcctcttattactgaaacagcactttaaattaattgggtacacatgctataattccgaaccttaatttaacttcttctaccaagccagctcactcagaagtttttaagtggcaataaaaatgtaagaggttagaaaatgcacgaggttagaaaatgcacaaactgaattacacataattaaatttacaaaatgaaattaaatctacacacatttactgaaaggctacacaaagatggataagacaagtttgtcatccttacagaatttgaataaataacacggaattccaagtcaagagaacattaaactcataagcgattatttgttttgtgtgtttgtgtgtgtg

SEQ ID NO: 175987 - DNA, 335 bp, Homo sapiens
gactcctcctttcaggataccttggtagtttccacattctttcctctacaccaggagcgtgtgttctctcgcccctctaccccctattctctcccatcctccctgtttctctttctttctcaaccaggtctggtctaacaaaggttcctagcttacattgtctttggctctaggctccacttccagtctttctgttaatgagtactttctccggtggcctgctatatttttttttttcaagttgtgtttttcctcatcccttcccaacaaaacagcgcaaaaaatgaagagccttaaagttgtctggacatttcttctcacccgctcataaagtg

SEQ ID NO: 175988 - DNA, 579 bp, Homo sapiens
aaaatacgtcccaaattttttaagtagacccttttcagtcttcctactacctaactctttacatcagctacacagtcctcctccctacagtcaaccaatctaatctgcttcttgtgtatacttctccagaggaattccatacaaatataagcaaaaatatatttcttgtgtaaatgtgtctttttatataaatggttccatagtgcactgtcctataatttgctttttttttatttaacagtattatgttgaatacatattattgtttcaaaaactagtatatgtatagtttaaatttccagaacaaaaagtattgggtcaaagagcatgtacacttgtaaattggatatcataaaattgtccttcacagaggttacacctattaacatcagtatctagaagtgcctatttccccattctcttgctcagtgtgttgtcagatttttggattattgcataattgataggttaaataaaagtcagttcatgatagttttaattggcatttcttttgtgagtgaggttatctttccatatgctaaagagccatctttatttcctctttcaggaaaattcgtt

SEQ ID NO: 175989 - DNA, 334 bp, Homo sapiens
cgtagttggacatgctagtgcgttaggggtgaaattggaaaaacatcagttatagagacggaaagcaagaagagaaaaaggaggaggacagagatgacagaggtcggcagtgcccggtcagttgttgaaagcttggctagacattgaagattgtgctgtctgaggtgacttcgtgataagactcctgtggacgcttatcttccacttgctttcaagcacatttattcgagtggccgagtggccccattctaaatccgtcccggaggggtgaggggctgtggggaagaggcagcaggtgctttttctacttcccaacacgggtgtggggctcagg

SEQ ID NO: 175990 - DNA, 930 bp, Homo sapiens
agattagtattatctgtttataatgcctgttaataaaagaatttacagtttggtaaaattgctgctaaacaatcattggatcacaatcctcatcagacaaacccatctgtaaaaaaaatgagggagagcttgaggtttcacacaagccatttactaaagaggtagaaatgttttctattggttttaccttgagtttagatatcctaaaaaattctgtagtacgtagttttgtcttacctgttaactttccccaattgagataaaagtgttttaaaattctgtttatagtttttgatatgcatatataattatgtgtatatctaaatacaaatgcaaatgaagcattagtaatacttaaatcatttttattgtgctactttaaaaattctctttgtcttacctttaacaatttaattataatgtgtctaggtgtagacttctttatgtttaacctacttggaatcttttaggattcctgaatctggatgtctatgttcttccctcaatttggatagttttcaattattactttgttacatatgttttctgcttctttctctattctccttgtgggacttctataatgtgtatattggcttgcacattcatgtctcccaaatcctggaggttttctttttcattctttttttttctcctctgactggataatttcaaataacctgtgtttgaggttgctgaatctttcttcttttgatcaagtctgctgttgaagctctgtattgtattttttattttactcatgtattcttcagctctataatttctgctttttttgtttttgttttttgtttgagttggagttttgctccagcctgggtgacagagccagaccctgtttcccataaaaaaaaaaaggaaagacagaaaaaatttaagggcaacaaccaatttaaccacaaggggacagca

SEQ ID NO: 175991 - DNA, 476 bp, Homo sapiens
ttaataatgcatttgcttcaggcgtgactcaatttaataaatcatataagttacaatacattttatcacatatttatggaaagagatattccaatttcttaagcactgcttttctaagtattaagaggcagcttaatataaccaagggacaaaagaaggaaaaaaaaaaaagtcatatacaatgaaaaactccagggaaatgcattaaaaacacctctaaaccatgagtttttaagttcatatgcatgaatatgtctttaaattatatgcagctgtttgtgtgatgaacatcttaatgaggaaagcatccataaatttcatcacattatcaaattagaaattggccgtgaacattttttctatgtgatgttgccgtatcgactctcacactaaacccagcaacttgccaagggtacacatttgggattcaacagaggttatgtggacagagacaaggagcattggtcaagaatata

SEQ ID NO: 175992 - DNA, 1229 bp, Homo sapiens
ggcaggagaatcgcttgagcccaggagtttgagaccagcctgggcaacatagtgaatccctgtcactattttttaaaatgtattttaaaaaagaaaatgttctatggtgaataaaaatgaagatacgacattacaaacactcacggtatgtagttatagcagtgcttagagggaaatttatagttacagatgcttatattaaggaagaagaaagatctcaaatgaatgacctcgcccctccaccttaagacactggaaaaagagcaaacctacttaaggaggcataaggaaggaaataataaagatcataaaagaatactatgaaaaattttatagcaatataattgtcatatgtcaaatgtcagaagcagtagacaatctgaatagatctatatcaagtaatgagattagtaatttaaaaactaccttcaatgaaaagcccaggctcagatagctttacagtgaattctaccaaacatttaaagaactaataccgattctttacaaactcttccaaaaaacgggaggggagggaactgctgttcccatatcattttatgtggctggtatttaccctgacaataaagccagacaaagacgtcacaagaaaactccagaccaatatctcttatgaataatggatgtgaaaatcctcaacaaagtactagcaaactgaatcccacaacatatttttttaaaaaacaaactgtatcatacatgatcaactgggattttttccaggttgccaaggctagttcaacatttaaaattaattaatggaatatattaatagaataatttttaaattacatgattatatcaatagatgcagaaaaagcatttgactcattgaattccctttagtgatagtaacactgtagcaaactaggaatagagaagagtttccttaacctgaaaaggggcatctatgaaaacctcgtagctaacataatcagtgataacagactgggaatttccccttctaagactaggaacaagacaaggatatctgctcttgctatttctgtttaacattgcactggagactctaggtaaggaaattaggcaagataaataaaaggcatctagtttggaaaggaagaggtaagactgttttcagatgacctgatcttatacacgttgagcatcccaaatccaaaaatgtaaaatttgaaatgcgccaaagtgcaaagtgttttgagcaccaacatgacgctcaaaatcctcat

SEQ ID NO: 175993 - DNA, 610 bp, Homo sapiens
tagaagtaaacccatgtttaggtatacttggatacatactgtataaatttccatagtacatgatgctaaaattaaagacactgagtactaaatgaacttcatcctagtaaataattatgaaccaaattattctatatagtttcggccttaagtatactaagagcatacaatataataaaatccagcttctctgggccttttgttttcaatgtgtatttttctaaatctgaaaatacctattcggcagcaagtataacaaaagcaaagacacaaattaaaactattgattattctgtttaaggccagggtttctgagttttagtctgattttaaaaaacctccgtctgtccctctctccctccctccctctcacggtaacagccggagaggcaagtatggtaaggtcgacctttaaacgtttgctggatcagcactgggtggggataagaaaagatcaagggcaaacagaagatatttgcgaaagggatctatttgcacactgaagttgatttaaaagtacgtttaaaaatcaagttggtcttaattcgtctgttctattttccatattcgtggtgacaaagggaaaaagaatctctggctgcccccaaac

SEQ ID NO: 175994 - DNA, 738 bp, Homo sapiens
cagcatcctccccccacccccatatatatagatgccacttttaggtagtaatttttattgttattcaccaacttagaagtgaatccatgttttagtttactttggatatatactgtttaaatctgctctgtcactgacatttaaaaatttggttacgttaggaagatcattttaatttccatagtacatgatgctaaaattaaagacactgagtactaaatgaacttcatcctagtaaataattatgaaccaaattattctatatagtttcggccttaagtatactaagagcatacaatataataaaatccagcttctctgggccttttgttttcaatgtgtatttttctaaatctgaaaatacctattcggcagcaagtataacaaaagcaaagacacaaattaaaactattgattattctgtttaaggccagggtttctgagttttagtctgattttaaaaaacctccgtctgtccctctctccctccctccctctcacggtaacagccggagaggcaagtatggtaaggtcgacctttaaacgtttgctggatcagcactgggtggggataagaaaagatcaagggcaaacagaagatatttgcgaaagggatctatttgcacactgaagttgatttaaaagtacgtttaaaaatcaagttggtcttaattcgtctgttctattttccatattcgtggtgacaaagggaaaaagaatctctggctgcccccaaac

SEQ ID NO: 175995 - DNA, 377 bp, Homo sapiens
taaataagtcaaccacagatgatctctgaagccaaaatgagagggaaaggaacaattaagatttttcacactaatgcatcacaaagtacacttaagtcaaatcttcagatattctaatttccaaaagttcaaattttgcgatctaggcataaaatatatctatgggaggtataccaggaaaaaaatacaatgcaacatatcctaaatttaaatttgtacactgtactgacacaatctaggattcaatgaacatctagctgcttttaaagagggtttcaaatttccaaatatagctttgacttttctcctaggatggtctagttcagtctgtgtaggtgagtgacaagaaataagcagacactgtaactgcagtaatc

SEQ ID NO: 175996 - DNA, 278 bp, Homo sapiens
agtttcagtggagaaaggttgggggtggggggaattcgacctatagctgagcaagagccagtgagagatgaggaagtgaaaatagtgagagttaggaagcttgactttgaggtgaagaagaatgctggggatagtaatggtggctcagagtcaaaggcaaattttgtattattttgtttttattttttaactgagaagtctcaatcacgcatatatcctgagaagaataaatcaatacagaggctaatggggaaaagtgatcaacagataatgtcagt

SEQ ID NO: 175997 - DNA, 334 bp, Homo sapiens
ctacccacgaagtgtttgctgttcagggatcagaaaagcagctaaaagagcacttccaggaattcagaaaacccacggtttgactggtaaggaggcgtggtcaaagtgactcaaaaggagagccaggggcttctggaagactaaagagaaagctgctggcaacttcttgggcagaggacaagacgctcctagaaagatcaagtcacttcctcagcagccatcggatggggcgtgctctagagccacctctgtgctgtgggtaacaccaagcctgggcttcctttcttataaaacaggaggaacagtccacaccctgtgcacttcgtgggcagct

SEQ ID NO: 175998 - DNA, 481 bp, Homo sapiens
aaaatcacatttgccagaataaatattttgaaaaaatcatcgaaaccacttaagatattttcttccttttttagaaaaattatttcaataaatgcacatacacaaaattctgcacacaagactcaggtgttctttgtttctaacacaaacttggtacggttatcaacagaaatcaagtctaatatcccagccaaagcacaaccaacttcctcctctgatcctaaaattgctccaaaaccctaagctctgttttatgaaaaagaaatgagacataatgtatatgtaattcttcccaaggccaaataaataatgctcaattttcaatcaaatctgtcctcctacaaatcttttggccatttttgcctatccaatagcatcaccagggatggaaagatgagactatactgaatccagtccatttggctcttattagcatcattggtgaatggtttgctgtgtaacaactggcaatccctatact

SEQ ID NO: 175999 - DNA, 258 bp, Homo sapiens
ataaactcaatgatccatcaacaagcaccatactcccaggtcctccagtgtttacttcccattctatacatgcactatccagacattcccattctcttcaaattccaaaatatcctatcacctcccctccccatacacacattctacttcaccaacaaaaaaaaaggtaccagctgcgcacggtggcgcttgcctgcagtcccaaagtgctgggagtataggcgagagcaactgtgcccggcgaagcagcatctcttt

SEQ ID NO: 176000 - DNA, 388 bp, Homo sapiens
atttagaaagaactgtgatcttccataaatacagcaaaaaaggtagtaaaaggtagaaaatagtacataaattgcattatgaatcagtgcctggactgcagagggatggctactgttttggtttattgcaactcgctgagtctctgagccagaaagcagacagggaggtccaaagcctctttctgattagtttcaggctggcagatttgctcggatatagaaactgcacaaaatgtttatctcaatccaaacccatcaatcttgcagttcccaacaggttgcagttgtaataggttcacccattctgttttattattatgagtttttattattctcagtgccttaatttcatatacaatgggaaaagagaatatgtaatttagtatta

SEQ ID NO: 176001 - DNA, 332 bp, Homo sapiens
tctgtcacccagccctgagtgcagtggcacgatctcggctcactgcattctccatctcctgggttcaagcgattctcctgcctcagcctcccaagtagctgggactacaggtgcacaccaccacacccagctaatttttgtatttttagtagagatggggtttcaccatgttggccaggatggtcttgatctcctgacctcgtgatccacccgccttggcctcccaaagtgctaggattacaggcatgagccagtgcacctagcctacattgcaccttctaatgcagaggttgtcaaagtatggcttacaggccaaacccagttcttgacct

SEQ ID NO: 176002 - DNA, 261 bp, Homo sapiens
agcctgagggttgcatttaaaattggcattaattttgtttttcacaggcttagcttttttccctgaggcttctaacaaattctagttggcttctgtctctattattgaccatgtgtaccaagtggaatattgtctataaaaatttgaaggcatctgttgctttgcaaagactatgtgccttttatgccttaggtaagcttatcaattccagtcccctttaagaggaggctgaccatgcccatggttgcagaggtgaaaata

SEQ ID NO: 176003 - DNA, 685 bp, Homo sapiens
taagaatgtctaaaaggtcaagtaatttgaccagccttttgggggaagtccagtgaatagtagaataatatttagagatgaattttctgtcataggcatgggataaactctatttcagtagaaaggcaagataatgagcaggatcttatatagacaaatcgttcattccaaacatgctggctctaggaggtgttcagtgtgtttgttgaatgagtgttacagatgaattgaggtcagatggaattgaggtcagatttctccatgagtggagggattttttttctctcatgtcctgggcacctaacaccatgcctggcacatgcttgtcagctgtcctttgttgaatctgcgaataaatgtgaggccgactcaacaactattacctccttgtggatatgcatataagctcttctagagtattttgggggaagaaataaccagaatgtctgccctctcttcttcctttgtgaaactgttttctacagttacatttagtgtcgagaaatgagggcttttttgttttgttttaagtggcttttaaagttgctccaagattcatgaggttaaagtataaaactttaatactttagaaaaataaggacttaattctggattctgacctctggtggtgaagaagaaacacctattactcataataaaagatcagattctcatatgttctgta

SEQ ID NO: 176004 - DNA, 537 bp, Homo sapiens
caaggatgccaagatgcttcactggggaaacaacagtcttgtcaacaaatagtgctgggacaacaggagagccacaacgaagactgacccttaccgcacaccagggcaaacaaaaagcgaaagctataaaacacttagtagaacacaggcataaatcacggcaatggttttcgctaggacaccaaaagcacaatgatcaaagagattgataagttgaacatcatcaaaatttcaaaagttcgtgcatcaaatgacaccataaagaaaataacaagtcagtgcacagattgacaaaaaaaattcaaatcatacctttggtaagagactggcatccttacgtaaagaactcttacaactcaataatataaaagacaactcaataatataaaagacaactcaattgaaaaatgggcaaagatggctgggggcagtggcttatgcctgtaatgccagcactttgggaggccaaggcgggtggatcacgaggtcaggagatcgagaccagcctggccaacatggtgaaactctgtatctact

SEQ ID NO: 176005 - DNA, 395 bp, Homo sapiens
ggtgcggcacgaggggcagccacttgccatgtgtggttatttaaagtaattaaatttaaataaaattaaaaattgagttcctcagttgtactagccacctttgaagtgcttaatagccacatatagcttctgcattagccagtccacacataaaacactgacatcatcgcagaaagctctttgcacagtactgatctggggcctatctttctgtctcattccctgacagacccctcctacgtaccctaggctccagccacatgaaacacaagctacagatcactgaaatgcctcgcattccttggcattagcagaatgaacctcttccttgtgttgtcagttgcattcctaagaatcaatgctgacacaaatcaagcatgagtcctcggtgagtt

SEQ ID NO: 176006 - DNA, 140 bp, Homo sapiens
caacaacaattgccctagtcttttctcccaagatgatgggaattgtgaactttcatgccaccaaaatgacttgcccaaacactgtgttaaaagacttgtcccgattttagcctggcttccatttacactagcctatgtcc

SEQ ID NO: 176007 - DNA, 371 bp, Homo sapiens
tgaggactgtggttctcaatgcagaaaatttgaccttggtttgtactttttattaaaatggagctttccatgttgcatgctaggcagaagttagaactataaggtcatacttcaagtagcttaatccatctaacagacctggataactcaaacagctagctaatgtttgtgtttcccagtacaacatttaacatgatactatttttcttacctatgttatttatgatatgtagtgtggtttatacttggtaagcaagtgaataaataaatgtcccagaggccaagtggagagaattattggattatattaggtcagatggggtggggaaggaaggaaggttactttgtgaacaacaagttgtcgtttctgt

SEQ ID NO: 176008 - DNA, 414 bp, Homo sapiens
cccagtgttctccccgatgccctccagccccaaggcaccctgaaaaacgcctttcacagcaagcctgcgtgcttctgccttcccgagccccacccccacttccctgcttttttctgatggtgggagagaaggaggagggtcctagccccctctaggctgctcttcttggagtcaaactggattcatttccagggaacctaatgtgtgattacacacgcagctagcttatctcacaggtgatagcttaccaggtttgtgtactagctcagcgcacatgtgtgtgatagcttatatgctttcctgtggtctcccatgcttatttgatagcaaacatctatggagcatcaccacacaccaggcactgtgtgaggcagcagggatacagtggaatcagacacagacaccacctcacta

SEQ ID NO: 176009 - DNA, 444 bp, Homo sapiens
cctaggtgatgaggatgatgccctttctcccaaacttctccagaacccttattttgtgactgtcacacccactgaaaaaccaacaaggggaaaacagagaagagaggatgtgtccttgggcgagaggaaggtctcaatcttccagaagaatgagggcagagaatgttttttaaagctgcgtgatccacaagtgatggggatctgaaggcttaaataaaacttccatcttctttgaagtttttgatctttaaagagaatatttagttcccattacacactattcttggtagttttgttttgtctcctgcctttgtgttttcagctatggctcaagaagtttagaagcctccttccctaccctcctcctcctcttcttgagtctgcttacaaggcaccagcaggtaccatgggggataaagaaaaataaaagtacaaagcagatcc

SEQ ID NO: 176010 - DNA, 500 bp, Homo sapiens
gaccaagaaaaggatccttatatatcgcaggagagctgaaacaagaagtcagagtgacgccttatcagatctcagcatagaacgtgtgtgttgaatgatataaagttttcacccctttgtgctgatctgtgaatgaccgtgaacatactacaaatactgatttgggggttaaaatacattttagtgactacgcaaatctgcaaacatagaactcacaaataacgaggatcaactgtacgtctaaagttatgatttcctaaaagtaaatttcagaggcattgttttcatattatctattcggcttagaatagattgaggcaggcagagcaagcaagctgatctggggaaaggaaatgatgtatcatttctttggaattctgagaagttgaaatatctgcagtatgtttctacagagtatatattgaaacaatgcctatcattaaagtgagagctagaaagggaggaactacagaagaaaccagaatagcaagatgtctatt

SEQ ID NO: 176011 - DNA, 664 bp, Homo sapiens
acagcttgttcacccttcttctgtgtatgggcatttgggctcctggtttgggaccattatgtgtaaggatgtcatgaatatttatttatgtatgtagcctgtgagcttgccttcatttctcatggttcattcctaggagtgcagtggccacatcatgtcatggtaggtctgcatcgaccttgttaaggaatcactgtcccttgtgctaagtgtttggtccattgcctgctttctctcttgctccctctgatttagtcatacaaacctcttgtatccttcaccctccagggcaataacttcttagcataccgcctttctttacacttggaatcaccagctccttctttatgtgctggctctgattccctcactaaatttgccctttgtgccccatgtgtgacccattcccattgatacaccctatgtatgagagggctttgggataagagactgtttctgatgagtatcgagtactacaatggctctgaatggaagaaagatgactgggtgggtcttgtcaaccattgtccctggagctcatctttgttgttacaaataagtctgggtgtggcctgggcatatgttcaagtactcgcaaaccttttctaaatgacaactggagaccaggccatgggctggaatgtgagtatgaagttacttggaa

SEQ ID NO: 176012 - DNA, 656 bp, Homo sapiens
gctttccaatgtaccaatatttaacatgcatttatttactttgtctggagtcccacggatgatctttgaagtcttaatatttaattacatttccaccttgtgcaaaatgtttgagaaaggaactttacattacctctcaacagaatgccaatgtcatagactctctaacaagggaggcaggatgaggaaacaagattattagcttctcctaaattgtcctcactgttttgtgggaagtttgtttctgaaagatcatacacacattttgaagccaagtggaaattttgttgttgtgctttacaaacacaaagtacttaaatacttaattaagtaattcatttatcgtttggattatccaccattcattgtcctctgcttggacaactgaaaactgactgaaaagggctgatgtgactatagacattaagtaatatataactgaatgctttaaagatgacttttcattttcaaagaacttgcttatattacagaactagtaaaataatctagcattttcaaagagaaaacaaagaaagaacaaaaactcttaatatttatgccaagtaataaaaaagtatttgacagaaatgatagagatactgacgcttcatcctattagctgtggtaggctcaagaactgatatattggtaattac

SEQ ID NO: 176013 - DNA, 393 bp, Homo sapiens
tctggtctcaagtaatggagagaagtgagaaaaagtgagctcagaggaaacatcctcttccggccacatcatatcctctctctctcttgtggccttaggcatgtcgctggccttcctgggactcattatcctcattgtaaagagacagcaatctgaagctcagaaagagattggggagcatgaggtgggggagtaccaaggctaaggagaccaaagcagtgcttgggggcctcccactctttaccttgggttctaactgccacccatctcgtgcttaatgggtccttctgactccagggtgagaaatgttctccttagcatcaggagacgctgcacatgagcagttcctccccctgggagtactggttcagtgagcaaaacagcaaggggctg

SEQ ID NO: 176014 - DNA, 341 bp, Homo sapiens
ggctgtgaacaccttggagagcttcagtgtgtaaaggttgagggaaagtaggtttaaattataggtcagattcccaggccaacagtggtactgaaatgagggacgtgtttctgctggattgcatgtttttctagcacctctggcaatcaagcaccagaacttggaaagacagaggagtgtgaggtcgagcagccacacgggcagaggcaccttcttccaagcctgacaggttttgctttattagcagaatatcatctccgggtgggactagcctgcagtcagtgagggagagtgcgtaacaggaagttgatccagggagagcggcagtggccagtacccgt

SEQ ID NO: 176015 - DNA, 479 bp, Homo sapiens
cttaatcagaatgtaggtccatccctgtctcaaacggcttcagctgtggtctctaaagatctgaggagaaataagtgacagcctccctagaggctgggcctctgagtatggaactctcatgataaaagcatcacttttcatctagaaggagatatcaggaagaaagaaaaaaaggagataaaaagcatcactcttcaattcaaataagcccttgattgtgccttcgtggctttcctggatatcgcttagtgttttctctcatctttgcagcagccagccatctcttcgtcccatcttctgcatcactctgtttatatctttctccactaaattaagctacttgagggtaagtataacagttgagtcatcaccatacatggctcccctaatacatactttcttcataaggttttactttgaaataattatagattcacatgaaattggaataaatatacagaagttataagtgcctatat

SEQ ID NO: 176016 - DNA, 326 bp, Homo sapiens
tatgcctggcaatgggatacgaaacaaataagagctagcccttgtgaatcaaatagctttggtgacagaaatagatgtactaattattatatgatgtagtaaatgctataataccagtattataaccaggctatagaaacatggaaaagactatggtatggttaaggaagaggctgggttaaagaaggtttcacggagacaatgacatttgagttagaccttgacagataagtagaatttcacaaagtggaaaagattgtaaaggcatccaggaaaaagaaccagaatgaacaaaaataccaatgcctggtgacccattgcaaatc

SEQ ID NO: 176017 - DNA, 349 bp, Homo sapiens
ggttgtatgctccccgctcctctctcccctcccggactgaagggcaggtctctggccctacatggtccacctctgtcagccgccaccacactggctccgcctgggaaaatcctgcccgccgatgtgtaagtgtgtcactgccaataatagtgcgaagcctccaaatctgagggcctttctaggatcgtttcctgattaattaggtcagcatctccaaaatcaatttccagcgaagtcgcgccacctggtagcgccgttccctgcccagccaggcgagggagttggcacgggaggcaattccctggcctctggtgcagttcaggtcttgtctctacctcatctcttctgt

SEQ ID NO: 176018 - DNA, 540 bp, Homo sapiens
ttaatgtttgtgcctaaaacaaaatagcatgtagtcaacgacccttgaacatttttaggaagaggccgatttggagagggagcaacatatgcaaaaactgagagaatttggcttcgggtaggaaagacaagtagttcagtatgtttaagactgtctagtggcccagagagaaggttggctgcattaatgggggttttgaatgtaagagtgtggacttgatgctgaaaggaagctattaaaacatttataagccggaagtggcaaaatcagacttgcattattaaaagattattatagcattaatgtgtttaaaagatcatcatgacttcattgtagagattaaggttggagacctggagaccatttaagaagttattcaggtaatccaatctggagatagataatgaatattgccctgggcagtggcagtgttttggagagaattccctgggcagggtgactgcagggtatttacactttaacctaactgggctgctggttttaaccattgccctctctgggaacttgactccctataga

SEQ ID NO: 176019 - DNA, 293 bp, Homo sapiens
tccttcccagaatttcggatgactaaacaattcgcctttaaagagatctggttactggcaaagctaataagtcaaagaagttaaacaagaaaaaaatctccatcaccagggatgccaataaatctaggtagaaaggggctcctaaaagaagaaataccaatatagctacgaaaagcaagaggaagccaaaggactaccaaatgggaaaaagatatttcttattttttaattctaatgttatattctcccagttgtgttttggaatcatgtaaaatgcaaccttccaatcacat

SEQ ID NO: 176020 - DNA, 179 bp, Homo sapiens
aagccagtaactccatccgggggtgagggtgagagggagacaggtgggaaagccagcaactccatccggggctgagggtgagagggagacaggtgggaaagccagcaactccatctgggggtgagggtgagaggcaggacgtcctggaaccacagaggcttgacatccagcccagatca

SEQ ID NO: 176021 - DNA, 432 bp, Homo sapiens
gggacctccacccccacccccactccaatttgttggtacctacttataggtgtgttctcttgtcaagctggttggcttccccacaggataatgtgccagtctgatttggcttcttcagacagggaatgttcggttttctgctgtggtgagggagagtgaattgcctaactgcacagagtgcgggaggcaatctggagtcttactgcttctttttacagcctttcaaccagtcttcctctgtttgagagactcagcacctccagttcctgagccttctttgtgaatctgcctgtttctgagctcctttacttagatttcaatttattaggtctgttacattggttctcattatttatctgcttttcagattttaaaaaatctattctgttttctttgtcctcatgtgtttatgctgtgtgtgtgtgtgtgtgt

SEQ ID NO: 176022 - DNA, 111 bp, Homo sapiens
ggtcgcaccattacgctccagcctgggtgacaaagtaagactccgttgcaaaaaaaaaaaaaaaaaaaattatagacatctataataataatcaacattgtttaatattag

SEQ ID NO: 176023 - DNA, 330 bp, Homo sapiens
aatcgggcatgtgattgtaagagctgggggtcaaagagacgaaattggtttaataaaacaaaatggggccacctgggtatttaagtgtgagaccaggtctctctccaaagacaacaaagttctacatctaatgccccagggttcctttgttcaaattcagccaatctcttcatgccacgggtcttaaaagatcctgaagttacagacttcaggtacttggtgtgtatgcgcacaggtacttcatacacttcgtgtgtgtgcgcacaggtttccaaggagagggaccttagctttcttcttttctcaacagatccctcacctcctcaaata

SEQ ID NO: 176024 - DNA, 591 bp, Homo sapiens
ttcacagcgcaggttgaactcacagccttgtgcgcccgtccctgtgcatcaatgattttttaaaaatcatattcatagggctgtgtaaccatcaccacaatctaattttggaacattttttgtccccctctgcccccactgccccggagagaaaccccatacgcattagctgtcactctaatcccctccctcccaccaggccccagcccctctggcaaccactagtctacttttggccagactctgctgagacattagaacaggatttatttatttattttattttattttatttttgagacggagtctcgctctgtcgcccaggctggagtgcagtggtgcaacctcggctcactgcaagctccgcctcccgggttcacgccattctcctgcctcagcctcccgagtagctgggactacaggtgcctgccaccacacctggctcattttttgtatttttagtagagacggggtttcaccgtgttagccaggatggtctcgatctcctgacctcatgatctgcccacctcggcctcccaaagtgctgagattacaggcgtgagccactgtgcccagccttagaacaggatt

SEQ ID NO: 176025 - DNA, 384 bp, Homo sapiens
aggaggctggggcagactccagaggagggacaaggacgcctgaactacagaagcccgggtgacgctggagcagggctggaaggagagacgtgaacatcacttgggagtaacttattaggtgttatgggagacggagaaggacaagttgaggaagattcccaggtttctggtttggacaatggggtgagtgatgttgctgcaaaatgaaataggcattgagggggtggagcagcttggtggggggatgatgatgagcttgtctgggggaatgacagacaagctggaggaggtgtccagcagacactagggtatctgagcccagagctcaggaaagcactccaggctggcttcagatgcagatttgagccacggtgtactcagaat

SEQ ID NO: 176026 - DNA, 494 bp, Homo sapiens
acccctgaccccgactgagccaccattgctctccaaatgcacacgaagacggtccatgtacccagcccatacctggctctgataggtcaggaggatgcttggagaaaagccctggcccagctgtgatactgctgcagaccctggcaccagctctgccaagctgacagccttggcccccagtggggctgcccctcctcagccctccttgagctgattctgaattgcccccaaacagctggggtgatctggcatccaggccccttggccttcttcccctcaaaggctgcccagcctgcgtgcctccatcctagaggctgccccactcccagtagcttggagccatgagggctggcagctgccagagtgcagaaactgcagacagtagcgtttggggatgttttccttgccttggcactttcctcctcctgacctcaccataacccccatgagggcatggctgggtgcaggctggcccatttgcaggttgaaactgt

SEQ ID NO: 176027 - DNA, 357 bp, Homo sapiens
gagaccactttatctcccctcacctatgtagtaatttcacaacattacctgaatcccaatgtattgaagaaaaataatagattatcaagattcagaaatgtcattgcaatatgatggtgcaataaaacacgtgcaaaatggcatgtgtttttctcatcagtctatcctggaatagagcaaacccactccagagtaggagaccactttatctcccctcacctatgtagtaatttcacaacattacctgaatcccaatgtattgaagaaaaataatagattatcaagattcagaaatgtcattgcaatatgatggttcaataaaacacgtgcaaaatggcatgtgtttttctcatcagt

SEQ ID NO: 176028 - DNA, 154 bp, Homo sapiens
tttttaatgcctattgtccccgactaggctgtgtgctccatgaggacaagaagaaggactattctgttcacatctcattactcagcaccttgtttacggcacatagtgggtataaataaatgctcaataaatgatgaataggccgggtgtggtg

SEQ ID NO: 176029 - DNA, 453 bp, Homo sapiens
ggctcctccaacagccccatcccttagcacaggcggggctggcggagcactgcaggggccaggtgcagccaccgtgcagcaaggcacagctgcctgatcaaaccagatcaaaagccattcgatcatccaaggactattttcattcgatatttattgatttctaccactcgctggggctgtacagggccctgagcttgccgtgaggagcacatttcagcccccaccccctcggggctcacagtctggtagaggaagcacatgaaataaaagaatttgcacatgtaaatatctcattacaaatgcgcaagagccatgaaggaaaaaaaaagaacacgatgggaggtaatcacaaagtccacttattttagacaaagtggttggcgacagccacatttttgccaagacctaaaggatgggcaacagtaaaaataaaaatcatcatcatcgtaatag

SEQ ID NO: 176030 - DNA, 337 bp, Homo sapiens
gaggagagaagaaaacttaagttatggcaagataagagcatgagaacaagccagagaagggaaaattgagaaagtggaagtaattgttagtgaaataataaatacagaagagtgtactgtagtagtggagacatcacccacccagacacagatgcactaaatagatcaatctgcttagcaaataaatgcccaggagaggaaagcaaggcaagaagcggatctcatcaaccactggaggacacaaacagtttacttccaccaaatgtactgaaaagatctcaataacaagagccatgattattcctacgttaaatatgcaatttacagattaactggg

SEQ ID NO: 176031 - DNA, 290 bp, Homo sapiens
cctgctcactttagggcaccctgggaggtgggagctggctcagcaggcagtcttataagggactgagcttcaaggcctctgtccctccaggagggaggtgcatgaccagagagggaggcctgaggatcttcttccctgccccagagggtctgctgcctgagctctgtgatagcgcagagagtaaaaggatcaagcttgattgaggcctatctctcaatgcgaaagtttgctagttaagaggagagtgggaagggcatttctggcaaagagaaaagtgtgacagcgcatgg

SEQ ID NO: 176032 - DNA, 533 bp, Homo sapiens
ctggagtaggaattgagaaatgcttattagctcaattcctctttctgatgtaaggaactaggcgaatgcgaatggctcttggctgtttctttgctgtcagagaggctgacattccaaagatgcttccctcacccattgcctactggtttatccgtttttctgagctgcagaagagctgggatgattcagcgtcttggggtggggtggagaggagacccaggacaggcagctattgggagcttaatggtagaggtggatggactttttgttcccaggcagaggagggtgtattcgggccagtggcggtccagttagtggaggcctgtggacacggggcaagtaagctgctctctctcaagcaaggattcttccccgggcagtttccctgctccagattcccggggaggaggagacttcctgagttctcaatctggataaggcactcagaaaactggtcctacatatgttctgcttgagggctgctgcttgtagggtgcagttgggggaacagaaggataagcagatagatacac

SEQ ID NO: 176033 - DNA, 133 bp, Homo sapiens
aaacattgattttgtcaacagaatacctttcatttaggaataatatggagagagattatctcagaggctgagagcacgagacaccaaatattcagaggataattaaagtgttcttccagatgttttcaaatat

SEQ ID NO: 176034 - DNA, 237 bp, Homo sapiens
agatatacttaaaatttattctaagatgaagtcttcaaaatcaggtgtatatatcatgcttacaacacattatataatttatggctcctgcctagcaggggtcatcactgttagttcaacttttctttggcaagtctactccctgtgccccaccgtacactgctacattattgtttgtatatgtgtgtgtgagactgcatttaggcaactgtaataggttgaatttggttatttaat

SEQ ID NO: 176035 - DNA, 1212 bp, Homo sapiens
gtagtttggaaaaagcaggcagaaatgaggacacacaaaaataaaattgaagccaaagaagagaagaaattcatactggataagagaaattctatttcattttgatgaagtgttttcgaaggcctagagagactttttttctaacctcccatgttatatttatctcgtgtgcttctgaggtaactaagaaaaagaagataagaggagagaacggagaaatagattttcttttcctcttgaagcctgtttcttggtacatataaatgtaacacaatagccgcaagaatcatcacactttaagggcaagtggattttaaaggaccaaataaatagcttttttcctaagctgtatttccatctcatcaacagtaaaatggtttctaaaatgaggtgttaaaaaataaaaattaaaacattgccagatgcttttgagaatgcatactattgtgatttgagacctcataggacttaaaatatgcctttttaaaaattattcttttgctgtgagagtttgtagcttaaataattcagagtatatatttcattttacatggcaaaaatgacatgcgttttgatgatcagaattctatagtaagtcagataacacacaatataaaattacttaatgcaacactgctgcttatcaacccctccaccttttgttcatctctccatccagcaatcactgggtaagtctcttccaggactgatattttgctcaatgctggggatatcataatgaataatattttcccattttctagaaagctgatgttttaataggaggtgattactggggttaggaaagtgaatattttgtctttgatagatcctagggattatatctctgtggagagtgacccttttctttgccaaataaatctaggcccagcccaacctctatgaagttctttttcccttgattacctggaattaatatgcttgtcctgattttcatagaccacagtaatatatattcaagtctcttgctcacctactataactttgaaatttttttagcaaaaattttaccttgaaattatctcaaaacccaacttgtcctcaagttgctgaaataaaggtagcaaaaaagaaattatacagcgaatctatcagacctccattttaattcttagagttaaattttgacataattccttcccaaaatttagtagcatttttttctttctttcattttggtattcggatagc

SEQ ID NO: 176036 - DNA, 430 bp, Homo sapiens
tcgctcatcttgcccaggctggtcttgaactcctgggctcaggtgatcctcccaccttggccccccaaagtgctgagattacaggcatgagccaccatgcctggacactgtttttaaatagtgaaaaaaagacttgaagtactctttgtgaagattgagacttcttgctacataggatttggaatcacaggcttctagagacagaagggggtcttaggaattcacattttaaagaaggaggaactgacacccataggagttaaatgtcttagctaaggctactcagtgctctggtgagagacaaggcttccatcttctaggccagtactcttacccctaggctaaaggttcaaaaatgtgcaggcgctggctttagtaaaatcagctatactaagcattgtcaaatgttttagccaacaacaaaacaatc

SEQ ID NO: 176037 - DNA, 745 bp, Homo sapiens
ccgaaagctccggagcgtggaggtggggggccgaggcccctgagggggccccgccgcgatgggcaacctggagagcgccgagggggtcccgggagagcccccctctgtcccgttgttgctgccgcccggcaagatgccgatgcctgagccctgtgagctggaggaaaggttcgccctggtgctgagctccatgaacctgcctccagacaaggcccggctcctgcggcagtatgacaatgagaagaaatgggatctgatctgtgaccaggaacgattccaggtgaagaatcctccccacacttacattcagaaactccagagcttcttggaccccagtgtaactcggaagaagttcaggaggagggtgcaggagtcaaccaaagtactaagggagctggagatctctcttcgcaccaaccacattgggtgggtgcgggaatttctgaatgatgaaaacaaaggcctggatgtactggtggattacctgtcctttgcccagtgttctgtcatgtgagtaccaccccggggctgaagttggggaccagttgggggaggacatagttccattctactttgataaggaagggtgagagttcaacaatgaagatggaaatgggaatcctggacaggaaggagtagcccaagcagtggtgtggaagtaggcaggcaagcccggagatgtctggggatcagtgaagaatggcacttggctggagtagaagataagatgcattttggagaacag

SEQ ID NO: 176038 - DNA, 482 bp, Homo sapiens
cttcaccaccacccctcttacatcttcaggataccatctcctgggctccttccccaaggctggaaaacagcctccacctctgtgattctataagccttccttctattttattaccctttacaattctatctctctcctcttctccatcatgcatcccaaaagaagggtctgattattttcatcactcttcctatatttactccaactattgcagccagacctctctctgcttcctgcaaggtgcctactgatttccaggttgccaaacgcaatggctttgagctttctgttctacccttctgaaacccactctgccctttgattctgtggtagtgcaacatcctggtgctcctgggaccaggatggtctatctgtccattcctagacccttccagtttcctcctcttttgcccatcccataaatgagagtaatccccacaatcaaaggtggccacatttagcaaaaaaagacagaaagccca

SEQ ID NO: 176039 - DNA, 532 bp, Homo sapiens
tggcatttgtttttttggctctaagaaattttcaggacctagtcaagcatgtgacaacaaatatttaatgatagtggacaaggtaaacttcaaaagtgactagaaacccttgtggaatctaagacagagggactctaacaagcttgatgacattttgaatacgttttgtattgattactgactcttttcccaataatctgtgaagctggctttctgtttggcaaggcagccccaaaaggaaccttcatcccatacctccatgcaggagtagcacagaacagcacccagcatcgggccctccagagtctgggagggttcggttgtctcatgaattatgtggtgcccttcaggaactcactttgacctctgatgcctttcctttcaagcaagtggtgtggaaaaatattaaaactctcagtaatgacagtttccagatatgcatatctttgagtggacaatgaaggcaacatttatattctgtccacgatgcgagcatggtatgcattctgcagctgtcacagagccttccttc

SEQ ID NO: 176040 - DNA, 248 bp, Homo sapiens
ggaaatgaagcttgagactctacttagatatcaaatttagtgctattctcatcatctttaatgtgttttctttcacaaatgactactagtggatgtgtttaagtccaaaaaaaaccctctgatgaggtttaagatttggggctttaagcatcctgttgacttctattgttagtttcactatattaaatttgagttaggctaatagtaagttttatttttctgtttttcattagtttttatgagttaag

SEQ ID NO: 176041 - DNA, 468 bp, Homo sapiens
ttaagagattggggtatccaagaaggaatgcatatatgacaagagaatctgtatcacaaatatataaaacaacctcagtaaaggtggtggggaaggtgacaacctagataactatggaaatgagtgaagtctgtaagactaaatacgataggaactgcatataagcactgtactctagttgataaagatgttttccatgaggatatggattaacaattctaatactactatgtatctatactggaattgaacaattaagtaaatggatgatgcagggtacgagccagttttctcactgctggagtgagaatctacagataagctggaagaggagattagaatgatctatgtggtactgtataagagttggcgacatatgtatgaactcatgtttagctaaatagatctacagatagttgcaagcagaaatatttatagatacatgtattgcacaggttagtacacaca

SEQ ID NO: 176042 - DNA, 167 bp, Homo sapiens
taataaagtgatgtctttttgatgatgtggaagaaatgctaaagtttttctgctcatttccactctacaggctgtgtgcatataccaaatagttttttttttaatacaatgtggaagaagtaaagtcctaatataatattctgtaactgtatattcagtcatcctcc

SEQ ID NO: 176043 - DNA, 283 bp, Homo sapiens
gacaaactcagcggtattaaatatgtaaagtaaaactaagagccaaacaaataattatttgcatgtgggccagcttcatatgtccttaagctacaatacccataataatgaatggtaggtttaaaaaatcctttccagctgggtgtggtagttcacgcctgtgatccccgcactttaggaggccaaggcgggaggactgcttgagcccaggagtttgagaccagcctaggcaacaaagtgagacccatctctacaaaaattagctaggcatggcgtgtgcctg

SEQ ID NO: 176044 - DNA, 512 bp, Homo sapiens
taatttaattgtagattttaaaataaccagaagagtataattggattgtttgtaacagaaaggataaatgcttgaggggatggataccccattttccctgatgtaattactatgcattgcatgcctctatcaaaacatctcatgtacctcatgaatatatacatgtacccacaaaaattaaaaataaaaaaaaaagaaaattttgctatctcagcaatggatttcctagttgctgaagagatctaggtatacacttctatttcaaatttaaaatgttaaaaaaaaaaagtctttacaatcattttgatgtcaaaacttggtttttaattaaaaaaaaaaaagcattcctgaaaaggtttattaaaactggttttcacacctcttatgaaaaagaagtggctcacacttataatcccagcactttgggaggccgaggcaggaggttcacttggggctaggagttcaagatcagcccgggcaacacagggagaccctgtctctattaaaaaaaa

SEQ ID NO: 176045 - DNA, 245 bp, Homo sapiens
cctcctgggcttgagcaatccttccgcttcggcctcccaaagtgctgggattacaggcggcgtgaactgccacacctggtcagaggatacttccatatcaaaaatcaaatataatataatgccatcatttgcaaataactatagaatattttaatgtttatttagcttgacctttggggattcttgttcctgatttatcatacttgttttagtcacaccagagataatgatcaaacattaaataa

SEQ ID NO: 176046 - DNA, 1795 bp, Homo sapiens
  misc_feature (1000)..(1000): n is a, c, g, or t
  misc_feature (1745)..(1745): n is a, c, g, or t
actgacttgttaatattcaatctggagatcgtatacccatggagtgttgtaggggcccctgactttttctctgaatagtaactctgaattcgtaatggctgtgtttaaatttttagttttctttctgtaggaaaagttctgtgaggatggctgcattgtgtcaacttctaagccaaagtttgggaatcttaatgaaaccaagactgtagatgttaccaggaagttcactcagagcaggctctgatgtgatgataggagctctgggagccactcacctacttcagcttatttcatctagcaattctctttgacttagtcggaaatttctgggatgcaaggaacggaaacttattcaaatcagctttaataaagaggttgttattgttcagagatgagggatgtcacagaaggaagaattgaaggaagcagatctggctgtcacaggagtagaacgtcatcaggcagctcccttctctctgcattgtcttgcctctgcttctctctgcagctcaggcaggccatcttcagcaaggctcttggtttttgcacctccatatcttggcttctatggcttttggttgccacagctttgactctggcaccagtgctgtgtcaccttgcaggtgatacaggcatgagccaccacacccagccccacttttaaaacattactgggtgagcaaattccttaataagaacatctctaaacccaagttaagtgtaaaggaaggggaccagcatgatgagaatctagatccaaagaggaccagttcagggaactaagcatgtataggctgggcataaaaatcttgaggtgaacatagtagccatcttcagcatccttaaaaggcaaggagtgattttattctgtattactccagaaaatgaacctagaatacatgagggtcattaccaaggaaactgccaaggccaggtgcagtggcttacacctgtaatcccagcactttgggaggccaaggcaaaaggattgcttgagtgnaggagtttgagaccagcctgggcaacatggcaaaatcctgtctctataaaaaataccaaaattagttagtcatggtggcatgtgcctgtggtctcagctactcaggaggctgaggtgggaggatcacttgggtccaggaggtggaggctgcagtgagctatgattgtgccactgcactccagcctgggtggcagagtgagaccctgtctcaaaaataaactaagtattgagggtgactttacacaatagaacaacatgcaaaaaatacttcacagcataagagtgaaggcagaaggaatatattttgtaaaatagaatggagctgagtgagaagctggtttgtgaagcacctgccatgaaatcctgtggccttgctggtggtagtctgcagggctgcctcaggtttcctagtggccagagaagggaaaggataagtcattgcatctgtgagagaaaataagccattagctcagaagaactttaaagatttctgcctgagagaataggaaaaatgtgtccaggcacggtggcccatgcctgttatcccagcacttggggaggctgaggcgggcagatcacaaggtcagtagatcgagaccagcctggccaatatggtgaaaccctgtctctactaaaaatacaaaaattagtcgggcgtggttgcgggcacatgtagtcctagctactcggaaggctgaggcaggagaattgcttgaacctgggaggcggaggttgcagtgagccnagatcacaccagtgcactccagcctgggcgacagagagagactccatctc

SEQ ID NO: 176047 - DNA, 1565 bp, Homo sapiens
  misc_feature (1000)..(1000): n is a, c, g, or t
actgacttgttaatattcaatctggagatcgtatacccatggagtgttgtaggggcccctgactttttctctgaatagtaactctgaattcgtaatggctgtgtttaaatttttagttttctttctgtaggaaaagttctgtgaggatggctgcattgtgtcaacttctaagccaaagtttgggaatcttaatgaaaccaagactgtagatgttaccaggaagttcactcagagcaggctctgatgtgatgataggagctctgggagccactcacctacttcagcttatttcatctagcaattctctttgacttagtcggaaatttctgggatgcaaggaacggaaacttattcaaatcagctttaataaagaggttgttattgttcagagatgagggatgtcacagaaggaagaattgaaggaagcagatctggctgtcacaggagtagaacgtcatcaggcagctcccttctctctgcattgtcttgcctctgcttctctctgcagctcaggcaggccatcttcagcaaggctcttggtttttgcacctccatatcttggcttctatggcttttggttgccacagctttgactctggcaccagtgctgtgtcaccttgcaggtgatacaggcatgagccaccacacccagccccacttttaaaacattactgggtgagcaaattccttaataagaacatctctaaacccaagttaagtgtaaaggaaggggaccagcatgatgagaatctagatccaaagaggaccagttcagggaactaagcatgtataggctgggcataaaaatcttgaggtgaacatagtagccatcttcagcatccttaaaaggcaaggagtgattttattctgtattactccagaaaatgaacctagaatacatgagggtcattaccaaggaaactgccaaggccaggtgcagtggcttacacctgtaatcccagcactttgggaggccaaggcaaaaggattgcttgagtgnaggagtttgagaccagcctgggcaacatggcaaaatcctgtctctataaaaaataccaaaattagttagtcatggtggcatgtgcctgtggtctcagctactcaggaggctgaggtgggaggatcacttgggtccaggaggtggaggctgcagtgagctatgattgtgccactgcactccagcctgggtggcagagtgagaccctgtctcaaaaataaactaagtattgagggtgactttacacaatagaacaccacaccttgtctcatgccgtttcttaactccctaatagctccctagtccacacagttggctcaagccagattctgcaagtcatccttgataccgtcctcttcctcattcccttcaatctgtcatcaagacttgtcagttctacttctgaaacacttcttgaattcatctatttatcttcatctccatcactaccacctgagtcctggccaccatcttctcacctctggactttggcaacagcttcataaactggtctccccacactcgtgctgcttcttccaatccacccccgagagagatattttatttt

SEQ ID NO: 176048 - DNA, 437 bp, Homo sapiens
tttttttttttttttttgtagagatgagagtctccctatgtcgcgcagggtggtctcaaactcctgggcttaagccatccccccaccttgtcctcccaaagtgctgggattacaggcatgagccaccacaccttgtctcatgccgtttcttaactccctaatagctccctagtccacacagttggctcaagccagattctgcaagtcatccttgataccgtcctcttcctcattcccttcaatctgtcatcaagacttgtcagttctacttctgaaacacttcttgaattcatctatttatcttcatctccatcactaccacctgagtcctggccaccatcttctcacctctggactttggcaacagcttcataaactggtctccccacactcgtgctgcttcttccaatccacccccgagagagatattttatttt

SEQ ID NO: 176049 - DNA, 171 bp, Homo sapiens
tctatgctcctcaatgcccttaatatgttcccataagcaacagcctgtaaattgtcacatgtaagtcatctaataagtttagaacaatgaacaactcattttctgaactgggacaaacaaggaagctaaattcagtatctgatccccatgggatgtcatgggacattaggt

SEQ ID NO: 176050 - DNA, 550 bp, Homo sapiens
gtagaaactccaggctcagagagttaggttcctagcccaaggtcacccagctaagaagtgatagagccagaattcagagccagcctgtgccatttcaaatgtcccacatgttagccaagctagacagtaagcacctgggctttctctgggtcagctacctgctgtgtaggtaagaggaagactgagtctgaacaaacctgggatggagggtcaggtctgggagggctccacttcaattcacggagggtcaggcctgggaaggctccgcttcaattcacgtccaccttccttacttcttaccccatggctttcaagaaatcaggtctgcccctgaccctctgtgggtctctctggatctgtttcctggatggggctggagaatctctcatcccaggaaggaacttccagccttaaaacctgaggactccttgagtcagggtattagggtgcagtggggtggcagtgggtgtgtcatagcttctgcgtctgcttaggctctgagtttgttcgtttttgaggaaggaaagagaagcacgagtcttgttgttta

SEQ ID NO: 176051 - DNA, 384 bp, Homo sapiens
tataaccgtacaactgtaaatgttgtcccctctagtctggtgttgaagatctctgcaacaatcagccttcacagccctgctccactggcccccacttgttcccacagaaatgaaagacttggcatatttgttaccattatacagtaatcggacaatcttttgttcaatgctcttaatgttcttagaataaaaacattaaaaatgcacttaaaaaaataggaatactcattacacacaagcaatagtttttaattgagaaaaacagtctaattgaaattacatttgttatgcagacactaccaataattatcttggctttaaatatgcaaacacaaagattccttttgaattgataactcttttcagaagtggcgactactagtt

SEQ ID NO: 176052 - DNA, 516 bp, Homo sapiens
cagtgccaaaggaagccaaacccaaggcccagccgccggggttaaaggtctgaacagctcgtgtgccctgaccagttcagatctcttccggccactgctttccttcttcccaaacccctcccccaactactttatggattaagcataaaaatgcctatgggcatccacgtcctgaatctgactccttgtagtgctgagcacagatttttaggaagagagaccaggcaccccttatagaaagagctttttgatcaagagccatcaggcagcgcgtggagggcctcacctagttcttcctcctgggcttgggcatgctctcctccctgcttgcctctgctgaggactgtatttccttgaattctgcctacctactcccagcggggctacaggcgattgtctgcaccagtcctcacaggagggtgctccctgccttttggcagtcagtgctatttctctgagctaggtagcctgctctaaatcttactaggtttacaaagagaatcctccatcccacct

SEQ ID NO: 176053 - DNA, 382 bp, Homo sapiens
ctaattgataagtgggaagagagggaagtaaaaaacctggttatttcatcccaattaagaccaacttggagggaccattctagctcctgagctgctgtggtatcagctgaggctgtcctaagttttgtttgcaactccacctctcctacccactcctgcttccttttctgtcctttccccttcacggttgttgaccctagagacatttcttaataagcatcctgcatgctaagcgctaagctctgctttctggagaacctgatctgcaaaagaatcatatttttgtagaccccagtttagacctcagttgcacaggttctcttttattcatcttctcatcactttctttgccttggtcacttctcatcttttctccttagat

SEQ ID NO: 176054 - DNA, 939 bp, Homo sapiens
gacaagcaaaatgaggccagttacctgcgggaccacaaggaggagctaactgaggaactggccacgacaatcctgcagaagattatacgaaaacagaagagcaaaagttgttcatgacaagtgaaagagatgtttataaagagctaagctctgtctgagatgtgacactaggtctcagtaaacattatttcaatattctgtgattctttagtctacatcagaccccttctctggatcctcagtagttcttcccacatggtttagttcaagaaaaatgtgattaaagccatgaattttctccctttaaaaatgcacttgtatacacacacatactcacacatgcacactcacacatgcacaaacatatcacaattttgcttttgcttacaatttcagataattcatgggctcccaaccagactaactttatattctctaaatacaccctgctcattcccagccctgtgactttgattgtgctatgcccttgcccttgcctccacctcttctggtgaagacctgcacatcactgtcaactcaataccaaaccttgtggagcccagctgccatgccctatactcttagtttggccagatagtgtcccctatggctgcagacaactcacgtaggtccaaagatatggtccaagatttcaccagtgtcttctacaagatcttctatgaatgcctcagccacatccctggtcctgaggcccccatgaagacaattgaggactcaggtcctcaagtcatagaatttggtatcagtcctgattgacctgctaacatattgcctagaaaaggtattttatttagtccaagcttcgttttctcctctgtaaaacagaagatcattaaaaatctgtctcatgggattgttatggtcttagaataaaattaaaaactttggttcaagtgtgaatcattattgtctagctca

SEQ ID NO: 176055 - DNA, 438 bp, Homo sapiens
gtaggtgggtcctggcagtgggatggctgcagtttcctggctgggcctggtgcagggactctggcaagtagcaggtgaaacatggggagtgtctctagcactgtatcttctgtgccttctcactttagacttttgtgccctggggacccatgcagagggaatgcatcgcactgcttgcttgctttgcagtcactgctgctagctccatgccctacgctgtcccttgcatggtgtacctgtcaattacttctgagaaaccaaacaccccaaaactctgtggcttttgacaaggatctttctgtcttccacagccaattctccaacaccaactgagaagtgaaattccattctgatactaacttcttcctggagttagtgcagaccccacaagttaagggcccagtcccacaagactgcccctacttcagacaccagcca

SEQ ID NO: 176056 - DNA, 465 bp, Homo sapiens
atccacccgaagacaagtcttactaaaactgtttcactttaaacataaaggaaaaaatctccaagtcctctaggcacaaagaccaaacaacttataagagcaaaataattttattggcactagacttgcaaagtcaacttaaaacaaggcctcctgaagtgctaggattacaggcatgagccaccgcatgtatagctaaggtaataaagggaattgaagggcagtgtgttttagtgcagtctggctgcttctcctttctagtaattttggtgcagtgcagtgtttagaatcatggccttgtcaccctggcttccaaccctagctaattgtgggtcttacgtcaagtaatagttctaactttgttgagcgtgttaagtgcttaacacagtgtctaccattattgatgcctagcaaccaaagactacctggaacacttttggtcaaacagaggtttattagattatg

SEQ ID NO: 176057 - DNA, 719 bp, Homo sapiens
aatgaattactcactaacaggagagagtgttttttaaagctttttgtatacatcgtcataattttactgtgggagttatataagtttacatggctaccagagatatattatcaatgatgttaaatattttttgttgccttaaatttctttttttgcatttgtttaatgtcttctactgaaatttgttttttatattggttatgtttttgttatagttactgcttttttctaaagtttttctgttttacttttttaaaacttatttttaattgacaaataatagttacatatatatttgtgagtcacaatttggtgtgtctatacatgtataccttgtggaatgatcaaatcaggctaatcagcatatcgattatctcaaatatttatcacttctttctgatgataacatttaaaatcctctcttttggctatattgatagctaaaatagggtattttagcaatacattattattaaccatagtcactacattatgcaatagaacactagaagttattcctcccatctaattgaaactttgtacttgttcaccaatgtgtccccttgcctggtcccccacacatccccctttccctagcctctggtaacatccattatgctctttacttctataagtttgacttttaaattctttttagaagtgagatcatgtattatttatctctttgcacttggcttatttcacttaacatattcttc

SEQ ID NO: 176058 - DNA, 422 bp, Homo sapiens
cagacacaaaggggcagctgaatggagccaaaggacacccccacggtggggggatgtgggcagtttctgaggttgatgagaggatgaaaggaatggcctggggcataggggcaactgaggcacgacagatgagtgtcagcattgagtgtgcttgaatgctccctggcatcaggtaaactctcagccctgatccatggccagtctaggggcactaagaagacaaaaagaggaaggctgtgaccatggcctggctgtgtgaaaggcaaatcagctacctttgtttttatcggctgtttattatttatgactaattaccatgcagcaaaaagcggctacatatataattacacggcagattgattttgttattagcttcttttaattatgctgctgatctctgtttcctaaatcttcactaccca

SEQ ID NO: 176059 - DNA, 536 bp, Homo sapiens
agttttcaccaggtgtccgtttttctgctccaggacctcatccatgacacattacatttaatggtcctgtctccttaggctcttcttggctgtgacaatttctcagattcttcctgggttttgatgactttgacagttctgaggagtactagtcgggtattttgtagaatgcccctcaattttaacatttggctgacagtttttctgggatgaagacttttcactgtatacctttgaacaggttttttaaaaacatacttgaactatgttaatctataagctatttaaatgttgacgtaccttaatttaaaaggcgaactgtaggaattagaagaaaagggaggagaggaggggaggaagagggaggagggagaggaagaagggaagttggggaggagaaggagaaagagagagagaaagggggcaggggagcaggaggagcaggaggaggaggaggctacctggaggggctgggctgatcctgccttgggcccactctcccggcgacctcccggctcccagacctggctgagccc

SEQ ID NO: 176060 - DNA, 467 bp, Homo sapiens
tcttacccagccaactgtttaatctttcccgactgcctaagatggattcagtacccagctgtaacaccctacttagccctatcccagtgctatcccctatcagcaagtggtacaattgcttgaatgtttgtctgacttccttattgagttgtaagatctctaaagataggaattttgttatagtgttcactattccatcctcaagggcttaacagattctaaaatgtagtaacagttctaaaaatgtatagacaaaatctttgatccaccatccaattccccctatatataatcccattaccagaactcaggagtccactcaacaacccaggaaacaaacacttactctgatggcatctctagtagtttatccaaaagacaggaaactttctcctaaaaacagaaaaatccccacctataaaatgatggatgctcttggcacaaaacattccgaatcctaccctttc

SEQ ID NO: 176061 - DNA, 487 bp, Homo sapiens
acatccctcaacaaatcttttcggctctgcctcaacatatgcagaattacttcaacatttctctgatgcctatcatgcttcaaatcatctgttaccctgctaatattatctaacatgcctgcttcttccttgatctccttcattctagtctcaacacagcagccagcatgagagttttagagtcttggtcagataaagccagtcctccacttaaaagcccccaaaggactctcatctaatccagagtaaaagtcaaaagatctcacaatggtctacaaggccctgcacaatctgactccccacgctacttctcttatgatgttttctccataactcagctcctgccacactggccctttcagttctatgaacatgctaagcacattcctgcctctggggcttttgcactcactgttccccgcatcagcaatgctctttccccaaatatctgcctttgcattcttatttcttttaagattctattcaa

SEQ ID NO: 176062 - DNA, 123 bp, Homo sapiens
  misc_feature (19)..(19): n is a, c, g, or t
cattgccattgcttccagntttatcaacgaaagaagacagcatatttaatttagaatgtttagcttggacagaacattagtctcataaatgcgaatttgtgagtagtcaccggggtctgcatg

SEQ ID NO: 176063 - DNA, 323 bp, Homo sapiens
caacaccactgacacacacatacaaaactatccacacttgatccacactggctgatgctctgacaatgcagtgcctcccagatcgtgaggatttcaaatttccaccagcatatcctacaccatgccctccactcaagaactacccctaaaggaggaaaggaattctgagaacccaacagctggagctaagcagggaaaagggttagggttagaacaaacaaaaattcgccaccaacaaacccaggccaagtggtgttgtccagcttgtgcactgccggaagccaaggagctctattagttagagatacagccaggaccagtgc

SEQ ID NO: 176064 - DNA, 705 bp, Homo sapiens
ttgtacagcagtggcttgaaaggatataactatatttaccataaaacaagaagtagtcatttttaccttacacaatttataagaatttttagaaaaatagaaataactcacatgtaattcaggtataccaaactttcctgtcttcctactaaatggaactagaaaagcaaaatgctgattttttccaggtactccaaaaatacctttataattttaaccgtaatttgtttagtctaaaaaggtactgctccaataccagaagctacaggtgaaaaacatatctctcaactgaagacaacttcttgaataactgtgtcactgacaagtttactctctgagcttcagtttccaaactgagaaggaggaataactgccctgcctgtcccacacttctggctgctgaaataatctcaatcaatttcttttttctttctttcttttttttttttacaaactacatgcaaatttaatttttccaattcataaagtaaaaggggtccaataaaacactatcatgtcctacctcacaggttactgtaggtattgttttcaaaatgtgaacaatactacagactgaaggtggaaaaaaaaaaactagttgaaagtagaatcagtttttaagggcatggctaaggcaaaattagaaatatatatataaggctgggtgtggtgggctacacatgtaatcccagcactttgggaggc

SEQ ID NO: 176065 - DNA, 404 bp, Homo sapiens
tattttgggtagaatacaacaaaatagacaacattaaaagtatactgagcttatagcctttgtgtaatctttatccaattagtcaaatgatgtctgggaatctttacagaatttcatgataccatgattaataccaatcatcagtatcctatagaagtatagaaatgccagttaaagttttctggttgataatgataataatgttgatgatcataaaagtggtgaatatttggacagattcattcgagaaagattaacgagtgctttctttgtaccagatgaatgatgttcatgttctttctcggagaatgttgtgggttgaattgtgtcctcacaaaatttatatgttgaagtcctaacccccagtacctcagaaggtgaccttatttgaagatagggtcttt

SEQ ID NO: 176066 - DNA, 281 bp, Homo sapiens
gagcatccccctatcaaataaattctagagagaattttgaaagttttaatgtttgtctttttaactggcctgatgaaattgaggcatatgtaaaaatggaaatgtcaggctctgatgtgagggatgaagagcaggaaatcacaaatgggtcacctgtattcaaatcacatatttgtggctatgggcaagttcccaaacctctctaagtaccagcctgctcacctgtaatggtgataaataatattgacagctgcataaataggattgcagggattcagtgc

SEQ ID NO: 176067 - DNA, 642 bp, Homo sapiens
ttcctctcctcttaaaagaccagtcttcttatatatttttttatatgtactttccctggataatgtaattcactgacattacaagtattcccaatctctgataactaccaaatgtgggtctctaactagaacacacacacacatacatatagacacacacgcctgcaggaacatgatgattgatgattgtgcttttgaatgtcagaccattcgtcaaatttatttaatcaaaatgattcaaaatattgaatcatgaagtaattaaaaaacctgagccgccttcctcactctcgataaaaaaccttcagaagtcaatgggaaataaacctttctttaaaagtatactcaaaaaaaaaaaaagaaaagccaagttacaggagagccatgttgcacaactctgatttctgcagggtttaatggaagtaggttggagcctgttctgcttcctgctggtttcctttctgtatattcagttcatcgttgcctctccgtgcttgctttattcacatcttttttggtatctcaaccatattatttacccaattcatttgttcagcaaatgtttatcgagtgtttctttggaagatctggtttagaaaccaggcatatggaggttgcagtgaaccgagatcgcaccaccgc

SEQ ID NO: 176068 - DNA, 468 bp, Homo sapiens
gtgtgtgtgtgtgtgtgtgtgtgtgtgtgtgcgcatttactaggtataattcaaggggactcttctttattatgctcatatttatcatttttgcattcagagattctcaaattcatataatcagggtcaagggcataccccatggtaatggttgttaaggatttaaggatcctgggtttaacatgagcctgaattaactccttggctgtgccatgggggtgccatagatattttcctctataaccataaggatcagaatcttctttttttggagcagaggcctagccagcagaagcagaagcagaagtgtttaaggcatagggtgttgttgagccatatgttcctggaggagtggacttcagcacgccacttggtgtctacttctcctccacatgagtgatgggccatgtatcacacagtgtattggtcttctctctgagtgttctataaaacaggggctaccatctg

SEQ ID NO: 176069 - DNA, 491 bp, Homo sapiens
atttaaaaatcagagtatttctacctaaaaagagatttctttggattcttttgtagggggtggaaaaggaagctcttaggctcacaggttttacactcctatgtgacaattggctggaagtgagcagcagctactcctttagatagaccctctcccctgtccagttcagcgatttacctgcctggccttgctgctccttgagctgtagcccctcaactgtactgggaactgcctgtgaggccgctctggtacctggcatgatgctggctgggctccctgtaagtgcttggaaatgctcagccactatgggggaagcttgtgatgcagcagctctagtcagtgagccttaacaacagtcctgtgacaagacttgtggctgggcctgaggtttggtccttaccccaacccagtcagagtgcagcaccctgggccccaaccatgcttccatgcactatcaaaacgcaacatcctgcccattctcctctgaaaat

SEQ ID NO: 176070 - DNA, 734 bp, Homo sapiens
gaagcaagcctggggccccacccctgtctggcccagaagcactgctctcctgagtctctgtccctatctggagccctgccctagactgacctgcctttctgcagctgacacaggtgaattcatgaagaccgggaagggctcctaatatttccatctgaagcgggatctctgaaatttcatagacatgcggtcacgcacacatctttccaaggtctcagaagcacaacagctattcacagcttctctgagaacagacaaggggcttgcaggtacatctggcacaggagggtcaaggtggccagcacgcacatggagatgcacagctaacactggggaaaaccagactggaataatcctctgagccttctccttagaggcagcagtcaaagcaatgggagtgaatgcaattgatgagaaaaaataatgaagaaccagagaggaggacaaggaaagggggtaaaggaatcatcttgtagaaaactcatagctaagggtcaagaacggagaaggttaagcaggggagtgatcaagaggttggttgatagctctgctctgtagacctttaatttgtttggaacttggtgccaccctgccatcgtagctggcttgctaatgttccaaataacctccagcttgcttgtctctacttttctggacattatgatgcccaagtaacagaatactgttgctgagaaagatcttttacaaaatctctgttatacaattagagcttg

SEQ ID NO: 176071 - DNA, 718 bp, Homo sapiens
  misc_feature (624)..(625): n is a, c, g, or t
aatgtcttcctgaaagcggacagacaccacagccccacagatctcctccccaaccatgaactgttcccccagcatggccaaaatgagattctcccagcaacgggaggccaagcccttccgcagccgaataatccacttgccaccatttttatttgcatcatcctcccacatgggtttaattccttctttgaagagatggaagtcactgtggcctgtcaggtccccagtgacttccttctttgaagagatggaagtcactgtggcctgtcaggtccccaggacgtaccatgtggctataaaacctccagaactgctccacagaggcaaaggtgccaatctgtttgatattctgttcatagctctgtgagctcgtgggacggccgggggttctcctggagtaccaaaaagtgtagttgtactgcaggggatgctctgccggtccaggacaacagcctttctcttgctactgctctgattcttgtctcgttccgttttttccttctcaccatctttctgtgtgctgttttcttcattctgatcatggtccccactgtcatcatctttcaaagcgtcgaacttgtgttcatcctctcgccgccgctggtgaaattgacctgccgtgannggcggcatgacacagcagacgagaagacctatggggccgtcatgctagattcccaggtcaaagcgaataaattcattgggcatattggcagga

SEQ ID NO: 176072 - DNA, 490 bp, Homo sapiens
ggacattttgatcgtctggaatggagaggtgagaatatgctggaaggatataaatcatgagactctgcagtattcatgttaactatgatttactagaggaatagaaagaaataactaattatcttatgtttagtttgtcttaagtaatttagatgtttctaatggtagtcttgccatgacaagattaattctttactgttgtagtgtgcagtcaactgtggaattttttttccttgatgattataaggtcgtttgatgcacttttttaagaaggcttttcatgttaaagtcagtgagaaacctctcaaatagatctgaattaaccagggcacttggagccgcagttgattttaatgacacaatttagaaaatgagaatcaacacaaaacactttgggtttgttcatctatgttaatacgtgcattctgtcatcttcctttagactggcacttatttaaatattaaaccatcctttacactgtgtatatgg

SEQ ID NO: 176073 - DNA, 488 bp, Homo sapiens
gcattgctcaacagtttatataagaatgctaatggcagcgttaaatgtgttgtagaatacctataccttagaatacattgtagctattaaaaatgataaatctgtattaatgtgggaaatgttcacaatatattaagaagcaggttattcctaattttaaaatggacaaagggcctgaatagacatttctcaaaagaagacatacaaatgcccaacaggtatatgaaaaactgctcagcatcaccaatcatcagggaaatgtaaatcaaaaccacaatgagatatcccctcacacctgttaggatagcttttatcaaaaagacaaaatgtaacaagtattggtaaggatgtggagaaaagggaacccttgtacactggtgggaatgtaaattagtatagccattaaggaaaacagaatggcagtttctcaaaaaattgaaaatagaactaccatatgatccagcaatttcacttttgggtatatatca

SEQ ID NO: 176074 - DNA, 196 bp, Homo sapiens
cacccgtgccccgcctaagggatggtttttaagatccttcttaaaataatccttttttaaaagaccctcttaagggtctttgattcttaaatgattccactgaaagttaagtcaaattatctctgtttgcagatgacatgattgtatgtttagaaaatcccatcctctcagcccaaaaactccttaagctgataag

SEQ ID NO: 176075 - DNA, 491 bp, Homo sapiens
atttgagttttattactacgtgagtttaacctgatgcatgcccataacaacagggaggtaaaccgctgaaaagtaataaatgtgaagatgattaggatcaccagatatctggcttcccatggagatttttcacttgtcctggaattgctttacatacactgagttaaaagctactctatgacagtgggttcccagaggaacatgagatcctcccttttccaactatatagctgtgtgaggatggattttttaaaaatatacacttcaaccaaaacaacgtttcatgacagattgaatgcaggagcagacatccaaatccagctgtctcctattaagccagacagtaaagagatttgcaaaagtgtaaaacaatgtcactctcctcactagttggttctgttttaaaaaataattaaatataaatctataatatgtaaatatatagttatgttgcttatgttaacagtaataaaacatcacatttttcaata

SEQ ID NO: 176076 - DNA, 337 bp, Homo sapiens
ctgtttgcccaaagtcaaatgcctataaggcagaacgtaagacggtaggaagcaaagtctatagggagctatataatagaggctgcagattcatggcagattctaaagcacagcagtccccaacatttttggcaccagggaccggctttgtggaagacaatttttccacaggcggcaagggatggggcgcaggatggtaatggtcttgggatgaaactgttccaccaagaccctggcagaagcaggaagcaggcctagtagaaatggtagctgagtctgtagaagtaaaactatgagttggaatcagggaagatcaagaaacagggtataaaagtga

SEQ ID NO: 176077 - DNA, 316 bp, Homo sapiens
agcctagaggatcgatacaccagcgcgatcagatgggggaagctaaattccacccacaccagcacacttcagacgggggaagcctaaattccagatacaccagcacaattcagacgggggaagcctaaattccagatacaccagcgcgattcagatgggggaagcctaaattctacataaatcaacaggtctcaggtctctaaattccacataaattaaatcaaatttggatagattgattcccagacgttctgctccgagcgttgtgtgcagcgtggaagtctttctggcctgctgtgtatgagcgggaatggga

SEQ ID NO: 176078 - DNA, 273 bp, Homo sapiens
aagctgagcttagtagtttgtggtggattttgcctgttggaatgggtagtgttgctgccagcgtgttttaagagccggttagttccaccgtttttctatggttgttgctggtctttcagatttgctcacaattgaggtcagttaagcatgcacgagtgagtgcaaatccaccatcatgcaggcttccacaagcctcgttcacatcactttgtatcaaagatggtgaaagtgtttttatataacaagttaagataatgagctttgtttaaattt

SEQ ID NO: 176079 - DNA, 472 bp, Homo sapiens
gctgtggatatacaactttagaatgttgctattgactctgaaatctctatgtccttgtgaatcttaggagtctcccaacaccactacccactttatgtatttagtatcttagacaacagccaatgttgttgaaaacctggagaggcagccctggctgcctcctgccctgctgtagatgatcctgtgaacagggtccccctccagaccatgcccaacaaaggcaggttcacaggggagcctctgagctcagagcctctctgggggctctgcatgcacaaggacagcagctccctgccttggttgtgggttgaggtagggaattcaggtcttttaaaaaaggctgagtttgttcaaaaatgattctgcttgctgaacaatgacaccttaagactttagattttacatcgtgatatttctccttgattttgatttaatttgttgtgcaaatgtcttaaatgcttgtgtataaata

SEQ ID NO: 176080 - DNA, 560 bp, Homo sapiens
gggggtgaagtgttaactaagatggtgacaatgagaatgaaaagcaggggacacatttgagagggattataaaggaggaatcggcaggtttgggggatggatctgaagggaaatccaagtggaagggatgaatcagagaggattcccagcctttgagcacatataactaggtaggtaatggtactaataacaaatctccaaattttagagttaggaaatatgtttcaaatcatccgattccatgtttcttaaataggctgtaagggagtatccagattggaaaccattatagaaataattgtcaactcttctttatgacttccttccttttgcccttttcccagtggtattttccatggttctggaaatgacctactttatgccaccactatatttaggctgcaaatttcccctgtccatcctgaccaaggtttgaacaatcccatgtggagaggaacttaattgcagaataccctttgccatgcgtctttttattttccctatatgccgggggtacttttggggtgagaattgaaaaggaaaaaatggtaatgtgtggg

SEQ ID NO: 176081 - DNA, 647 bp, Homo sapiens
tgagaaaagatactaaatgaacaatatattgcatgtcagatggtgataactgctatgaagaaaagttaatagaggaagggggctaaacatgttgggagttgggggtaataaaggaaggcctgatggctaatgggacatgtgagcagagtccttgaacttgggaggaatcggcaggtttgggggatggatctgaagggaaatccaagtggaagggatgaatcagagaggattcccagcctttgagcacatataactaggtaggtaatggtactaataacaaatctccaaattttagagttaggaaatatgtttcaaatcatccgattccatgtttcttaaataggctgtaagggagtatccagattggaaaccattatagaaataattgtcaactcttctttatgacttccttccttttgcccttttcccagtggtattttccatggttctggaaatgacctactttatgccaccactatatttaggctgcaaatttcccctgtccatcctgaccaaggtttgaacaatcccatgtggagaggaacttaattgcagaataccctttgccatgcgtctttttattttccctatatgccgggggtacttttggggtgagaattgaaaaggaaaaaatggtaatgtgtggg

SEQ ID NO: 176082 - DNA, 268 bp, Homo sapiens
catctctggagggcagaggccatggacagcagaacgacactttgctccttcacagaaggaaggacagaatccaagcggttcccattttcccaggctgagatccctctctcaatgaggctggctctcggtatcttcctcaggtctcattctgccccgccccacttgcccctcccctgccactcaagggcggcaggacactgacccaagactcatagctttgggctcccagagtccctgttcaaggcgcggttgcctgtgggaaaggctg

SEQ ID NO: 176083 - DNA, 504 bp, Homo sapiens
ttatgcctttagaatattatgatcttaatatatttaggttaagtgcttataattataagctgtactttaagccacttgctgccttcctccatcattcactttaaagaaaaacttaagaaatgaaagaaaggggcaaagataaagaccacatgtccataggaactattagcatattaatctactgtgtttctatgtacacttccatcaccaaagctatgttaaggaagaggttatgccttaatcaacagtgcttgataaatgcaatctgggtgtatttcttaagtatgttcaaatttcacaagtcttacttcacagtaggggttccagttcattccatacttttacgccataacacctctgatcaaggaagaaagtctttaaaagaccccaaataattagtttccagaactaaagtcaacaaaaagcataattaatgagtacattagttgtctatctccaaagcattaacattcatgcacattttaaatgaaggagattgaagga

SEQ ID NO: 176084 - DNA, 360 bp, Homo sapiens
atgttggtcaaaaatgatttcttagagcattttaaatagaggtagataacagttggtgttagattttttaatgtcttagttttttcaatattttgatgttttaagctgcagtagaatttgtcttagcagcctactcttgggattccatgaattccatccatgtttacacagggggaggagcaaccgtattttttattaataactgtgagtgccgtttctgtaagactgctgctactgccaagctgtcacctctacccctgagtcctgactgtgtgatctgctctggatggtttgctcgttaaacttcacttcatggaatgtgaccagactgtttacttgacaaattttgccctcacattc

SEQ ID NO: 176085 - DNA, 517 bp, Homo sapiens
tgtataactagatattatgaaacccacatgacagagctgttgttataattaaagatctatttcatgccaagtagttacagactttcctgtgcctggcatttagtaagtgctccataagcaattgttattatgtttagggaatgtagtgagtttctatgacacctactgtgtgctagcactgatagaatgctgataagaggatagatgcttgcctttaaatggttttccacttagttgaaaagctaaaacttacacaagttaaactataggaagaatattcacgtgtgagtacataccagacatcactcaagtatgttagtaatgaccaagcgtgatgctcttcataaatcaatcacatattcattgaacactaatgtgtaccttaagctgcagcagtcacaaaaggttaagtcttgacttcagtggtttggaatataacacattgctagaggaaataactaatgaataatatcaaaggtgatataattaagcattataaatgggtgtttctatctca

SEQ ID NO: 176086 - DNA, 362 bp, Homo sapiens
ggcatacagagtaggatcctccttctgaagaatataaggattttagaatgctttaacttaactcatcccccttttgttttatgtgtcattgttgtctagttgatcccaagttatattttaaacttccaaattaagtaatagataaataaatgcacacatttatcaaatgcaacaggcactgttctagattctgtggatatagtaatcaacaaaacagagttttatctcttttttgtgtttgtgttctagtgtcaggagcaaaacagtaaacaagttatatatagtacatcagagggtgatgataagtgctatggagagtaatggtggggtactgctattagtactctgtatgggggatctcg

SEQ ID NO: 176087 - DNA, 361 bp, Homo sapiens
cttcccattctctgattcaagcatccatgcagttcctcaaacacttcaagcctcagcacttgcttcctactacctagaattctcttcttccagatatccaaacagcttgctctctacttacttccttcacatctttgttcaaatctcaccttcttggtgaaggcttctttggccaacctatttaaaactgtgataccaggccaggcatggtggctcaataaatatttgttctttctaagcatctatgtttctgtttatctttccacctacttggtggaaagataaacagaaacatagatgcttagaaagaacaaatatttattgagccaggctctgttctttttctttttttttttttttt

SEQ ID NO: 176088 - DNA, 217 bp, Homo sapiens
atcatctgcctcactcaacttgtagatgagccccatgacatagggacatgtctgcattattttctactgaattcctggtacctcacagaatatctggttcaaaggtagggcctaataaatatttgtcaaatgaatgaatgacaaatgacttgagcagggtcctctgaaaaggaacgcctgtgctcggcgttgtaaggaggctttcttctcactccat

SEQ ID NO: 176089 - DNA, 282 bp, Homo sapiens
aattgtcatctgtagaacattaaattcaaagaatccatgccaattaaaaaaatttagcagaagaagctctaaagttggtgctgtttacgcctttcttagcccttctgcccctctacgcttcaaagaccagcctttggccatgatttgattagaagcatttatagaacagaacaggatctggcattaaatacaatgaaaacatgccattggaaaataaacattgttagagactacgaagaaataaagattgtattaattatgttttaatgttctatgagggtt

SEQ ID NO: 176090 - DNA, 528 bp, Homo sapiens
tgtgttttcgattaagaaaacagagtctcgaacagtgtaggcactcatccttagtagacgatgacattggatggcagaattaagcagttttaaaagagccttgcacactgtggagtactgttgtggataattgaaattatggaggttgtgcaaatctctctttagcaaacaagatcaccactagtttcatattacattcattttaaattgagccagaacaattttctatttatttccacctgtcaagaagggacacactgcaaaccttattttggaggctacctgcaggtgcacatgtgaccaatgattatttctaattctgaatttattgaaagagagtggaggtgaagaggaagaggaaagttgcaaaccctgaatccattattaatttttttcagaggacagggtttttttcttttgggattaatgctcactgataaaagagggagctttagttgctttaaggcttaaggctagagtgttgtcatagttttagttgctgagtgattttgattgctaattgccctt

SEQ ID NO: 176091 - DNA, 321 bp, Homo sapiens
tctctgtaacttgacccccaaagtatgccatgtggttgggttgtgcagccaggcagagagtggtaataatagataagttggtggaataggcatggctgaaatcttctgagccttgtgggtcaaagttgggagtttgaattttaagtataacaagaatccacctgttagttttaagctggagagtataaaatttataatgtatgaagacccctttgctgttaatgttaaggcatgaccctctctcggctcaagcgtggaaaggcagtgaccctcagtggagctgggtttgagacatttctcttaaacagagcatagggagaa

SEQ ID NO: 176092 - DNA, 327 bp, Homo sapiens
agggagtaaaaaaaggaaaactggaaacagtttaaaatcttcctgaccaatctgcactcagagtgcagaaatggagtgtttgggtacaattcagaggcacagaaatagcatttaaaattctataaatttcactcattcattcattcattcaccttgtatctggtgatcacctagtatgtaccaggccctgagaatatggaaactggaggcacagtcccagtccatcctcaggactctactgttagcaaaggagtcaagcaaatcagccttttacagtagtacaaccaatgcttctgtttgtaattattaaagtcttctgaatttcca

SEQ ID NO: 176093 - DNA, 258 bp, Homo sapiens
tgtctatggtcatagtctgtctctcagatataccacgctacctgacactgtggtcagggaacagtggggagcaccagcctgcctattttatcatggcactggcacaagctggctctgggcacaaccttgaggtcagaggcaggagaaagtaggcagcaccatggctctctcggccaacacctgaatatataaagttttcccttggtgtccgacggggattggttccagaacatgcccctgaccaaaggatacccaaat

SEQ ID NO: 176094 - DNA, 300 bp, Homo sapiens
ttttgaaaagtagaattccaaaggcaataaaacattttggacatttatgagttttgcatgctattgagcctcttagataaaacttactctgtaaaattgtattattcttatttctgaaaaagtcagttaaatactgacatttctcaaaacactactttttaacatgaggtggcattaagggtgattattataaacaaatttctatttacttttgaagaagattttgttacagacacccagcattataatgtgcaattgacatttaagaataatatttagtccaaagctgaaaagtggtca

SEQ ID NO: 176095 - DNA, 443 bp, Homo sapiens
cttacaaaaatggtttccgagcctcacccgcaaggattctgacttggcaatggaagaatgaaaggcaacccagagtgaaattaggattacaattttacaaacgtctgtttctgacgcaggaagcacatcatttgtccacatcacactctcttggaatttatgacaaagccaggtgagagccgggctgggaatgacctttgtccaagaaaaaaatgttttgctgagtaaattaagagtgcaaataagactggggaaaaaacttaaattgtacatgaaaacttttgaaaatattttagtaatgtcaacttaagtacaattgatacctggattgcctaattccataattcaggaagcttcccactcacctccacaaaatattagtttgaattaattatatttaattatatgtgaatgcctcaaattaaatgatcccaatgctcact

SEQ ID NO: 176096 - DNA, 255 bp, Homo sapiens
aaggaatacatcccagccaatgccggacaagatggagatgaagaagaatctctttgggctataaaatgactaagcagagaaatttggaggcgaatggcagagcctcctcctcttccagattgactgtttagaggttgacaggggcatcatgccctgccattgcttcatttctgcttagagacagtattaaaagttcctggacaggtgccaaaagtaccgttgacatgcaatgagtctcacaagaccatcaccttc

SEQ ID NO: 176097 - DNA, 161 bp, Homo sapiens
ctattcactgtgatcaaacaaaggtgctctgacctgcccatgaaggtgaagactgcgatgtcaaagcaaccctttcctctccttctttcctctgcttggtaaagctgtagaactggaactgtgaaagggttttatctgaggggttcattcgtccaagctca

SEQ ID NO: 176098 - DNA, 423 bp, Homo sapiens
tccaagttaagattgataatgggaggaaggagattaaatggacagtttcaatcctgaaagggctctcaaaagataaacagatgagtaagcaaccacttgttaaaatagtcacgagttattttccatcttaagagtctattatacaactgaataataaagaggtccatgaaaaacagataagggagagattcatttgtgaaaatgaaagcagagatttcttttaaaagatgaaatctgaaaaagagtaagatttcagccaagagaagtatgaggtacaaatagagataacgaacagaaacctagcagaggaaaagcccaagctgatcctaggaactggtaataatctctcctagatatagacaaaaaacaaggtgcacaatggccatggtcctaggtatggcaaaaaataaaatcatggcggcc

SEQ ID NO: 176099 - DNA, 940 bp, Homo sapiens
cttgcgatccacctgcctcagccttctgcaatgctgggattacagacgtgagccaccccgaccaatttttgtattttttagtagagacggggtttcaccatcttggaatagcacctgtagttccagctactcgggaggccgaggcggaagaattgcttgaggccagttcccgaccagcctaggcaacacagggagactgcgtttctggaaaaaacaacaacaacaccagcaacaacaaaaagcaggaaggaaggggagagggaaagagaaagagagagagagagaacgaaagagaaagagaaaaggaaggaaggaaggaaagaaagaaagaaaaaaagaaagagggatactttgagaagctttgaagtgatctgtttattgatcaagtagataggtaaggtgcatgctgccaggaggagctggggtagggagggcagggccctgctgtatgggggtgggcaggggacggcccctgctcagccctggcctccattgctacacagaatggcaggtccaaatgtgatctggtcttctgatttttcaggagaaatcaggaatctgaggtgcatgcaaaaatctcctgatttttaaatattggcaactaatttgttttaaaaaaacaacaactatgagctaatccaaaactgtttgctggtgggatccacctactgcctttgcgctggggtatggagaggtgggaggtcaatgttgacaagagccagatctaattttttgttaaagaaaagggtacttggaggtcagatagctctcttcatagctatctgaagccttcctctcccttatctcttacaatctggtccaaactcagaaagctaggccgctctcggtgagatgggcttgtctccgtctctctgtacctgtcagagcagcctgggcgcctgcaagaaaccggggcttccagttggcatttgccttccct

SEQ ID NO: 176100 - DNA, 298 bp, Homo sapiens
atcgagccggtaccctcgtataaggcaacatggtgaaaccctgtctctactaaaaatacaaaaattagccaagcgtggtggcacgcgcctgtaatcccagctacctgggaggctgaggcaggagaatcgcttgaacccaagcggatggtggaggttgcagtgagccgagatagcgccaacgcactccagcctaggtgacagagcgaaactccgtctcaataacaacaacaacaaaaagaatctggtgttctcctgaagacctcctctttcctctctgcaattaactggttctaaagag

SEQ ID NO: 176101 - DNA, 737 bp, Homo sapiens
agacatgggtcctgctgttgtggagctaagtagggaagagggcacatggacagaccattgtagtatgacaaagtgaatgcagtggtgacactgtaggaagcaaagggaggccaataattcagcgtagcagtcacctggaaaggttactggaagccataatacaggtcagattcgagccacctttccctgccttgagatttttgtaaggacacagggacataaattggcacttagtgtctaacagtgtctggcaatggatgatatcccatattatttgtagctcagattagtggaggaattagctaagaagtatagagagaatgttgctaaaataaagtaatgataccttagtcaactgtcagttactttaaggaaagaaattaaagtatatgaaatcaattagaacaaaaatagttcattgtttccaacttatgtgattggggcgaggtgttgaaaagaagtattaactagctcatgtctgggcccaacaggaaagaacaccatgactcattagtgatagctgccatgagtgctgatccattagggatgtctaccgtgagtgcaagaggaaaagaggcaacctccatgccacatgtctgcattccttaaattagaataacagctcaaggtactgggatctgactgcatgcaacctgttaaccccaaactcctacatgcttggcatttttcagagacaaagtaaacaaagtaaactttcaaaatgtctgttgtgatcc

SEQ ID NO: 176102 - DNA, 181 bp, Homo sapiens
gcagatatcaacaaactgattctaaaatttatatggaaaggcaaaagattcagaatagtcatcacagtattgaacaacagtcagccgaatgacagtacctgacttcaaggctttctataaagctacaggaataaagacagcatggtactggtgaaagaagagattactggaacagtaacag

SEQ ID NO: 176103 - DNA, 227 bp, Homo sapiens
cacttactctggatacacttgaattccccttacagactccttctcccacactggctcccactgcaagcgtggtagcctgacttacctttgacatcaatgaccactcttgctcccttattttccttccctggttccttcttttgccccctacataggccctagggttctgtactccatactcttccttcttcctttccttctctagtgaattttacttctactttttt

SEQ ID NO: 176104 - DNA, 953 bp, Homo sapiens
atctctgcaaaccttcccttaactctatgcttatttgctattccaggctttgttttcttatactggaaattattttctcttttggttacctcaaaccaggaactttttttttcttaatttgaggtaaaattcacaatttaaaatgtatttatgaagtgtgtacaatccaatggtatttagtaattcttaaagctgtgcaatcatcacttctgtgtagttccaaaacatgttcatcacctccaaaggaaatcctgtacccattaagcagtcactccccctttcctttctcttcagcccctggcaactcatctgcttcctatctctatggatgtacctactcgggatattttgtacaaatggaatcatcctttaattcccttcttgtttcttcttctgtattgtttttagtatttttcgtgaggctatcctgtcaatccctgagcttccaaagtttagttcaattcccactttctctacaaggctttacctggctgtaccctccactccacactgatcttagccttctctgaatttctgtagcatttgttctctccctttacttattttagcccttaatcacatactgctgtgaattgttagttacctgtttcaacactaccccttcttggctcacgcagatgataatctcgtagctacagaagctctggtatctccctttgtgcctagaaccaacttgaacacatgtgcaactgttgtgtctggcaagacatgaaggaataataaatcaagaaaactgaagtctagatgatgaataagagaaagcctcaaacctgtttcagttctttatccttccttatattatcttctcttggtaagagaagcatctgcttgtgtctagcagggcacttctttgccctagtagctgaacaggtgtggtggcaggaggagaatggcaggttgcccagcagtggagagcatggaagttccttgca

SEQ ID NO: 176105 - DNA, 147 bp, Homo sapiens
gaaatagacctcccaatctcagccaaggcacaaactcagagaagagtagtaggaggtagctcaggcacatggttggactgacatattttgggtgttactgtttttttttttcactcttagaaaagcttgtatttttttttaaatttc

SEQ ID NO: 176106 - DNA, 683 bp, Homo sapiens
ggacaaagatccaaaccatatcacctgctcaccaccagcacgtcgctctcttgttcgtttcgctcccttgttcgtttgcttttgctcttcctctctttcactgcctatttttctgtttctttgtatgtgtgtactttgtttgttttctttttctcctgtctcttcctctcctcctttatcaattgtttccccctccctctttgtctctttctttgactttcttcttttaaaaaaatataactagccccctctgcccagccaccacctcgtctgggaggtgtacccaacagctcattgagaacgggccgggatgacaatggcggttttgtggaatagaaaggggggaaaggtggggaaaagattgagaaatcggatggttgccgtgtctgtgtagaaaaaagtagacatgggagacttttcattttgttctgtactaagataaattcttctgccttgggatcctgttgatcggtgaccttacccccaaccctgtgctctctgaaacatgtgctgtgtccactcagggttaaatggattaagggaggtgcaagatgtgctttgttaaacagatgcttgaaggcagcatgctcgttaagaatcatcaccactccctaatctcaagtacccagggacacaaacactgcggaaggccgcagggtcctctgcctaggaaaaccagagac

SEQ ID NO: 176107 - DNA, 374 bp, Homo sapiens
aaagtcaaagacatttataagttgtagaaaacaagccagagggcagagaaaaggttttaaatagtagcttacttcagtcaattattcacacaacaaatatttatagagcatctacactcttcttgagcaaatcattccaacatagaaacaaacaaccctccatcacagtgttaatatcatgtttcaaataaacttgagaaacaataaaagcccatggtaaatagcgcaaaatatgtatgtatctcaattctaaagcagcttaatgcttataaccaaaaatatgttagcatctttggctttgtcatatttatgtaagcaatgccacaattcaaaataactattcagtgtagaggtttattttgtttacttcaaga

SEQ ID NO: 176108 - DNA, 489 bp, Homo sapiens
cgatctagaggatccggagatagcaggaggtaaggggcttggggctctttgaagataaatgtgattaaagaagatcaaccaactagtcaatggctgaatcagtgtttatgcccctttccatcggaattattctcctggggctgcggtagccattctgggtggcttatcacccggttctggaggttagaaatctgaaatgaaggcgttggcagggtcttgctccctgtgaaacgtgcagggcaatgaatccttgctgcctcctcgcttctggtgtttgcttgcagaccttggtgttccttgttctgtagtgatgtcaccccaatctctgcgtgttctctgtgctttgcgctctgtatcttcacataatctcttctctgagtctctgcgttcaaatttccttcttataaggacatgaaccattggattagagttcactaatccagtgtgacctcatcttaacttgattacatctgcagaaatcctgtttcc

SEQ ID NO: 176109 - DNA, 423 bp, Homo sapiens
acagtcatctcttggtatgcacgggatattggttccaggactcccgtgcatatcaaaatccatggatgctcaaatcccttatataaaatgatatagtatttacatataacctatgtacatcctccatatactttcaatcatttctagattatttataatacctaacacaatgtaaatgctatgtaaataattgttatactgtattgtttagggaataaaaacaaggcaaaaatccatatgtgttcagtaaagaagcaaccagccgcttttttctgcatatttttgatccacagttgattgaatccagatgtggaacccatggttacagagggctgactgttcgttttttgctagacattcattttatatttagctttatttcccactacagatattgctgcaataaatatccatgtacgtatc

SEQ ID NO: 176110 - DNA, 587 bp, Homo sapiens
gcagctagagtgcaggagtgctaggagcctccaaaggatgcctctttcatcccagaatctcccagcactgtcctgagcctgctgtaaagccccaggctttggagcagggtgcctgtctctcacggaaatctcccacaagcgaaaacgtggccgaagggtggcatgggtgggccacagagactcagggggaacattaaagctggaagagtgcagatgcggtgaggccgcagggaatgctgggagtctcagtaaaaggcctccctcatatcagaaacccccagggctgtcctgggtgggctttaaagtaataagctttggagcatggtgactgggtctcctgcaaaaggcctccacaagtaaaaacagggcagcagggtggcatgggcgggcagcagggactcatggaaacatagaggcagacagagggaagaatcagtgtgtacacagcgaatgctgggagcctcctgtggaggcctctttcatcccagatactcctggactgtcctgggtgggctgtaatgccccaggcttaggaggatggtggctgtgtctctcgcagaaggctctcacaagtgaaaatgcggccg

SEQ ID NO: 176111 - DNA, 452 bp, Homo sapiens
gtctgcacagacttccaaccgtctccgtcaacctcctgcatgctgcctttcctgattagatgggtcactgtaagggttatttttcatttttcatgaccgccttctggttgtaagaagaaaaatgactatatgtttttccctcttaaatttcatgcacattttggtggccactctgttctcctaaggtttgaggagactgtaatctctggtttgagtcttaactcagtttctctggtctggctgctggtcaactgatgtcattctgtaacacctacagagagaaaaaagatctagcactcaatgtactaccttgtaataatataaagagaaaaaaatataaaatttgatccattattttcatccttttgtgctttattagtctcctggtcagaaaaagaaagccacggtcctaactatgctttcaagtggcttcttcacagacgaaatgggtg

SEQ ID NO: 176112 - DNA, 483 bp, Homo sapiens
gctgcctgaagttgtcctatggcatagtgatgcttttattatttatttattttttgatatctaatatcactgctaagaaaactcaccccctccagccatccctccctgtctttccccctttactgcacagctccctggaaaagctacctgcatttcctctctccacttcttccttgagccctcaccattaggcttttgcccccaccactgcagtaagccactcctgtcaatactgatctcgtgtcaccaaatccaattgcagatcaggctttcttctgcaacaggccttctttaggtggctgccttgacaccttttcccagcaatccttctaactcactgcccaggtcctgactcctctgtcctgacttgtctgctgggagagtctgctgcaagggtctaggtaccacctgtcacagccatggtcaggtacaggccctaacctcccccttgaactctatcccctatccacctggatgtttaac

SEQ ID NO: 176113 - DNA, 762 bp, Homo sapiens
  misc_feature (56)..(56): n is a, c, g, or t
  misc_feature (176)..(176): n is a, c, g, or t
  misc_feature (560)..(560): n is a, c, g, or t
taaggagtcctgaaacctctggaaaggattctatgaagggaagggatgaagagatnctctctagcctgttctagctgttcttacaaactgtaggaagaccaattagggctctatagcaccccacaggaaagatgacagtagggtgggatatggtgggacatggtggtggagatggntcataaatggctggattccaggcatattttgaaaggtaggactgacactctggcagatggactaagtggagattgtgagaaagagaatcaaagatggcttttagatttttcgcctgagcaaatggatgaatggagaaactatttaatgaaccatgcaagactgggaaaggggcatcattgaggggataattaagcttttttaacctaaggatgaatttttataagtggtaatgcttgatcaaatgatttacatattaaaaggttgataaaattgttagaccagaggccgggcatggtggctcatgcctgtaatcccagcactttgggaggctaaggcaggagaatcgcttgaacccgagaggtggaggttgcagtgtgccaagnatcgtgccactgcactccagtctgggcaacaagagtgagattccatctcgaaaaaaaaaaaattgtcagaccatcctccaaaaaggttataccaatctatctttctaccaacaatgtataagcatgtctatttcccaatatttttgccagcagggaaaaaaaatcagatgagaaaaaattttattttaatctggattttttt

SEQ ID NO: 176114 - DNA, 806 bp, Homo sapiens
ggctccttgggagcagcgggactcgagccatgttcctgaaaagctgccgagaggcctttaaggccaaacctcactagcatcaggaagggttcacatcccgagctcagtcttcagcaaagaccagagtgctggcccaccctgctccttgaatctggaaagcagtcttagaagagctgttagatgatgacgtcaggacagtgttgaaggatggtgcacactaggcctgtccagcccgtcaggggcactttgttggcctggaagtaattaagaggcttgtcctttgaacgaaagtgtgatcacttgggtttgaaacgcactcgcgggctcgcgtgaggaacgtgcagcctggcacgggttgcctctagattcctgcttccctcgctctcaccctcatgcctgctggtggtctttcacccagctccaccatgccagcgtggttttctccagtgtgtgaaggatagaaacgggctgatctatataatcttcagcttattttcctaaagaggatggaccgttgatccatatttagcttatgagagtgttgagaccgaggcagcggttgggaactgaggaactcctgctctgatcccatgagtggtgtgtgggtggtgacttgagcatggcagacatgctgtcagatgcacgcgctccaggtacacgccaccgtttcgctgttagaacacgcaggacaagatttcttcttggagttgttgagtgatccatttgaaaatgttctcaaagtattgctggtgtggtggccaaagatgtggtattttttattgtgttgactttggggtgataaagaa

SEQ ID NO: 176115 - DNA, 296 bp, Homo sapiens
gactaccactgaatcatggggagtagagaggaggtgattacaggaaatcaggaaggaaatgccagccccatgaaatcaggtcaggcttcaagatcaactggcctatcatggtctgatggttgaggagaactctcatttctcacagttcttaatgtcttagctattctgacagtgctcaggggctctcaaactcaaaaactctctatgctgatttttgttttagactattttgctcttctgcttatccgttttctagagtaataatttataccttggctttggaaacagaggtatag

SEQ ID NO: 176116 - DNA, 275 bp, Homo sapiens
agagtaggacatgatgtatcatgtaataggggttggcctatgacactgttgtgtgggcatattttgttaggtgagatgtttcagtccgtaagaggatgtgtacagtctattagttggcacttctaccctcaggtacgttgtgaaaatcacgtgagtgaatttggcttggtgtgttccagaggacatgagaaatctattttgttgagaattacaaattatattcgcactaagagatgtcactactacttcccaaatgaaaaattatctttataatt

SEQ ID NO: 176117 - DNA, 722 bp, Homo sapiens
atagaggattttccatttctcattctctgcttctcatgctcttagcatatagacggaaacttagatttggaattgtgactcttctttttttctgcgttaaatcagcctgcagtgtctgatacatatacttgggtacatttcagatttaaatatgcaatacctttgcacagggcaagatggaaagaaaagtatgccccgtggttctggctgtgttttgaaactaagattgaaggaaggagagtatattcagaggcaagtattctgaaaatactattaatagaggcatttctttgttgatttcttaagcagcctctgcattaacaagagttttagtattgggatagcttaatgaggtgctaatgagggaagaagaactgagccctctgtttagtccctcatactgcattgtttacaaggggtcaaaggttctttgcatatttctacatgagcaaaataattgcagtactttctaatcccatttcaactatcaccctgccaacctgttttcagcgtacacacacacacacacacactcacacacacacacaggcacacacacactcaactttatacaaagtggactagaagtggattacataaaatagaaggaagccgatcccctcatctctattcatttttcctagcattaactgctgacttattgacaacgtatttgtgctcagcttgagtcagtcaaatatttcattcagaaccgacaggtt

SEQ ID NO: 176118 - DNA, 404 bp, Homo sapiens
cctctcgaattgttggggttacatgtgtgagccacagtgcccaccaagggtatctccatttttaatggagaaaaggtaacagcatttcccttaccaacagaaacaaggtaatactgttacctttgttggtcacagtactagccagcctacagtgacaacaataaggtgtaaggatcagaaaagatgtataaggattacagttgacagtttttttaaaagatgccgcttacagtagcaacaaaatatatacctaggtgtaaatccaactgcaggctctttaggggagagatcagaggtattagagtcagaaaagactagtttcaaattcttatctgcttctagctccatgactctggttcctaatccccttcaactgctttatgtggtggctgaacttgtgcaag

SEQ ID NO: 176119 - DNA, 333 bp, Homo sapiens
ccataatcacatgagccaatccctcctaaaaatctctttccatattttatgtacacacatatgtataaaatccattgtttctgtggagagccctcatgcacccattgtatggcagatttaagagtgccagtatccagtgttgtcaaagacatggagcaactggaacacttattattattgctggtggggatgtaaattattcaatcacttcggaaaacagtgaagatcagcatatcaaacatttcgaaaatgatttgaaatttttttacatgttttaacaaagccagtttattttgtagttttaataaaaaaggtgccctttttgtccctgga

SEQ ID NO: 176120 - DNA, 340 bp, Homo sapiens
ccactcataccaaggctcacctggactttctcaccactcagatttgctccaacctggaaaacttaaactctaatgtcctgcttcctgaaaacagttttggtgcttctcataccctgattcctttcttctctttatacctgctccttgccttcttccttcagtacatttcctcctagtctatcaaccaaatcctcattccacttcctgcatttttcagtccaaacttgtcaagagtaacctcttcttccttgccatctctcctaagccactatgaaatggcttatgatcactttggtttcctcatcccttctcaaccttgacactctcttcccattggatg

SEQ ID NO: 176121 - DNA, 687 bp, Homo sapiens
aatgcatggcgtcagcagggttgtggatagccctggccagaaggacagtgcattctcttaggcagaagacaggccgagggcctgctccaactgggccttgagcccagtgccagggagaggctgcaggtggcctgactgtgggcggcttgctccctgaccccatagtacatctgacacaagcactacaaggaggagtttgctcagagagcatcttctgagcgccagcctggtgcgagaggtcagggactaggcagggccctgtgagcagctaggacaccccccacaaccctcaccccagctgcccccgccagggaagggctcaacccttgcctggaatatgtgctggcttaagaaacagcagtcccaccctctccgtgggtggctgaatatcaccaaggtatggagagcccgatgtgatttctggggcctgaggcctcccgtgaagggcctgcacaggcagctgcccagcgagcccagctttggctgcttctgtgaggttaatgagacaaggttggtgagaagttagctctgaggcattcgctctagtccttgaagtcacttgcattccaggaaattccagatctcaagctgggttgggggctgaggcctggcttagccaagcagcctctgtggctcaagaggactgcagggctctgaaccaagctgtcatccgtccagagcccagga

SEQ ID NO: 176122 - DNA, 341 bp, Homo sapiens
ggtgcttcctacaacagtgcttaaatacatgggaattatttatttcttcctacccatcaccaatcccagtgagattcatttaggtatagggcttgcttaaggcatattccttacttccttaattttcttagttaaaaagaaattgttatgccactgttcaagatcttttatcaaattgacagtttttgttctagttaaaaattccaaagctcatgagcctaaaatcaagagctatttgttttaaaaagatacaagatcgatataccttaatcgtatgaaataaagtctattttaaatagtatcttctaaagacaaagcctgaataaacctctgtagtaact

SEQ ID NO: 176123 - DNA, 592 bp, Homo sapiens
gactgcaggcgcccgccattacgcccggctaattttattttattttatttttagtagagacagggtttcactgtgttagccaggatggtctgtgtctcctgacctcgtgatccacccgcctcggcctcccaaagtgctgggattacaaaatgcgtgagccaccacgcccggctgatggttttattaatataagggactttaaccctttgctcaggacttctacttgctgctgccatgtgaagaaggacatatttgcttcccctttcaccatgattgtaagtttcctgaggcctccccagccctgcagaactggcacggtggctcacgcctgtaatcccagcactttgggaggccacggtaggcagactgcttgagctcaggagtttgagaccagtctgggcaatatggtgaaatcttgtctctacaaaaaataaaaaattagccaggtgtggtggtgtgtgcctgtaatcccagctactcaagaggctgagtttggagtttcacctgggcccagggatgtcgaggctgcaagtgagccatgattgcaccactgcgctccagccttacagagcgagaccctgtctcaaaaaaa

SEQ ID NO: 176124 - DNA, 566 bp, Homo sapiens
gactgcaggcgcccgccattacgcccggctaattttattttattttatttttagtagagacagggtttcactgtgttagccaggatggtctgtgtctcctgacctcgtgatccacccgcctcggcctcccaaagtgctgggattacaaaatgcgtgagccaccacgcccggctgatggttttattaatataagggactttaaccctttgctcaggacttctacttgctgctgccatgtgaagaaggacatatttgcttcccctttcaccatgattaaaagcaattttgttaatcactttagcaccaattcttgcatccctggcaatactcagaactgcttccatccaagtctttgatgtgggaaagaaacacacacacactctttcgcatgtaatctgaaaacaattcacctcttgccaatgaatgcacagcactccactttaatagagagcaagttctgtggaggtttctaatcctttctgccaaagaagagaagagagagaatcactcagcttctattgcagatgtgaagtttagcatttctttgctcactcttttactgggaa

SEQ ID NO: 176125 - DNA, 399 bp, Homo sapiens
acaggagtgattttgccccccagaagtcatttgacattcttgattgtcacaacttggaaagaagtggggacttgctgctggtatctactgggtagacagaaggatgctgatacacatctaacaattcagaagacagcctgtcacaaagaattatctagtctaaaagatcagcagtgctgaggttaaaaactcctgccatatactttgttttctcatatagcattcatgtctttctcttctaccagactaataatcttttaacagcagaaacatgttacctgaatgtagcagagctatggctgaatccatcattgcacagaattatggacaagtagattataatgccttattttgcaagtaaaattaaactaagaacacaataaattactttaaaatatg

SEQ ID NO: 176126 - DNA, 394 bp, Homo sapiens
atgctgcacttcaagtggaaagtagaagtttattcattaaagagggtctctgacccccaggaactcaaggcatcgttgaaaacggaataaagtgcatattttattgaaaacagagggattaagtaagtatatcatttccagaaacagaaaaaagaaagaagaggggggaagagagaaagagacagaaatcagaacatggaagaaaactggaaccctactctagaagcttcaatatcctcaaagtaagaaaaatggaagggaggaaataaccaacagagtaattcaagaaaactttccagaacagagaataggaattgccaggctgaaagagcccctgtacagcacgacctcactgaaagggcatctgtacagcaatgtcccactttcttggcac

SEQ ID NO: 176127 - DNA, 448 bp, Homo sapiens
cacaaatagtagtaaatacttttaaactaaataaataactgctgtcaaattcacttacagaggcagtatgccatcttttctagcgctgtgttaactaggatatgcatttccatatgccattatgctggtgtgccactctcccaacccctttttaaatccaggtacaacaattcataacatagtttttatatctgaattcaaatgagacaatctcattctgctctttctggttgaccatctgacaatcaaaattaaatgcactgagatggactttgcacttcctgatccctaccccatgccccgacttctaaatcccaggattttcctttaaaatgttccctcacgtctagtcagtggatttgcctagtacaagtactgtggaaattttcaccataaaatattcttactctagaatggccaatacttgatgggtttagccgcacttaca

SEQ ID NO: 176128 - DNA, 467 bp, Homo sapiens
tagcaccatacacatgaccaatggccaggctgctgtgtatggtgctcatcttttcacctcagccccccaaagcctgtaatcctagtgctttgggaggccgaggtgagcagattactcgagcccagaagttttagaccactctgagaaacacggcaagctcccatctctaaaaaaaattttttaaaaacaaaactaaaaacacattagccaggcatggtggtgcaagcctgtgtagtcccaactactcgggaggctgacatgggaggattgcttcagccgcaaaattcaagactgcagcaaagtatgactgtgccactgcacccagcttgggcaacagagcaagaccttttctcttaaaacaaacaaaaaaccccaaatacacatgatcaagatgaagaaaattataaaatcttatttgaagacaataaagatgatctagatcaatgaagaatttaataatacgaact

SEQ ID NO: 176129 - DNA, 692 bp, Homo sapiens
gttaaccccaccatgttctttgacatcgccgcgagcccttagactgtgtctccttcgagctgtttgcagacaaagtttcaaagacagcagaaaactttcgtgctctgagcactggagagaaaggatttggttgtaagggttcctgctttcacagaattattccagggtttatgtgtcagggtggtgacttcacatgccataatggcactggtggcaagtccatctactgggagaaatttgatgatgagaacttcatcctaaagcatacaggtcctggcatcttatccatggcaaatgctggacccaacacaaatggttcccagtttttcatctgcactgccaagactaagtggttggatggcaagcatgtggcctttggcaaggtgaaagaaggcatgaatattgtggaggccatggagggtccaggaatggcaagaccagcaagaagatcaccattgctgactgtggacaactctaataagtttgacttgtgttttatcttaacctccagaccattccttctgtaactcaggagagcatccttccacccaatttgctcgcagtatcctagaatctttgtgctctcactgcagttccctttgggtgccatgttttccttgttcccttccatgcccagctggattgcagagttaagtttatgattatgaaataaaaactaaatgccaaacaaa

SEQ ID NO: 176130 - DNA, 566 bp, Homo sapiens
agaggctgtgctttgggtatgataaatagactgttttggtgacagcattcacattgtaagggaagagcaatggtaaataaaagttgaaagtcaaatcatagaggatttagatttggccaatgattccctgtggtagtgttgatgctgtagcgagaggcaggggatggggaggaattgaagacaatgacacaatttcaagtctgggttacttgaaggaatgatgatacccagaatagagtcaggaaagacaacagcagtaggtttgtagtaaagacagtgaatttgactttagacatgttcaataggaagatatatatttgaaaataaattctactccaaataagactatgtcacaacctattataataaaaatgtcaaagatcaaagacaaagagagaattctgaaagcagtgagaaaaaagaagcaaataacatataagggaatcttaataagcctaacggcagacttctcagcagaacccttataggccaggagatagtgagatgaggtattcaacgtgctgaagggaaaaaactgccagccaagaatacttcagaaatgaaga

SEQ ID NO: 176131 - DNA, 550 bp, Homo sapiens
atcccagtggggaaaaacagacaatgagcacacatgaattatcacgtgtgtgataataagtgtaccttcgtgtataatatgtaaggtgatggtaagtggaataaaaaaaaattaagcaaggttgagccgggcgtggtggctcacgctgtaatctcagctacttgggaggctgaggcaggagaattgcttgaacctgggaggaggaggttgcagtgagccaagattgcaccactgcactccagcctgggtgacagggcaagattctgtctcaaaaaaaaaacaaaaactgctgaatgaatggaatctcccagagagcttaagagtatgatggacaggccaaaatagacaggaaattgaataggaataacagcatttgacaaattagcagttttcctttttccgccttccaaaaaaccctttcctcactcttaaataatgtaacttcagtatgagtattcctgtagcactggattcagtgtgtgcacaattaaacttcagcagccaccgctgcaagtgggctcccagaacccatctcctaagtacttctgtc

SEQ ID NO: 176132 - DNA, 584 bp, Homo sapiens
ttgagcaaacttataagattgttaatacaattaaataagatgatgtatttaagcatttagcaaagtacctgacttatagtgctctctgaatagcaactgtcattattattgtgatccttattattaggtatgcattattaagtcatataaatactttgaactatgctgtgagcctggtaagaaatgaagcaagaggagaatttcagatagatgtggggtaggacatgaggcttcagggacgttagagttgataatttattttgcattcattcaactctttttcactgaaagtcagagatgtaatgagaaaatataattaaattattaaagtccttcctcaagatcctaatattaacaggaaaacagctaaaataactctcccatgttttccagagtaaccaccagggtccaccttgacataggcatgaggcaatgccttggttcagcataaaaatgccaccaggaaacctatgtcatcttggtccaagaaacttataaataccattcattcaaaatgggcacatgtgttgagtgaggcagcagtgagtccaggacagcaacaagattatacagtctttccttat

SEQ ID NO: 176133 - DNA, 1026 bp, Homo sapiens
tagctgtgagttgctggcgctggggcgattcggtggcacgtggagccacggcgtgggagtagggggctgaaggcaggcagcagcggccagggccgccctctgctagccgcttgggtctcgggataccccgtttcttcctgtaggtgtgggacgtgcgtgcggcgagatggacactcccccgctctcggattcggagtcggaatccgatgaatcccttgtcacagacagagagttgcaggatgcgttttcccgagggcttctgaagccaggcctcaatgtcgtgctagaggggccgaagaaggccgtgaacgacgtgaatggcctgaagcaatgtttggcagaattcaagcgggatctggaatgggttgaaaggctcgatgtgacactgggtccggtaccggagatcggtggatctgaggcgccagcacctcagaacaaggaccagaaagctgttgatccagaagacgacttccagcgagagatggagttctatcgccaagcccagggccgcaggtggttggcgagtctttaccccggcttccatcagctcaaaagtcccttaacccaagcggacccaatggattattgggcggggaaattgggccaaattctggttctggagattgccgaagattcggacaggaagctggagacttaaacggtgctggccattggagaggtctggaaaaaggcttaaggaattgggaagcaccttttgggaattacggggaagcagtggcaacgggggggtcttccagaaggaagggggcgtgggaaagccccattttgttgatgcgctattagggagttttcggaaggcgtgtccctggataaagcggggggtttccccttgaggggcgagccagaaaccccttggtgtgcagggcacacagacaggggctggaggcccaagggcgcggaaatataggaaggggcgcacgggtataacacgagggtgttataacccccgagatctggtggttgtgctggcgagaaaaaggcccaccagggtgaaactcgggacag

SEQ ID NO: 176134 - DNA, 305 bp, Homo sapiens
tagaaagccaaccttgtcacagacactgctgcactctccctccgagagggagctggacctggctgtggcagaaaaaaattccagggagaaaagcaattttaggaaatacggtgaaatcaaaacaatgcattttacccgtctccagtgtgaagatgatgaaggttgggttgtgggagcgtggaccgcctccaccagcccgagccctccacgtgcgcccgaccgccgtctctgcctcaggtgcgtggagtttggaggctgcgttacactggattcaggtcacccatctttactcttggctctttgaa

SEQ ID NO: 176135 - DNA, 361 bp, Homo sapiens
cgcaagtgaaatcaactctttatgagctgtttgtggctgtgattgttttgtaaatgtgtgaatgataccagtaatgttggcttttcataaggctgcaggaaaacttgtaactatgactgtgtgtacattttacacaaagcagtttcgggttttatttttgtttagaaactaggaaatgacatagtggcagcatctgagttatttttatcttgaattgagagttactgtcacacctaatgcgaatttctacctaatgtttaattgggatggagtggggagacaattccagctgtttgtgatcgttgtcagagtctcaaattatgtacatagacatatttttaaaagattgaggataaagagg

SEQ ID NO: 176136 - DNA, 404 bp, Homo sapiens
tcacagctctgaaggccagaagtccaagatcaaggggccagcagcggtggtttccagtgagggctcttttcctggtttgcagtcaccttcttgctgggtcctcctctgcccatgcacacacacagagggggatcttggttgtctcctttttataaagacactagtcctattggattaaggcctgacccctatgacctcacttaacctttactaccttcttataggccctatctctaaatacaattacattaggggttagggcttcaacatatgaatttgaaggcaacacagtttagtccacaacaattagatatgttttttctttcaataaggctaagataaaagtcttttctgtgcttccaatacatgtggtgttcttgtctaccacgatctctgctaggaga

SEQ ID NO: 176137 - DNA, 130 bp, Homo sapiens
atgctaagtaatataagctttaagagggttaaaattagtccggtttcaaagatatatttgagaattatgtagtatctcttgagatagtctagagatcttagagctacgttggggcctaaggactgagaat

SEQ ID NO: 176138 - DNA, 151 bp, Homo sapiens
gccctggaggaattctatagcaattattatggggattacactttaagaatctctttaatctaaaaagtcttccatccctttagtaagcatttttgagccctcaaccaaacctaggcatgacataaagtgctacaaatgcagacaacagtaa

SEQ ID NO: 176139 - DNA, 734 bp, Homo sapiens
aggatcctgcttgaatagccagtcagaaagggagaagcaagtgtgttccaggcagaggaaacggaagggggagcccctggctgtgtagacagaggaggagagatgggcaaagaaggccaaaaaggaacacccagaaggtggagaaaagccagggagaaaatcaagacttcagagggaaaggaggcatgtgttgggtcagaggtcaaaagcaaagcaacataaaagctgagactagactcagcatcactctcagggagccctgggcagtgtgggaaggtggggcacagaaacacaggaggccagagtagatcacgcctctgctcaggtctgagtgtcagagctggagccaatccatacccctgagtagtctgtgaaggctgcctgggagagacatgtacagttacccgcctggaagggcatgcaagtgcctctaggatatgggcaataagcaggaccaggcagcctgagtgtaactctccaggttctgggactgaacacaagaattaattagaagtgtggggaggtaatagagtggggagcagcctgacctctaacccccagactcctgggggagctggaagagggcctagtacaaggatgttggcgttagaagtgtcttggacaccgggcgcagtggctcacgcctgtaatcccagcactttgagaggccgaggcgggtggatcacctgaggtcaggagttcgagaccagcctgcccaacctggtgaaaccccg

SEQ ID NO: 176140 - DNA, 194 bp, Homo sapiens
ctacccaggtagactaactgcacagcaaaacaagttgttgttttgggtttttttttctgagacagagtctcactctgtcacccaggggtcttgctttacttttctcaaatctgggcagatcagttctgaagtcggcttctgcctccagcgcaggggcaacagtctggagagatcacctggttaggtctacctga

SEQ ID NO: 176141 - DNA, 193 bp, Homo sapiens
cgaggcttgggggctggggctgggcaggtcataaggccaggaagatgagtggctgaggccacgtcagaggccttgggtgccgtgctcaggaggttggatgtggtcctgtggctggccatggagtggaagacgggaggccttgggggagggggcccaggccagggccatcagctgaggctcctctcacaccctg

SEQ ID NO: 176142 - DNA, 411 bp, Homo sapiens
cctagctgcttggtaaccaactccacttttgtctttctggttgggctcttatttccagtcctccaaagacagcaagtgactgaagggaaccagtgaaggctggtatggggctcctctcagtatgtttgccttttctccggaatcttggccctacaagtctaggttgcctttgttactcttgatgcttttaaacactgggggtttttggtttgtttttttaattgtggtcaaatacatataaaatttaccatcttacccttaagtgtgcagttcagagctattaagtgtacgttcacattgttgtacagagctgtcaccaccatcctctccagaattcttttcatcttgcaaaactgaaattctgtactcactaaacagtaactttccattttcccctccaccaagcctctg

SEQ ID NO: 176143 - DNA, 382 bp, Homo sapiens
gaatggagtaattgttttaaaaacctattgaaactacaacatagatgtgagcactaattcattctaatgataaccagtgatctaatggttagaacagacaagcagttttaggatgtttattaatacatcggaaagaagagattgaaatggaactttgtcactataaaccaaactgtagcaaagtttatgacttttcgtcgtttcgaaagttagaatttgtagtatacaaaatgatttgcatgaaattactactctgcatggctgttgtcgatgttttacagtcatttgcatgctttgcccaacaggtatttttttttccccgtgctagtaggccaaagcattataatggcctacatattatatatttggtgtgttcgggtct

SEQ ID NO: 176144 - DNA, 527 bp, Homo sapiens
aaaatcagctgggcatggtggcgcatgcctatagtcccagctacttgggaggttgaagtgggaggattgcttgagcccagaaggcagaggttgcagtgagccgagattgtgccactactctccagcctgggtgacagagccagaccctgtctcaaaaaatacaattaaaaaaaaaataaaagaaaaatggcaaataaggaaaacttctgccacaagcatgggcaaaaaatcaatatctttaaaaatataaaggtcttaaagtccataagaaaaagatggatatttcagaaataattacaaatggccaaaaccaatatgtttactctctaatagccaacacaaaatacgctattaaaataagatttttacctttcaaattttcaatgcatttttaaaaaggataataactactgctggtagggattcattggcactcacttatgcttatgttggtacattaaattggtacagatttctgaaggataatttgacaatcggcacatgccttaatcatttaatacttagca

SEQ ID NO: 176145 - DNA, 119 bp, Homo sapiens
ataggaagagaagcttagctggtagacaccacagatatgtactatgtgggtctagagagggaatcttaaagcagtgatttgtgtctgtacatttatactatcacgttcgtctttacttc

SEQ ID NO: 176146 - DNA, 460 bp, Homo sapiens
tgattctaaagcatctaaagggtgtctctttctaatgcttttgttttttgccagataccccagtggtatctttgcaatgaacattgttcatgttaatatttcactttaggaattcctaaaataaaataaaataaatgcctaaaataaaattcaaacttacctgagggtcttctattgttacaaattctgaggagactcctcccacaatactccatcaagaacattggccaagaaaaataagctccatgtcatcactccatatacatgagaagatttcaccagtttgcatttttcactgagagaccaaaatttacatggaagtctctgtccaaattcctccccctttgatatggaccaaaggggttcatctcttttcctctttgaagcgttaaaactccaactcttggttaccaagatgggtaaatccccataaggcagccaaagtgtcagctctcctgct

SEQ ID NO: 176147 - DNA, 445 bp, Homo sapiens
acacacacaagcgttcagatataaagatttcaactgtagcatcatttgtaataaacaatattggaaacaatgttggtatatattgctaagaaaatgtgttgagatcaatttagtataattatataatgagatatatgattatttcatttctttatggaatgagtgtaatgggaaaatccagtggaaagcttacgttaaagctaagaaagttaaatctttaagacctttcatatgtatgggtctttctcggggtcatatgagttttgcaaaatttgctatgtaagatgcttaattaaaaataagaaaagccacacctgttttgactcccatttgcctttagtcatttatctccctgtcaggtagtgcgggtccagcctacaatacttttagtattcagctaaggggaagttgaatagagacatatttaatttcagttcattgaggt

SEQ ID NO: 176148 - DNA, 418 bp, Homo sapiens
tacttccttcaggtcttgactctgaagtcactgtcagtgaggccttcctgttcatcctgtctaaaatttcaaaccctaacccctgcatttcctagttttcctccttagcacctgccatgaacacgctatgtattgaacttatttttctggtctattacatctccccccttgaatataaaatccagtcttgtgtttgctatttattgtccctgtagtacctagaacagttccagatatagaagacactcaaattttttttgttgttgaatcacagctgacagggtatagggaaatgagtgctctcatacactgctgagagagtgaactgatgcagcctttttgcgaacagttgtgtggtatgtaaaagtctcaaaatgtgcttgccctttgacatttctccttctaggcttttatcata

SEQ ID NO: 176149 - DNA, 109 bp, Homo sapiens
caggaggaaagacaaattgggatatttcttcccctgcttcctcgctgtttaggactgtgtttctgacagtagctgcatcccccatatgacctcagttcctgttgggtag

SEQ ID NO: 176150 - DNA, 374 bp, Homo sapiens
tcattgtcacatatctgaaatcaggatgccttttaaaacagattgctcttgccccagattcttccagaggggatttacttttgactctgctatcacttgagtacatttctgagaccattgaaagttaaattctctgcttgaggttttcccctgcctcctgcctagtagtgtgaattcagacagcaaccctgtaagactgaacttttttcttctttacgtcagggccaggtgcatgcaagcttttgtactgccccttactgcatggcatatttatttattctttactttgtactgagaatgttgctctttgataccccagtggtgggatcagaactcactgcagcctcaaactcctgctgggctcaagtgatcct

SEQ ID NO: 176151 - DNA, 427 bp, Homo sapiens
cacagtactctgagcatatttgattcttgttcaattcttaagattaaaaacaataataacaatataggtagtgaactggctctggaaacattttcggtaaatgccagccaaaagctaacacaagctcaaatgtcatttggtttatcccagtcactgttcaaagatatgaagcaattcaaaatctacttttactcaatatctctatgaagttagaaaaatttatcttgacattggcaagaaaacatatcctttctttacatatatcattttattctttttatttatttcttctatttctatataaagagaggtagctgtgtgtttatgtgcacacactccattgtaaacttaaaagctgttgttattataaattcactttctagttagacctgtggtaggacttaaagctattcagctgaaaccattc

SEQ ID NO: 176152 - DNA, 295 bp, Homo sapiens
ggaaatcaaagaatcatgagagaactggacagggactctgtgagagtctcctgagagggactctcagcaaaaccaacactgtcttgagctgtggaggaaaaaggcaaatgataataaaagacttagtctgtgttacaaataactggagcaacatcttcatttttcatctgtaagttaaaggaactggaccggatcatctgtcagctcccccttccgagctctcaacatcctacgattctagttggagataaaagaatattcaccagcaaatgtttacaaatgggagggggaaggg

SEQ ID NO: 176153 - DNA, 193 bp, Homo sapiens
tatcttcattagtccctccatgcccagtctagatcccatttactcctgtctttgcaattatgtttttttccattatgttcaatccttccctgtcactgtttcaacagcttattctgtcgcaaaaaaaagaaagtgaacgtggggaggggaggagctgaggagcaagggaggagctgaggagcaagggaggagc

SEQ ID NO: 176154 - DNA, 885 bp, Homo sapiens
ctcactatgttgcctatgctggtctcaaactcttgagctcaagcgatcctactgcctcagcctcccaaactgctagaattacaggcatgagctactgcacccagcctcaagggcccattaaaaaatgtgcaacaacctagtggagaattaaaagaaaaaatgcacataaaaaattgcttatgagatcagaattcctgagacaccagaagatggctaagaagaaaggcaggcactatcgatatcagtcatgtggcctgctctgcagaggataccaccttcttttgccacaaaggtaaccaacagccatggccatagcaagctagtttgcactccagagccaagatctctctgcatgtccacactccaaacaccagctcagctgccattgagagcccatgctccaggccctgactccaaggctgggctgtgcacacctataccgcaaacagtaaagccactgccatagtaagggagtttacaccctgggccccagagccaaggtttctctatgtgtttacaccctggagaccagctcagtcatcacagagggccaggccttgcctccacactaaagccgctgtagctgtgtgcacacttgtgctcttgtccctgcctgtttcacaagctcccatacttcaccagcagggtgtctgtgccctgggcaccagtgccattaccaccccagagctatagtccctttacatatgctgctctgtgggcatcactcatcagacaccagttccattgccacctcaagtgggcttgcatgccagacccagtgtcaagaaggatccctttagccacaacttccctggtcggggaaagagagatcaagaggaccctacagtcatcatcaccaagcaccccaacagcccttaccactgc

SEQ ID NO: 176155 - DNA, 610 bp, Homo sapiens
tgaatgcagcctgctgagcctgggggctcatccctcccatgggaggctggagtttctgctgtggatgctgctggggcaggccagccctccaaacaccagctcagctgccattgagagcccatgctccaggccctgactccaaggctgggctgtgcacacctataccgcaaacagtaaagccactgccatagtaagggagtttacaccctgggccccagagccaaggtttctctatgtgtttacaccctggagaccagctcagtcatcacagagggccaggccttgcctccacactaaagccgctgtagctgtgtgcacacttgtgctcttgtccctgcctgtttcacaagctcccatacttcaccagcagggtgtctgtgccctgggcaccagtgccattaccaccccagagctatagtccctttacatatgctgctctgtgggcatcactcatcagacaccagttccattgccacctcaagtgggcttgcatgccagacccagtgtcaagaaggatccctttagccacaacttccctggtcggggaaagagagatcaagaggaccctacagtcatcatcaccaagcaccccaacagcccttaccactgc

SEQ ID NO: 176156 - DNA, 1320 bp, Homo sapiens
atggttggagacacattaaaacttctgtctccactgatgacaagatacttctttctgcttttttattctactgattcttcagacctcaatgaaaatcaacatcccctagattttgatgaaatggcttttggaaaagtaaaatcagggattagcttcctcattcagactggagttgggatcctgggaaattcctttctcctttgtttttataacttaattttgttcactggacacaagctgagacccacggacttgattctcagccaactggccttggctaactccatggtccttttctttaaagggatacctcagacaatggcagcttttggattgaaatatttgctgaatgacactggatacacaagcagcaagtccaacacaatcacagcaacagactctcctgcagaccttcccaggaagccagagccacacacaccatcatggtcctggtgagctccttttttgttttctattcagtccatagttttctgacaatttggacaactgtagttgcaaacccaggccagtggatagtgaccaactctgtgttggtcgcctcatgtttcccagcacgcagcccttttgtcctcatcatgagtgatactcatatctctcagttctgttttgcctgcaggacaaggaaaacactctttcctaatctggttgtcatgccatgagtcttttctcttcatggaattcagctatttatcataactcttgctaagatttaggaaatattaactactagttatttgtgatagcaacatacacatggccagtaatgctcttgtccaggaagatctaataccagagctaaaaatgaaagtcatggatactgttacacaaagaacactctatataactgtgttaagtccttcagacaagttcaggaaatcaaaaagtttaaaaagggaattctttagagatttaggggagatttctcatttttgtactatgaagaatcatggaatgttttaaaaatatttttaaagcacagtttgattcaggtgcttcttgaacagcataaatcccctggagagtccacatgtaagaaagacatgtgcaggccgggcacagtggctcacgcctgtaatcccaccgttttgggaggctgaggcactcccaaatgcctcaagtgatccactcaagatgacttgaggccaggagttcgagaccagcctggccaacatggcaaaaaccctgtctcaaatacaaaaattagccaaccatgtggcacacacctgtagtcccagctactccagagggtgaagcacgagaattacttaccagcttgggtgacggagggagactcaaaat

SEQ ID NO: 176157 - DNA, 1286 bp, Homo sapiens
cgggtggacattttgtttgcttttccattaatccactggtttagtttccagaacgcaatgtcagacctgaggtgacagaaaagggaaaacgtgagagagtgtcttcttccctgaagagaggtgggcctgaggcttgacagtggcgctgcctgagtgacctagccgctgggctgggccctggacagctgatcccaggttcctgcacttgtcgccacccttccgtagtccacaggcctgatggcggcggctgagccgatgggcccggcacagggatacctcagacaatggcagcttttggattgaaatatttgctgaatgacactggatacacaagcagcaagtccaacacaatcacagcaacagactctcctgcagaccttcccaggaagccagagccacacacaccatcatggtcctggtgagctccttttttgttttctattcagtccatagttttctgacaatttggacaactgtagttgcaaacccaggccagtggatagtgaccaactctgtgttggtcgcctcatgtttcccagcacgcagcccttttgtcctcatcatgagtgatactcatatctctcagttctgttttgcctgcaggacaaggaaaacactctttcctaatctggttgtcatgccatgagtcttttctcttcatggaattcagctatttatcataactcttgctaagatttaggaaatattaactactagttatttgtgatagcaacatacacatggccagtaatgctcttgtccaggaagatctaataccagagctaaaaatgaaagtcatggatactgttacacaaagaacactctatataactgtgttaagtccttcagacaagttcaggaaatcaaaaagtttaaaaagggaattctttagagatttaggggagatttctcatttttgtactatgaagaatcatggaatgttttaaaaatatttttaaagcacagtttgattcaggtgcttcttgaacagcataaatcccctggagagtccacatgtaagaaagacatgtgcaggccgggcacagtggctcacgcctgtaatcccaccgttttgggaggctgaggcactcccaaatgcctcaagtgatccactcaagatgacttgaggccaggagttcgagaccagcctggccaacatggcaaaaaccctgtctcaaatacaaaaattagccaaccatgtggcacacacctgtagtcccagctactccagagggtgaagcacgagaattacttaccagcttgggtgacggagggagactcaaaat

SEQ ID NO: 176158 - DNA, 1702 bp, Homo sapiens
atggttggagacacattaaaacttctgtctccactgatgacaagatacttctttctgcttttttattctactgattcttcagacctcaatgaaaatcaacatcccctagattttgatgaaatggcttttggaaaagtaaaatcagggattagcttcctcattcagactggagttgggatcctgggaaattcctttctcctttgtttttataacttaattttgttcactggacacaagctgagacccacggacttgattctcagccaactggccttggctaactccatggtccttttctttaaagggatacctcagacaatggcagcttttggattgaaatatttgctgaatgacactggatgtaagtttgtcttttattatcacagggtgggcacaagagtttccctcagcaccatctgccttctcaatggattccaagccattaagctcaaccccagtatatgcaggtggatggagatcaagattagatccccaaggtttattgacttctgttgtctcctctgctgggccccccatgtcttgatgaatgcatctgttcttctattagtgaatggcccactgaatagcaaaaacagtagtgcaaaaaacaattatggatactgttcttacaaagcatcaaagagatttagctcattacatgcagtcttatatttttcccctgattttatgagtttgggcttcatggtctgggccagtggctccatggtcttcttcctctacagacacaagcagcaagtccaacacaatcacagcaacagactctcctgcagaccttcccaggaagccagagccacacacaccatcatggtcctggtgagctccttttttgttttctattcagtccatagttttctgacaatttggacaactgtagttgcaaacccaggccagtggatagtgaccaactctgtgttggtcgcctcatgtttcccagcacgcagcccttttgtcctcatcatgagtgatactcatatctctcagttctgttttgcctgcaggacaaggaaaacactctttcctaatctggttgtcatgccatgagtcttttctcttcatggaattcagctatttatcataactcttgctaagatttaggaaatattaactactagttatttgtgatagcaacatacacatggccagtaatgctcttgtccaggaagatctaataccagagctaaaaatgaaagtcatggatactgttacacaaagaacactctatataactgtgttaagtccttcagacaagttcaggaaatcaaaaagtttaaaaagggaattctttagagatttaggggagatttctcatttttgtactatgaagaatcatggaatgttttaaaaatatttttaaagcacagtttgattcaggtgcttcttgaacagcataaatcccctggagagtccacatgtaagaaagacatgtgcaggccgggcacagtggctcacgcctgtaatcccaccgttttgggaggctgaggcactcccaaatgcctcaagtgatccactcaagatgacttgaggccaggagttcgagaccagcctggccaacatggcaaaaaccctgtctcaaatacaaaaattagccaaccatgtggcacacacctgtagtcccagctactccagagggtgaagcacgagaattacttaccagcttgggtgacggagggagactcaaaat

SEQ ID NO: 176159 - DNA, 805 bp, Homo sapiens
cgggtggacattttgtttgcttttccattaatccactggtttagtttccagaacgcaatgtcagacctgaggtgacagaaaagggaaaacgtgagagagtgtcttcttccctgaagagaggtgggcctgaggcttgacagtggcgctgcctgagtgacctagccgctgggctgggccctggacagctgatcccaggttcctgcacttgtcgccacccttccgtagtccacaggcctgatggcggcggctgagccgatgggcccggcacaggttcccatgaactcagaagtaattgtggaccctatacaggttgttggcatggaatggaggatgaagagataccttttgagcagagcttttctataggaatgtcacagatcaggattcccaagggaggtccttctactcagaaggcttacccctgtgggacatgtggcctggtcttaaaagacattttgcacttggctgagcaccaggaaacacacccagggcagaaaccatacatgtgtgtgctgtgtgggaaacagttctgcttcagtgcaaaccttcaccagcaccagaagcagcacagtggagagaaaccctttagaagtgataagagcaggccctttcttctgaacaactgtgctgtgcaatcaatggagatgtcttttgtgacaggggaggcttgtaaggacttcctagccagctcaagcattttcgagcaccatgcccctcacaatgagtggaagccacacagcaacaccaagtgtgaggaggcctctcactgtggaaaaaggcattacaaatgcagtgaatgtgggaa

SEQ ID NO: 176160 - DNA, 305 bp, Homo sapiens
agaggggataaagtaacaaagaggaagaagaagtaacaaagagggagggatgactcccaagtttctggcctagaagaacatggatgcagatgagataagtaagttagtaagagagtgcttgcctcagaagaaaaatggatgaggtgcagattgtggattgtgaggtaacggcaggtgggaagagggatgaggaaaacgtcacataccgggtatgtggtacacgtggtgcagtccaggcaacacagggaatcaaggctctgctgagagtcaagagccaaggcttgaacccaggctccccatactct

SEQ ID NO: 176161 - DNA, 255 bp, Homo sapiens
cagggcacactaatgcaaggggtgggctcccaaggccttaggcagctatgctcatgtaactctgcagggctcagctcccacagttgctctcaagagttggcattgagtaggcctgtggcttttccaggcacacagtgcaagctgttggtggatctaccattctgggatctggaggacggtggccatcttctcacagctccactaggcagtgccccagtggggaaacagtgtgggagctccaactccacattttcc

SEQ ID NO: 176162 - DNA, 507 bp, Homo sapiens
aaggcaaatcctgacttcagacaggtacatgcagcacagccagtgaatgaatgaatagataaggaagccagtgggtaagagagactctctagcgtgtgcctgcacgtgtcacaagtcagggatgccccatttatgtcactggcctcatgctttgcacgttacaaagtgagtaatgtgtgctgacatttgtcttcttgacataaggcagttggcttaagggctggccagagtgtttgtgctgtgcttgcagaacaaacactattcattggttacagcaaagtggcacaagttcactgggatttacccttttgtcccctggtgttttaaaaacaaatactctttgatatatcaggtgccctgagctgaacacctaagacaataaaatgaatggaccaggctgagtgtggtggctcacacctgtaatcccagcactttgggaggctgtggatcacctgaagtcaggagatcgggaccagcctgaccaacatggcaaaaccttgtctctac

SEQ ID NO: 176163 - DNA, 246 bp, Homo sapiens
cctcagatgattcacctgccttggcctcccaaaatgctgcgattacaggtatgagccactgtgcccaaccaaaaaatttaaaaattagatggttgcagtagtgtgtctctgtggtcccagctattcaggaggctatggcaggaggatcccttgagcctaggagtttgaggtggcagtgagctatgatagcaccactacactccagcctgggtgacagtgtaagaccctgtctctaaaaaatgaagg

SEQ ID NO: 176164 - DNA, 422 bp, Homo sapiens
tcacttggaactgtggggcagggccaggcttgggcagcattgccccctgagctgcatgagtcatgtccataggatacccctacccagctctcacagtggttaggaacacaggtcagcacttataagctaggtatatcttgggcaaattctgtagcctgtctgccttggtttcctcatctgtataatcgagataatgctggtattgcttcatagggttattgtgaggattaactgagttaatacacaacaggtgcttaggagcagtgcctggcacgtaagaaacaacatagaagtgttttcattgctatgatgcttgaggggtgagcataggagggatggcgtctcctcaaaaacagcgtcccccagctcagtctcttgacccccacagcctgcctcccagctctcttcattctatcctgtcc

SEQ ID NO: 176165 - DNA, 520 bp, Homo sapiens
caccacgttggccaggctggtctcgaacccctgaactcaggtgatccacccacctgggtctcccaaattgctggtattacaggtgtgggccaccgtgcccagctggtaattcggtttagatgaggtcatgatggaattagtgaccttataagagacactaaagagcttgctccttctctccatgccacgtgaggacacagtgagagggtggccatctgcaaggcaagagagcagccctcaccaggaatggaccatgtggaccccctgatctcagacttccagcctccagaactggaagaaaatacatttctgtgatttatgtttaccttgcacccagtctatggtacattgttatggcaccatgaacagccaatgcaatataaaaatagtcactattacgacgacacaaaactcccaaactataagatacacaccctacagagcagacagattaaatagtgaaatatttttatattgcattggctgttcatggtgccataacaatgtaccatagactggg

SEQ ID NO: 176166 - DNA, 573 bp, Homo sapiens
ggtactatggcatagctgttcctatgatgtatcacttctgatctgcaatacctagctctacgcacgtgtgtgaaatcgaacccctgaactcaggtgatccacccacctgggtctcccaaattgctggtattacaggtgtgggccaccgtgcccagctggtaattcggtttagatgaggtcatgatggaattagtgaccttataagagacactaaagagcttgctccttctctccatgccacgtgaggacacagtgagagggtggccatctgcaaggcaagagagcagccctcaccaggaatggaccatgtggaccccctgatctcagacttccagcctccagaactggaagaaaatacatttctgtgatttatgtttaccttgcacccagtctatggtacattgttatggcaccatgaacagccaatgcaatataaaaatagtcactattacgacgacacaaaactcccaaactataagatacacaccctacagagcagacagattaaatagtgaaatatttttatattgcattggctgttcatggtgccataacaatgtaccatagactggg

SEQ ID NO: 176167 - DNA, 212 bp, Homo sapiens
ataattatttttgttttcacgtcagtagtcttttgttccccccattgaatttggtgattcccccccgccccccgaggattattttttaaataatgcattcccaagtattttgacttttgtgaaagaaaatactttttaaggtaattgaatacctccataaatcttgtatttccttaataatttatttggcaatgtatttaaaaacagtgttg

SEQ ID NO: 176168 - DNA, 251 bp, Homo sapiens
aatggtaccgggaaaattgggtatccacatccaggagaatgaaattggacccctctctcaccatatacagaaatcaactcaggatggactaaagacttaagtgtaagaccccaaactataaaactaccatgagaaaacataggtaaaataattcaggacattgatctaggcagagactttatagctaagacctcaaaagcacagaaaacaaaaacagaaatagacaaatgggactatattaaactaacaag

SEQ ID NO: 176169 - DNA, 707 bp, Homo sapiens
gctttggagctgctgcaagggctaagagtgtctttgtctgaagtcctcagcgtggtccatgccgtcctgtgcagggcccttctgaggccacagggacgtgcaggatggccggcaaggcctgcacagaaggggcgctggggggccttcccaggcaaggcagcagccccaccattcacagcaaggagactaccaaggagggcagagaggcggctttgggcagcaagggctgctggggtggagtcctgctggccttcccctagagaaggcgacgtggggagggcagagcaattctgagtaagggagaaccagtttatatttcactttagaaagtaattgtcacagtgcgaagtttcttcccctgaaaaagcgatataaaaaggtccatcgtggccagtgcttttggggacttgagatgatgggtatccggtgcccgggccctgcgtggtgcctcagctggatgctctgcaggtgggggaggccatgttggctgagggcaggggctcaggcaagggcagtggggtggctgagcctgcacaagttggtgcacccctgtctgggtctttttcttaaaactgcaagtccagccttatctctgagacctcctgaggctggaacctgccatcagacaggcttacagttctagccctggtaactgcaatgatgcggatgcctctgtgactggcagagcagagggaggagcgacaggg

SEQ ID NO: 176170 - DNA, 257 bp, Homo sapiens
ttgattgtgagcttcccagcaaccaatgcaaaaagggcaaccagataagtcatgtgacttacgctgtccacaagctcaaaacaaagcatgtgttgagggaaagcacagctcctctggtgttggcaaaaaaaattctccctaaagatcctcgtaaaaagaagtcacttggtttcattgccggttacaagttgctggcaaccaagtgccactggcaggtatcttacagcttaatagaagcagcattacattggtctaaa

SEQ ID NO: 176171 - DNA, 379 bp, Homo sapiens
ggttcagaaggcacacccaagactcaggcccctgcctcaactccacaacactgagggaggtgagtagactgggtgggaggggcagctctgcagctggccagaggctgcggggacacaaggggtactcagcagacctgggcgtctctccacaaggctcaggtaccagatctgaaataacatgaaacacagtagggggttcatcaacgtcatcatcattattcactacgtttgcttcagacctcaacatcacccacagatgattatgggtttagaaatggaatgaggttgaacttagggggtgaccacctgacttctgttttatctttgtcttttattcatgcttctttttactgagtggtcatccgcaaacaagcctgca

SEQ ID NO: 176172 - DNA, 237 bp, Homo sapiens
cctagatagtatgatacctttttttgtgtgggtgaggggaggaaaaaattaagaatgtagtttattgtatatgcatagaaaaattctagaaggatatataagaaagcaataacagtgataaccagattgggaagtagaaggagcagaaaccagctgaagggcagagatgaggagagggagattttatagcatagcttttcatatgttttatatttttgaatcatacgaatacattac

SEQ ID NO: 176173 - DNA, 495 bp, Homo sapiens
gtacctgcctggggtcccggctcacccttcatccacacccttccccatgacaggctgcctccaagccctgcagtctgtagagaacaccttcctcctcctgccctaacccaggtccccacggtaccttggtaaggggttgcaccactgccactgcacagaaccagacaccctctcccttgcgtggcatcagcatgcccaccatgggatactcatcactagcaggacaacactgacccatctgccctctccctgctggaccatggacaccttaaggccaaacacagctgactccaggtgcacactggctgagaaggagtgggttgtgcaatcatgggggagaatttctacaaccctagggtactgcaaagaatgcagccattctaaatgaaacataagatcagctggtaagttttgaatatttttctttttaaagagctttcacttctattattgggatgtattctcaacatacttctaaataattattgttggcat

SEQ ID NO: 176174 - DNA, 126 bp, Homo sapiens
attttagagatgagcaaactgaggctcacaataggtaagtaactcattcacagcttgaagctgcagagctgaacagcaaacccaatattcatgccctttgcccctaaaggctctccaatatggcac

SEQ ID NO: 176175 - DNA, 337 bp, Homo sapiens
atcctaaatcaaagcagagaatccttgccactgtccgctttcttcccaggtgaaagcaaagtttccagttctgccattctcaagcataaccaccttccacaagcaagaaattcaatactctgagctaggtgtggtggctttctcctgtaatcccagcactttgggaggccgaggtgagaggatcacttgagcccaggagttccagcctagcctacacaacatagtgagacctcctctcaaaaataaataaataaacaacaataataataaaaataaatccacctttcatatgtgtaatgaaaaatatcaaagattttttgttttgttttgttttgag

SEQ ID NO: 176176 - DNA, 471 bp, Homo sapiens
tgggcaacatagcaaaaccccatctctactaaaaatacaaaattagatgggtgtggtggcatgtgcctgtagtcctagctatttggaaaactgaggtgggaggttggcttgagcccaggaggttgcacagtaagccaaggtggcaccactgcactccaacctgggtgacaattcttttttccactgaataatattaaaatgaatattcaaattttaatatggatgacagcacattagtgggcccttaaaaatacaatgctgagctgggtgccctggcttgtacctatagtcccagctgcttagaaggctgaagctggaggatctcttgagcccaggagtttaaggttccagcaagctagaatcatgccactacactacagcctgtgcgacagcaagaccctgtctcaaaacaaacacccccatgccgtaatagtttaaaagaattatcctgaatcagggcccagaaggggg

SEQ ID NO: 176177 - DNA, 298 bp, Homo sapiens
tggaccaccatccattttcagcactaggctggatacgtatcattagaattaaacttacatggcaatcactctactttctacattaatcaacaccatttccagagtttaacaagccttgctacatagggtgctcatttggcatctgattcatccaacacagccaagtgtacaatcatgaaactcccataatattgtttgaagaaggctcccaggcctaatattagaattaaagagattttaaaagctgtcatttctccttcactctctttaatcctcacaattacgtagtgggcttttg

SEQ ID NO: 176178 - DNA, 670 bp, Homo sapiens
agcagaggaggggccagcagtagaggaggtctcagaagctgaggggcctggatgggaaaggcgccaggccctagccagctcaagaagtctgaaagcgtccccagtgagtccccactcagagccctgtcctctctcgccatggctgtccagaggatactgtctcagagaccttcaaaaccgtgtacattcctgaatggtactgggccctcagcctcagctctctgctttgtaaaagaggacaagaacaccactcctgtcccccgggtttgcctccctcaagtcactgcagatggacagaacagaaattaaatgtcttcgctgtggccacatttggccccaaagccttggcagcgcagggccaaagagcccgccctgcttcagtgggtgctgcctatgaggcttgagaaagtctcctgcctacttctctgggcctccgtctcctcttgatgtggggctggaaacagtaccctctccccagcacagctgccaccatcagagcccagcactggggcaggtatacggtggtgtaacagtggagtcgccacccacagccagcatgccccaggcccaggcctgcccagtcctggcagcctggcccacaagtagtgtccagccctggtgacaagaacagaagaggtggggtcctaggccctccccaacccacccacca

SEQ ID NO: 176179 - DNA, 594 bp, Homo sapiens
tgccttttatgaataacagaaaagagaacttttatcctgatccgctgtagtttcttagagaaaatcctgctcccaagtagaatgctggatttccatctcattctagttatagtcagaattgggttacaatcattctgaaccactgagtgtggcacaagtcaaaatgtttgttcctagagattgagatattagtcagtgatgtctggctctgaaatggttatttatagattggaacgacctggagcagccagcagagtgacaaatgaggaagaggacagaatctagctgaagaagctctggaagataccatttgaagtcttgagtgcttgaactcacaaagaaagcacatgagtacacactagcacttgagctcttcattttaaacagaataaagaatgtactgctattattgtcattttacagatagggaaattcagactcaccagggctactcagatacaaagaaaatgagccagaatttcaagcaagcctgagcttagaatcacttgaacccggggagaggcagaggttgcagtgagccaggatcgcaccactgcactcaggcctggcaacagagtgagactctgtcaaaaa

SEQ ID NO: 176180 - DNA, 665 bp, Homo sapiens
acacttcactccgtgctgtcagcaccctttgcttctgttcctgcacttgtgccaaaccctttggatgaagagcctcgttgtgcccatctctggattcctagtgccaagcatggggtccagcacttgacacatggctgttgctgaataaattaaagaacaaggattatggatggccaggtaccatgcatataacatccttattataagaactttgggccagaaaacagaacaaaaagggagagtgctttgaggccctggagatcagagcaaatctcggcaatatcacgctccaatttgaaggctgtaagtgtgtgctgctttttagcatggatgctgatcaactgcccgaggtaaaggaacctcttgaggtcaggaaggaggtctgtatgtttagtctggaggtcagtctacattttggttagctaccaaaactaacagacctaggtggttggcaattagaggcgcattttgattgttttatgccatatactctacaactcacatggcagcacttttttcctcctgatttcctttccctttgcaggaagaaatgtgtttctccttttcttggaatctccttattttctgctccgattatatcccttttttctgctgttcatacaatttcaagaattaatatgagttatgagggttctccagagaaa

SEQ ID NO: 176181 - DNA, 2676 bp, Homo sapiens
gcgagggccgctggggccgcgaagtggggcggccgggtgggctacgagccgggtctgggctgaggggcgcggcttcgcggtggaccccagcccggcaacggaaggcgagctctcctccaccgtccaaagtaaactttgccgctccttccgcggcgctcccgagtcctcgccgccgccgggccgccgcagtccgcgaagagccgtcctgcgtcagggcctccttccctgccccggcgcggggccactgcgccatggacgccacagcactggagcgggacgctgtgcagttcgcccgtctggcggttcagcgcgaccacgaaggccgctactccgaggcggtgttttattacaaggaagctgcacaagccttaatttatgctgagatggcaggatcaagcctagaaaatattcaagaaaaaataactgagtatctggaaagagttcaagctctacattcagcagttcagtcaaagagtgctgatcctttgaagtcaaaacatcagttggacttagagcgtgctcatttccttgttacacaagcttttgatgaagatgaaaaagagaatgttgaagatgctatagaattgtacacagaagctgtggatctctgtctgaaaacatcttatgaaactgctgataaagtcctgcaaaataaactgaaacagttggctcgacaggcactagacagagcagaagcgctgagtgagcctttgaccaagccagttggcaaaatcagttcaacaagtgttaagccaaagccacctccagtgagagcacattttccactgggcgctaatcccttccttgaaagacctcagtcatttataagtcctcagtcatgtgatgcacaaggacagagatacacagcagaagaaatagaagtactcaggacaacatcaaaaataaatggtatagaatatgttcctttcatgaatgttgacctgagagaacgttttgcctatccaatgcctttctgtgatagatggggcaagctaccattatcacctaaacaaaaaactacattttccaagtgggtacgaccagaagacctcaccaacaatcctacaatgatatatactgtgtccagttttagcataaagcagacaatagtatcggattgctcctttgtggcatcactggccatcagtgcagcttatgaaagacgttttaataagaagttaattaccggcataatttaccctcaaaacaaggatggtgaaccagaatacaatccatgtgggaagtatatggtaaaacttcacctcaatggtgtcccaagaaaggtgataattgatgaccagttacctgttgatcacaagggagaattgctctgttcttattccaacaacaaaagtgaattatgggtttctctcatagaaaaagcatacatgaaagtcatgggaggatatgattttccaggatccaactccaatattgatcttcatgcactgactggctggataccagaaagaattgctatgcattcagatagccaaactttcagtaaggataattctttcagaatgctttatcaaagatttcacaagggagatgtcctcatcactgcgtcaactggaatgatgacagaagctgaaggagagaagtggggtctggttcccacacacgcatatgctgttttggatattagagagttcaaggggctgcgatttatccagttgaaaaatccttggagtcatttacgttggaaaggaagatacagtgaaaatgatgtaaaaaactggactccagagttgcaaaagtatttaaactttgatccccgaacagctcagaaaatagacaacggaatattttggatttcctgggatgatctctgccagtattatgatgtgatttatttgagttggaatccaggtctttttaaagaatcaacatgtattcacagatgattttgcgaataatcgagaatttatcacaatggttgtatacaagactgatgggaaaaaagtttattacccagctgacccacctccatacattgatggaattcgaattaacagccctcattatttgactaagataaagctgaccacacctggcacccatacctttacattagtggtttctcaatatgaaaaacagaacacaatccattacacggttcgggtatattcagcatgcagctttactttttcaaagattccttcaccatacaccttatcaaaacggattaatggaaagtggagtggtcagagtgctggaggatgtggaaatttccaagagactcacaaaaataaccccatctaccaattccatatagaaaagactgggccgttactgattgagctacgaggaccaaggcaatatagcgttggatttgaggttgtaacagtttctactctaggagatcctggtccccatggctttctgaggaaatctagtggtgactataggtgtgggttttgctacctggaattagaaaatataccttctgggatcttcaatatcattcctagtacctttttgcctaaacaagaaggaccttttttcttggactttaatagtattatccccatcaagatcacacaacttcagtgatggagaaatctcaagttactggcttttatacttaccaaacatcagttcttcaaataaggacgcaaatcttcaggacagtaagcagaacaatcagaatggaattaaatctctaaaaacgtg

SEQ ID NO: 176182 - DNA, 2813 bp, Homo sapiens
gcgagggccgctggggccgcgaagtggggcggccgggtgggctacgagccgggtctgggctgaggggcgcggcttcgcggtggaccccagcccggcaacggaaggcgagctctcctccaccgtccaaagtaaactttgccgctccttccgcggcgctcccgagtcctcgccgccgccgggccgccgcagtccgcgaagagccgtcctgcgtcagggcctccttccctgccccggcgcggggccactgcgccatggacgccacagcactggagcgggacgctgtgcagttcgcccgtctggcggttcagcgcgaccacgaaggccgctactccgaggcggtgttttattacaaggaagctgcacaagccttaatttatgctgagatggcaggatcaagcctagaaaatattcaagaaaaaataactgagtatctggaaagagttcaagctctacattcagcagttcagtcaaagagtgctgatcctttgaagtcaaaacatcagttggacttagagcgtgctcatttccttgttacacaagcttttgatgaagatgaaaaagagaatgttgaagatgctatagaattgtacacagaagctgtggatctctgtctgaaaacatcttatgaaactgctgataaagtcctgcaaaataaactgaaacagttggctcgacaggcactagacagagcagaagcgctgagtgagcctttgaccaagccagttggcaaaatcagttcaacaagtgttaagccaaagccacctccagtgagagcacattttccactgggcgctaatcccttccttgaaagacctcagtcatttataagtcctcagtcatgtgatgcacaaggacagagatacacagcagaagaaatagaagtactcaggacaacatcaaaaataaatggtatagaatatgttcctttcatgaatgttgacctgagagaacgttttgcctatccaatgcctttctgtgatagatggggcaagctaccattatcacctaaacaaaaaactacattttccaagtgggtacgaccagaagacctcaccaacaatcctacaatgatatatactgtgtccagttttagcataaagcagacaatagtatcggattgctcctttgtggcatcactggccatcagtgcagcttatgaaagacgttttaataagaagttaattaccggcataatttaccctcaaaacaaggatggtgaaccagaatacaatccatgtgggaagtatatggtaaaacttcacctcaatggtgtcccaagaaaggtgataattgatgaccagttacctgttgatcacaagggagaattgctctgttcttattccaacaacaaaagtgaattatgggtttctctcatagaaaaagcatacatgaaagtcatgggaggatatgattttccaggatccaactccaatattgatcttcatgcactgactggctggataccagaaagaattgctatgcattcagatagccaaactttcagtaaggataattctttcagaatgctttatcaaagatttcacaagggagatgtcctcatcactgcgtcaactggaatgatgacagaagctgaaggagagaagtggggtctggttcccacacacgcatatgctgttttggatattagagagttcaaggggctgcgatttatccagttgaaaaatccttggagtcatttacgttggaaaggaagatacagtgaaaatgatgtaaaaaactggactccagagttgcaaaagtatttaaactttgatccccgaacagctcagaaaatagacaacggaatattttggatttcctgggatgatctctgccagtattatgatgtgatttatttgagttggaatccaggtctttttaaagaatcaacatgtattcacagtacttgggatgctaagcaaggacctgtgaaagatgcctatagcctggccaacaacccccagtacaaactggaggtgcagtgtccacaggggggtgctgcagtttgggttttgcttagtagacacataacagacaaggatgattttgcgaataatcgagaatttatcacaatggttgtatacaagactgatgggaaaaaagtttattacccagctgacccacctccatacattgatggaattcgaattaacagccctcattatttgactaagataaagctgaccacacctggcacccatacctttacattagtggtttctcaatatgaaaaacagaacacaatccattacacggttcgggtatattcagcatgcagctttactttttcaaagattccttcaccatacaccttatcaaaacggattaatggaaagtggagtggtcagagtgctggaggatgtggaaatttccaagagactcacaaaaataaccccatctaccaattccatatagaaaagactgggccgttactgattgagctacgaggaccaaggcaatatagcgttggatttgaggttgtaacagtttctactctaggagatcctggtccccatggctttctgaggaaatctagtggtgactataggtgtgggttttgctacctggaattagaaaatataccttctgggatcttcaatatcattcctagtacctttttgcctaaacaagaaggaccttttttcttggactttaatagtattatccccatcaagatcacacaacttcagtgatggagaaatctcaagttactggcttttatacttaccaaacatcagttcttcaaataaggacgcaaatcttcaggacagtaagcagaacaatcagaatggaattaaatctctaaaaacgtg

SEQ ID NO: 176183 - DNA, 229 bp, Homo sapiens
caccaggccctacttccaacattggggattacaattcaacatgagatttggatggggacacagatccaaacaatatcacaatggctaaattttcttatgagtcatcgggctccagattaaaatttgtcattgattcactactcccagccaccccagattcttctctgttgagcctctacaactgttaaggatgttcaacctacctttccctatcttggctggaactatg

SEQ ID NO: 176184 - DNA, 2126 bp, Homo sapiens
taatgaaggcccatgtagcaaaatactgattcaatgtaaagcaaactttgaaaataagctaatagtccttaaagaaaaacttatttcagatagcaaaagacaagccaatgaactcattagttttaaaaaccaaagtcaagaaaggctgaataagaaaaagacagattatgaaaaagaattattggaaaaaagccggaagttggctttaactgtaaagggcaaagaattgagtgaggaagagttacatgagaaattcaatcaactttggaaaaagtgggtgtgtgatgtatccacaactctcccgcaagttacagagcctgacattgatttggattctgaaaacatcctttgggagtatttcaaaaacaagacgaatgtcgtgggtctactgacaaattctgcagagaagtttcaaatcaattatgataaacatatcaaggtgaataagaaatataaccatatcccaatgacattaacagtctttgagaaagagttcattaatatgactactgactacattgtttcaagatttaataaaattattaacaacatgtggaaacaacagtgtggttacaatccaaattatttccatgagattctaaagacaatagaagaagaagtgaaatctgcctctactcagaagagatacacatttacaaatacatttatcattgacttatgtgtgtgtttatttcaaagagcaagagagaattttaaggaaatgcacagggcattcaagagagcaaatgatcctgtaaactacctagaaagtaagaaagatgatttcttcacgagttttaagatctcctgtcaaggagcaacctccatcaaaacatttgttgatattctgtggtataagctcactcctgcagtctccactactatatgggaggacatgacctttaaaattgcgggggacatgcgagctacctgccctgcgttcaatggaaacaggactaacctggagaaacacattctcttctctctggcagaagaagaaaactttgataattactgggaataccttcataattcaaaatcgttttttaggagttacatcaaaaatcatattaaaagatattgttcagacaatggaggtgaaaaaatgaagactttttttgaaaaaagcttaattgatatcaagaataccatcctctctgccatccatgaatccacatcagtagctaaagataaaagcagcactgcttctgagtggttggatttattctgtgattgcctggggtgcaacttgatctttccacgaagggacttgataagcattgaacaccaggagataaaacatactgaatttcttaaagaagccatgagtgcagctttggatctcacaatgaagaaaatagaacagaattattcaagtaagcctatagaagcaatggtttctaaaattgagaaaatgctctctgaacatctctgtggctgctggaaacagtgtcccagctgtggagcaatttgtacaaacacaattcctacacatgaaggagaccatagtgttcccttccaccgtcctcaggctgtcaatggggaggaatggtatgaaacagatgattttgtcattgattgctgtactagtttggttgcaagtgattgtttgttggttttgagggatggcaggaatttcccatttaagaactatcgacaagcaggaggggattatgccatgtggagcatcaccccagatacctccatccagctatactggaaatggtttgtctctcacttcagatcaaatctagaagaaaaatatcagaaaaaatttgcaggtaaaggtaaaatccccaatgcatgggccaaaatcacaaagcaagatgtgcttgaagacttgaaaaaacagtaatactcagtgaccacaaaagagccccagtgtctgaagaaaagaggcagtgtacctgaacaatccaaaaacaactactcattacaattagaaccttcatcatttccatgtttaaaatgaaatgtgtaaaaatcaatcaattaacacattaagagatgaaaatttccagtaaaaggacttcatttctctctgcctcaattcctctagtttaaaaacaacttactaaaatctgttaatatatgatgaaatcaaataacattcattttagaaacct

SEQ ID NO: 176185 - DNA, 163 bp, Homo sapiens
ccccacttcctcctctcctcctccatttcccccataatagcctccccgagactaatgactgaggaagataagagccctttctccaaatggcagtgaatgccactaatgacagagcagatgcagcactgttaattattccacgggtattaaatgaaaacgccag

SEQ ID NO: 176186 - DNA, 406 bp, Homo sapiens
agaaaacagaacacttacccaggagaaagccagtcaccaggcaggaaatcccactcccctgagacctcatgatggaaaccacaaggccagtccatgactagctacacgcattgacatcccccactgagcctccagcaacaccgactcccaacaactagtgagcctccagcaacatccactcccaaccactagtgagccaccctgcacaccaccccactgtgctttcacacaatccagcttggctgcaactgtgtgtgagatgagctggccaccaagactctctaagccaaaaaacaagtaataatgagttgttttacttcagaatagataactggaacagaatatggcagctggaaatgagctgctgtggtaatcagaagctacaatatgtgacacgactgtgagg

SEQ ID NO: 176187 - DNA, 597 bp, Homo sapiens
ttggggtaattacagaaatttgaatatagaacacatatgtaataaaattcattttcttaggtatgattacaatattcttgttatacagaagaaaaaccttattcttgggagatgcatactaaaacattatggggtgaactgtcatcatgtgtatggttttcagatgctcaacaaaagtgtgtgagaaaataaaactgtggcaaaatattagtaactggtaaatctaggtgaagcatatattgtgaaattattatcgtatttacaggtatttattttactggtgcatctatctttctatgaatgtgagaattttcacaagagctgggaaaatgttcataattatgcatgcagaataagcccaagctggtggcattctgttcagttacaggtaattttctgaatcttccctcaaatttttctcaaacctctataatcaaggggaaaatgtttcattttgttttgcttttttgagacagggttgcctataatggagtgcagtagcttgaccatagctcactgtagcttcaacctcccaggcacaagcgatcctcctgcctcagcctccaagtagctgcgattacaggtgcatgccaccat

SEQ ID NO: 176188 - DNA, 519 bp, Homo sapiens
atctcaactacatggtgagaaaaagagctgagtccagactggctcagaaatggagcctaagaactgcaataagtatcctagcaccttaggccctaggaaggactgttccatagttaacttctgtgtggcttcactgtaagcacaggtgacagatgggcatgtcttgaattcctagaagccattgtctctctcaatcatctgttccaacactgtatcagagaatgataaactttcagaattgaaaagggtcttaaaggacatattttccagctcttgctatatttccaacaagaggcatcatctcacatttgcttgactacctgcagtcatttctgagaagagggaattccacaagttggaagtagttcaaatcattgctcaaagctgtgtgtaaagatagtagtttttttttgttttttgttttttttttcagccaaaatttgtccccagggaacctctatccatgaaattttgattacttctcacaggaactttagcaaaagttagttgggattgtct

SEQ ID NO: 176189 - DNA, 224 bp, Homo sapiens
gcttgcttcttcttatgttctctccctgacaccaaatttcttgctgtgacacacaggttatctgtgacctggccttgcctctcaccactcccccagccatgctgaataattctgcactcctgtatctaccaagttctttctcatttctgtgctgttttttcctcacatggaacagcttctcctttcccctttttgggctggcattccctccaagtcttagcttg

SEQ ID NO: 176190 - DNA, 376 bp, Homo sapiens
agattgggggttctgggacaggggcaaagtgagggcattcaagttagtaggaggaccctgggtctggggccagaagacctgctctacttttgccatgctgtgcaaccttgagcgagtacctaatcctctcttgggtctctgtatatggggataatacctccgaggacaaatctagggtttctagatgagagttcttttcttatttttttaaacttaattcttttttttttggtgatggagtcttgctctgtcaccaggctggagttgcagtgagccgagatcatgccattgcactccagcctggacaacaagagtgaaactccatctcaaaaaaacaaaaaaataataagtagcactcgtacttgtttggagatat

SEQ ID NO: 176191 - DNA, 317 bp, Homo sapiens
tagtatgtagaacacatagaaaaatgtttgtaatacccaataagtagcctgataaataagctattcaaaaatagttgcctcctacgtggttggtatgggaaaaaaaatagttgccaatttttatttatcagccaatactttatgccttatttccttctctcctggacagtaagattctaattttaattagtaattgcaattgaaatgtaactgctggatgattattctgctttgtcttcttaaaagcatcctgacttgaaatgggaagatgtgaactcttgatttctctaatttatttccaggaataagaaatggta

SEQ ID NO: 176192 - DNA, 525 bp, Homo sapiens
cacccccactcaggccctgcccaggtccttagcatcggggactcggcccatggctctgagagtttacccttcagaggggccccctcagtgccatcccaggtgcaccccgtccccacacccaggctctgcgtcgtgactcttgtccgcatcttcttactactcactgttgtctgaaatcactttttaaagctgtgtttatctacttgcagatggtctgccctccagctaaagaaattaatgaggccaggcgttgtagctcatgcctataatcccagtactgtgggaggccaaggcaggcagatcacccgaggtcaggagtttgagcccagcccggccaacatggtaaaaccctgtctctactaaaaatacaaaaatttcgttttcgtatgatggtttgcacctgtagtcctagctacttgggaggctgaggcaggaggattgcttgaacccaggaggtggaggttacagtgagctgagatcataccactgcactccagcctgggcaacagagtgagactctgtctc

SEQ ID NO: 176193 - DNA, 301 bp, Homo sapiens
ttttggtggtgggataatcagagtaggtaggggcagtgaagagaacagggctgtgacctaggtgatgagcatctatcagggtggtaatggaaggaatagaaaagagaatgaaagggggcagtcaggaggagagactgagttgctatccaaggctgaaaagaaaatcttgggtgcagctggggacacgaagcagctctggaagcctaactgcgatggagattcagatgtaggagccagatgcgcagaagtgttgctggtgctataaaagagggcggaggcactgccagagtgggcagtgaga

SEQ ID NO: 176194 - DNA, 260 bp, Homo sapiens
agaatgttgagcggagaggaaggtcagcgccagctgtattcaagcacagagtaccacaaaaggcgctgggggcagacaggcctgagatgggatcgccactcagccacttacgaacctgtttactaacttggccacatcccgtctccccttctgacctccgtttccactgccaattaaaagtgcgacggtgtctaccttgcagggctgttttcagagtcagcgaaaatctatgtatgtttagcacctaacaccacatccat

SEQ ID NO: 176195 - DNA, 114 bp, Homo sapiens
gatgtagaaaccatgggtatgtataaataaatcacacagacatattttagtcaacttgagagaaagaatgtacttcctctccacatccagcacccgctcccgcctcccaccatg

SEQ ID NO: 176196 - DNA, 414 bp, Homo sapiens
ttggtttcatgaacaaaaccagacccaataactactgctcccatcatttcctccctcccctcggctagtgaaaaccaactcatcctcaggcccacttcctcttagatttgggcttccccaggctgttgcctttccccaagtagcttctgcttgtcctgtagaagacctttcatgctttgcttctgcagcagccgttcctgaatgcctagtgtcaactgccttcttaccacgcccaccctccctgcatgctgcatttatcccctgccacagccctgtgaccctgtgtcctgctgcctctgacttgtctgtttctgcttggccatggtctctgtgaggtcaggtgtgcatatgggcacaaaccagggcatctctttatccccagcacctggcttaagtgctgctctggaactatct

SEQ ID NO: 176197 - DNA, 450 bp, Homo sapiens
tggggtgctgaggttggggtgcaattgaatctgtcaccctggtagtaagcagagtcctgaataggttgtttttcaaccctccccccctcctgcccttcccactcttgtagtcctcagggtctgttgttcccatctttatgtgggacacattttaaaagcttaatacagactgcactctggtactcaaagagtctcatttctcttgtaggttacagtcccaccatttgttgatcctcttttttttttttttttttttaaattgatcattcttgggtgtttctcgcagagggggatttggcagggtcataggacaatagtggagggaaggtcagcagataagcaagtgaacaaaggtctctggttttcctaggcagaggaccctgtggccttccgcagtgtttgtgtccctgggtacttgagattagggagtggtgatgactcttaacgagc

SEQ ID NO: 176198 - DNA, 411 bp, Homo sapiens
ctgccacccacctcccagagcctcataatgcttgatctctgtagcactgaagtttgggattctaaattcccaagtgttccatagtggggaaggccagaagtgtgctaggctgggaagtgggtggcagtaaggagaaaatcttcacctgtttgagattatttagagctctgcttagaggcaagacgttagacaggacacatgggtgaggtgacagagacccgtactggtctctctttctgagcctcaattttcccactcatagccagaggtaattccaggccactcccacagtggttttgaacctcgaagaaatctccttgtttatcacagagattatctactgtacagaatgtgttaatcatgggagatgatggaggtgagaagaaggatttttagcaagaaacaaaatct

SEQ ID NO: 176199 - DNA, 479 bp, Homo sapiens
tccctgtcccaagtgcccccatcagctcttgagactagaattgtagagaaccccagagagaggtgtcagagggagctctgcaaagatggggctttgtctagacacctgctttgtatttgcacaaacactttgctgaaccagacagactctgcctgtctcagcaaatgctcatgtatacttttaaattgcaggtatccatttaatgaagttaatcaatgttggcaggatgctgggtgctggaaaataaagaggagcaagaacactgtccctttcctcaaaggggcattagtctaggagagaagggaaactgaaaaccctaagtgggacactctggcttctcacccacgagtccccctcagaacacacaccagaccaacctagccaggactctgggatagtgacttggcatgtggattcagaacaaggcccacagtgtgaaaggtgctgctgaacaaagataaataaaagggacatcgcag

SEQ ID NO: 176200 - DNA, 514 bp, Homo sapiens
ggactgagaacgctctagggaatcacactgaaggaaaacagccaaccccaaagggccactcactccatgaccccatgcacacaacacccttgaaatacaaaatcacaaaaatagagaacagattagcggtgtgtgtgggactataaaaggccgacatgacggatttgcacggggacggagccgtcctgatgttctgtgtcctggcagtatcagtgccccgatcctggtgctgagagtgcgttgaatttcaccagatgttacccagggggcagctgggagaaggggacacaggatctctctgtattctttcaactgcatgtgaaactatgagcatctcaaaataaaatttaactgtaaatacaaccaccaaccactgctgagatggctttctcctgctggtctcacctggcggatgaggagaagggcacattgtccaggctgcattcagagacaggcctcgcgctcctgctcccagacccacagttctgtagacaacctgccggtgggtccagct

SEQ ID NO: 176201 - DNA, 462 bp, Homo sapiens
ctccccagacccctcctcccctcctgccgcggccgtttcctgtggctgagactctcgctcagccatgagctcaccgcccctaatgggttgcagctgcctcgctgctcaagccctagctccgcactccctgccttggagcagacggccccactctgcctcacccccgcccatctccaccttccccccacccacgcgcactgcgtccgcctggtcccgggaacactgggggtctgtctgctcgcccacacaccttggggccgggtctgcgcgctgacgcactgaatgtcccgtctctggagtggttgccctaacttcccagacggtcaagacaaacgggcaactctggatggagctcagagaaaaataagctattttgttttatggcaaaggcaaggtatgggggtagggaaggtagagaccaaggtaaaggctgcattgagtatccccttccccatttacagc

SEQ ID NO: 176202 - DNA, 526 bp, Homo sapiens
ttcatgagaagatggcagagttgagcagttgtgacagaggccacatgtctcacgaagtctaaaatatttaacatctggtcctttacagaaaaagtttgctgatccctgtcatgtaatgtgacagtatttaatcacttaagaatgttatcatgacatgtcttttggaatagtgaggccttttcagaggcaacgtcctaccgtgcttgtgaacacagagtcaggctattattagctgacaatgtgatcttgggcaaatgttatttcttttgtcccagtttgttcagaaaagtacttgtgtgtgcaggcctgagactgtcatccttggaaaggcttgaacagctaaccctcggctcgcatctggaacatagatttggagacggttcccaccgtttccagaactgatgagtggctcaccgtgcctaaaatctttgtacaaacaacgtggtttatgccgaacacctgctctctgggagcctggaaaactgggcacatgccacgcagggggcacctatgtgaccacacccca

SEQ ID NO: 176203 - DNA, 709 bp, Homo sapiens
gctgtctagaggatctgaaggagatagcaggacaccggagatacatgcccacagagaaaaggccatgtggggatacagcaagaaggtggtcatctgtaagccaaggagagaggcctcaggagaaacaaatctgcagacacccagatcttggacttacagtctccagaactgtgagaaaataaatatctgttgtttaaactacccagtctatggtattttgttatggtagcgctagtaaactaatactggagaaataagaaacagaaaggtcagcataggtaacttccttttgaggaattgaccaacaagttgccaacgtcattttccattatatcccattgaccagaaatttcttacgcagccatatctaagactcagctcttgctgagtggccatgtacccaggtaaaacttgtggagaagtagtcttttgctaaaagaaggggactgtggatattggagggtaattaatgttttatattgatacaattctatgattatattgtccttatgactaccaaaacaagaatgaaagtcattcctggttcctgaaataatcttgtgggccaagctttggtcatgtgtccattcttgaaccagccactatcactaaggaaaaagatgctttgtttaggactaggtcatgtttctccaccctatgtaggaggtagactaggagaggtcatctacctccaaatatgtctgatttc

SEQ ID NO: 176204 - DNA, 323 bp, Homo sapiens
tgagatggagtctcactatattgcccaggctggtcttgaactcctgggctcaggcaagcttcctgcctcagtctttcaagcagctgggactatggtcatgtgccactgtacccagatgtttttttctttgttgcttaaggcctcaaaagattataaaaatattctcttacatttattctaataaattattattcggcttctcaacatttgtaggttcgatccatttgaaacttttttgatttatgtattttgggattcttttgtagggtgcatatatgtttataattgttatatctttatgctggatttacactttttttggg

SEQ ID NO: 176205 - DNA, 575 bp, Homo sapiens
taaagagagaattgagagagaacagcaacaagttgtgctgagtatggatgtgggtaagggagagggaagaggtcacagacctctggtgttcgcagctttcaccatggggcagagcagggagagctggctttggggagaaggcaatgtggatggctttggtatatgcctagtgttccattattggaatgctaagcatgtgggagttgtctcctactgctcaaggtcattgccaaggtctgatggcaaaaattcaaaaaattgcaacctcaagcataaatggattaaattgagacaagtttagaagagcaggctgaactattatacttaggagctactaaaaatataaaaagcaagatgtctcaaaaaatatcccaggccagacctctggtttgagggaaatcaacacatagggatgtatttggaaccaggggagtaaataagattacttagggaaaacagcgaataggtaagaaagcaaaagacaagagttttgggaaaataataaccatgggatagaaaaagatgtggtggaatgatcctgattctcgttggatttgtgtggtagacagaatgtt

SEQ ID NO: 176206 - DNA, 589 bp, Homo sapiens
cccagaggcaaccacagggaagtggttgagcctacaggaactggaacaactaaaatatgcgttacatattaggaacgtggcccatgttcttgcagcttatagaaaccaggattctccatcaccgacagacctggttctgcatccttatgtccatcgatattaggtatatctgaaaatctggaaggttcaaagtccagagaggcaattaggtccaaaacgaatggggccatacgtggtgattctgacaacacatgctgccttaaagcttcagggagtcaccccacagcttcatcacacgagtgaaatgagtggatgcaccagtgcagtaaattccctcgtaccaggcttaacccatctcagatttaaaattgctcttctgaaaaaccaacctgactcccaaaaatataagtacaggatactttgacccatctaaacggtcgctgctataacacttaaatgtctccacccgccaggagtgttcttgtgggctatctgatggcattagggcttgtcctgtagtcctcaaagctgtctctggctcagagatctgtttccttttattccagatcatcttgatcatgtatccctg

SEQ ID NO: 176207 - DNA, 618 bp, Homo sapiens
tacttgaccttcctattacatttactctgtcacttccatcataagtcttaccacatgatgtgattgtgtgtgtatatgtttctttctttttctctctctctcccactgaactctaagatatttgaaaggtaaaaatccccttgtctactctaccctatgtgattagcatagcaattatacagcacgtatctgggtgccagcacttaattagtgatacacacgtatgcatacacatattctctctctcccatatatattatataaatcagggctcattatatatctcaggggtaacggagtacctaagaaggaacaacttgggtaagtgggagacctccccaagtctaggattcagatcactggagaaggtatggctgcagcccggtagatagtggagaagtctgctgaattgtccagaccagaattgatccacatttgtctagcctagtggaaacttccctcagggtacaggctggtgagggctggttggtgcacacacaaatggagtcagagcattggagcttgctcaccagcagagcagcaggagaccaactgtacataggagaccatctataaaccagggacagccacagcaagaacctggtgccccggactgca

SEQ ID NO: 176208 - DNA, 412 bp, Homo sapiens
aagctcaaggtgatgcctcagcccccccgcaacccccccccttaatgtcccctgtccccagggccaggaggagagtgcggctgcagcggcccccctccagagctaatcggcctggccggagcaaatggcattaattgtggagatggattagctgtcacagctgggcctcccaccgagaatccaagggccgagccactcagtgtggggggaataggcagccgcctgggaagcgggtggttggacagggtgggggtaagcgcgcaccgcagccaccggggttgggggtgggcggcagcttttcttggtcattcacctgctgtgtgactttgggcaagtgtcttcacttctctgagcctcgttttactaatctatcatcacagttttttgtttttttttgagacaaggtctcaca

SEQ ID NO: 176209 - DNA, 424 bp, Homo sapiens
gtgttaatttgcgtttcttcttatggcagcaccctccttcacagagcctgcttctgtattagtcaggacaggccaggctgtattgtggtagcagtcggaacccccaaacccagctgctgccaagagagcaggcaccgggggcccgagtgatggggacttggtggagctggagcagcaaacttgctaaaatcactcctggtgacctggcaggctgaatacaagaaggctcagccaggagcataaggggcgaagtgggaaaacaccacattgcgagttttgtgttaggtcccgcaacacgagacggagaccagcttgagaaagaaggcccagcttacaagcagagatgaaagtgaacagagagatggatccagaaattcagagcaccgcaagggcagaaaaaccaactgctccaagagttaggatt

SEQ ID NO: 176210 - DNA, 172 bp, Homo sapiens
gaaaatagttttttttgcattggcatgctgcatccctcacaaggctttagagggaaaaatggacagatgaggtaatggtatatccagtggagtatgtttcttggctgtgcctcaaattgtcactcaaggctaaaattctgcagatctctgcaatggagtttggatgcccacg

SEQ ID NO: 176211 - DNA, 413 bp, Homo sapiens
gagtatctactaggaatctaacatggaaaggtaattacatatgatgttggaagcaaatttgtatacaccctatttatggccaagcaaaacagtgtaatgtgtctgagcatgtatgtgttcctttcaccagttttcttgtggtagaatttataaaactgcatatattcacaatgtacaatgtgatggtttgacgtatatatacattgtgaaataattaccacaatcaagtcaatgaacacattcatcacctcagcgttttctaaaattacatttatcaaactgtatttgaaagtaaatgtgttttctcattgttaaccacgactttaaaactttattacagattaatgttaagaaagctactgaaattaattttagtaataaaacatctgaatatacaccatgaaatgtataaa

SEQ ID NO: 176212 - DNA, 233 bp, Homo sapiens
ggggctgagaaaagtggcagtcagctacatcaaaacgactctgcagctcaccccgactggtcttctttcccctccagctcctacctattttgacgcatgggaagtattcccaacagggtttgagtcaggggcccttgccaacattgataattaactgaagaaagtacagaagaagtaagaatgaatcttgtgtttattaaattggtatcggtagaacacaacattatgagggg

SEQ ID NO: 176213 - DNA, 357 bp, Homo sapiens
tcatggatgcatccccagtgcctgtgtgctcagtggcacatgaaaggcactgaataagcatttgctgaatgaattaatgaacacttgattacctgggcccatccaacttttcccttcatccttccaacataaactttttctgtctgtgtaacatttggtggaaaacttcctgaatcccttagtactaaatggaacacccagtccattcagtgttgacaataaaacaagttaacacccattgtggaggagtgattgggccagagtcttgttccttagtaagttcatatctcaccacaatgcagagctcaagagagggctgcttttctctctactccaaaggtgaacacagacccttcc

SEQ ID NO: 176214 - DNA, 819 bp, Homo sapiens
taaagtgccagatggtactacaacgatatttcatcttacaataagattcagcaatacctagatgatacattgatgaaaatataagttatttaacagtttgtttacataaattataggataagtacagaaaattaagctatgccactagatgatgacttcctgaatagatagttcagctttttattgaaagagggattgattggctaaattgaagttacagtgacatatattcctattagtgttctgtcattgccttctgtaaaggaatatgacttcaggtaagctcaaacctgagtctactgaaggtatggcacacctggaaaattgattttcaattttctaatgtacctacaaacctctcagaagtatgctggctattggtgagtggaaaagggctagaaggtatctacaacttcacacataaccaaaaacagagaagtggtgaagtggtgaaaggagtttctcaaagcctgtcttcagtcaagtgatttcattggcagcaatgggccagtatgagaacttgaaagctgcagatgcttatcaagctctccagaagtaccgctggctagccattttattccgtgtaacaatttctagatttgtagataggggttttattaatcacctatgttaaataaaagtgtggcgtgtcttttgctggtgttttttggtgtctctccatggtgactatcactcttatgcaattgtacatcaccattggagtcaaaatataaagttttaataggtgagaataataaataatagtgctgagaagaaaaatacagtgaatttggccaacttcggttggaccggctcatt

SEQ ID NO: 176215 - DNA, 468 bp, Homo sapiens
ctcagttgcattgctaaaaaaatgaagaaactgaccctgccgtcctgagggttggggatgcgaggcagggggccttgtgtgactcagttcattccccagatcctgtctggctcaggggcgggcaagcatcgtgggtgaggggtcttttggttggcctgaccagctttggttgatagctcctgtttcttgaatgcctacagatgagaaagcggaggtaaagtaacttggccaaggctacacagcagaagaggcagaagtgggattcgaacctgagactctatgatattacgtccatgccgcaagacagagctggcacctacgggaataacaaggaggtggtggcagggtagtgagctccccgtctctgggggtgtgtgcaatccggcgctgcgctgtcagcagggcaagggctggggccggggccaagaccaccaagccaggcccaggcccgcccgcctcccgcggccg

SEQ ID NO: 176216 - DNA, 995 bp, Homo sapiens
acacttcctggacactgggctatcagggtagacactgtccccccagctaagagggacaggtgctgaggagggatgaggggctttgagaggtcaccaatgagacttctgacccattcctgccctctggtggggctggcatttggatttgtgctgttttatgctgctggaagtgccccacactccctggggcccccaccacagcaaaagcaaaccctccctggagagacacaccttcctcatcccggccttccggctcccagagtgtagacagacgaagagcctggttggaattacaagacgttgaggaagaaagctgttctgagagggtcagcaggggtcagccccagggacctcacgtgctgggatggttaaatgcacagtattcatcaggggagttaaaaccatggagtatcatgcagatgtttttaaggcatatggaatatctggaaatgaaaactataatcactgaaataaaaaacccagtgagcagatgatgtagcttattagacacaacataagaaagtattggtgaattggaagttctaacaaaagagattgcctagactctggagcacagaaagaaagtgagacaggaagcctgcaggaagcggggagctgtggaggagagaatgcagcttaacaggcacctcggcagaggagagagcagggcagggagacggtggctccagaggccggcagcagagggcttttcaaggttcataaaaacacaagcctcaaattcaaaaagtataatgaattataagcaggagaaagagcagtaattacacatttaaatatgactctgacgtgaagttttcagaacagcaaagggaggatgttaaaagcagccagaggcacacccacctgtggtcccagctactcctgaggctgaagtgggagggtcgcttgagcctgggaggtggaggctgcggtgagctgagattgcgccactgtgctccatccttggctacagagcaagaccttgtctcaaaaaa

SEQ ID NO: 176217 - DNA, 929 bp, Homo sapiens
ctcggctcccggaagcggcacgggaggcgaccgtgctcgccgttggcaggctagggttggcggcggcgtattctgtttgttttaaacgaaggagcggagggaggggccgcgcggagcgtgcctaaggtgaaagggctgccgtgcagccaggcagaggcgaggaaggcttctccatcgtcgccaccgcccgcctgtttcgccggcaacaggttcccccgggacgggaggggccgcagcgccgcgcagctcgcagcgctgaacgtcgccgaaatcccttggccggccgagcctccgcagccgcgacccggcttctctccgtccgagtcccccgagcctctccgaacccccgttggacttcccctccctggccggcgccgcccgacccgctcccccatcctagagggaattccctgcgccgcggctgtgaggcacctccaccccggcctgaaatgcaccgcagtcctgaaggaaatccaccctcatcccacgcagattcacccgcaacgctgcctgaatacgcctcgctgcccacagaaattcctgcccaaaccagacgcgtggaccacccaagacgaaattcacactcgaccctagccccgccagcccttgccgaaatcaccctaaacccgttgaaattaattcccagctgtccgaattttccttccaacattaactgactacctgtctccgccaagctgactgaactctaccgaactcttaccctgaaagcccctgagagtccaaaatatatttttccagcccgaaatctaaatcccagttctctgtatgaaaacctccagaaacccagactcttacttccttcggccacggactcgttcgaacatcgtggacatcaccttcccacatttttaccgcagtctttggctccgattctttgtccctgcctcttgggcagcatcctatccctg

SEQ ID NO: 176218 - DNA, 679 bp, Homo sapiens
ctcggctcccggaagcggcacgggaggcgaccgtgctcgccgttggcaggctagggttggcggcggcgtattctgtttgttttaaacgaaggagcggagggaggggccgcgcggagcgtgcctaaggtgaaagggctgccgtgcagccaggcagaggcgaggaaggcttctccatcgtcgccaccgcccgcctgtttcgccggcaacaggttcccccgggacgggaggggccgcagcgccgcgcagctcgcagcgctgaacgtcgccgaaatcccttggccggccgagcctccgcagccgcgacccggcttctctccgtccgagtcccccgagcctctccgaacccccgccagcccttgccgaaatcaccctaaacccgttgaaattaattcccagctgtccgaattttccttccaacattaactgactacctgtctccgccaagctgactgaactctaccgaactcttaccctgaaagcccctgagagtccaaaatatatttttccagcccgaaatctaaatcccagttctctgtatgaaaacctccagaaacccagactcttacttccttcggccacggactcgttcgaacatcgtggacatcaccttcccacatttttaccgcagtctttggctccgattctttgtccctgcctcttgggcagcatcctatccctg

SEQ ID NO: 176219 - DNA, 840 bp, Homo sapiens
tgccagggctgggacggaaagagtataaggtgagcttggaatattttgtgtaccaaaaagcaaggaagcgctcaaagaataatagagattagtggagaggacatcagagccatcttgaagaagctcccactgaccaaatgtgagataattcgagcatcaaaataaatagagatataatagattataaccgactgaataacaggaaaccatgaatctaaacaggtattaataaataaatggaagccaggagtagtggctcacacctgtaatcccagtactttgggaggccaagatgggcagatcgcttgaggccaggagttcgagaccagcctgaccaatatagtgaaactccatctctactaaaaaaaaaaaaaaaatacaaaaaattagcctggcgtggtgacacatgcctgtaatcccagctacttgggaggctgaggcacgagaattgcttgaacctgggaagcggaggttgcagtgagccgagattttgtccctgcactccagcctgggtgacagagcgagactctgtcttgaatgaatgaatgaatgaatggaaaatgaaagccctttctcatggtagaaggccaactaatatttaatggttggaatgacagagtcatacaatcatcatatggtaaccagcatggtaataatttgttcaggcaagaatcatcaatctgtgctaaaacaagtaggtaaaagtttgttgaataacaggatatttacgtagtttcaaaacgtatcccccaaaaatacatattaattacaatgaaaaaaatagtatctttccagtggagaaacatggaagatacttcctccttaaccaagtgaccgaag

SEQ ID NO: 176220 - DNA, 437 bp, Homo sapiens
ggcctcaagtgattcactcatgttggcctcccaaagtgctgggattaaggcatgagccacccccttggcctcttcaatttttaaatagtgtggttcaaagagaagtttttaagtttatgaagttcctgtgatcagtttttttaatggaccatgtttttggtattgtataatatctaagaaatttttgcctagcccaaggtcacaaagaattttttcaagttttatagttttatatcttatagaagttttatatttttaatttgcgtatagactatgagatatgggttgagatttatttatgtttgtatgtggttatccaattgttttagcaccatttgtttaaaagactgttatttctccttcgtattatcatacctttggaccttttataattatcttcattttaataattttcatctctgtgtagatctacattt

SEQ ID NO: 176221 - DNA, 360 bp, Homo sapiens
ctaaagtgttacccactggaggtttaagaatgaggataggcccagatagaagcagatgaggtgagatagcccagttccagacttcccgatgaggaggcgcacctgtggcacctgttacgatgggggccctgagcccccaccccagccctgcagaaggaagtgctgctctgcagaggaaggggcggatggaggcggagtctggggttttaatgagtgtctcaggtgtgtcttaggctagacaaatttgggaaatgttgaattcatcacggacttgctctgagctacccacagcaaccagcaaactgccacagaaagaccaagtactgctttgtatctcgttagcctacttaaaatggacac

SEQ ID NO: 176222 - DNA, 359 bp, Homo sapiens
cctgcacaaatgttaactctggttcagacaccttttctgcacccagttattctcactcataatttctttctccttgggtttttgttttattttggaacggctttttaaccttcagaagtacattttgtctggaggaccagagtatcgatgtgatcctacctgtagattcttggcaagagagaaaatgttcttattaatgcagaaagtcctacccagaaggaagaaaacgtctcacctagaaaaaagtcattatgtagttttttctgggctcatggtttcctgaagagacctggtcctagtcaatttctccttggtattttattatttttgtccatttgaggtgaaatccggaggaagta

SEQ ID NO: 176223 - DNA, 284 bp, Homo sapiens
ctccaaaaaaaaaaatcagtgaagtttagggacttgtttgaaggtcatctagtacaagctatgcagatagctattattttggtttctagcttcaggctgtctcttttgaactttgtattagaaacgcagggccttttaataggtggagttgtctcaccttcaaattcaactacatagctttttcttaaagtagtataatgcagaaagtactcatccgtaaaaacaaaaatggttttctttcttccctgttatctttgtgacccactgatagcagctggtggtcc

SEQ ID NO: 176224 - DNA, 446 bp, Homo sapiens
tgactagcaggagcttatctagctcgccagtgggtcctggtccgtacatgggacagaaggagccgcaaatatgggaactccaatgatgccagataatggagcagtggtaatccgcccaccttggcctcccaaagtgctggaattacaggcatgagccactgtgcccggccaaagaatatttttttgaggacaaactatgcccaagcacagatacatattcgtgggcaagtcagacttaagtgatggggtatttttgttttgaggctgccgatctcaagaagcaggaggtgtccaagggcattgaccaatgcacctgtctggtgaggcactgtacttgttagttaactgctggtggctcttcatctagttggcagagaattcaattcattagttattcacacagctactgtgtattggacttaatagtgagactttgagatgaatga

SEQ ID NO: 176225 - DNA, 253 bp, Homo sapiens
ggtaagaagaaagaagtatccgcgaactttgggcaaaaacttccctaaaataattttaacaaaacgagcagctcagaatcaagtatactaaaaagcatcatcattattattattactatgagatggagtctcgctctgtcaccaggctggagtgcagtggcacaatctcggctcactgcaacctccgcctcctgggttcatgccattctcctgcctcagcctctctaagtagctgggactacagatgtgccac

SEQ ID NO: 176226 - DNA, 253 bp, Homo sapiens
ctatatgccataagtaagaaacctgaaccaaggacctgggtatcagattggctggataaggagggatgagcacagaaggaaggacaaagataatacctttttcaagatgagcctgtaaatgaaaattctaaaataaatgctaaggaggccaccagtaaaaacagagattaagacatatttactccagatgaaattaaagtaatacaacagtctggaaaatacttcaaaacaactttcttccataagaaaaagg

SEQ ID NO: 176227 - DNA, 180 bp, Homo sapiens
ctgaatacacagcagaggtctatagcaatcaagagttttctgttaaaagaattttattatcaagaataaaacttataaaactgaaaaaaattgcctgagtgtgtacatgcatgacttatcttttagagaaatgagatgccaaagtcttatcttttagattaatgttcttcaaactgcttt

SEQ ID NO: 176228 - DNA, 216 bp, Homo sapiens
ttgaaaatggaaataaaaagggttgataaacattgggttagaaataggtatataggtaataaaactataaagaaaaggagagaaattactgctatacattcaggatatttcttgaggtaagggtaggagctgggtgcttctagagtgttgactatggtctgtttcttcacctgggtgggccactcaggtgtagtttatatgttcatgttttgttaa

SEQ ID NO: 176229 - DNA, 416 bp, Homo sapiens
tagaggagggggcctggatccttgggagttggtggtgggaaaaagaagaggagccctggagactgctctccctgcgggagactaggagcctccatcctgaggctgagccctggagggggggggtcactttgctccagggacagggcagcggtggccgtggccgggtggagaggagacgctgcctaggcccgtgactcctagtgtgcctctgggcttgcttccggaaagccacgacgcctggtcctcttaaaccccacgcctcttgttttgtaaacagatgattttgttgaggataaatgaatacagcttaatacttagaactgttcctcgcatatagtaagtgcagttgaagtgttagattttattttattttgagatggagttttgctccagcctgggagtctcactctgtctca

SEQ ID NO: 176230 - DNA, 431 bp, Homo sapiens
tgatttctttgctgctgcataaagggagttggaagataagcacggtcagctgcatggctaagaagaaccccaacagcagagaccccagggtcagctggacacacaacctccagctcatgatgaggccgtaacagagaggacaacagatggccacaaaccagtcaaaggccatgatggccggcaggatgcagtcagcccttcccaggaagatgaagaagaacatctggcctccacagccgggcagggaaatgaggtttctccccatgggtaggacattggccagagtcagaggggcaatggtgaaaaagtagaagatctccagacctgcaaagtttgtcaggaagaagtacatggaggctgggcacggtagctcatgcctgtaatcccagcattttgggaggcagaggcgggtggatcacctgaggtcagga

SEQ ID NO: 176231 - DNA, 672 bp, Homo sapiens
atgaacctgtaatgtgtctgtttgccatctgctatcaccagttttctagtttttcctacgaattgcaattctacattttcataagatcagatcatttaattcacacaaattcctgggaaccgtgagacctcctcagggctttatcttcctgatcctgttcttgctgtttgcctaacaatgttgatgcaacagaatagaaagcatttttgcctgcctgataagcccgattttgccttcataccttaggtggtagcctgtttatagaataaataaagatagcccagagcgcctaggttcagaaaagttctctctgttgatggggaagaaaagaaaacaaataactaagaaaaagtctgcacactttaaaatgagtggatataaggtccctctattgggggtatcaattacttaaatgacttacacccacagtgttttagttctcaaatgctttcaagatttaaagaatccggaatggttacagttagtcttaggtctgggttccattaatcaaacctgtaatcaaatagtcacttgacttcatttgggctttaatggttgaatggtgtttataaccaaatttactagccagaggcctatggggctggagaggggtttagcctcacaaactccagattttagtcaaactaaaaagacccaggaggccagttctat

SEQ ID NO: 176232 - DNA, 447 bp, Homo sapiens
gttagcaactactgtcattaagactatccgtattctattttacttttgatagttttaagtgtatacaataatgatgggtaaaacaggtaactcatgctggtcctgataactttgttttaacattttgttttgttttttgagaaagagtctcgttttgtagactagagtgaggtgcggtggtgcaatcacagctcactgcagcccccaaatccctggctcattatcttcccatctcagcttcccaggtagctaggactacaggcgtgcactaccatgcctggctaattttttgtgtttttggtagagacagtgttttgccttgttgcccaagctggtttcgcactcctgggctcaggcgatctgccggccttggcctcccaaagtgctgggattacaggtgtgagccaccgcactggcctgtttaatgagctctcttcgctgccctct

SEQ ID NO: 176233 - DNA, 419 bp, Homo sapiens
tttgtatcttcaaaacttcgtacataattttaaacaaaagtatgtatggaaaagtctcaagttacaatccaagtaaaatttgtaggacttaatctgtagggtctcataatcacagtttgaaaaggaggccaaaaatcagaatattaagggactccaacccttgaaagtgactgctatagaagtctttcttctacagataccctaatgcttcctataaccccaaacaaagaaattaagaatacagcgaatggggatgtaaacaaagctctaatttcccattttcctactctaaatcatcaatcactgaaagaacatcatgaaatcttcccagctctatagtcacatgaagtgactggacatctcagtaacttcttggcctgaattgccccattctctccaaaaccatctgccccattccc

SEQ ID NO: 176234 - DNA, 419 bp, Homo sapiens
ccttactgagaggaaggaaagatgggtgtaatattggaaggcatgaacctaggcaggtccctagagcatacttatcttctctacttattgtgagcctccttaactgtgagatctataactgtgcttctcatgtgcttggccagtggatggtgttattctttctagttttctatttacctttctggagtccgagatcaaaaaaggatacaaataaagcctgcattttgaaaatacctatttttaacttattaagtggaaactttgagaagagtcattattacagaataattagtaaaaaatcaccttcatttagattctgcttttggttatgtaggtcacgcagcctaaggcagtgggagggtctaggtgtcaccagtatggcagtcagacgcagtgactgtgctgcctgtgatttcctg

SEQ ID NO: 176235 - DNA, 594 bp, Homo sapiens
gaaaaccttgagtttcatttcctagttcatatatttttataacatcgtgggacggattttgggagaaccaagatggtatagcgggtgcacactttgatcctccctctcccttcaagaacatacaagtgagagtaaaatataaaaaagagaaattgaaaagacatagtcatgcttaaataagttacaacaatctcaatggaacagacacaaaactgtgagcaggactaaaactgcaggccttctagactccagatgcagaaggaggaagtggtggctgaacactaacagtaagagtttctcgggggtaagggaggctaacatgctgtgtgtgaggcagtgataggctccctgctggaagttaagggttgactgggctacactaggcttcaggagagaagaaaacaacactcctctcactcaaaataagcttgcaaaattcaaatgtttgaaaatgaaaatgtgtaatatgaaaaaaagacaaccagggcccatacggtggctcatgcctataatcccagcactttgggaagtcgaggaaggaggatcacttgcttgagcccgggagtttgagaccagcctgggcaacatggcaaa

SEQ ID NO: 176236 - DNA, 468 bp, Homo sapiens
atattattccactcccgtagccatgaggccaggcttgagtcagtgcaaaggcatctcatgtcagctgagggtagcaggggttgctgagggagggcatagtcaatagcacctgaccagtggtttttattaaccttccctgcatggatttgagttcctgcgtggagagcaggacaagcatctcagagcactcaggagagcttacaaggaaggtgggagtgaagaaagtgccagatgccagcaaggctgaagcttccagcgggagactctcagagggaccctttctggacctctggttggggtcgtgagccctgcagctttgacaggaagaaatctgcctgttctcgggacatctttccccagagcccagccaggagctggtttctagagctgagttagccttgcacaacatttttctctgtaagtggcctccatcaagatgagcagtagcttttcctcaacaaatttgat

SEQ ID NO: 176237 - DNA, 338 bp, Homo sapiens
gaaatcacacagggctgcatcaaattgcacctttcttctttgttaactgcaagattctggatgagctaacttggtattgaataacttgctaactttttttaagcctcagttttctcatctgcaaaatagaactagtaataatacatatgtcataatgatattatgaagattcagaatatgcttggcccatgggaggtgccctacaaatttcaggttctaatattttatatgcaattcctcaatgttatggcctgtatataagaaagaaatggaatgcataaatattgttgggagtattcatttgaattttgagctttacttaaaacacatttagcatt

SEQ ID NO: 176238 - DNA, 400 bp, Homo sapiens
aaggacttggggggcttgatatggcttggaatggggaatgggttggcttagcctcagacggagaggaagtgccactccctgagatgggctgcagtgctcacgggcctgggagaactggctagagcagcagatgagccaggaaagacggagagcagtgggggcctggctgcccaggccacacaccaggtcagtcttttcagaactcacgggcccggctgcctctcagcctctcaagggctgtctactgcaccccccactccaaactcttggcatgtgactctgcttgtcttcacttggcacactcactgaacagacccaatgcaagactcagtggacctgcatctctggcccctcctgggctcccctaaccccaggttcttgatctcagcaccctcccctg

SEQ ID NO: 176239 - DNA, 561 bp, Homo sapiens
ttagcttcatccacctgcaaacagtaaatgcgttgtgtagcattttagagtcctttaaccccatctctttcatccatacctaccatgacagtcctcggtccacccatatacagttctagttctgaggttgtcatgtattgctagcttaaaactactacattaatgagtacagagtttcagttgggaaggatgaaaaaattctaaagatggatggtggtggtggctgtactacaatataaatgtatttaatgccacagaaccacacacttaaaaatattcaaaatagtaaatgtcatgcacattttaccacactttcaaaaactgcaaacattctctgccataaatttatgctccccaacctcagcagcctctccttgcttcttcccagcttgtatgctcatgcttagtcaactctatgatagatactccactgcttgtactattcctctctgttctcttttttcactctctgctctggggaacagacccgggagggggtttacagctactccactatgcagaagattccagtaccaagttcccttttcagttcatgctctc

SEQ ID NO: 176240 - DNA, 401 bp, Homo sapiens
cttatttcttttatctagctataattttatgtcctttaagaaatctctccctattcctcattcattatatgcttcccagcctctggtatcctctgttctactttttacttttatgaaatcaccattttttaccttccacatatgactgagagcatacatggtttaaccttcagttcctagtttattttacttaacataatatcctccagttccatccacgttgctgagaattccaggattttattccttttcattgccaaatagtattccattgtttatatataccacattttctttatgcagccatctgttcttagacacttaggtcaattccataccctggctattgtgaatagtactgcaacaaacatggggtaacagatgtctctttgacatactgt

SEQ ID NO: 176241 - DNA, 470 bp, Homo sapiens
ctggagggcccaaaactgcgccccctgctgccttgtgtatttggtggctggcatagtcagttcattatgtggcaggcaaaagtttgcattccaagggcggaagacatacacattggttttgtttgagaattatatcataaaactgagttctaagtacttcttgaacattgagattattattgatgaactgattataaagtattcttaaatataaacccaaagcaaattttattaaaaataaatagaaatttgattaagaataagagataatttctaataactttttggtaggtgacagcagggagatttgtttgatcatggagtttttaaatgcttttaagtcttgaagtccattaaggcatagaagagagaataggagaaaaaaacatctctgaatggcacagaccgatcacatgttgattgaagcacagtcaatgtgtatactgaaattgtgagtcaagagctatatc

SEQ ID NO: 176242 - DNA, 123 bp, Homo sapiens
acaggtcccttcacccagcatttccagagctgacctcattgtaccttcatatcctcccagtgtttctcttttggtgaggaaaaacacacattgtccagccagtccctcaaggcagaaacctgg

SEQ ID NO: 176243 - DNA, 544 bp, Homo sapiens
tgctaaggaggaaagttcttcagtgagtcttataaagcggcaccaaaacgcggtatttatagtgacataatcagccctaatggagatggaattaccccataaaggccccaaggagccctcagggcctcagcgccactgcagcagacaaggctcctgtacagaaacaacgtgaggctcagagagaagaaatgactaaaattacacagctggtacatggcagaggtggaactaaaaagttaagtgtgtctaccccagagccgagtagacctgctcttttttgaacacttcctggactttcatgcctttgtcccagctgtgccctctccctggatgccccttccatctgggcagctcctactagacctgccttggcatacataacacaggagaacggattgccaaagggtaggagagtgcctggtctatagtgtgcgcccaacacagatttggtgaatgaatgaacactgggtccagcagacctggattcttccatgtaacccactgtgtggccttggtggagccatgcgggtgcaataatcctggt

SEQ ID NO: 176244 - DNA, 270 bp, Homo sapiens
ccaaaagaggacaagaaagaaagaatacaggaataaaaacagatgggacaaagagaaagcaaaaagcaagatgacaagttggtagcctgctacatcagtaattacaatgattatgaatggactaaattctccaatttaaaaaaatattgtcagattgtattttggaaaaaaaacaactagagtttgttaaaagagacatattttaaatataaggacacagaagggttgacataaatgggtgggagctgggcatagtgatgcacacctgtg

SEQ ID NO: 176245 - DNA, 323 bp, Homo sapiens
tcagacaggaggggcgggaaaagagggctctggaacagtgcttcgtcccatacctgaagcactactgccatcgcgaggatgttgtttaacaaatccctacgccattacggtgttctcctgaggactacttgttggggaagttctctgtggggaggtggaaaaggcttgctccatgctgggagtcctagccttctcgtctaaggccttaaaggacaccaggactttggcggtgtcttggtatagaacctggagtgtgaaggttctaataccaaatcctgtaaacttccctggaataaacctgttgtttgtgcgcggtactggtg

SEQ ID NO: 176246 - DNA, 451 bp, Homo sapiens
ttctataaaacaaaagattcagaaggatctaatggattaggttttagtatattattgcaaatcataatgaattcttagatacatattttttaaccataataggaagaatagctatttatacaactcatatttacaagatgatttcatatttttagttcattttctgctgtgtagaaatgtaatggttataatatggtgccctttcatgctcatcaagcactcttttatctcactaatgaagggcaaaagtgatggacatatgttgttactagaataaaaggccaccttacactcaagaaaattaatgtattactgtgataactttgttctctattaaaaatgaatcattcttgaatcagaatttctttactttggaagttagtatttcacccttatatcaatttaactttgtagaaatatgactagaaattaaatggcataaaaactgaga

SEQ ID NO: 176247 - DNA, 530 bp, Homo sapiens
attgattgattatatgtgatacctggctaatgagtaattttgttagatgcatgaagtttaaattgcccagaactattttaatatccctgcgcttatattcatccaaaatgtttactgatgacagcatgcttaggtaagctgccacatacccactttcatctaggtgaaatttgttagtattgctttataaaaataatacaagctcaaggccactgaacacagaggaacccatttgcttttatctagctgtatctcctgtattttactgtacatcaacaatacagtccccgattccagaatgacttcatttccttattataatcccagataggcagttaaatggaaagaagaggtaatgagcaatttctatacacaaatgggccttgatttcttttaactttctaactaaactaatttcttttgcagcacgttacatttacacttccatccaggtttagaattatatgtttccttttgacttgctgttcttgcatacaaaagaagagtccagggaaagagtttcagaaaaa

SEQ ID NO: 176248 - DNA, 312 bp, Homo sapiens
aggagatagcaggaagagaagttggttgtcaggatggtgaggaggaaggatctcaagagcaggacgaattgcatcacagagacaccaaggaggaagaacccttcgagagctccagtgaagaagagtttggtggtgaggaccatcagagcctaaattccattgttgatgttgaagatttgggcaaaattatggatcacgtgaagaaagaaaagagagacaaggaacagcaggaagagaagtctggttggttcaggaacatggggaggaatgaagatggtgaaagaagagctatgataactcctgcttattcct

SEQ ID NO: 176249 - DNA, 181 bp, Homo sapiens
ctccatggaaacctggaggtgggcagccacactgatgcccccaaaactaggagggagctggctgagaagctgagggtggtggagtggaaagtctgtctttgatgaggtgggtggatggatgaattaagctttggtagctgtctgccttcagtaccttttcttacgctaaacgtggtaacag

SEQ ID NO: 176250 - DNA, 466 bp, Homo sapiens
gaccatgatgtcatactttggcaaatggtgttccctttgttgaaacaagcacctccccttgccctctgctcatttttcaacatcagtttgagtcaccacctcttggaaaccatctctgagtcccttcactttccatcctggaagactcagttgagttcccacttaatttctcaaagacctttaccacactgattttcctattgatttgctggtttgtatattccactatactgttgtgtagcaaggaatctgccttgcccagagaggtctggctggtgccctgttcctaggaggtaacctctaaacccacagaattccccaagtgatagaggagagtctttattattcatggcaggatcctgggagagctctcctggcctgtgatgtaaatcagacctacaggagggcagtgctggagattaagtttaactatccgggcaatgatttaaccaatcatgcctcagca

SEQ ID NO: 176251 - DNA, 349 bp, Homo sapiens
acacacacacacacacacacacacacagagcaaaaaggggctgagctatttcctcattctgttcttcatcacaagcttcttttcttccccattctaaagttcttcatctcgaacttatccaatatatcactccttcccaagggagacgaaaccagggtgttgttctactaacagaaatccctcaatagaaaaagaaaccacaagactggggaagaataggtactatccatatgggtgttataattatgtaccccataacaattttctgaatgcttacttgtagataaattttgtcttaggcatgaaggagaacagcaaaagaagaggaaatagctaatatttgttgaac

SEQ ID NO: 176252 - DNA, 256 bp, Homo sapiens
cttggagaaagtaaaggtggaaatgtttaacctagacactggctgcaagtgctttcttcctcagctgaaccttatccccttgcttgagctgacctgggggtcctccttcttgaggagccactccccaccctgctccagtccaaacctctcctatacccgcaaaagatactcaacacattagagttgcccagttatcaactaaaatatttcccaagtcctcatttatgctttccagtggtcacctagactctccttg

SEQ ID NO: 176253 - DNA, 489 bp, Homo sapiens
aaaatgtaaacattttacaaaagtagacacacaaatggccaataagaataggaacagatgaaggctgggcgcggtggctcacaccgttaatcccagcactttgggaggcaaaggtgggcagatcacctgaggttgggagttcgagaccagcctgaccaacatggagaaaccccgtctctactaaaaatataaaattagccaggcgtggcgcacatgcctgtaatcccagctactccggagggtgagcagaagaatagcttgaatctgggaggcggaggttgcagtgagccgagattgcaccattgcactccagcctgggcaacaagagtgaaactctgtctcaaaaaaaataaaataaaaaagaatatgaacagatgcaaaaaaaaaaagatcaaaaaaagaaagaatacgaacagatgctcaacattattattcatatatgatgaattaaaaaccacaaattaggccaggtgtggtggctcaagcatg

SEQ ID NO: 176254 - DNA, 287 bp, Homo sapiens
ccgactagtatccatgaggacacggatttggtccctggccctgctcagtgggttaaggatctgatgttgctgtgagctgcagtgtggatcgcagacgtggctcggatcccacattgctgtggctgtggtgtaggccatcagctacagagagagggtccaggcgcctgtccctctctaggcagcactacttcagagccatctgagacgaatggtggttttaaagatgattgagaaggagcttcttggagcttcttagaggactgttgtgtgtttaattaccttttccc

SEQ ID NO: 176255 - DNA, 733 bp, Homo sapiens
ctctacaggtcaccctgccccatctccatctcctatgagatgagtgactcccaagaccccaccacttcccctgtagttaccacccaggtagagctggggggctgcagccggcaaggtgggggcaatgggttcctccgttttcgccagcaccaggaggtccaggccttcctcagccttctggaggacagttttgtccaggaattcctctccaaagacccctgcttccagatttcagataagtatctcctggccatggtgctggtctacttccagcgcgcccacctgaagctcagcgagtatacccacagcagcctgttcttggccctgtaccttgcaaacgacatggaggaggacctggagggccccaaatgtgagatttttccatgggccctgggaaaagattggtgtttacgagtggggaaattcctgcaccagagggataagctttgggcacggatgggtttccgggctgttgtgagccgccagtgctgtgaggaggtcatggcaaaggagccattccactgggcttggactcgggaccggcgcccccaccatggtggggttcagagggtctgtccacaggtccctgttcgccttccccggggccctggcctctcgccgcccactgttccccctgtggtttgccccagcactgcagcagccacttgcttaagcctgtgtcatccaagtgcccttctctgacctctgaatgtcatcgccctccctcccaaaa

SEQ ID NO: 176256 - DNA, 494 bp, Homo sapiens
acaagcaagcctggatagcaaattatctctgaagtcctgcccaaacttgttttctgtactgccatgcactgctcacatctgctgcaaccccttctatgcccatcttctcccgtccgacaagcctagttccaaccctacctctactccagctctgcctgcctctcccagccccccagctaactcctgcacccatagtcaacactggtttatgtctttccatttatctttttatatagatacaaatagatctcttttaaagataaatgccatcatagggtacatagtgttgtattcttcatttttctcatatgtcttgtctttccacatcacttcaggttaagatcatttttttccatacatgatctgtactattctgcagtacatatttccttaattcatttatctcctttatttttctctagggtcatttgtcaacattttatcattctgaccctcctagcaacccttttgacagaggtattattattctagca

SEQ ID NO: 176257 - DNA, 349 bp, Homo sapiens
ccaccttggcctcctaaagtgctgggattacaggcgtgagccaccgcgcccggctggtttttaagacatgaaatttcagaatgtttgttttcaagaaagaaagcccaattgcctcaatgctttatttgaggacagagcctgaggcacaggagaatagcacggtgggacattactggcaccattgccaacacagctcacacgcagcaacagcacgttttgttggttttgccagcgttgatgctcagatccctctgtggccaccaatagccagcacctgtgtcaaaggtggctgcctcaattaagacacaaaccaaaaattctaattatatagtagtttctgtagtatcag

SEQ ID NO: 176258 - DNA, 653 bp, Homo sapiens
taaagaaagaaagaagaaaagaaaagaaaaaagaaaagaaaagggagggctctgcgggtggcggcggcgcggggagccggttgcaggccgagatgctgcagatggacctgatcgacgcgacgggggacactcccggggccgaggacgacgaggaggacgacgacgaggagcgcgcggcccggcggccgggagcggggccgcccaaggccgagtccggccaggagccggcgtcccgcggccagggccagagccaaggccagagccagggcccgggcagcggggacacgtaccggcccaagcggcccaccacgctcaacctctttccgcaggtgcagttgtctcaggacacactgaataataattctctgggcaaaaagtacagttggcaggatcgggtgtctcgatcatcctcacccctgaagacaggggagcagacaccaccgcatgaacccatttgcctgagcgatgagctgcccccccagagcagccccgcccccaccacagatcgaggcacctccaccaacagcccacgctgctggtagatgagcacgcgcagctggagctggtgagcctgcggccgtgcttcggagactacagtgacgagagtgactcggccatcgtctacgacaactgtgtctccgtctcctcgccct

SEQ ID NO: 176259 - DNA, 244 bp, Homo sapiens
gtttcctttctctgtcttgctcctacttctgccaaatgagacatctccttgccccttgacgttctggtatgattgggaggcttcctgagtcctgtcagatgcagaagccactatgcttccttacagcctgcagaatcattaacctattaaacctcttttctttatgatcatggagaaaattattactgcaaagtggatctattaaatgtcttcaaggccttctctctaatgtcttggcaatcag

SEQ ID NO: 176260 - DNA, 226 bp, Homo sapiens
aggaggtttgcctggccaggagataagcaaataagtaggactggggatgtagaagggctgagagcagccatgccccagggaaatgagtaatcatggtttgtctgtgaggttattgtctagaattgccagagtctacaagaccagctgtccccgagggttggagataaagtgctaggtggtgtggaagttgtaagaatcaaaatggagttactaatgttttttcttt

SEQ ID NO: 176261 - DNA, 593 bp, Homo sapiens
atctgccacatgttgccaaggaggtcctcatagagttaaggttaaagactttcatggctctccattacctaaaagatgacatttaagtttcatggcctgaaggaacagaattgcaaaaaaagatctgcttttatctcttttttccttcactttgagctttgaggaaccgtcctcagataataggtctaaatcctattgccaataggcatttgtctctgccagctctgtaaccaaaattaactatacattaagaaaaacagcctgtaatcccagcactttgggaagccaaggtgggcagatcacttgaggtcagaagttcaagaccagcctggccaacatggtgaaaccccatctgtactaaaaatacaaaaattagctaggcatggtggtgggtgcctgtaatcccagctactttggaggctgaggcagaagaatcacttgaacctggcaggcagaggtttaaatgagccgagattgcacccctgcactacagcctggacaacagagtgagactcagtctcaaaaaacaaataaacaacaacaaaaacagataatccacagcaccatcatagaccatgtttcttctaaagtag

SEQ ID NO: 176262 - DNA, 578 bp, Homo sapiens
caatagtgatcaatatgagaaagtaagtatttcaggtaaagacaggaaggaaaaaattccctctttcctctcttcctctagagataaaatgtccatctgcatcacctcctcgaaacctcccaaacttccatgcgtacagagcagccttcctggtggcaaagtggtgcagtggttaacaacctgggcttgggcgtcagacagcggagctcttggttaagttccagagctccatgcttactacctgatgtgatcttggatagcttctttaatctatgaccctttgtctctaaactggggataatacctatcctctctggataattggtaaggtgtaaatgggataatgaatgcattaaaacctggcacgtcacatagctgccactgtcatagagattgaagaatgaacagaacatggcttctctccatggggaagacacaggtttttaggcaatccaagcaggtctagtcctgacctgagttggacccactccctgggcacagcatccccaccagctagaaaccaggaaaacagcagaggtggtacaaagttctttggaaaggagtcagagttccaagtc

SEQ ID NO: 176263 - DNA, 334 bp, Homo sapiens
catatggctcaaatatattattacacactgaaaccactaggtaactaatacctatatcagtaatcagaatatcactgtcacaacataaatcccttcgtccttccccagttcactacctcctctaccagagaaactacctttgttacctctaacagcatagactaatgttgcctgtgtatcaaataaaatagagcctacttttttctgtctggcttattttgttcaacatgtttatgagactatatccctttcttttgaagtagtaaaaaactttttacttggaaataattacagattcacaggaagctgtcttttgaaattttaaatcactaaa

SEQ ID NO: 176264 - DNA, 467 bp, Homo sapiens
caggttggtaaaatggactccaaagtacctgctattgaggagaagttctcctaggtgacaagcatttgctgaagccatgggatacttagaagctgtcgtcaccctcctcctgaccccggtcctaatgaagtccctggaattaatatctttccatttcctggccagcttgccaatgttcctgtcctcccacctgccatgaagactggatgtggcaggaggtccctacctgacctcatcaatttgtactttctgccagcactgcccaccccccggaccctgaggagacagcctactctagcctgaataggggcaacagtacctccaatttgactcacatcatgactcacctgggcattagtgagggcctgagcctggacttgggcccaggtcatgatgccccaggactttgttcacctctcagccacccatccctgcagtcctccctaagcaatcccgatctccagact

SEQ ID NO: 176265 - DNA, 327 bp, Homo sapiens
cacaatgttggtcaggctggtcttgaactcctgacctcaaatgatctgcctgctgagattacaggcgtgagccaccatgcctggtagagaaggatagcttttggtcacaggattgttgtaagaattaaatttgttaatacaaataaaagaaatcagaatagtatctggcacacaatcaacactatataaactataaaatgaaaacaaaacatagcgtattactgaagctaacacacacaacattttcacagaggtagaagctaaaacattaaaggagattttgttcacctataactgttctcactaagaatgttaagttttagaaga

SEQ ID NO: 176266 - DNA, 999 bp, Homo sapiens
aaatctacggctaggtacgaggctgggtttgggctttcccagggttctcggggccggggcagtcgtagggggcggctggggctccacaggacgttcgtgacccaccttgcgccccccagggagtggcaggaccctcccgtccccagcctccgcgccaggcctcgtccctgcatgggacaagaggcagccctccgccatttcccgcggcccttgcctcccgggagcggctcccctctgacgactgagtggactgcgcttgagggggccgccgctgggaaccagcccctccagaaagagccgtctctgcacccgctcccacccgtgggaagcaccagatggggctgtctcccgagacaaagcctaaaaccaaatgtaccggaatttttggaaactgaaacacaacttgtcctagataggaatgtcaggaagccagcgagagaatgaagagtctgccgtccggggacacaatttctgtccactgtccctgcccacgtcccctcacagccctgcaaggtgggtggggacggctgatgatgccattttcagatgaggaaactgaggcacagagaggctccacagccaggactgggcgctcatccagttgactccagggcagatcctctcttcccagggcagccacccccgccttgtgagagccggtgcccgggggaggggaaggatggagacctgggcagttcacccaggcccaggagccagagccctggcaggttgtacgcagctgctcccaagaggcaccccttccagccctgcaccaggcctgcctccacagaggcgcaaaggaagcaaaggcactgctggcgaagaaccttgggattccagccgcgcacagacacccagagaggaaacccgagcaccggaactggacggggtggcgggcaggggcagggcgagggcattgagtcagcgagaccctgggggcctcaaggaagacggcaaatcgtgaagagccctgtgctgcaagagggggcctgggctacc

SEQ ID NO: 176267 - DNA, 1390 bp, Homo sapiens
gatgggacgggttgagagattggtcgtccaggcgttgagtgtgccctcgctcctccccaccttccgccgtggccttgagccccttgcgcccgcgcccatggggttaaatctctccctgtctctctctgctccaagttgttttccaagtgaggcagagaatggttctcttgttaccaacatggcttctgggcattgggtaatgcgctccctcttctcccgcagcgccacaaagggaccttttgttcccctccctgcccctctcgctggctcttcccggccccccacccacccaaactccctcctccccccgccggcgcccgcaccccggggctgcgcgctgaccgtggcggccgcggcgccctccctctcccagcgcctgcactggcggccgccatcttgcgagcggccctcagggcggcctgggctttcccagggttctcggggccggggcagtcgtagggggcggctggggctccacaggacgttcgtgacccaccttgcgccccccagggagtggcaggaccctcccgtccccagcctccgcgccaggcctcgtccctgcatgggacaagaggcagccctccgccatttcccgcggcccttgcctcccgggagcggctcccctctgacgactgagtggactgcgcttgagggggccgccgctgggaaccagcccctccagaaagagccgtctctgcacccgctcccacccgtgggaagcaccagatggggctgtctcccgagacaaagcctaaaaccaaatgtaccggaatttttggaaactgaaacacaacttgtcctagataggaatgtcaggaagccagcgagagaatgaagagtctgccgtccggggacacaatttctgtccactgtccctgcccacgtcccctcacagccctgcaaggtgggtggggacggctgatgatgccattttcagatgaggaaactgaggcacagagaggctccacagccaggactgggcgctcatccagttgactccagggcagatcctctcttcccagggcagccacccccgccttgtgagagccggtgcccgggggaggggaaggatggagacctgggcagttcacccaggcccaggagccagagccctggcaggttgtacgcagctgctcccaagaggcaccccttccagccctgcaccaggcctgcctccacagaggcgcaaaggaagcaaaggcactgctggcgaagaaccttgggattccagccgcgcacagacacccagagaggaaacccgagcaccggaactggacggggtggcgggcaggggcagggcgagggcattgagtcagcgagaccctgggggcctcaaggaagacggcaaatcgtgaagagccctgtgctgcaagagggggcctgggctacc

SEQ ID NO: 176268 - DNA, 600 bp, Homo sapiens
aggctgaggtgggggaattacttgagctcagcagtttgagttcagcctgggccagatggtgagaccctgtatcttaagaaaagaaaaaataagaccaggtgcagtatctcatgcctgtaatcccagcactttgggaggccaagttgagatgactgctcgagtgtaggacttcaagaccagactgggcaataaagtgagacccatttctaccaaaaaaaaaatcaagaaattagctggacatggtggcacatgcctgtggcctcagttacatggcatggcaggctgaggcaggaagatcacttgagcccaggaggtggaggctgcagtgacccatattcatgccactgcactccagcctgggcaacagagtgagaccctctctcaaaaacagataaagtggacagaaaataggtcagtaaggactaatcatttaagggacaagcccccagaagagtggctactagagtgggaggaggaaaagcagaaggagaaagagttgaagataggcgaggctgtggtcccagtgctgaattctgccaagcagtgacttgattcatgaacactcactggatgctgactctgtttctcttctgagtgctg

SEQ ID NO: 176269 - DNA, 193 bp, Homo sapiens
ggaagatgaccaataaaaactgaagaagaacctagaagtcacagagtcaagtgaggcttttataaattcttcaggtctagtttctgctaatatggttcgttttatttctttacaagaatgtccagtcttttggcttccctgggccacactggaagaagaattatcttgggccacacataaaatacactaacac

SEQ ID NO: 176270 - DNA, 2062 bp, Homo sapiens
accgcctcgcctctttccgccagcgcccgcaggacccggatgagagcgcacgcttcggggtctccgggaagtcgcggcgccttcggatgtggcggatgcggccgtgagccggcgggggaggtgctgctgctgcctccactgtactcagacccaggtagcacaggattgtccatcctccagcagctcagtgcaacggtgtgaactcagcctgtttcagagcctccacaccatgacctccaagaagctggtgaactcggtggctggctgtgctgatgacgctcttgctggcctggtggcctgcaaccccaacctgcagctcctgcagggccaccgcgtggccctccgttctgacctggacagcctcaagggccgggtggcactgctgtcgggtgggggctctggccatgagcctgcccatgctggtttcatagggaaggggatgctgactggggtcatcgcgggagctgtgttcacctccccggcagtgggcagcatcctggcagccatcagggccgtggcccaggccggcacagtggggacgctccttatcgtgaagaactacactggggatcggctcaacttcggcctggcccgggagcaggcccgggctgaaggcatcccggtggagatggtggtgattggggacgacagcgccttcactgtcctgaagaaggcaggccggcgggggctgtgcggcaccgtgcttatacacaaggtggcaggtgctctggctgaggctggtgtggggctggaggagatcgcaaagcaggtgaacgtggtcaccaaggccatgggtaccctgggggtgagcttatcctcctgcagcgtccctggttccaaacccaccttcgagctctcagccgacgaggtggagctgggcctggggatccacggggaagctggtgtgcgccggataaagatggcaaccgccgatgagattgtgaaactcatgctcgaccacatgacaaacaccaccaacgcgtcccatgtgcctgtgcagcccggctcctcagttgtgatgatggtcaacaacctgggtggcctgtcattcctggaactgggcatcatagccgacgctaccgtccgctccctggagggccgcggggtgaagattgcccgtgccctggtgggcaccttcatgtcagcactggagatgcctggcatttctctcaccctcctgctggtggatgagcctctcctgaaactgatagatgctgaaaccactgcagcagcctggcctaacgtggctgcagtctccattactgggcggaagcggagccgggtagcccctgccgagccccaggaggcccctgattccactgctgcaggaggctcagcctcgaagcggatgggccggtgctggaacgggtgtgcagcactctcctgggcctggaggaacacctgaatgccctggaccgggctgctggtgacggcgactgtggcaccacccacagccgtgcggccagagcaatccaggagtggctgaaggagggcccaccccctgccagccctgcccagctgctctccaagttgtctgttctgctcctggagaagatgggaggctcatctggggcgctctatggcctgttcctgactgcggctgcacagcccctgaaggccaagaccagcctcccagcctggtctgctgccatggatgccggcctggaagccatgcagaagtatggcaaggctgctccaggggacaggactatgctgggttctctgtgggcagcggggcaggagctccaagcctggaagagcccaggagctgatctgttacaagtcctgaccaaagcagtcaagagtgccgaagctgcagccgaggccaccaagaatatggaagctggagccggaagagccagttatatcagctcagcacggctggagcagccagaccccggggcggtggcagctgctgccatcctccgggccatcttggaggtcttgcagagctagggtgtgtgactgcctcccttggcctcagctcctctcactgctgtgctgaggtggcctttgtcacttccttctgccttccaaccctcaccttcccccggcctggccc

SEQ ID NO: 176271 - DNA, 1161 bp, Homo sapiens
accgcctcgcctctttccgccagcgcccgcaggacccggatgagagcgcacgcttcggggtctccgggaagtcgcggcgccttcggatgtggcggatgcggccgtgagccggcgggggaggtgctgctgctgcctccactgtactcagacccaggtagcacaggattgtccatcctccagcagctcagtgcaacggtgtgaactcagcctgtttcagagcctccacaccatgacctccaagaagctggtgaactcggtggctggctgtgctgatgacgctcttgctggcctggtggcctgcaaccccaacctgcagctcctgcagggccaccgcgtggccctccgttctgacctggacagcctcaagggccgggtggcactgctgtcgggtgggggctctggccatgagcctgcccatgctggtttcatagggaaggggatgctgactggggtcatcgcgggagctgtgttcacctccccggcagtgggcagcatcctggcagccatcagggccgtggcccaggccggcacagtggggacgctccttatcgtgaagaactacactggggatcggctcaacttcggcctggcccgggagcaggcccgggctgaaggcatcccggtggagatggtggtgattggggacgacagcgccttcactgtcctgaagaaggcaggccggcgggggctgtgcggcaccgtgcttatacacaaggtggcaggtgctctggctgaggctggtgtggggctggaggagatcgcaaagcaggtgaacgtggtcaccaaggccatggatccacggggaagctggtgtgcgccggataaagatggcaaccgccgatgagattgtgaaactcatgctcgaccacatgacaaacaccaccaacgcgtcccatgtgcctgtgcagcccggctcctcagttgtgatgatggtcaacaacctgggtggcctgtcattcctggaactgggcatcatagccgacgctaccgtccgctccctggagggccgcggggtgaagattgcccgtgccctggtgggcaccttcatgtcagcactggagatgcctggcatttctctcaccctcctgctggtggatgagcctctcctgaaactgatggagtcacaaacccgaagcggatcgtctagagtaccttaatcaa

SEQ ID NO: 176272 - DNA, 1253 bp, Homo sapiens
accgcctcgcctctttccgccagcgcccgcaggacccggatgagagcgcacgcttcggggtctccgggaagtcgcggcgccttcggatgtggcggatgcggccgtgagccggcgggggaggtgctgctgctgcctccactgtactcagacccaggtagcacaggattgtccatcctccagcagctcagtgcaacggtgtgaactcagcctgtttcagagcctccacaccatgacctccaagaagctggtgaactcggtggctggctgtgctgatgacgctcttgctggcctggtggcctgcaaccccaacctgcagctcctgcagggccaccgcgtggccctccgttctgacctggacagcctcaagggccgggtggcactgctgtcgggtgggggctctggccatgagcctgcccatgctggtttcatagggaaggggatgctgactggggtcatcgcgggagctgtgttcacctccccggcagtgggcagcatcctggcagccatcagggccgtggcccaggccggcacagtggggacgctccttatcgtgaagaactacactggggatcggctcaacttcggcctggcccgggagcaggcccgggctgaaggcatcccggtggagatggtggtgattggggacgacagcgccttcactgtcctgaagaaggcaggccggcgggggctgtgcggcaccgtgcttatacacaaggtggcaggtgctctggctgaggctggtgtggggctggaggagatcgcaaagcaggtgaacgtggtcaccaaggccatgggtaccctgggggtgagcttatcctcctgcagcgtccctggttccaaacccaccttcgagctctcagccgacgaggtggagctgggcctggggatccacggggaagctggtgtgcgccggataaagatggcaaccgccgatgagattgtgaaactcatgctcgaccacatgacaaacaccaccaacgcgtcccatgtgcctgtgcagcccggctcctcagttgtgatgatggtcaacaacctgggtggcctgtcattcctggaactgggcatcatagccgacgctaccgtccgctccctggagggccgcggggtgaagattgcccgtgccctggtgggcaccttcatgtcagcactggagatgcctggcatttctctcaccctcctgctggtggatgagcctctcctgaaactgatggagtcacaaacccgaagcggatcgtctagagtaccttaatcaa

SEQ ID NO: 176273 - DNA, 1219 bp, Homo sapiens
accgcctcgcctctttccgccagcgcccgcaggacccggatgagagcgcacgcttcggggtctccgggaagtcgcggcgccttcggatgtggcggatgcggccgtgagccggcgggggaggtgctgctgctgcctccactgtactcagacccaggtagcacaggattgtccatcctccagcagctcagtgcaacggtgtgaactcagcctgtttcagagcctccacaccatgacctccaagaagctggtgaactcggtggctggctgtgctgatgacgctcttgctggcctggtggcctgcaaccccaacctgcagctcctgcagggccaccgcgtggccctccgttctgacctggacagcctcaagggccgggtggcactgctgtcgggtgggggctctggccatgagcctgcccatgctggtttcatagggaaggggatgctgactggggtcatcgcgggagctgtgttcacctccccggcagtgggcagcatcctggcagccatcagggccgtggcccaggccggcacagtggggacgctccttatcgtgaagaactacactggggatcggctcaacttcggcctggcccgggagcaggcccgggctgaaggcatcccggtggagatggtggtgattggggacgacagcgccttcactgtcctgaagaaggcaggccggcgggggctgtgcggcaccgtgcttatacacaaggtgggcttccaccggggacgtggagactggccagccctttccagccttcccttgcctggcagcacccagtaactggacctttccagcccttccccaagaagctagttctttttctccagtgttccctgatctcagaaggccccgccatcccctcagctacctaagcccagatacaggcattttcccagactcgtccccttttcttctccacacccaatcagttgcccggtcctggtgcttctcctcccaaatgtacaacacacatccttctcagaccccgccctcctgctttgccttggttcaggggtcatctactcatgcctgatggctgcagccacctcctcactgggctcccctgcctgcttcctgccttctggccttgctcatccattctccacactactgccagaggtgtctttttaaaatgtgtatctgactaggttattcatccactgaaagccttcttgggtgcctacaatcaatacaagccctcaccatagctcc

SEQ ID NO: 176274 - DNA, 835 bp, Homo sapiens
acaggcacttccccaaccacctccagcactgggacaccatccccttcggcttcttctcatcttttatctccatcctgttctcctccaacttttcatctggcccccaacactttcaatgtgggctgccgagaaagccagctgtgtaatctaaacctctctgattatccaccatgtgcccgaagcaacatggctgccttgcagagctacccagggctgagtgacagtggctacaacaggcttcagagtggcaccacttcagccactcagccctctgaaaccttcatgcctcagaggactccatccctgatctcaggaataccaactcctccctcgttgcctggcaacagcaagatggaagcctacggtggccagctggggtcctttcccacttcccagtttcagtatgtcatgcaggcaggcaatgctgcctccagctcctcatcaccacacatgttcgggggcagccacatgcagcagagctcctacaatgccttctcccttcacaacccttacaacctgtatggatacaatttccccacttcccctaggctagctgcaagcccggaaaaactgagcgcctctcaaagcactttactctgttcttctccttccaacggggcctttggagagaggcagtacctgccgtcagggatggagcacagcatgcacatgattagcccttcacccaataaccaacaggcaaccaacacttgtgatggccggcagtatggggcagttccaggctcctcctcccagatgtccgtgcacatggtttaaaggccagtccaaacaccacggagcatttggcaatcaaggccccagagtctccgtggtc

SEQ ID NO: 176275 - DNA, 101 bp, Homo sapiens
tctcttcacggaattaataacatatagtgttctagagttttcgtgacttctgctatccatgttggtgaggagaaactttatccttggagaagggttggtaa

SEQ ID NO: 176276 - DNA, 312 bp, Homo sapiens
ctggtctggaactcctgacctcaagtgatccacctgcctcaccctcccaaagtgtgagtctgtgtttcatgtgcttcaaatgtaaggattcttggtaaactcattattatttgttcacaacattatatttttgtcaattctgagtacaattctttttatgacttactgcaaaaggaattttaaaaataaaatatccattagaagaaccaaaggatcatcatatagcctaaactaatgttttttgggtttctgcattaaaaatatatctaattacaaaagtatgacatgcccttgtggaaaacttgacaaaag

SEQ ID NO: 176277 - DNA, 527 bp, Homo sapiens
agaagtcttatgttgccttactttgttttgtttattttgaaattaattaattcacaggaagttgctgaaatgagtacaggagaacccatgtacctttcacccatatccccagtggtaacctctcacataactatatacaatatcaaaaccagagcattgacattggtataatccacagggcttgttcagatttcaccagttttacagtttgtgtggatatgcatatagctctatgcaattgcatcacacttatctgttctccaagtctatacattttattacttcaagaatgttaaataaatagaatcatatagtgtgtaaacttttgagatgggctttcttccactcagcatcattcccatgagatccacacaagtggttgtgagtgtcactagttcattgctctggagaaacaagtaggtcatggttccaggtgctctgtctcacttcatccactttttttcttccccccccgagatggagtctcgctctgtcacccaggctggcatgcggtggcacgatctcgg

SEQ ID NO: 176278 - DNA, 231 bp, Homo sapiens
gtgctaagtgaaggaagacatctggccaccaggtgacgcgggttgctctcataggagtctagacttaaagcacatggacaaagatggaaagatgactctaaccaaggacgacttcaaaaggagcacagcttggtcttgactgagcaatggaatggcaaagcccagagctgagatttatggaaagttctgggtacaatgcaaaggacaagaacaggactggggagcggggaa

SEQ ID NO: 176279 - DNA, 217 bp, Homo sapiens
attattttgccttataagttaagatcttgaagagggcccatcattgcgttgacaacccccctaaatttaatacttttagactttttcccaaatgacatcataatagatttctagatctgtatcagtgacattatgttgatattcttccttcaactcattatcattatgtatcaaagaagtctagttttgttttcaaaactaaaatttttcatcagat

SEQ ID NO: 176280 - DNA, 320 bp, Homo sapiens
ctagaggaaacttgatgggaaacactgatctattcaacactttttaaaagtacactttagtactatttctacctagtcaataaaataaagaaggaaggagaaaggaggacgaataagagagaatccgaaagacacactacccagacagactactcagacagacgagacagtcaggcagacatggtgctacccgtcaagcatgcaggaaagcagctttcatggaataacattcctaaactcttgcctaataaattatgctgagagctgctgctaagaattttttaaaccaactcaaagcaaaaaaggagctattcacccaa

SEQ ID NO: 176281 - DNA, 273 bp, Homo sapiens
ctggatgagagggaaagacagaagccatgatgagatggccgtggaagccacatccccaggcctcttcctccctcttccctctctccttatctctgcatctcagtctctgtctttttctctccaaggctcccaatctcccatttatccattcacagtacagtcaggaagctgaaggatttaggccgaaatgcaaggtggaatagaggtttgccccctacttaggactcagagctgcttgtggggaccatggcttcacactctcctcctgggcct

SEQ ID NO: 176282 - DNA, 322 bp, Homo sapiens
cgatgcaagccccccgagttcaaagaaaggaaatggaagtacagggcagacaggtgacgtggcaaccgtccctaggaaaggcactgctggacccagctgtccctgtccctcaccagcctcacatgcccaagtcccatgtacccctggggctgccatgctggctgctgagccatgggcgctggtttggagatgaacttcttcgaggaaagcagcttcttatcccccagaagttctgcagatcatctgtgcactttggtttttacttaaaatgtgatttaaacagcctgctctacttaatactgcctgtgccacagacagaaaa

SEQ ID NO: 176283 - DNA, 809 bp, Homo sapiens
cctgggcaacagagtgagagactgtctccaaaataaataaataaaataataagacagtgtgtattatgtacgtgtatacctctctatgtatctaaatctgtatattgtattaccaatttttaaaatatatgtttcatttaaaatacacttactatgtgcagaacattgtgctaagcactttaaatataataccatgtctcagggaatcctgacagccatcttataagataggaattgttattaccactttagaaatgtgaacatgcaggcgtgagaaattccaggtcacagagcaaaaagttgtacctgttattggaacccatgtctctaatttgaaagccatcggctaacctctggatatactgccaatattgaaaagcttgtcctttctctttgagaaccatgggaaatactgtattctcaggtgagaagtattaacatttgaaactggggacatttgcatttatcttccaaggtgatctgtgtgtttgtaacccctttatgaagtccctgggagcaaccacaggagtaacagcttttagatttgtgccttggtagacaaaattatcacaaacgtgtccatcttgtgactgccctctcattttgcttctcttttgtttataaacttgtttttcatttaatgagtatcttccaaagaattaatacctactttgatataatgcagaaagttatttggcaaacatttagatgatactgggatttattgctttaaaaaaaaagggtactcttttcatctgttagctaccaatcaaatacctttgcaaaaagttgaattttaataatgctac

SEQ ID NO: 176284 - DNA, 875 bp, Homo sapiens
gatctttgtaatgttgtgcaagtaatctaatcaccccacagaagagctgtgacttaaattatcccagagtcggcccacctgttttcataaagatcaatgtaacttgtaaatttcttcagttctcctcacctatcatcatttgactaacaaaacccagaaaactaggctagttatggtggcctatgcatataatcccaactctttgagaggccagggtgggtggattgcttgagtccaggaattcgagaccagcctgggcaacaaagggagaccctgcctatatcccagctatgcaggaggcgaggccagaggattgcttgagcctcggaggttgaggctgtagtgagccatgattgccccactacactccagcctggatgacagagtgagaccctgccttaaactaatacctactagtacataatatttcataaagatacaggaaacttagaattataatggacattttcacaagtgacaatactgtctagaattgggctgggccaacacgtaaagctctggtcagtggaagtcattactactactatgtctttcattatatttacataactactttttttgacaacaaaaacaaaagtcctggacaacaacactggaacccagtaacacgtcgtactactatcacgtaagttgccccggaatagagccagcatttccacgggtatgacaagggcaaaggctaggcatatccaagggccaggtatatcagcgataaccggcccttgcccatggaaacttaacgcccggaacccggccaaattgggcgggggccccacgaaccacttgaggggagaccgcgcgcgacagacaatgcctcaaaaagcggggggcccagagcaggacgggcgctcgaa

SEQ ID NO: 176285 - DNA, 126 bp, Homo sapiens
tcttaacgtagaatatagtaaataccagaacagtgagacttaaaaataattcccagaataaataaagagctatgagtcaatcagagaaagacaaatagcttaatataaggaaaagagataaaatac

SEQ ID NO: 176286 - DNA, 270 bp, Homo sapiens
  misc_feature (239)..(239): n is a, c, g, or t
atgttggccgggatggtctcaactcctgacctcaagtgatctgcccgcctcagcctccctgtaaccagctgggattgcaggttcccggttggtatttccttatttggaaagaccatctttgtaggtgttattagctaaagtcaagtcattctgggttagggtgggccctaaatgccattgactgctatcctgctaagagacagaagagggagggacacactagggaggggaccacgtgnaagacggaggcagagacgggaagaggcagag

SEQ ID NO: 176287 - DNA, 608 bp, Homo sapiens
tacacaagataggcctgcagcattttgtgttgccacaaagtttaaggaactgcttcgaataaaacgaacaaacaaaaaaaccactgaaaaacacattgatggggatatgtcaaagggccacaggagccaaattaaagagtggtagacggccaaagctggaacaatttgaccgacaaaatacagtagtattgggttataacacaaagcataaaataaacatccaggccaggtacagtggctcatgccggtaatcccggtaatcactgccttgggaggccaaggcaggcggatcatctgaggtcgggagttcgagaccagcctgaccaacatggagaaatcccatctctactaaaaataccaaattagccgggcatggtggcacacgcctgtaatcccagctacttgggaggctgaggcaggagaatcgcttgaacccaggaggtggaggttgtggtgagccgagatcatgccattgtactccagcctgggcaacaagggcaaaactccatctccagagtaaaataaataaataaataaatatccagcattccatcctgatataattcaatgacctagtaagtgggggagagcgagggtcagtatagata

SEQ ID NO: 176288 - DNA, 796 bp, Homo sapiens
tctgaaagcttcatttttaaaaacaaagtgtaggtcatagtaatacataaaaataaaacagttgacatgcatgagagcatgaggattattaaaaaccacacttaattgaaatctctaagtgcgtataaacaaacggaatcaaaggacctttgtggacaaaagtccacaaagaagcagtagtgtggtacacagcaaggattttaaagatgaagcactcctgtcagacattatttaactcgttggttacatctgcagctggacttaaaaatcaccagacttcatgcgtcctggtgtaggccgggtccttttcagtctcatttgctaagaggatggaaaaatagctggtttagttgtcctgggaattagatatgtacctgagtatgggagagcttcagcctaccactgaagagcatcatcagcctctcacaggatgtcccacggaggcttcagggtagtagaatctcaggcaggacgggactggtcccttataaagacttcacgttgacatgaaacatcttgtaagcagcgcatctgctgagcctttgtaaagggcaggttgacacctgcaaagaattcggtgggaacagtaattggctcagttctccagcacagaggctttcgggcctccgtgatgccaactgggtgtgacttcatgagcaaacctgctctaccagcgccagataaacagttgagtcttcgtttaaggctttgattcctgataaagatgaaaaccccttcatgagaataggcttttaagcccatgttgggcattcaccattcgcagttgagagtgaaa

SEQ ID NO: 176289 - DNA, 708 bp, Homo sapiens
gggcaaagcacacgcattgtatttgcatctgggaaccacatttttaatttaaaaaagttatttgtaggccggacacggtggctcacgcctgtgattccagcactttgggaagccgaggtgggcggaccacttcaggccaggagtttgagaccagcctggccaacatggcaaaaccctgtctctactaaaaatacaaaaattagccaggcgtggtgatgcatccctgtactcccagctactcgggaggctgaggcatgagaatatcttgaactgctcctttttattgctgagtgatattccattctatgaagctcagtttgcttatccgttctcctgttgatgaacatctgatgtttgcagttctcctctccgtgagtcttcttgtaaacataattttcatttctcttgggaaaaaccctaggagtggtactgctgggtcaagggggtaggtgtttgtatagctttataagaagttaccacatccttactaatatttggtgatagctattctttaagttaaaagtgtagaggcatctcgttgtggttttaatttttatctcccaaatgagtaatgataagtgtctcttcatataccgaatggctatttgtgtatcttttttgtgaactgtctcttcaactgtttcatccatttctgattgattatctttttattattgagttgaaagagttcttcataaacccaggatt

SEQ ID NO: 176290 - DNA, 466 bp, Homo sapiens
tccacaaatgcgtaacctatttatccacttgcttatttatttctacctgccttcttatagaatgggcttagcatacaatcaccctcatttgaggtagactattatgatttccgctattctctttttggacacttcagatgtttccagttgccttcctcattttgcagtgaaacctgcaatgagcaacttcatgtaataaaactccctttctgaatttaatcatttcatgattaattatcaggtgagttaatgagtcaaagattgtaaatccagtctcttatgtataaacatatataatttagtgtatacattttcatagatttttttatacataatatatgcatatatgtgaggttgtttttaaacttacctttcattttacattaaatttctccctaccctcaaatatgagcctatgacttctgtgaatctgtctcattcaaatgtcacttgattccagttatat

SEQ ID NO: 176291 - DNA, 455 bp, Homo sapiens
ataaattccaaaacaaacaactagaagaatttaattgcctctctgaaggaagattggataaaatagagaggagtggggcaaaaactgctatattttgtcatttatactatgtgattttttaaactatgtgcatgctttgctttgatcgattaaaaatttactattagaatatttaatgctcggtggcttacgcctgtaatcctagcactctgggaggccaaggtgggcggatcacctgaggttgggagtttgaggctagcctgaccaacatggagaaaccgtgtctctactaaaaactcaaaatcagccgggcgtagtggcgcatgcctgtaatcccagctactcaggaggctgaggcaggagaatcacttgaacccgggaggcggaggttgcagtgagctgagattacgccattgcactccagcctgggcaacaagagtgaaactctgtctcaa

SEQ ID NO: 176292 - DNA, 762 bp, Homo sapiens
ctagattttttaaaaagtaaagtaattgcgctacaatgttatgacagctatgatgtcactaaatgatgagagtttgtcagctccattaatcttacgggatcactgttgtatatgtagtccacagttgaccagaacattgttatgtagcacataactaatgtaaatattgcaaatcacatctgactactgagcttttgcttcaaagtagacacttaaagataagaatttgccatcctttcagttggtctcagtgcctaggtctaggtatgttacattttgttgtgttgagtgtgattctgttattcagacatgtaatgttcatacaacatggcctctaatacccagcctgtagtgcccaaccaaagaaacagcagtttgatccggtgctggaagagaaactgctgtttgggcttgctgagcaattgtattggtctccaatgtggcctgcagatatggcaacaagaaactgtcatgtattctctttgatatacacacgtgtgcaccccacatgtaagccttcacccttcttaattctatgtatattttatatattgtgtatatagttctattgttttagattgctatatgtgcattatatctttgtacaacacacaattttgtacagtgtggtatacaaaaaccacatacattatactttatggatgacttgagatttttcaagaaaaatgtcgattctgtacaatcatagactctgtttgtttgcacatactcatttctagaacatggcaccccagaaatacc

SEQ ID NO: 176293 - DNA, 520 bp, Homo sapiens
attttagaaggagaaataaaagtccatcaaatattatgaaaagtcctggacatggatagacctgagattagctgaatgtctgtatgagttgtttcatctaccaaataaacagattgattcaaaactatttcttgagcacctactctgtgcaagatatcacatggcatgcggggtgacaaaaaacgaaacgggaggtttctgctttcaaggagctcttagcctgatatagcataaaattcaagaacagaaatacatcacagaaaacatgaaatgccataataaatataccaacaaagtgccactttcagctgcagagacctgggaagaccacttcaaatgtgggaggaaacatttgaatcagaacatattaaaagagaaattgtcatctacgtgtgttgcttaaaatataattgagaggaaaagaaactatgttctattggttctggtaatacagtagatttgtctcacctaattagcaatagcaaaaataccaacagaaaatgaagaaatatttggaaaa

SEQ ID NO: 176294 - DNA, 439 bp, Homo sapiens
aatcccagcactttgggaggccaaggcgggcagattgcttgagtccaagtgtttgagaccagcctgggtgatgtggcgaaactctgtctctacaaaaaatacaaaaaattagccagatgtggtggcacacacctgtagtcccagctacttaggaggctgaggcaggaggatcacttgagcctggaagatggaggttgcagtgagccaagatcgagccactgcactcctgcctgggtaacagagcaagaccctgtctcaaaacaaacaccaaataaactttaagggcaaaggataatctcagagtacttgggcaagttgctagaaaacagtattctcaggggaagcatcaaaggggaaaatggccaagttgatatggtagttgacttcattgtagttccaccagaaagacaaaaaataaacaaacaaaacccttatatct

SEQ ID NO: 176295 - DNA, 301 bp, Homo sapiens
ctagaggattcccggtattgagtggcatgtgatgaaacaatatacctacacaccaaaagataagtcaaggacgaaagataaaaaaatactcttaatcaagatgttctacatcatactgaagcagatatagtccctgtgcaataaaagggcggggcatgaagtactctatgaggaatctgaagaagttcattccagttcagacttcacaaaaatataacctagagaaacttaatttctttatccaaacccccaacttctgataatgggtacctatgatggtggttgttgataatgatagctc

SEQ ID NO: 176296 - DNA, 697 bp, Homo sapiens
ttctaagtcttccgctgatctgttctccattactataattttgtcatttcaagaattttttatcaatgaaataatatactatacaaccttttgagactagcttttttaaaaattcaacataagcatgtatttattttgtgatcagctaccataataaagatactcccttttggaagacaactccaaaaaattttatcgattactggctaagtaaatcgtaattcaactgtataatgaaatcgtatgcagccattaaaactgatgagataaacataaattaaggacatgtatattttttcaaatacacagtcagctctccatatccatgggttccacgtcagagaacccatggatatggaggccaactgtaagaaacttgagcatccactgattttgctatctgtgggggctcctggaaccaatccccaatggatgccgagagagaaaactatatagttaagtgagaaaatacaaaactatatattatcccatttttgttaaaacacacatataaatacatagatacacagagatagacaacaagatgttaacagggattatctctgggtgataggattacaagggatttttattttcttgttgcttgtctgcattgtctaaatttacaacagtgaatagctgagcagatcgggatctctaagtcgacgaggctgaagcgagcggggttaaaaaaagg

SEQ ID NO: 176297 - DNA, 255 bp, Homo sapiens
tcacagctaggctgaggctcagctcttctgaagatgatttgggttctttaacctgcaatctctgagaaccattgacttggctactgtgcagttagtaaaagatgctgtgccagccccaactcggaaaaacgactcattcacgccccaaataattccagatgtgtaatatgagtcatactcaccactgccatgtctttgatgaatgtggaaaaggccagtattcccaaaacattcaactgcttccaggtcgttggt

SEQ ID NO: 176298 - DNA, 418 bp, Homo sapiens
tcgctcagaggatcccgtgatgtatcgccaacacttataataccatgccacttccttctggcctccatgatttctgaggagaaattcactgctttcaaactggtgtccccctataggtaatgcactattttcctctggctgctttcaggactttttgttttcagtttttagatggttaacttattatttgccttggcatggattttttttttcttttgtttgagacggactttcactcttgttgcccaatctggagtgcgatggcgcgatctcggctcaccacaacctctgcctcccgagtagttgggattacaggcatgcagcaccacacccagctaatttttatttttagtagagatggggtttctctatgttggtcaggctggtctcaaactcttgacctcaggtgatccgcccg

SEQ ID NO: 176299 - DNA, 255 bp, Homo sapiens
ttgatcatctatattctcagctagttgaggtgtaagagtttcccaaaatacctgcactgtcattcagtctaccactagagttttggactgcagccactgtgctagcagcaaagcagcacttgctgcatcaagaactctgccgagaagagcatgtgtagagaggatggatgtcagtatccattatccacacaattgcatgggatcctgctgacatccttatgtccacatgcttagctcatcagaattcattttgcg

SEQ ID NO: 176300 - DNA, 428 bp, Homo sapiens
acagacatcctcagccccagaactaattttaagggaagtacaatgataaaaagttgtaattcaaaaaatactaaaatgatcaaagctttcaggctttaatgatcttttgaaataatcaagggtttggaagattaatgatagagagaatacgacatgtattacaaaagtgaactgcctgatagatagctttccgaatgtacggtgctcatgagtgaagactgcatgctgaccctgtgtgtctggggcagaaacaatcaagcaagatggactcccactgacagcagcaaggcagtgcagccacccctcaaacatgcagacaagttacaaatgagaactttgccaaaaagctggtatcatccctaacaaaagtggaactgttattgatttatacactttttcactcaaagtggatgcgggacagaatgcat

SEQ ID NO: 176301 - DNA, 336 bp, Homo sapiens
tgtgagccaccacgcctggcctgaagatttttacaatgagaagaaagcagtaagagatgattcctgctaatattctttttcaaaagaatatcccttaaatggccaataatatcacaaagacataattgaaatgttttggtcctagatcactaatctaaagtagaagaaatgaatacattatgtatgttcagctgtagaaaggatttaggacaagggttgaaaatggaaaaaactcctatttttcatacatggtgatcaatatcattcaaatagttattgctaatatacacaagaatcttcccatcttctcttcaaattttttacccaggtatttat

SEQ ID NO: 176302 - DNA, 292 bp, Homo sapiens
agggggccccatggtcagcaggacaggcccatggtcaagccattgcactgccttcagtttacagtgggcaaaacaaaccccgcatccctaaggtccaaccggtagtgacccaactggtagtgacatctgtcttcatgctcaggccttgggaagagcaggagcagagaggacagaatgtggagtcaagaattcagaatggggcaaaaggggggtctggggtggaagcaggctggggatgaataaggggagccacagcccccaggatgtcagcccagggtaggcaacctggact

SEQ ID NO: 176303 - DNA, 188 bp, Homo sapiens
agtttttgaaagagtttgcaaaaaactggcattaattttcctttaaatgtctggtagaagtcactggtaaagccacccagtgaggggtatttctttgttgggaggattttaattagcaatttaatcttcttactagttataggtttacccctattttcttttttttttttttgagacgaagtcttgct

SEQ ID NO: 176304 - DNA, 552 bp, Homo sapiens
aacacacctgagatgcacactcatcactaacagtggttttctatacaggaagagagaggacactcccaaactgacccctccacctggaactcttccacagttccggggatgactggctctctcccatcacgtaggtttcagctcaagtgtcaatttccagagtggcctttcctgatctccccatataaagccaccctccttcctgctgttattctccatcggagaaccttgtttattctcctcgaagcactatttacactctgtaaatcttttattgaacttgcgtatctgtttctaccactagaacctgagtcctgtgcaggagaaatcatacactgttttctttccattgaatccccagtgttgaccatagtacattggaaaagattaataaatattcatgacataagtgactgtatgcataataaatgagaaaagaaactttgtcagaaacaacttatttttcatacgatgtctccaaatgatcactgcttccttacaaactagcatttgataaatttcttagaatgtttccagggacctctattcact

SEQ ID NO: 176305 - DNA, 336 bp, Homo sapiens
tcatgcttctaattcttcctcaaaagtcacgtgccatccagcgcgtcctcgagcgcggaatcccatactagctccttctcttaaggtacatttccatcactagtctcctccttcctgagagaattatccctcctacatgcctcctaatggagattctctacagttgctctgcaagcatgccatctcatccctgtcctgctctacagaacgttttgattgagaacctccttgtagagacacatttcatccagctcctcctctacaggcacattccatccagctcctcctctacagacacattccatccagctcctcctctacagacacatttcatcc

SEQ ID NO: 176306 - DNA, 774 bp, Homo sapiens
acttactgggtgaatgctagcatgttcatattttgtaatttcttaggatataaaggccattccagacaaattcctggactttggaatagaccaccggccttgtagtattgcttatcattttaatcagataactcagtgaattaaaataccaaaactctggagtctgtcatcattttccagactattttccttcagaggatccctggaactgtcatctctgaagtatatccagcttcctctcaactccctccttcttctctctcttcctactcctcatacccagcttatttgctttgaccacttggatttttctccaaacaagataaagaaaatgtgtttgttttttggtattatttgccacaaacccagggtccacagaacttggaagaatataagaggttcccctcttctactttagattgtagagaaccctggtcaggtctcagattccaacccacttggaggaagctaagacataaaagctggtcagtaacaacttggaatatcgaagtatgtgagtaggggcagcgtaccactagttgctgagacctgttatagccttgtgtgtttaggaagccagtggtccaacctgtacctattatccttgtaatcaagaagtcattcctatgcctgtcccgtatccattcctgttgctctatgaatctgaaagatctgcagtcacactggggaaaataaccccctccatataaatgcatttggccacattctgccgagccacctttcagattcatagagcaacaggaatggatacgg

SEQ ID NO: 176307 - DNA, 706 bp, Homo sapiens
acttactgggtgaatgctagcatgttcatattttgtaatttcttaggatataaaggccattccagacaaattcctggactttggaatagaccaccggccttgtagtattgcttatcattttaatcagataactcagtgaattaaaataccaaaactctggagtctgtcatcattttccagactattttccttcagaggatccctggaactgtcatctctgaagtatatccagcttcctctcaactccctccttcttctctctcttcctactcctcatacccagcttatttgctttgaccacttggatttttctccaaacaagataaagaaaatgtgtttgttttttggtattatttgccacaaacccagggtccacagaacttggaagaatataagaggttcccctcttctactttagattgtagagaaccctggtcaggtctcagattccaacccacttggaggaagctaagacataaaagctggtcagtaacaacttggaatatcgaagtatgtgagtaggggcagcgtaccactagttgctgagacctgttatagccttgtgtgtttaggaagccagtggtccaacctgtacctattatccttgtaatcaagaagtcattcctatgcctgtcccgtatccattcctgttgctctatgaatctgaaaggtggctcggcagaatgtggccaaatgcatttatatg

SEQ ID NO: 176308 - DNA, 308 bp, Homo sapiens
ctctatccttaatctttagaacaattttatgatgcacacagaacccaaggctcagtgtgataaaaataacatgaccaaagtcaaatagctagaaagagaaggggtttggacttaaatagatctgcctgattgcaaagtccatgctttttccactacagctaaagttcatgtcttcaattcccacaatgtggtaaggaagacagacatataaatagatcaatgaggcagagaaaaataaactgcttacccattctaataacgttagtaactttttttttttagacagattaaggatagaggggtaccga

SEQ ID NO: 176309 - DNA, 336 bp, Homo sapiens
cggctggctgatttttgtatttttagcagagacagggtttcgccatgttggccaggctggtctccaactcctgactttaggtgatacgcccgcctcggcctcccaaattattcttaagggaaaaatctcatcatgtaagctttaagttttgcacaagacaaaagaccaccagtctctttgagaccagttagaaagaaccccaagaacattgagagagaagctgtttatacagctgttctgagcactgttgtgatatgaccaaccacctgccctgctccgcaccctagttactgtgagtcaggaaacaaggtgcactgcacaagactgggcgagctt

SEQ ID NO: 176310 - DNA, 571 bp, Homo sapiens
actccatcccaaaaaaaagttagtgaattgcctacaaccttgtcctctttgcaggggacaagcccagaaagccagatggtaattgttgtgaaatctgtaggtttattaggtttattttgtacctttgccttcccagaaaaattgtagttaaaagcattgttataatgtggataacaacaactaatgtttatatagtgctttatagcatacagactgtccagaggagaaaaatgaagtacagaaagtctattacttgttagagggaggtaacacagcccttaagtaagtagagcaggacttaggactgaggccttcttattccagattctatattctttttattattacatactgtctcagatttgtctgtcaacgtgtgatttaaagaattacaaaatttggctgggcatggtggctcacaactgtaatgccagcactttgggaggccaaggcaggtggatcacttgaggtcaggagtttgagaccagcctgggcaatatgacaaaacccagtctctactaaaaatacaaaaattggctgggcatggtggttcacgcctgtaatcccagca

SEQ ID NO: 176311 - DNA, 274 bp, Homo sapiens
cgggcaggatcttaaaggttacatgaaaccaaatgccctaatttttcagaagtgaaaattgagactaagagacagtgactttgtcaacttcccccacggggctgggaacaagctataaagtaactcctggctcatgtcccatacccttcccaccggcctgggcattgtctggtccactgtgaccccaacactttaaggcactcatttctacctctttaccaccaaatcattacaaataaggcacagtttagttttctacagtttctccttcccc

SEQ ID NO: 176312 - DNA, 1103 bp, Homo sapiens
ttcttcattcgcaggtgtgtcgggtttcccgctttaaatcaacgctagttgcctatttcgtctggcaaggcgtatcagtgcgatgctctagacctggtcgcatatgcccttctatacccaatgacatggaggcccacgtgctggcatacccgcacgacgctctgttgaggaccctaggggtactagcgagttgggtagggtctctgagcagagagcctgatagggcacggtaggctccagagctgaggcgtcgagtaatccactagtatgagcgctccgttccagtgcactgcggggtttccactttctgcattagtccatgtgagccgtcatcagactttgcaaatgcttcctctctgatgtccactttctttagtaagaggaggcaggcggcccacagctgcgttcagaatgcattccggatgcggctctcctgagccctccgacctcgtccccttgtcccctcgtcccccgtgtggggaggcactgccaggggtgggggctcctgtctgggaacagcggccttttccaaaccttgattttactcttgaatttgacacgtcgcctctgttcctagacggactgtagtctttagaaaatgtcaagctatggtcactacttgcttccattttatttaaatcgtttcttcctaacattggcttttttttttgcagttgaattatctatttctcatataaacatgttaggattttgtgcctgaaaaagtggccactcaggagccctgctgcaggagccgggcgcgggactcgactaccacacttgctgggtgtctggcccatgcccggtgcctcctgtgcctgcaggggcagagcgcccttgagtgctgggagggcccaggcagcggagaacgtggctccctgtcccactccgtctcaccgctcttgtctgagaaagcgccctgtgctgtactgcttggacatgactggttgggagtgtccaagctaggcttccacgaggtcacctgtcttgctaagccatgtccctgcctctgacacagagactgcaggaggagccctcctgaccttcctcttcctgtttccagggccctcatccccacgcggcccatgacaaaagtgctatgg

SEQ ID NO: 176313 - DNA, 818 bp, Homo sapiens
cgtcagccctgcgggttcacttctgcattagtccatgtgagccgtcatcagactttgcaaatgcttcctctctgatgtccactttctttagtaagaggaggcaggcggcccacagctgcgttcagaatgcattccggatgcggctctcctgagccctccgacctcgtccccttgtcccctcgtcccccgtgtggggaggcactgccaggggtgggggctcctgtctgggaacagcggccttttccaaaccttgattttactcttgaatttgacacgtcgcctctgttcctagacggactgtagtctttagaaaatgtcaagctatggtcactacttgcttccattttatttaaatcgtttcttcctaacattggcttttttttttgcagttgaattatctatttctcatataaacatgttaggattttgtgcctgaaaaagtggccactcaggagccctgctgcaggagccgggcgcgggactcgactaccacacttgctgggtgtctggcccatgcccggtgcctcctgtgcctgcaggggcagagcgcccttgagtgctgggagggcccaggcagcggagaacgtggctccctgtcccactccgtctcaccgctcttgtctgagaaagcgccctgtgctgtactgcttggacatgactggttgggagtgtccaagctaggcttccacgaggtcacctgtcttgctaagccatgtccctgcctctgacacagagactgcaggaggagccctcctgaccttcctcttcctgtttccagggccctcatccccacgcggcccatgacaaaagtgctatgg

SEQ ID NO: 176314 - DNA, 532 bp, Homo sapiens
ttaatgcctctcctccactcgactgcacatggcatggacaggagcacgcacgctgcactcatctgagtccccagtacgtagcgctgtgcttggaacacaggccgtgctcagtgactatctcaggaatggatgtggagtcagcccccatgaacggggactccgaacagagcccaatcagttttcagttctgctttcgtagagtcagcagtgggaacagggtttttgtttgggacctaacattcctgggtaagagaggggagaagcctcacacacagacctggccggcctctgtggaaatgatgtctggacatgcctgagtatctgacaggagctgtggtaacaagaaagaacatgggctcaggagtggcagcactttaaataagataacctttatattttataaaagtttttcatttacagaaacattgggcagatagtaccgagagtcccacagactccacacctagtttcaccttttatcaacatcttatgctattaacatctgttacaattaataaaccgatatggatac

SEQ ID NO: 176315 - DNA, 387 bp, Homo sapiens
ccaataacacatcttttaaacaataaacactaaaatgtatacatgtccaatcattttgttagcttttttccatgaaggaatactaagatttttaaaaattaatttagcatttcttcattatctttttaaaattaaattagttaagattaaaccattaattcctccatccactggcccaggctgggggaatactgctgtgcttggtgagcacaggagcaggtgtccatttccatggcatctgtagtgctcaatgtcagcccacgcaagtccttgagctctcaatatctgtttttcagtgtctgacctgtcaaatgcgggacatggattgactcccacagacccttccagctctaacccccatggcctataatcagggctgtccagtga

SEQ ID NO: 176316 - DNA, 130 bp, Homo sapiens
attagcaattattaattaatcaatgcacaaataaaatcagaaaactttgggaaacatttatttatatatgtgcatgtatgtacagattatacctgatctacttcataaagtaatttttattagcttacag

SEQ ID NO: 176317 - DNA, 453 bp, Homo sapiens
tcaacttgagtatcctttccacattccaagcattgcaagtcttcccttatgtctactgtgaaatacacagtgcattgttgccgactctggtcacccagtgctgctatagaacatgagaacttatctcttctaactgtatgtttgtacccccttgtggggcacccggttctgttgctgtttggggtgcaactaagtaatcctcatggacctagggggaccgaacaaagggggcgaacatgggaataaaagacaagagacaaaagagtatgtttggaagaaggggtcagggggcaccttgcctctagtggacaagggccctgaactttacacagccctccgtatttgttatgcaaaagacatagtgagaaggggggtggaagaaggggtcagctgctcagtccggagtaggcttgcaagactgcattcctcaaacaacaggctctagatgtcgca

SEQ ID NO: 176318 - DNA, 263 bp, Homo sapiens
ggacccgatcaacgtcaactattacaatcgtccatggggatgatggtgaagggcactcaggaccctgagagtggcaggagaggtaagattaatcaccagcagaacccattcagctccagctatctctaacggtgtggaggagaacttgacatgattagggcattgtctttgatgtaatttggaaggctgcaatgtagataatgttatcagaatatatgtccaaatacaatattaacaggctatgacacagcttcctggctcca

SEQ ID NO: 176319 - DNA, 388 bp, Homo sapiens
gtataaagctgctacagtttgtcaattgaatactgaaatggtacaaagatatggattctttccacacaaagaaatgagatgtaagttatgcgggaaaagattgcaaggtagtgtgtatacacaaaggacaagtatgtaagatgtgtaggtgtcagtccatggggatgatggtgaagggcactcaggaccctgagagtggcaggagaggtaagattaatcaccagcagaacccattcagctccagctatctctaacggtgtggaggagaacttgacatgattagggcattgtctttgatgtaatttggaaggctgcaatgtagataatgttatcagaatatatgtccaaatacaatattaacaggctatgacacagcttcctggctcca

SEQ ID NO: 176320 - DNA, 562 bp, Homo sapiens
cagaaggaggtgataagcaagctgcttatcattaccactgtgagtcccattacagcaggaggggtacagttagctcagaggaagagcctctcagggagaaataccgaggcatctgatatcctgccagggagacactgtctgacttgagagcaggcaccaggatgtttggtgtggcgtaggcctaacccctacccagagacgggaatgggtttcagacactctagaacagggccctgtccacactcctaggcctgctttacccatgctcccttcccctgctcccttcccaaacattgcttgactgacagcaagggaagctactgaggcttgtaagtgtgcagtttgtgcctcaatgcaagttctaggaaaaccagaaaaagagaagttagtagagtgcagctgcaggcattccttcactccaggttctgatactgagtgggtggctgggattcctctgtggacttgggggttagagggtgctctgtagtcatattctgcagcacctgagcttccagaaggacagctgagcaagcatttcaggatggtaagtctcagcctaaac

SEQ ID NO: 176321 - DNA, 841 bp, Homo sapiens
ggtgacagagtgagactccatttcaaaaaaaaaaaaaaaaagtaaggacattaaaaaaaattatagccatctaatgttgccacttctttaaaaattaacagtattttcttaatgtcagtatctagcaaatgttcaaattttcagttgtcccagatgcctcaaatattttatgtaactgtctgttggaatcagaatccagtggggttcatatgtcactactggttgatacatcatctcttgactgtttgacagctgtagggttctctgctaggtcttgcctggtttttgttgaagaaactgattgttctttcgagtgtgccagtctggaccttaatgatcacatcactgttttaataggttccttcgttttttttcttttcctgaaaattagtagttacgtttagtggttagatctggttggttggtaaaactccgctgcaggtgggagtgggctcttgcaggagacccccagcctctggtggcaaccattgtgaccagatactggatccactcatttcttaggggttactctaaacggtggtactctaaatctgtcattcctttcttacttatagctgggacatgtctataaagcgcagcttctcgtttttttaccctgaggtgcagttcatgatgtttgaatctgtgtgagtttcttagcatcctgcagtgatggtcagagtattttaatgcactcattggtttaaatacttcatacacttctaagggaaatggaaacctggtacctgctaggtctccgtgtgtgagtgcagcaggagaatgtcctcgtgagggtgaggctgctgtcagtgccacccacatccttgaaaagcccctccag

SEQ ID NO: 176322 - DNA, 298 bp, Homo sapiens
tcctgaaaaagtgagtgtatctgaaatcataaagattcaattttgaagactatagcttattataaaatactatgtaacaaacattgtggtatggatgcttggtcctgattgtcaggttgtaagttgttgtaggaacttggcttttgctttgagtaagactgaaaatcattgcagggttttgaacagagatttaacgtgacctgactttcgttttaaaactcaggctgcaggctgggcgaggtgcctcacctgtaatcccagcactttgggaggcggaggcaggtggatcacatgaggc

SEQ ID NO: 176323 - DNA, 230 bp, Homo sapiens
ttgtgctgtggtcaaagcacttgctgtctgcggttctcccttgtgcacaccggttctttggttgctgtaacaaaaactacataggacacagacaggaaacccgcaggctttgttttttcttcctaatttggcagcagaagggggaaaaaccagggcctttcacagacaaggcttgttttagagtttaattttaacttcttgttcgtgttctaaagcttgggttggtaata

SEQ ID NO: 176324 - DNA, 514 bp, Homo sapiens
tggatgaaaaataaagtcaccttaatctaaattcaatttttcttatctctgtccttaagtgtatgtgttctttgtaagtgtattgttcccttatctcagggaacaatgttctgtattacgttaaatgtacaataaatccatcttccaaattctaattgacatgttcacctatacacttaaataccctactgatccacacattcatcaaatgtttgctaagcatctcttatatacaaagaacagatattcactcagctgggctgtggtgccctcttcctagtaggctgagaatgctcatagcattcccatctgggcactagccccaaatggtctgggaggtgttggaatgccccagcctctaaattcatagagagctccttgagggaactgcagaaacctaagagaatccgttatacagactcatacaataaatttctgtgggtccaatggccaagaccaaggctaaactaatgactgagaactatgtaatgaactctccagaccaccactactg

SEQ ID NO: 176325 - DNA, 1037 bp, Homo sapiens
cagtgagccaagatagcaacacagcactctagccagggcgacagagtgggattctgtctcaaaaacaaacaaacaaatgtgctaagtatactaaagaccacattgtatgattccatttgtatgaagtatccagaaattgtgtatttgtagagatagagtggttgcataggactgggagtaggggaggttagagggaaatgggaagtgactctagggtatggagtttctttttggggtgacaaaaattttctaaaattcattgtggtaatagttgcacaactctgaatagactaaaacattgaattgtatactttaaatgagtgagttttatgataatctgagttgtatctcaataagatacaacctcttaagaaaggttgagtctagattcctttgttagtttgtatcactaagttactgccttcttgagtaccccagcaagaagactgactattgtttctgacactgagggtgggccctagacacaattggaggtcaagcgttctacagaaaacactgaattaagttaaaatgctcaatattgagaccgttactgaggcctcttctctttggcttccagaattctggcaatcaagtaggaatttggaggatggttctcttactaacccaagaagagaatctgtgttatttacaatagcttttatggccctccttttaaatatgagaagataatcaaggatcaccagacatgtgaagaaagcttctcatataagaaacctcttaaaagaaatagaaaacaaactgggaacaatcagaacaacaaaaaaaaaggctcagtagaacagtcaatagaaaagttgaagttagagtaaaggagttctttcataaagtagaggaaaagatggaaaataaatgagaaaagaaaattaaaaggtccgtcagaggtcaacttccaaataacagaagtactagtagacatcagagaaaagaaggaattatcagtaaaatattcaagaaaaattcccagaatcaaggaacgtgattttgcagaatgagaggctctatgggtatcctgg

SEQ ID NO: 176326 - DNA, 710 bp, Homo sapiens
tctgcaagaaagagaaaattctaaggaaggcttagtactagacctcagaacctccatctagggcatcccctttggagatgttaaggtctggagttggatcacctagggtgtccccgtttggtgtctaatcttagtgtgttagacatctctgaccttaggtgggcactggtgccactttgtatgttttccctcgagaggcaatggcctactaggagcttttcttttgtccctggatgaagatcttgacttatatcatccttataatttgataaagccatgctttcccatgcttccccttccactagagtgacagccatgagctttagtcataggaactgggtgtgtttcttttgtccttagccaattgaaaagattgagtaggagaagggaggtcaaatcgcttaagagacattatcttctgccattatggttaactctataggataatttagcataagaaaagagggtttaattcgcctgaacacatgcaagttcaccctggacgagttgccactgccaattgcatcacatgtagggatcagggactataaccaggaaagacagaaaagagtccttcccctttccatgcagggcagttgtcctcattcactttgtggccttcaggtaatgccagagagtggctccagccggttgccctcaattactaaggatctactaggaaacagctgctgaaagattaaaaaagaaaa

SEQ ID NO: 176327 - DNA, 182 bp, Homo sapiens
cggtaccattatctctgtcttgagcaggaaagacagaaaagagtccttcccctttccatgcagggcagttgtcctcattcactttgtggccttcaggtaatgccagagagtggctccagccggttgccctcaattactaaggatctactaggaaacagctgctgaaagattaaaaaagaaaa

SEQ ID NO: 176328 - DNA, 449 bp, Homo sapiens
attggcagggtcagacttaccctgctccccgcctccaaccaccattttacttaatgaatgtggaaagcagccgtttgtgattattgaatagatcagttatgtcattaagagctgcaaaacagtgactttctaattctaacttcacttttgagtaatgctggaaattttctctcaataaaaattttctttcatccatttttagctaaaaaaagaaagataagcatttgaaccctctttcatttcagagccaagagttggttctatcatcctcccattttgaccaacaaggggagactttatgagcatcaggtgcacatatgggttttatgcgtttgatgtgtttcaatctattgcagttatcattctttctgattttctttttgttctacaccaggctggtgagaacacttttctttacatgagagtttaaagtttgcatcaaatttaga

SEQ ID NO: 176329 - DNA, 429 bp, Homo sapiens
acaagtcaatttagagatgagggtgctgggttgagtcatggtacactcacaggatttcacacattccctagcacagtccactgagacatgtgccacgtcagaattacagattgtactacttgtcattatctcataggaatagtagaaactgcagatcttaaaactttgaaagctaatgacccactgtattctgtgccttcattcagaacactaaagaattaatggctggtggaagggagcttatggttagatttttttctgtttaccacccacagttttgaaccctgagagaaatcttttacttccctaagtacatttccctctaagatttgattctggagtgaatccaaacttactgtttctcactagcacttaacaaatggcaaaaagggaattgtcatagttactaattgtattgtttcatggtta

SEQ ID NO: 176330 - DNA, 602 bp, Homo sapiens
tcacagcttcccttggctaggaaagggaaatcccccaaccccttgagcttcctgggtgaagtgataccccactctgcttcgtctcaccctccttaggctgtacccactgtccaaccagtcccagtgagatgaaccagctactacagttggaaatgcagaaatcacccatcttcttcatcgatcacgctgggagctacagaccggagctgttcttacttggccatcttggaatggatcctccattcatgattttaaagatatttttccatgtcttctagcttcattttgtcctatagaaactagacgtcatgtttatacacttctacataatatgtcttctttcgatgcttttaagatttattctttggttttcagcagtttgaccatgatacagttagttatatttttagttgcacttaccctatttgggatttgcggagtttcatgaatgtgtgggttgctgttttcaatcaaatttagaaatttttcatataatatagttgcaattttttttcttgctccatattctctctcctctccttcttaaatgtgtgtcagaccttttgagacaattgcacagctcactgggggtctgctaagtt

SEQ ID NO: 176331 - DNA, 315 bp, Homo sapiens
tccgtttaggtgctttgcatatgcctctggctatattataggggagattctgcccgcaagagacatttggccaggtctggggacatttacggttgtcaccactggggggtgctcctgacacggagtgggtggaggccatgaactctgcacagcacccaacagtgcccaagacagccccgccccagaggatggtctggccccaaacatccacagtgcaactcctcaaaccacgattctccctgctgggaatgccctcccatcatcttccctgcggataaatccacttaaatcatcccggttgtagcttagccgcga

SEQ ID NO: 176332 - DNA, 256 bp, Homo sapiens
ggaagatgaggaattgggctcctgtgagggcctcccctaccctgccctgtgcctggacttcgctgggcccactgcgggagagaagaggtaggacgaggccttctgcgtggctgggccagggtgggctgtctcacgtgctttcctggatgtgtggttgggtcatgccttagccaggaggtaggtggtttgtccactccctgtcattgcaagggtcacagaggtggctgggtggcctgaccctcagcaccgctccttg

SEQ ID NO: 176333 - DNA, 694 bp, Homo sapiens
tagtcagaaaagtaccctaaaagactccttggatattagggtttgccttccggatttctttttctagattttcctaattttttacagtgaacagaatagtgtaattagaaaacattttttaaagtaactttaaattctataacagcaatataaatgtttttcactttctaaatcactgtaattatcaataaggcaagaaatacaaagtggcaagataatgtgccaaaaatcacatcatgcatgatggggattgtttagagagctgctggtagacataacctttcattatttttagagtttcaatttgtagccgatttggtattttgagactttcagttcatcttcacttacaccactttcattaaaacttcagaaacagaaatagccacaggcaaacactttgaagcatgcatcttccttttcttatttcttactaagatatctaaattcagacatttgaccagtaacattgcaaagatgattcatatgtgttacaaacttagaaaagtcattaggaacatactcagattttgctgtaaacatgttttgttataaaagtgatgtgggtgattttgcttctgcagttgaatgcagtgagtggttactgtcagaaacacaaaatacagattgtgactggttaacaatcacatcaggggtacgagctcgaatcgtatcagccatagctgttctggga

SEQ ID NO: 176334 - DNA, 309 bp, Homo sapiens
tgttctttataccccaattcactaaaacatatagaggggtctatgtctctttcatccataactcagccactggtggaacaaatctcataatcaagaggatcatagtccctggtaagtggatccctggagcattggcaatatgttttccagggaagtctatctggctatcagggaagagccacctgccctctgcagagggagagggaaaatcaaaactcaggaaagggaatatatttctgctccaaaaccaccaggttttgcctgtacccttcactctttctagatcattcttcagactatacactaaca

SEQ ID NO: 176335 - DNA, 234 bp, Homo sapiens
aagtggtgtgatccatcatggaaagaagagtctgaactgcttcaaatatcgcacactgggaataattattttttttacttttttctttttctcttttcttttttttttttgtgagacaggtactcactttgtcacccaggctggggtgcaaaggggcaaacaaggttcactatagccttgacttcccaggctcaggcaatcctcccgtcttggccccctgagtggctgggacca

SEQ ID NO: 176336 - DNA, 166 bp, Homo sapiens
gtgaacgggatgtcctccagagagagcttgaagagctaaaaaagaagttcgagggcatgaggtctcggaacaagctgctgtcaagtgagatgaagaccctcaagagtcagatgggaaccctggtggagaagggccggcatgatgacgagctcatcgacgccctcat

SEQ ID NO: 176337 - DNA, 528 bp, Homo sapiens
atccacccacctcggcctcctaaattgctgggattacaggtgtgagccaccgtacctggccatattaagttttttgagagaattagaaaactgggtttcctcaactccaagatgttatcagttgtaaaatgtacccgtatgttttataccactaagaaagaaaaataagcctccaattaagcaacatgccatcaattgtaaaatataaccagaggggggagaaaagtagtgtttagctgggatacctccctactccctgaaaaacaagtcagggttttattagtaaatgaaaatgggagaatggatatttggtggcagtcatgataaccatttcatttctatatcattattaacctcttaaaatatccatcttaagtacattatggcaaagcttcttaaaatggtggcattggaatctcaagaaagtctcttctcatcctactccttacacagttgaaattaattgttgctgcctcctttctgtatctttttctttggctatcatttcttatccttttaatcaataaa

SEQ ID NO: 176338 - DNA, 392 bp, Homo sapiens
gatatttatataaacttgggttcacatccatatatctgtacactgaaaggcgaagaagtagtgacaccccagtaacaacgtgcacatccagtgcccatatcttggtttctaataccattttccaatataaaactagggctccttggagaaatggccctttcgaggacactgggacacgggacatgtcaaagggacacaggaaccaatctaaaagaactcccaacagccaaagctggaacaatctgatcaacagaataaacaatattgagttataacccaaagtataaaaaagtataaattgatataattaaatgactgaatgaacaaatagggagaagaggcaaatcttccttacagaggaattccaaataatttatatcaataatcccccc

SEQ ID NO: 176339 - DNA, 156 bp, Homo sapiens
acaagcacacagatagactgtacgtgacaatttctgacatggattagtgctatgagggaaacataaacagggcaaggtcgactgcaatttggagagggcagagcagacttttgaaatgacatctgagctgagacataaaggatcagtagcagctgg

SEQ ID NO: 176340 - DNA, 377 bp, Homo sapiens
agctggccccagttagacataacccaggtagcgatgcagagtatagatagggctcaggcgtttgtgtatgatatgttcgcggtgttctgatgatgtggtcgttggagtagaaacctgtgaggaaaggtattcctggctaatgttaggtctacctggatcaggtagactaacccctcaccagaagccaagggccaataccaggcttctcgtacagcctgcagaactatcagccagataaaccttcttctcttcttgaattacccagcctcaggtatttctttatggtgacaactaaacagactgagacagtaacataatacctgcacagtgtctggtaaatagttggtctacctggccgaacaactcactgttaggtc

SEQ ID NO: 176341 - DNA, 429 bp, Homo sapiens
gacgttaggacgcgaatcagccttgctcgcgctaggaggtcgacctcgcgttcaccaccctgtactagcattgacgagaataaccccaccctactaaaccccattaaacgcctggcagccggaagcctatacgcaggattactcattactaacaacatttcccccgcatcccccttccaaacaacaatccgcgcgctctacctaaaactcacagccctcactgtagcagagtcttctcccattaactgcccagaagattcaatgatgtctatgaggaaattagtgcttagtcatttatttgaaggaaagtcaaaatctcctttcattgagctcaacctgcagactgagtctagctaaactgcttgcttatccagtgaattctgagctatctttgttttgttgttgttgttgttgttgtttgttttcctt

SEQ ID NO: 176342 - DNA, 717 bp, Homo sapiens
aatatattaaaaagtttatatgaacattttcatcattgtagaattctattggatagcactactgtgggtgattctgatgtgtgctaaaacttgacaaccactgagcttggacatacagttttcaaccctggatgcagattagaatctacctggggcgttttttttgtttttgttttctctgaaacggagccttgctctgtcgttcaggctggagtgcagtggtgggatcttggctcactgcagcctccaagcaattcttgtgcctcagcctcctgagtagctgggactgcaggtgcccgctaccacgcctggccaatttttgtatttttagtggagatggggtttccccatgttggccgggctggcctcgaactcttgacctcaagcggtcctcccacctcagcctcccaaagtgctgggattgcaggcatgagccacagcacctggcctaacgggggacagcaggggaagacttttgacacccactgacatcccaacatacagcagaccaattgaaacagatggtggggcggttctgggggttgcaggaagactttagttgtttcagtttccccaggtgatcctaaccagtctcaaaaccaaagtcagaaccactgccaattccatgcacttttcccagcattctcattggagtcctctgagaccttacgaggttgccctgttatagccacatgtgctcaacagaagagcatcagg

SEQ ID NO: 176343 - DNA, 256 bp, Homo sapiens
ccccatctctaaaaaagaaagactttttaaaataagtaaaaatattttaaaaaatgaaaatgacatactccattgaagttggattacaggctgttgtgcaatctgtagttcacaataaacatgtgatgagtcttactaagtatctgtagtcatttcagagttctcttgtctccagttatgccttctaggtcatcatagatctgatgcttttgcccacaaaagggcaatttcattcttcatatgatatccaggtagt

SEQ ID NO: 176344 - DNA, 296 bp, Homo sapiens
tggaattgagccaacatggaaaaaccagattttctatggaagtctgaattcctattgtcccttgacaacaattcaccggggttttaggcatccaggagctctctggccaccctggccccaacgtgtttcattcacctacattgtctggccctgttgacatgtagtttgcaacactgggttccaggcctcatctttcaacaatgtccacacacacccaaatgtcctgccacacatctgggaattcctgaattggtcttccattttcacacagctctttgcaccttggcttatgcaaa

SEQ ID NO: 176345 - DNA, 498 bp, Homo sapiens
caaacttcttttattgtaatagtctccagtcgagcataatcaccaaagctatagtgcaatacgattgccaaaactagacaaacatctgtgagatggattcatctcagaggggaggccaacagcttgttatcattaaagcggcgatgctcgctctgcgcctgaactgcaggccgccttgttactgcgtttgcggaggcaattgtaccagatgttggcaactatcttcagatagatgacagacacctgctgttgaggaaattaagctcctcattggcctctctgatttgggggtggggaggaagaagcaagaaaaagtgacccttccagatagcccatgggacaggcactaacccaagagggtggttggagcttgccagatgggcaggccagctcagctcctggtgtcaaagacccaagaagggcccacggggtgctggtggaaagatggagaagtttgggaggaatctaattcaggctgggaaagtacggagctctgcg

SEQ ID NO: 176346 - DNA, 503 bp, Homo sapiens
tgatgccatgagactggatggaatttcatacagcacagagaatgagacttataataggacttgaggaattccattgtgaagacactattatttttaatggaaggagtattttttggcgtccgaaatatcagaaactagatatagtaagacacctctcaatcatatgtcatgctttagtgccaaatagaaataaaagttatactctagtacttcaaccaatgaatcaaccaaaatatattgaaatattgtgctgagttacagaagggttacaaagaatgaaagagatggttcatgctctcaagaagttttatagtttagcttagtagtcatgccacataatgctaaaagaataaaaatacaagaccataactggtcagaacccagtgagtgcgtctgaaaaaaaaaaaaaaaactctgaatttagagaacgggaatgaaaacagttttctcacatgagatgggcatgaaatagattgtaaaattcagagaggcagagtgtgaaa

SEQ ID NO: 176347 - DNA, 236 bp, Homo sapiens
ctggtattggacgcaggcatggaggttcttgtcctgcccatgctctcctatcctcagcaggaggctcctccaccctccaatggcccacagtgtgtctagcacaggcttttaacttgtaaactccaagccattgacaagcatggcaataaaacttcattgttcccgatggcagtagtctgtttttctaacctttggcttccctttttcctggtacatttatacatctggttctggta

SEQ ID NO: 176348 - DNA, 1055 bp, Homo sapiens
agcgaggttgcctggagagagcgcctgggcgcagaagggttaacgggccaccgggggctcgcagagcaggagggtgctctcggacggtgtgtcccccactgcactcctgaacttggaggacagggtcgccgcgagggacgcagagagcaccctccacgcccagatgcctgcgtagtttttgtgaccagtccgctcctgcctccccctggggcagtagagggggagcgatggagaactggactggcaggccctggctgtatctgctgctgcttctgtccctccctcagctctgcttggatcaggaggtgttgtccggacactctcttcagacacctacagaggagggccagggccccgaaggtgtctggggaccttgggtccagtgggcctcttgctcccagccctgcggggtgggggtgcagcgcaggagccggacatgtcagctccctacagtgcagctccacccgagtctgcccctccctccccggcccccaagacatccagaagccctcctcccccggggccagggtcccagaccccagacttctccagaaaccctccccttgtacaggacacagtctcggggaaggggtggcccacttcgaggtcccgcttcccacctagggagagaggagacccaggagattcgagcggccaggaggtcccggcttcgagaccccatcaagccaggaatgttcggttatgggagagtgccctttgcattgccactgcaccggaaccgcaggcaccctcggagcccacccagatctgagctgtccctgatctcttctagaggggaagagcctattccgtcccctactccaagagcagagccattctccgcaaacggcagcccccaaactgagctccctcccacagaactgtctgtccacaccccatccccccaagcagaacctctaagccctgaaactgctcagacagaggtggcccccagaaccaggcctgccccctacggcatcaccccagagcccaggcctctggcacagagcccccctcacccacgcactccttaggagaaggtggcttcttccgtg

SEQ ID NO: 176349 - DNA, 301 bp, Homo sapiens
tggaagtgagggaaaggggaccactgggaggggcaggggaagtgatgagtaacttctgctttctgagaagttggtagtcaggatatgggagccggctgggggcggagggcagtgttgcaacaccccctctggctccagtctgacgtccctcccctggcctttggtttgcaggccctggctgtatctgctgctgcttctgtccctccctcagctctgcttggatcaggaggtgagttctggacaagtgagcagctgcagcctgcctgccaccctttcatctccccctaggctcccaccccat

SEQ ID NO: 176350 - DNA, 356 bp, Homo sapiens
ctgcagtgtgtcacttagtataaatatctttgtgggaagatcttctaatattagggtacctctgaccgtgatgtcacttatcctgatatcctgattgtagtgtgtctgaattcaggagaatgtcaggtatatgttagtacttgacagaagttaggtagtgtacttaccagcagttgccctcaggtttagttgctattcattaaatgagataaggcttactaagagatgtttccccctatttatttttcagtttactgttagcctagcccaaggccatttttgttttttagtgtatgcaaaaagatatccttaggagtgttcactggatagtagaatatgttcaagttacaaccatt

SEQ ID NO: 176351 - DNA, 412 bp, Homo sapiens
tcggggtgtctagaggatcccggtatccgtacagcctggattcataccttggtttgccacttaaagtatgcctttggcgagttacttctgtatgtcacagttcctgtatctctacaatggggatagtaatagtagtacagtacttacctgaaaagatgattatggggattaaatgagatcatacatgtataaatgttttatagtgcctggcatatagtaaggattcagtaaatgttaaacattattgctattattaactcaaacagatttatgtttgttactgattaagatcatattacaagtactttttaaaaagaagctttttagtttgatatatttacagaaaagtagcaaagatgatagagatttccctatacccagcttctcctgatgttaacatcctctataacca

SEQ ID NO: 176352 - DNA, 484 bp, Homo sapiens
tcatctagaggatcccgatatgcgttctcagctgtgtcgcccaattttacatcaatgtgaatgacttttttttctgcaactcagcagatacacagtttgtacaatatctgtcagagaggaatagaaacagatcatgcaacacagagatggaggtggaggtggacaggggatggaggtttttagattaagaggtaaggggtgaagcataacatcaagccaaagccaagccaaatcaagccagcaacaaagaaatatcccatgttttctagaactcgtggagaatatttgccgcaaacgataaaagaagtctgctcaacagtaacccaatgacaaagagtgtaagcagatagtacaaaaaccaaggatgtttttatagatattatattacggattttgttaaagaccagagtgttctgaatgtgttaaattcctttaggtgagacatccaaaattttaatattcaaatcactgctacagacaatga

SEQ ID NO: 176353 - DNA, 243 bp, Homo sapiens
caatttcattttcattcagttcaatttattgttttatttcctttgagacttccctttgacatatagattatttagaagagtgctctttaagtttccaagtgtttggacattctcttgtcttttttctaatattaattcctagtttaattccattgtaatcagagaacacactcggtatgattttcggttcttttatatatattcaggtttgtttatagccaatatggtctaccttggtatatg

SEQ ID NO: 176354 - DNA, 378 bp, Homo sapiens
gatccctcgcttacgcgctgtcacaatagggtcgcattcctgtgagaatcgaatgccgctgctgttctgacaggaggtggatatgctggctcactcgcctgccgcttgcctcctgctatacagcctggtttctaacaggccacaggctggtaattatgctcagcccagacattgggcaccttgctgtaaccataaaccaaggagaacgtgacatgtgctagagtggaaatacaagatactatgaaagcacagatgagtaaggttaatttcagctgagtaggtaggtaaatgtaggtgtggcctgtgaactagaacatgaagaatgattaggattttgtttgttgaggatacaggaaaatgtttcagaagagggaaatt

SEQ ID NO: 176355 - DNA, 499 bp, Homo sapiens
tccaacgaacttcattaatgagtatcagcaaagaatgaacaccaaaataccgctcaatccaactttcatcgtgaattcttgaattcacagtaggatcattaaatgtgacggtatcactctgctataaaaactatttccaaaacaaaacaaacctatctaccccctttcttgatttaaaaaaaaaaaaaaaagaagaaagaaggaaaatttgagggtttttgcttttttcaacttcacataccggtttgcctttgcaaaaaaaaaaaaaaaaaatgtttagtctcaaagtatagctgcaaggtggaccggctgcacgggtcccagagggccgctcgcctccgacggtcgcagtttcagccgggccgcgcccgcgagaaacagcggagaggccccagcaggcgggcgccgccggacaggtttaccgtccgcgtcggccccggggaaccgctccctcgcgcccgcagcacttgttcgcggcgcggactccacaccgcggccg

SEQ ID NO: 176356 - DNA, 337 bp, Homo sapiens
gctcacttgtgacccaaacatgttccttctcccacccaatgcacccgagtttcctcacctgtaacgtgaccagagttgggcttccaaacattttcttccagtgaaattttacatggaaacttgagctgtggaagagacagaaggctgctgtagtgaggtgggggtgataggaagaggactgggaacccccttttcttataccccagatatccctatggctcccttgagctcagtcagaaagccacatgtggccttactgcttcttaaatttttgtttgttggcaaggaaaggtcatttttgaaaaaacaataaacgaataacaattttaaaatgaaa

SEQ ID NO: 176357 - DNA, 645 bp, Homo sapiens
ctctgaacatgccacaaagggtgaatgttccatccagtcccacgattctggaattctatgtatacttatgtacctcccacgcctttcctccaggacacgcacacacagagcaaagtcttcctatagcgggccatgatgctgcaattgcagagtatgtaagtgtatgtgtaggcgtgtgtatatttgtaaaagcagaagtgcacgcatacgtgtgtgtgtgcatgtgcatgcacatgtgtataggggcatgcgtgtgcatgtgcacacagaaatatgtaggctttcaatacatagaacacgactttcctttcagacctttctttcttctattgcctgaaagtataaaacctgaaataatgtggatagtttgaggaaaccaaggatgtttctagagcctggcttttcataggctctagaaacagagctctgtctgctctaggtttcgagactggttaccgttctcagatccaggagttctttagacgtcatccagttttccttgctatgtgctgtgaaattacagccgtgccatcagtagagggctccctcaaccttagaagctggtgagaatgcttgaaggccacgcaatgtaaatgggagaaaaatgcagatctgactgtgaattttaaatccagtgccctaaag

SEQ ID NO: 176358 - DNA, 408 bp, Homo sapiens
aatctccctaacctgccctccccctgagccccctctctacacacacacacaattcaccatttaattgccttgttgctttagcttcctggagacacagccacagagctaaatatagctctgtccttcccaacaagcaatcctttaaaggagctaaattgccttgcttttttacttcttaccaaaacttgatctcaagctttataaaagagaaaaactaaaggccttctaccatagaatgtttagcaatcgacatgctgtccattgcttgagaggttttgtgtactggcacttaatccttgcttcagttacaacccctgtagggaaatttgagtcctgtacacgggttcttcattcatttctgagccaagataattctaggattaccatttagaaaattgggagaacaga

SEQ ID NO: 176359 - DNA, 159 bp, Homo sapiens
tgctgggattacaggagtgagccaccgcacctggccctgtttctttcctcaaatgctaagcctagcagaatgcctcctatacagcagatgtcagtcaatgtttgttgactgtttgaaaatgtatgatcttaggctctggaaccgcagttgaaagacgca

SEQ ID NO: 176360 - DNA, 290 bp, Homo sapiens
cctgtgtggcctgactccaaagcccagtctcgatccccatccattctgcttccttggcttggcaagagtctgtctgcagactgcattcattaagttataattactttacttgtccattttttgagttggtgagaggcttatgtcccctccagacagagctattattccctatgatgtactacagttcccatttgccgatgccagccaatagcaggaacgtttttttatttttgtttctggtatgatctttctatagagaagcttacattttcaataggttttaacacatt

SEQ ID NO: 176361 - DNA, 140 bp, Homo sapiens
acatgcagtgtggacaaactggacagagggagactcacgtcctggacaagatgcagcaggacagtgtgggattgaagactaaagaattgtctggaattttccacctaatctttttagactgcggttgactatgggtcact

SEQ ID NO: 176362 - DNA, 783 bp, Homo sapiens
ctcagcactctgccacagcttaggccgtcagcacgagcagatgccccattagggggcctgagaactgagaacggggactgtaatctgctatttctgtccatttgttgttgacccaggtaaccaggaaatatgggaagcaggcagattctggttgtttccacaggagttgagacttaaccagacaactaactctcctgagtgttccctcttgggtgggcacaccacagttcaccccgtagtctgtggtagactcagcattagacacagtgctggtgcttaagaaaagtttccatgaacaggcagtgtgcttattgagtgccagctgtgtgcaaggtatcgtcccaggtaccgaagaggattccaggacaaagtttcctgtcttcagggaactgtcagtcaagtggatcaaaagacacatgcctgtgtgatctacaacccagtggatcataaggcacatgcctgtgttttctttgaccctcagaggaacaaaagtgtttttatttgaccctcagggttttaaaactttataccaacatttaaaaattggctaccatctatatggaaaaaaaggcagtgtgtgcttgtgtatgtgtatgtttgtagggtgtgtgtgtgtgtgcgtgtaaggcagcactgcagaagaacccggccacagtgatggcctcttcaaatagggaatcggggagcaggaatgggtgagagacttgttgcaatgttttataatttttttaaatgtaaaatgtaataactttacaaataaaaaaggattggggaattcacata

SEQ ID NO: 176363 - DNA, 214 bp, Homo sapiens
gcttattttgaaaataagtagtatggaagcatctcaagcatcttatattttatatgtaatttctatcttctaaaaagtttttgttagatgggcattgagggcatgcttagtaaatgttgaatagtgataatagaatttttgccttatattttcatgagaattagaaattacgccattttaatcccaagcacagttagattagtacttaacaaaa

SEQ ID NO: 176364 - DNA, 789 bp, Homo sapiens
gaccaaggggagcacctcggccaagcccctcatcttacccgagggaaactgaggccccggtcggggttgggaattgcacccaggaacaagatcgggcccctgtgactccaggtcttctgatcactgcgcttggcccatgcgagaaacctattgtgtttgttttcacaattaaatttacttcaccagagttttctttctgaagccgctggccccagagggcagcctgtgtgtgagagttgctgcgtcctgcatggatgaccttatttgtggacaacaggactgccaagaaaggaccctcaggacacctgggtgttttgagaatggttgctagactctccaagtagttgacttctgaattgcacaagtaagagacaggcagctttggcagggcacagtgtgttccagaatggtccatacgatgaaacttactaaatcagattggctgcagatctccaggtatgggtaagtttcttcaccttctgtgtccctggagaatcaggagtccctgcagccatcacctagcccaagtttgcacatttctgttttcagagtctacaattgagggtaggggccagctgtgggcttgttacggaagagtcattccccaaaataggaaaggagctgagagatggcaatttggaagggcgggcctccgttatgcgaagcggcagcagaggggtctgttgggacctccctgaggaggccgccctgggtgaagctgtagtcaatttggggagagggttttaccccaggcaaagaaaagggctgggatgaggcaggagaggaggg

SEQ ID NO: 176365 - DNA, 499 bp, Homo sapiens
ataaaacacagactgtatactgggaaaatttataaactgggatcagagaaaacattttataaaacaaattgcacaataaaaacataaaaaatatgatgcaggctccctggtctgagtgttcatattggccaaaagccatgttcagagttcttattctccaattggatgttcctgcagatggggcctttgagagaatttggtcatgggtgttgactacatatgaataagactggtgcttttatttatattttttctttctttctttctttatttttgagatggagtttttctcttgttgcccaggctagagtgcaatggcatgatcttggctcactgcaacctccacctccagggatcaaatgatcctactgcctcagcctcccatgcagctgagatttcaggcatgttacaccacacccaggtaatttttgtacttttagtagggaaagggtttcaccatgttggccaggctgctctcaaactcctgacctcaggtgat

SEQ ID NO: 176366 - DNA, 372 bp, Homo sapiens
  misc_feature (88)..(89): n is a, c, g, or t
tattttcataatgttcttattcgtcccaattggattttacctgctaactagccctatgtacataatctttgtccttactttttccctnntttttaaataagactggtgcttttatttatattttttctttctttctttctttatttttgagatggagtttttctcttgttgcccaggctagagtgcaatggcatgatcttggctcactgcaacctccacctccagggatcaaatgatcctactgcctcagcctcccatgcagctgagatttcaggcatgttacaccacacccaggtaatttttgtacttttagtagggaaagggtttcaccatgttggccaggctgctctcaaactcctgacctcaggtgat

SEQ ID NO: 176367 - DNA, 339 bp, Homo sapiens
aggccattctcctgctcagctcccgaatagctgggattacaggtatgcgctatcactcccagctaatttcgtatttttactctgtatgggggatctccgagatcccccatacagagtaataggtgatccagatgtacttacaaatcctatcttaacaagctttaggaattatagtggtcatatattgaagttgggtgggagtctcacaccaggttccaagggagattacaaatcactaattaataattaagtcataatatctcttctatcagtctcgggtttcttgttttctaagttctgtgctccatgggtttattatctgtactctgcttacacagt

SEQ ID NO: 176368 - DNA, 436 bp, Homo sapiens
ccctcccagcttggaatacatatcagagtcattaaaaaacactggcattcctgaattcaagccctttccttatgcgccatcctttgagctctcacttcaactagattgtgttttcttgcagcatctctctaggtggatccatgctaccagctattgtatttagtttttctttttccaagtgagatcaaaaaggttaaggcatgacttctttcatattcagcttcaataaaatcattgatgagatcttttagatttaataagaattctaggttttctgccctgcatctcaaagtaagctcatttgcataataaaaatatttgcactccgacaccaccaattactggctcgggacaagttactcaaatgctttcagccttagtttccttacctgtaaaatagagataataaccacatagtgctcccctgaaaataaat

SEQ ID NO: 176369 - DNA, 379 bp, Homo sapiens
agttcctgggtctctaccaggattttccaggtcagcatcgagtgatactatctctcctagaagtggtgggaactgatgggaatgaccatggaagctgaatccacaaaccaagggtctccttatcttgtcctctcatggataaggcttcgtaaaggggggattcctcaaggtcttttaaccaagtctgcacatgggagaaaacgatggaaagcagatggaaatgcttctcaagaacctctcaatacaaagagataaagaggaacaggccaggcacatggcacacacctgtaacctcagcactttggaaggccaaggagggaagaccacttgagcccaggaattcaagaccagcctgggcaacacagcaaaactctgtctc

SEQ ID NO: 176370 - DNA, 129 bp, Homo sapiens
agggcctgcttgattttcctacctaaactagtcccaattttgctgagtaaatgtgaacctaaacaaacaccaacaagccttagcaattttagggctcttaaacaatttagaaattatgtttatcaagac

SEQ ID NO: 176371 - DNA, 345 bp, Homo sapiens
gatctgatgcctaattctggttcagaaaagcccctgggactttacttaggcaccagtttagtgcctggttttcccagctcccatgaaaggggataaaacattgctttgatcaatatctctttggtaatggtttgcttctctttccactactctcctccatacccacatatcacatgccctcagggatctccagatgatatggtcttcttgagatttcttgccaatacccagacatcagaccctcctgtcattccctttaccacctggattagccactgtggtaactggaggcattctgcccccaggcctttgctgtttaagggtttcaccaccagagggtggtat

SEQ ID NO: 176372 - DNA, 773 bp, Homo sapiens
tacccaggcccagctgccgaaactggcctgagatcaactcctcaaaagctgagaaggactctggactggccacggttgggagatggcttccaaacgccatctgaacaaggcgcgtgctgtccagcttagaacagcagccaggctgggggcactggtagggccagccaggtaggaagcctgccagggagggggtttgcttttcttggctccgactggtaagaaaagctgagaaggtatcaccaaggaaggagtcgggtgggagttctccaaagtattcagaggacggcgactcctggtgccaacaggaaggtctgggccatgtctggggactggaatcaccatcatggccagcctggggtgttgtgtgctcacccaaatgggcagctctgcagctgcactgacccacccatgtgaggggctgggggctgggacaaaattatggcccaccccgtccaggcagggctgggccaggatcagggagggatatgtggtctgcccggcaccccagggagctggtgggtacagctggggcttcaagccaggtctcctgacatggaagccacatcttttcttcctctgatttggaaggaaagagacagtgctgtgagtctgcaccctctaagagtgtggaccctatagctggacacaggggacctccagaggccagggtgtgcgtgaggcctggatctgccccttcctggttctatcacctttctccagtttactcaactctaaaacagactcctatttcccagtggtggtgcgaggattaa

SEQ ID NO: 176373 - DNA, 327 bp, Homo sapiens
ggtagacactgactgagctttgtccttctgtccccaagacctaccccaccgtgggcattgctgaacttcaggatgtgattctgtgcttctcccatggcacccaacctttcacatgccactggggaaagaggtggagaacctctctcactgagcagcctgtgaaagtgagagggagggatgcagttttataaggttggagcaaccccttcaacactggctcccctatccccagtcctatgcttcagggtaccataaaaatctcaggaggactatagagtttctagtggcaaaggatctcagtctaggtcctccttgccaagtgctcaa

SEQ ID NO: 176374 - DNA, 428 bp, Homo sapiens
cagttgtcccttcctgtactctatactattgtagattcatatcttcatatgccttgtaacattttcatgcggtctcaaaagggagagaatcacatgtgatctgttatcctctttattcagaatatcttgtttcttcaacctgtgttttccacttgcatcttttttcccctttgaatctatcttcaactctttagtttatgtataatagtaattgattttggcatgggcagttagcattataccttctgtatgcccataaggagtgacctgaccaagggctcagagctaataagtagcagaacaaataaccctctaaatctttagacttttccattgtattgtattatttcctcatatccatttattctgtcttttcaaagttctttgaattattcctgtatttgttctgattaaagatttctttcacc

SEQ ID NO: 176375 - DNA, 163 bp, Homo sapiens
attctacaaatgtggaatcatagcaaggcagcacttctttcatttatgtggggatttatactaatagacattcatttagttaggtagtcaaccagtgtgtactgagcacctgctacatgccaggcactgctgtcagcactgcagacccaataatgagtaagat

SEQ ID NO: 176376 - DNA, 506 bp, Homo sapiens
catgtgtgtttatgtgtggcggggatattagtgccgaatcaaacagttttaagttcatagggttgtcctagttgtgagctaattttgaagtagatgctgtggtggttactgaagctacttgatttacttctcatttttattataatgtgattaacacacatggggggggaggggtgccatttgttcctctttacactttccaagtgtttgtgtgttggcactaaacttgtttcctggtgtaatctgagctctgagaattgccaaattacctaaatctccacacattttaacacatttattttctcccaaagcattaagtttttgttttatttaaagtagcagtattcctggacatgtggctcttattttgcatggacagcttatgatgttccgtgtgtaactagtttgtgcatttctgtttagctcggtggatttgccttggacaaattagggacaaggacattgtgggacagcaagaattccaaaagaaccccggattaaggcca

SEQ ID NO: 176377 - DNA, 627 bp, Homo sapiens
agtcggtaccgaaagatctcgtgcatttgtcaaaattggctttttaagggtgattaatattccattatatgtatatgccacgttttgtttatctagtcttccatccatggccatttggtttgcatccaccttttggctattgtgggtaatgctgctatgaacatgggcatgcatgtgtatctttgagactctgctttcagttctttagggtaaataccgacaagtaaaattgccagggtcatggtctgaaagtatttctgtatatatgtttgttgacacttcagctgggtttttaccatttcttgactttggaaaggtctgaaaccccagagcaaatggcaattctaattgattagaaaactggatttttccttaatagattttggaagatttaggagggtagcacataaagttcatcctcccttttctcaccacatttgatgtgaatttgctacctctcagaaaacaaatttggtctctgaaataaagcagatgttttgaattctcttatataaggaaactgattttcctacatgtaaatttttatcttttaaccatttttatttaaaacttgtgacctacatttttctgtttcctccctgaagtctttgttagtggtcattttgg

SEQ ID NO: 176378 - DNA, 713 bp, Homo sapiens
aaggcattataagacttatgtgagttaatgaaggtataagcacatctaatactgaacctttgtgagggtttcttttatcaatttatttttaaatggactaccaaaaaaggcctaaaatggcctaaaaatagacttttgagaactaagaaagcaaaatgtagttccaacataaaattaccattgccttcctcatcctataaccaataaaaattcctttgcaacaaatataattacatggaaaatctctgtagagaaaaatgttatatccttaaataccacttaacttcaagcatttgtttaatatccaaactgttttaaaaaaataacaatgccagagaattttctgtaagagaatcttcccatttttgattgggtagcccgtcagatgggagaataacaggccagtgatggacagctcctaggcctgtggtcggtgttaagaacacaaacttctccaaggcagggattcaggaaatctgtaagtcttttaataccttacattgtaaagtaccttttgatgtatttataactgaaaaaaaattattcaaacaagaacagagtattatggtacaaagtctcttataggtcactgggaatagaaaaaaagataaattctttgcttatcaagcttaacaatttacaaataagcaatataatttgtataagagtcacaaattgtgctaagggaatccagagaagtaaaacagaaaaca

SEQ ID NO: 176379 - DNA, 524 bp, Homo sapiens
cattcttaagaacaaatcttagctattgatcatctcaatcataaactcttcaagatggctccctcaggagcttccttaaaacatctcatcctgagttaaaactatgccattttgaattttttaggatgattagcttcaaagtggacatgcacatggaaccagtgtgatctgttgcttaagtttatttagtattttcttgttaaatgttgggtctaccagatataacatttttagaacacattaatgtagctgataatattgtatctggtaatactggccaactgtttgagcctctttgaagtcttcagtggtttgatcaagataaaaccatgtcggctgggcgcagtggctcgcgcctgtaatcccagcactttggaaggccgagacaggcagatcacgaggtcaggagatcgagaccatcctggctaacaaggtgaaaccccgtctcttctaaaaaaaaaaaatacaaaaaaattagccgggcgtggtggcaggcacctgcagtcccagctactcgggaggct

SEQ ID NO: 176380 - DNA, 388 bp, Homo sapiens
gtgattgctttggtatggagctgaagatgagaggaagttgatggtgacttccagatttctaacttgggagaaaggaagggacatgggttcaggcaaagaaggaaaaaatcaagaaatcatcattatagtgtcaagtattccttctgccactccttctcttcctcaatctctgtctccctccacaccagtctcttcgcagggctccagcctgtgtgaggggctctgaatgctggtgcctgagcagtgagggcagcaggtatcagatctccaggctttcagcttcccaagaagagggatgcttgtgctgaatgtggctggaataaccaaggcaggttgggaccagggaccttttactggaatgtttgcacctggacagagagggtccagg

SEQ ID NO: 176381 - DNA, 454 bp, Homo sapiens
agtattcacaacacacttagaagtggagaaatgaaagtagacattatgatcctcctttaaaaaagatatccagtgaggaaattgctgcacaaagaaattaaggaacttccctaagggcacacagatcactgatgaacagaccaatgttcaacatcaggtctgactgagcccaaatcctatgtgctgccatgcctgcattagggcatactggggtcagcaggggcctctggggcccagaattgctcagtggcccaggatgtcccagtgataccttaaggtgggctgtgggctcctctgtacttcctgcaccgctccttcactttcacatgcagtctttcagaatcctgtactccgctagttaatttaaacatgtatttccacttatgagttaatgattattgtaataggtgatgtaaaagatatatccgtgcacagtaaaaattcaaatgctaca

SEQ ID NO: 176382 - DNA, 357 bp, Homo sapiens
tgatgaaagaatgggagagagagaattattataactaaattcgatgaatgaattaatgagtatcaagatctatgctcagacccttgctgtaagatggctccatcaaaggcctgccccccagtggagtttctgcctcaagaacactagtattctttcaggttgtcaggccaggaaccttggtcttccttactccacctttggtagaacatccatcttcagtccagttggccattccttcagcgtgatgttggtgggcccttgccctccattctaatttcatctctctggtccaggcctccatcactttgtgcccatcttaatgcagttgtctgtgtgtgtcccagtctccagtctctt

SEQ ID NO: 176383 - DNA, 263 bp, Homo sapiens
gtctgtcagatcgagtctagacgatccccaggtgttgctggattccaatgggttgtagcaataaatgattgtggggtgggggggtttcaagaagtgcagccagtgagtatacatgccactgaagtcacctggctacagagggaaggacagtgtgtcgtgccagaagagaatatggagttaagggttttttgagttgtttgtttgtttgttgagacggagtcttgctctgttgcccaggctggagtgcagtggcgcgatctcgg

SEQ ID NO: 176384 - DNA, 309 bp, Homo sapiens
ggctaaaaagcatcacatatgttatccgtattgaggcgaatggcctctcttactagtttcaacggcatggcaagggtggggggctggattccaatgggttgtagcaataaatgattgtggggtgggggggtttcaagaagtgcagccagtgagtatacatgccactgaagtcacctggctacagagggaaggacagtgtgtcgtgccagaagagaatatggagttaagggttttttgagttgtttgtttgtttgttgagacggagtcttgctctgttgcccaggctggagtgcagtggcgcgatctcgg

SEQ ID NO: 176385 - DNA, 207 bp, Homo sapiens
gtaatctagctgaatgcacaggaggaagatgaaacagtgcttgattgaaacagcacagtctctgccgtggacctgaggccccacctactcaaccattgaagctgctgagttgtgctggatgcaaattaacatccggtgactaggggctcctacaatgtgtccttccctgccttaggtgggtcttcatttggagcttcctgctttcct

SEQ ID NO: 176386 - DNA, 122 bp, Homo sapiens
caggacattttagaagtatacaaaatagacaagtaatataatgaaaccttggcatcaccattaggcttcaacaatcatcagtgttttgtcattcttattttatctatccctctacttttggg

SEQ ID NO: 176387 - DNA, 271 bp, Homo sapiens
aaggttagggtgatgtggatggtgactttccagatttaaagggaaccatgcaagtcaagccctgtggatggctacttttttcatggcagataaatagcagttctgtggcagccgctcatcgccagagtccatcaaggtcaaagtatgcttctcaatccacacatcctttcgctatgcagaggcaattgttgaaaccttcaagggtaaataatactctgcattatcaagactatgtgcaatatttcatcaaccgtagacaacccaccgcatc

SEQ ID NO: 176388 - DNA, 418 bp, Homo sapiens
gcccagtagggaggtctccgaagaacagatgaaaacaccattgagaaagaggaggaaccttcagaaaaccatcccatcaagtgtgaactttctgcattttttttcccctgtcctttttcccatttgcaaagaggaggaggtgagtgaaaggtgtggctgaacacacctcccacctgagtgtaaagtggccatcgtcaactggccctacctgaggaaagagagaatattcagctctaaattagttttggagacttgattgttattaatacataggagtgggcattctaatgattaaatcgaggctctgtctcctgaaataatgactctaggactaaagtgggaaaatcttgggacctaccagcgttttaatctagccaaaaggtgaacatttcctcattgaatacatttttcaaactta

SEQ ID NO: 176389 - DNA, 303 bp, Homo sapiens
gttaattttttgtgatagcttgagatataattcacatattatacaatttgccatttaaagtatacaatttagtggtttttaatgtattcacagagctgtgcaaccatcaccgcattcaattttagaacattttcctcaccagcaaaaaaaaccctgtagcctgtagcggttaacctcttcccatttattcccaccagcccaggaaaccctcagtccactttgtttatagattcgtctgttctgcatagtaatataagtcaaatcataaaattgttatcttttgtgactggtttctttcactta

SEQ ID NO: 176390 - DNA, 576 bp, Homo sapiens
agctgttattgttgttagtattatcacgaagcttatcttatgtgtccagttctggtccacatatagtcggagatgaaaaatgagaaaaatgaatgtgccatatctgtgtcaaggacctttatttgctaatagaatttttttaactcatttgttagaaattgtcagtaccattttggagtaacaaaattagcagttttgtttggcttaacctaataattactatcataaaaccctctttctacctttttatgtctttagtgtgtgtatatgtttataaaatttctgaagtttgtgtacatttgcacctatctgtgattgagtaatacatgagtgtaacccctttatgtaaacatacatcaagttgtttctaattaatgcatgtttttggtaaaggtagaagcatttggacacaactctagctgataatatgtcaccttaaaaattttttcgtataaaaaatgaaagtaatgtatacaaaatgcagttgtattcagtaatatagaggtgtctaaaataaaactaacaatgacagtctctgccactgccatggccctattgtaaccattcttagcactg

SEQ ID NO: 176391 - DNA, 367 bp, Homo sapiens
gttttcaagcttgagtggcattagaatcaccttgataaaacacagattactgagtcccgccttagagtgtctgactcagtaggtctggatggggtccaagaatttgtatctaacaagtttcctggggatgctgatgctgcttggccccaaaagtgggaccacacttttggaaaccactgtgtaaaatcacatggtagcataggaaagggaagaagaggagagcctggataattcataaactggataatgagcccctagttacagacagatgtgtgaaaagatgtgttctaaatcaggcaattcaggccgggctcagtggctcacgcctgtaagctcacacctgtaatcccagcactttgggaggcag

SEQ ID NO: 176392 - DNA, 772 bp, Homo sapiens
taaaaaatagaatctgctcagccctcggggtgctgctctctgttactatcctcatttttatgacggcgaaactgaaatgttacggagattacgggaagttgctgagctgcgatgggaacctaggcccatctgagccctgagctggagtgctgagtcaccatgccatgtggcctccctggccaatatctatttgctggaactctattaattggtgtgtcgggacatctgtggtacaatggaaattgatgtttgtccagatgacattgagatccttttacactggggtttcagaccctgtggagaaggggagggtatttgcagtctcctgggagcatgttcagtggcaggatgtgaatttacagcaggagaacaaaccaaaaattctgtcatttccaatttataataaaaattcagaaagtggggaaggacagatcttctgggctgatagggcccagagaagcacgttgacagggcatgtccatttgtcaaaagagactcgggcgctggtattccagagttttactgatgtggattttgtggtacaggactcagttcctttgggaattgctttgtttgttttgtgtcctgagcctatccctgctccccagaaaagtgaatgaccagctgatcctgcttctccaagccccagcagagagtcccagccagccaggccaggcctgagtctcagcagtaaagagtgctgccgagggggcctagagggcacggtggctgttctttgcatccaggcggtcagctggcgggaccccgggag

SEQ ID NO: 176393 - DNA, 511 bp, Homo sapiens
gcatgttccacaagggtttcctgctccaacttgggccctaagggattgattaggttggctaggttaggtcccctttatgacaaaaccaaaacagaattgatgcccccacccgtcaagggcacttaaaaaaccaaaactcaaagttcagggccaagtttgaggatgtgcagaaaggtgtgtgttttttcttgtcaattgcgactctaatgatggactcacgttgcccgctcttccctttctcttacaccttacctacctactaaaggaggagttcttgcttggtaagtggatataatccgcaaagacatgagagaatttattagaagccactcaagagccttagctaccttctacaaggggaaaaggacacacacaaatatctatagtgaccctttttttcgtttatttttggtcagactgtttaacttccattttttttgtcccctcctttcttttcccctttagttgaaaactgctaaaatgtcagtttgcgaccttgactttatattta

SEQ ID NO: 176394 - DNA, 352 bp, Homo sapiens
ggataaggttaagcaaagggttatgaataaattacagttggtctcccatatttaaaaagtactagaatttcattataatatttcattgctccattctggtcagaatcaaaataacatgcaaataaactgattaagcataataccccaactgccttaacagcacacatacgacacccgctgatcacacagacaggtaattgtcgaatcaagcacaaaatggatcaacctctgtccttcaaagaaaatttaactgtgtggaacaccactttagttcccacaactgcatgatgcaaacagtgtgtcttagaaatagtttcaaatacgaggctctatgctcaataattaacacctc

SEQ ID NO: 176395 - DNA, 179 bp, Homo sapiens
atgggagactgcagagatagcaaatgcagaccagactcttaggaaggcagaaagggggctagaaaaagaattgaaggaaagctttcttcagatgcttaagattttgtggccaggtgcagtggctcatgcctgttcccagcacattaggaggccaaagcaggaggattgcttgagcccag

SEQ ID NO: 176396 - DNA, 516 bp, Homo sapiens
gcgcgtgttgtttaccagcagaatattggaatagatgttttctagttatgcacttagcaacctccctaccagcacatctgggtaaatacagatttctttaagtgctgttccttagtaattgtttttcattttgtttaaaaaaattctcaaggagtggggaagcttacattatagactccctggaaagtcttcctggtctgcatcggcactccgttatttgagggtaccatttctaggtagccattgaaggtagtgctccgtgagtcatcctttgagccttctcatgactacagcagcgctaaggcagcaccttccagaaattctctaaagggttctgtcagattctagtgttggtcctaagactaatttgaactggtgcttctttagaactcagagtttacagagtattattggaaattggaaggaactagacaccgcagtctggagacacttactggctgtgaagtgtctttcagtgatgtggtgttcctgtaaactacaacgcgcggctaaggt

SEQ ID NO: 176397 - DNA, 390 bp, Homo sapiens
acacacacacacacagaggaatggaattgctggatcccatggtaactctgtgtttaatcttttgaggaaccaccagactgttttccaaagtggctgcaccattttacattcccaccagcagtgtataacggttccagtttctccacgtcctcgctaacacttgtcaaactatattttaactataccccacaataagaaatattttacattcctactcagtttatacacatacaaataactgaaacaaaaactttagaaaaaacctacctatactatgtctgatgcactttgacattttcgattgcattctgttctttttcatcaaaacaaacatgttgcttctgatcgctcaagttgcttttacaactcactaattgtgacctgcagcta

SEQ ID NO: 176398 - DNA, 507 bp, Homo sapiens
tgttgatggggggatccacggtggtcttctcagaggatagagtatttcagttaaacttgggaggtggagcaggatttgatagggcagaagggaagggggtacatcacaagcctaggtgagggcaactggtgcttcacacaactcggggaactccattcacttcagtcatcatagtgccaatcaacatagtcactatgtggatgtgacaggagaggtttctctttacctctggtcctgcacccctctgagccatcctacccacagccttcagtcattgtcctaaagcctagctctaattccactgcctctccttttgtgcacacacacttctctgcttccctggccgttctctatcttggagaggcatttcaaacgccacttccaccagaaggccttgctactgcaccaactagttactatctcttcttcacccaaatcctggtagcactttggatctcccactttgcacttagggttcaccttccgttataatcacgggccatcaat

SEQ ID NO: 176399 - DNA, 369 bp, Homo sapiens
gtgaagatgatatttgaacattttaaaacactttaaataaactgttctctcctgtttattgccactgacaggagaggtttctctttacctctggtcctgcacccctctgagccatcctacccacagccttcagtcattgtcctaaagcctagctctaattccactgcctctccttttgtgcacacacacttctctgcttccctggccgttctctatcttggagaggcatttcaaacgccacttccaccagaaggccttgctactgcaccaactagttactatctcttcttcacccaaatcctggtagcactttggatctcccactttgcacttagggttcaccttccgttataatcacgggccatcaat

SEQ ID NO: 176400 - DNA, 347 bp, Homo sapiens
ggcatgatctgtaccatggcttgttctttctatctatttccatctatacgttctgagcctctaaaatcttatatgcatagttcgtggtacacatcttttattgagactattgccttgttaatttctaattctagaaacttaactctagaatgtagtagcattactttctcatccctccttatgaaaccactccatagtcaatgctgtactcagcactgcatgatgcagaaaatggtattggagaattcaaatgccttttgcagccttttttctttttactctgtccccagctgcaataaattttcactcttcctcaaacaaatagagcttcatcaccacttagaatt

SEQ ID NO: 176401 - DNA, 390 bp, Homo sapiens
gggagctatatcgcatggggttatgggtgaaatgagctggatcacagttaaagggggggtacactactactttattttatgcatgttttagattctccataattaagaatttattttatgaaggtatgttctgctgttagttggtgagaagtaggggctacataattcttttctgttgtgagaattttactacagtaatctgagtgagcctataaacaacataaaagaaggggcaaaagaggaataatggcattctgtaaggggtatgagtacattccccttctggaatttctctggttaatttaaaagaggagcttctcaactgtgaccctgatgcagttcaatttaataggcatctatcctgtgcttacgcagcccattgcgatatag

SEQ ID NO: 176402 - DNA, 235 bp, Homo sapiens
ggacactgaaatatagatccaacttcccctctactttgccatcatcttcttttttaggcaaaaatacctggggtctttcatttaatctttatgtggttggtttccacaccattcctctttcccagcttgtttgaatgaacatgtgtcaacatccctattacccagaatggaaagtgatctttgagcagagcccagacaggcatgtggctaggagtgacccatccctaacttaggg

SEQ ID NO: 176403 - DNA, 134 bp, Homo sapiens
gctatctctaattccttatctcccacgtatttctcaactaattgcaatcttatttttatcgcactactgtaaatcacactattcttccaatattaccaatatgttcctcatctgatttaatctgtcagtagcat

SEQ ID NO: 176404 - DNA, 565 bp, Homo sapiens
ttggatgaagtggttcttccccaggcttcctacaggcctagcttaggagggtggcttcctgtatgctgaggagctcttccttgcagagggtgacacaatatgagtgtgcagacagactggctttattggctgcctggcttgtgcccaaggtcacagggcacaggtaaccagagacctgagaaaataatggctgcaaggcaactccagcagtcaccctgagctccaggcagaagaccaactgtgccaggcccatctgcaccaggcacacacaaggcccacccatcaggctcctggctgcagccacttccccatcaaattgggctccaggagcttaagcaacagcaggtgagacaaggctgcccaggttgactctgagcacttctatgcatctgccttaggctacagacacaggagttcaggccaggctggccaaacaccagagtctttctcttctttttttctttttttgagacaagtcttgttctgccactcaggctagaggcctgatcacagctcattgcagcctagaattcttgggctcaagggatcttcctgcctcagcctc

SEQ ID NO: 176405 - DNA, 131 bp, Homo sapiens
tgttgaaatcctaaccaccaatgtgatggtattaggggtggggcctctgcaaggtgattaggtcatgaggggtggcgcccccactgggattagtgcccttatacaagagctcccagggttcctcccctttc

SEQ ID NO: 176406 - DNA, 453 bp, Homo sapiens
actgctaaacactgtgatagatattattacaaatgcccagttaattttgctagaacttgtataaaaatcaggtatacctgtgctgacattaagttcaggcctcaaactatgcaattaccgtgacgttctttatgggaaagccaagttacctccacatattccaaataaagcctgttcctaaacttgggtcatatagtcattcaacaaacttatttgtcctattttaagtctgactatcattttcagaaacacaaatgtgaactagattatgtgaacatgaggttacatcaagtttatataattactttaaatgcaaattactggtatataaataaaaacaaaacaatttaaggtaactatttctgatgttgcacagtatagtgttggatgtatcactacttctgggagtggcgcctgtacacacattctaaatcttatttccacaaacaagaa

SEQ ID NO: 176407 - DNA, 644 bp, Homo sapiens
gatgaaataagattgactatgtgttgacaaattgtttaagctgggtagttcccactacttttgtatgtatgaatgaaaatttctctattttgtttaaacattaagtatgctagctgaagatttccccccaaaataggaaagctttaaaaaaaaaatatcaagactctgggcaagtcaatttgagcattaaagaatttgctggttgggcaaagtggctcacacctgtaattccagtactttgggaagccgaggcggacagatcacttaagccatgagttcaagacaagcctgggcaaaaaaggcgaaactcagtctctacaaaaaaacacaaaaattagccgagcatggtggcacgtgcctgtagtctcagctactcaggaggctgagtacaggctcaggccaacatgcccagctaatttttaaaaattttttgtagggacaggagtctcactatgttagccaggctggtctcaaactcctgtcttcaagtgatcctcctgcttcagcctcccaaagtgctgggattacaggtatgtgccagcatacctgacctatgcataatatttttttaaaactctgaggaacctttataacctaaggtctgccctaatcacatttcagaatacaacaaaatacagtaaacc

SEQ ID NO: 176408 - DNA, 283 bp, Homo sapiens
tctagtaaattaatcaaaccaaagagggggtcctgggaaacccaacttgaagtccaactggaagttgattagaagttctggaggcccagacttgtaactgctgtgggggaatagccttgtggtactaagccctcaacctgtgggatctgacacaatccccaagtagatagtgccagaattacagggcacccataggaattgattgtttgcttgttgctggggaaaaatacatatttggtcacagaaatcttctgtgttgatgattgttgttgcggtgtgagag

SEQ ID NO: 176409 - DNA, 220 bp, Homo sapiens
tttgagacaacatggatgaacctgaaggacattatgctaagagaaagaagccattcaagaagggtaaatagtttattattacacttatgtgaggtatctataatagtcaaactcatagaagcagagaatataacagtggttgtcaggggcaagttaagagaggtgaggagttgttcaatggttataaagtttcaattatgctacatgaatgaattctaga

SEQ ID NO: 176410 - DNA, 754 bp, Homo sapiens
cgctcttcctcaggcggcggccatggcgggacaggaggatccggtgcagcgggagattcaccaggactgggctaaccgggagtacattgagataatcaccagcagcatcaagaaaatcgcagactttctcaactcgttcgatatgtctgtgtcgttcaagactgtgcaacactaaacgagaaatggacagccctttgaacggagaatagagtacatggaagctcgggtgacaaaaggtgagacactcacctagaacagtgccgtgctgctgctgggaagtggctttacacaacacaggccacatgggaaagggccccagcagccttcagctccttcctttctccttaaaggagcaacaggggcttattctggttttcttttttcaaaaggtgtggccttgggggctctgccatctggggtgtgggtggtatgtgggaacgaagttcagaggaaccgtggaaacgacgttaggcattttaccttttccagtaacatttttatacatctactgtgtcaatgttatttcgagacattcacagccaaaaagcctgggactctttgtgaaggtcctcctcaactctatctttctttctctctctctcaaaatttccttaaagttctcatgtgcctttgaatggttctgtgaacagtcttggtctcttccccaccttgtggtggaaagtgcggggcagtcctggtcaagacactcatgcctggaatgtggtgcagaaatgtgtggctaccacagttctgg

SEQ ID NO: 176411 - DNA, 558 bp, Homo sapiens
gccaccgtcactgagaagctcagcggtagcttttgggaagcaggacgttctcaccaggagagcgtcctctcgagatttctgctccctccattcagggcgtttgggagccaccccttcattttttaaaaaaagtatttctctgtgaccgacggccggggccttctgacggtctgaggtcttgcttgggccagtcacctcctgtcacggtccgcggaggggggaaggataagagggcgaggagctcatcgctcgccacccccgtgggcttcttgggcgcaggtcggagctgggtgggccggctccccggcccctggcttgggcgaccatgtccgcatccgcccagcagctggcggaggagctgcagatcttcggcctagactgcgaggaggctctaattgagaaatggtagagctaagtgtacagtatggacagaatgaggagggaatgggatgccaacttataagcttctgcgccagggcgcataaagagggagcgacctgggagatgctgaactgttgagaacgtgagtttgtggacgcgagatgtggagaagcaaga

SEQ ID NO: 176412 - DNA, 455 bp, Homo sapiens
ttaatcttaccatatatattacaagtttatattttaaaaataaaggaaaagaaatgcactaatacaatgctagtagtcctgtaagccacttctacaacaacaagcaaaattagaaatgcaagcacactttggcccagcagaaattttgcaggtcaggtatgtgaggggtattcattgcagccctgtgatattctgtaatggttaatcacacacacaggagctcttcatgtactgatatggaaagatcagtatacatctttccaaactatactttacattaaataaataaaagggcagatatgtatgtagatataacttgagaagaagaaaaatatgtttttatggatctgtgtatgaatttttttaatttttgggaagaataaacaagcaatgaaaatcactcactaccagaagggaactgggagttaggcaggtgtgggagaggaaagtaagac

SEQ ID NO: 176413 - DNA, 426 bp, Homo sapiens
gggacctccccactctctcatgctccctttcctgtcatgtcacatgcctgctctcccttcatcttctgccatgagtggaagcttcctgaggcctcaccagaagcagatgctggcactatgcttcttgtacaacctggagaaccatgagctaaataaaccttttttctttataaattacctagccttagatactcctttatagcaacacaaaatggactaacacatgattcatgaacattaaatgtcttttcagttatttatatttcccttaatttatttcaatgatggtttttagtctgcagtgtacatattttatgcttatgttaaatttattcttatgtattttactcagatactattgtaaatttgaatttttaaaaattacattttctgattactcacgggtagtatatagcgatggttggt

SEQ ID NO: 176414 - DNA, 639 bp, Homo sapiens
gtcatctttgattccctggtcacatttcatgcacacattttctgtctttctttttctttttttagtgtcaagatgatggggatgcagaagaaggaaagtagagaggattataagtttaggagaaaataaaacatacaatctccacctaaatgtcctggctgttatgacttaggagtgactactggtacagaggaaatagttctggttttcttaggactgttggatcatatcggactcttaggagattctcaggctgcactaaccgtattcacgtttctttctcttcagtctgtcaattgaaggcttctcattattatcactcttaacgttaaaggcattgtatttcataccccttttatgtttaaaaagcctacatatcacctcaaatgatggcaggtgaactggtgaaatctgaactagctttggctttgttattgccctatagttatgcaagcactgggggaagcttcggaaagggtgcactgggcttcttcttacatttccttgcacttcttatgaatctataattatttcaagccaaaaggttaaaaaaaaagttgaaagactatgtaaaagataaatatgtagagacaaaaaagtctagatcaggagctggcaaacttattctggaaaggggca

SEQ ID NO: 176415 - DNA, 168 bp, Homo sapiens
catctaggcagggaggcaaacctcaacagtgcatttctacttagcatagcagctggtcccatccatcccaagcagtgattctgcctaacctgaagacccagcctacagccctgtccaaatacaaacttcaaacagtggtgctacctggccatggaatacaccttgtgg

SEQ ID NO: 176416 - DNA, 691 bp, Homo sapiens
tgggaggcctactgatctaattaaagagtacactaaggaaatattaccacacaaatactggcttcacttctaaaggatcatcatgagaaacaccaccacaaaggaaaataaatgaaaaaggaaaaggttaaagaaaaaggatactgaaatctaagaatttcacagtcatctgtttttatgattcctgaagtgctaagagccgcctatctgctcccagatgcactactgtttatctttcacgggattgcttcttacaggggaagtgttcctcgcaggtcagtttactcgcttcttggaccgacaaatcaattgttccacaagcctaacattcgcggatggaacactgccgaaccacaattccaggttacattatttatatcctgaaaataaacagcccaccagtctatgggagactacatctagcaccaccaccagagaaggtcagaccacattaggctcgagatggctggctaattcctaagccactcagaataatatcaggcttattgctctgtcatggtggaggctataccagtgaagtccccatagcacctaactgttccagtcccaagataaatacctagtatacttgtataccattttaataaaatttaaatgaaactaagtatttggacctttgcagtagctgggtctctgaagagtaaagacttgtccattcaggtgcccaagt

SEQ ID NO: 176417 - DNA, 441 bp, Homo sapiens
tggctaggccccccttctcctttcattcccttcttccttccttcttgggattcagaattgctctctgggcagagggctgcggagcaggagcgaggctgcaggtgtgagaaggaccccgccgtgccagggcagcctcaaggagctgttgagcgagttgagcccagaagacaaaggtcgctgaagtccttccaggagaagaagatcaatgcctgggctgagcctgcggttaacatcttaatagtaaccggagagtttctgagagattaggctcacatacctctcagagtccaggaggcagtgagggaaagcttttaattcaaagccctatccatcttcccaactcaggcccttctgccccctttgtcagtgtgcccttgtgggaagccggtgcgtttccaggggagctgctggaggcttcttatggcatgcagatcaaggaag

SEQ ID NO: 176418 - DNA, 212 bp, Homo sapiens
tggccaggctggtcaagtgatccgcctgccttggcctcccaaagtgctgggattataggggtgagccaccacgcctggctatttacatatttttaaactagagccccttaacatattacaattttcatgtatggaatctctaatgtattcacccctgccagtctagatagtaacacaaattgctgtctagttcttgtgtcccagaatgatgg

SEQ ID NO: 176419 - DNA, 260 bp, Homo sapiens
tatgcctcagatctgatcttgagtatccccgactgcttagccacagaagagcagggaccaccgggaagcgtgacctgcccttgcgcctttctgcctcactgctgaaggccgcacatcagcaccctgaccacccacctcctcaggagctcagcaggacacgcccatcacgaccaccaaaccctgactctccgtaggcttcacacacacgtgtgtccccgcctgtgagctcggcggtgtggtgctgaccaagcactggcttc

SEQ ID NO: 176420 - DNA, 108 bp, Homo sapiens
ctgtgggcaagtggcactaaccccattgcattcgtgtcatcactgaagatggtacaaagtgcctcgggaacgccaggcgccgagccatggcctctgcatgggaatggg

SEQ ID NO: 176421 - DNA, 416 bp, Homo sapiens
gtagcactgttccattagttgtttttttaccccatgtctcgtgatcacactattttaatttaccattcctgtatggtaaatcttggtatttggtaagattaatcagctttagtgttcttcaaaattatttggctcttcttgctattccttcccatgtcaatttcaaatcagattggcaaatattgtaaaaagaacatgctacttgggattttgattgggactgtattgaacttaatggattaattttgggggactttctattcaatcacagaaattacagaatagaaactatagaacagaaattcctgttttcccatccaaaagcataacactgatctccatttatttagatcctatatctttcaacaaagttgtattatttttttccataaaggtcttatgtatcttctgttgga

SEQ ID NO: 176422 - DNA, 305 bp, Homo sapiens
catattttaccgtgtgttttttaactgtgaagatcagcaataaaccccttaaaataagatcagccacattaataatttgttgaatagcaaacaccagtgagtgcgaaggagtagtgatgcctttcaaaaggaaagggaaacagggaagagaaagagacagcctgagaaatggtcccaaggccagaccaggccagaattcatctgaatggccccaattccaacccactccattcctcctggcccctaatttatgagccaatcaccaatcatccaaactagagatccttttcctggcttgttctcca

SEQ ID NO: 176423 - DNA, 179 bp, Homo sapiens
acatttgtagacatttctctcgcacaaatgacaacttatatttacacaaaagcctgtatataaaatgtgcataacagctttattcataatagtcaaaacttgtaaacaactgtatgtctcacaatgggtgaaaaattaagtaaattctgttataggcatacagtggattactactcagc

SEQ ID NO: 176424 - DNA, 320 bp, Homo sapiens
aggaaaccaacgaagcctctgtgggcttgtcctggggccctcgccccgggaccattcagtggccagacccggaggctgctccacggagaggctgttgagacagaggtgcgccagaggagtccaggtatgggagcctcagtctgaggaccaggtgagatgaaggagacgaccccagccacagccaccatctgaccactgctgaacaagagcagccctgctgagcccagtcaccccagacctgggaacaacatgcaaggtcattactatttgaatttgaagtcctgccttagggtggcttgactgcagcattagacaaccca

SEQ ID NO: 176425 - DNA, 532 bp, Homo sapiens
aatcaactctttccctaaaaactgtggtttcagagatctggactgtagttttattaagatgttcatatatgttactcttctccacagttctcaatgctataggtagttaccagtagaaacaaatttgttccaggcaattagtgcatctccttggaacaaaatgcaacagttttcttcccaaacacacgagtccacttttaactgtggcttagctctttcgtaccattcccaattcttcaccaggagactaaaacaatcattacaatgaaccaaaagctagagattctaaaagtagtagaattatttgacagtgactgaatgatgcagctacagttatttacacgtaaacattatctcagtgaggttctacaacatatctctatgatgtcccttactaagagttgaagaagtgtttttataaatgaaagcatcgtgcaaatgtcaagtagtaggtattattgttaaaataattccacaaaaattgcttcatctgcctggtactaattgaaattttgtttatatatccatactt

SEQ ID NO: 176426 - DNA, 217 bp, Homo sapiens
ctagattactgatgttctttctccagacgttctgatctgccctcttggaggactgcacagtccttcatccctcccctcctttccacgatcatgcctgtgcagaagccactgttcccaaagagtatgacacttctccttggcatgttggggaggagtaaaagttagggccactgtaagtgagcactgagagccagggctcctctgtgtgtctgtgaaa

SEQ ID NO: 176427 - DNA, 641 bp, Homo sapiens
tcttccatttataattgtcataaatattacatctatatattcaaaaccctaccagataagattttaatctttgtttcagtaatcttacatattttaaagaactgaagagggggaaagtggtcttttgtattcccagccatttaccatgttcagtgctcctttatccccagagctccaggtttccctctggtagatttttcttcagcattaggaacctccttttgcatttcttttagagcagagctgctagcaataaatactgttttccttcatctgcgagtaccttttttttttctctcattcctgaaggatatttttgctggatgtaaaattctgggttgacatgtcttctagcactttagagatagtatttcatgttcttctgtcccctgtggtttctgatgaggaatccatgttcattccaattactgtttccatatttgtaatgtgttgtttttctctagctgttttcaagacacctgcttatctttagttttctgtaggttgattattgtgtgtctggacttggtttctttgattctatcctgtgtggggttctctgatcttcttgactgtaaatttatgggtatattgttatggtttcgtttatcaaatttgagaacttttggccttttttcttc

SEQ ID NO: 176428 - DNA, 472 bp, Homo sapiens
tgcaatgcctctcctaggtcctcttctgcattctctcaccacgaacctcacccaggccagtctttcatgactgctctgctaagcccacaggggttctaaattttttgactattcgtaaccaaggcaacccataaatatagcacaaaccgattcttgattcctgagacagtttttgtagattgctactcagtttccatctttccttttggtcctggttgtggcggtccctgggacggcccacacacttggtgatttgccagaagggctcatgggacccagtggagtctgcagcattctgttacagccatcaggggcttcctccttccctcgagggcgctcacagagcatgctccttccccagccgagagaaacacatgtgcaatatgtctgcccagggataccccttagagactcagaacccaaggtttttactgagggctggtcacataggcaatccctactgagcaacttt

SEQ ID NO: 176429 - DNA, 307 bp, Homo sapiens
gaggctgcagtgagccgagatcaagccacatgccctgtcaggtaggctcaggaacacatgggcccaggttggaagagcaccatttatataaaacactctaatgaatagtcgcatatttgtctagttatttcatcaggataaattcccgctcataagaatgataggtttaaaagtatgcacattttgacagtgatgccaatattcccaaattgtgattgttgacaatcccggagagtcagtgacattgtttcccataccctgacttcattgggatagtcttttttcattttacacctgcttgaattcc

SEQ ID NO: 176430 - DNA, 465 bp, Homo sapiens
aaagcctagctccttccttccctgtggagctgtcaggaatcaactcgaggaggctcgggtcctggcaatgtccatcccgaggaacatggccggcccaaggaggagtggcatagactccctgttgtgcttgccacttagagctcacactggcttgcctcatagttttctctctaggataaaatacctggttcggggctgacatgggcaggagagaaagcacgctggctggttgcctccactagtgtggagtggcatttgctgacatcctttgaccttattatcttttgttctcctgaccaggcacccattcacttccagctgcagacacttattgattccggaatcttgatgaaatggttatttctcttatgtcttcaagggtaccttacccttgctgtatcctgtaacaaagaagcacaggagatttctgcaggttaatctgtcaataactgcctaacctttaca

SEQ ID NO: 176431 - DNA, 333 bp, Homo sapiens
  misc_feature (190)..(190): n is a, c, g, or t
  misc_feature (195)..(196): n is a, c, g, or t
  misc_feature (237)..(237): n is a, c, g, or t
tttatgggtaggcatctaacaagaaaatagaatggggtggggaaggtttgaagagaaaatgaggagttttgagaagtatctgtgggacatctaagtaaaagtgtctaaaggacagttgaataaaccatataaataagaatataggtgttcatcttccagatgtacttacgagcatgtgcaaagacaccangatgnntggtagcagtatgtggtaataacaaataacaggaaaagccnttaaagtgttcattacgtagagctgtggaaaagaatgaagtgtcctgatgcagaattatcctcaggttagattttttaagtgagtggggcatttgg

SEQ ID NO: 176432 - DNA, 411 bp, Homo sapiens
tgtcttcgagggaagtgagcagtggctcttccaaggacacagagatgtcaggcacctctctcatgcatgcaagtgctacatattatgtccacagtatctggagtatttaaaccaggaataacacgtagtctttattattggaagaaataaattaggtcagagttagtatgccatcgtgtgatgccagtttgtattctttattttctgtacttgcttctagagggggagtaaatactatgagataatgaagaaagacatgtttttgtgacttttctgatttaggacactttatgttatggaggttattttgaaggatttggaatttggttgcttattgagaacctcttgagaaaatcagattatctctgatgcacaaccagtcctacattgagttttttccatttattgctg

SEQ ID NO: 176433 - DNA, 368 bp, Homo sapiens
aggacatgattacgaactttagctcgcacgctgaataggcactgttaatctatgatcttagatgaagtacatcgatgtatatggatgttagtatctacaatatggtcctctcatcaagcgtgtagctgtctctattccgtgatcgttgtgctcccttctcccttgtttgtaaaattttcatctccaataacaactcgcctctaattccactcagagagtagtcctgaaaccaccagctcaattgtccccagtgacctctaactgccaaaggatactcctcaagggcttgccttgatttccttgtaggactttacactatggtcttcccttctttttaaaaattattttcttctttggctttccctacg

SEQ ID NO: 176434 - DNA, 107 bp, Homo sapiens
aaaatcttcttgaccttgacctaaactgataagttataatgatctatttatttatccaagctggactttacaggaatgagaaaaagaaggtctttaaataattgcct

SEQ ID NO: 176435 - DNA, 294 bp, Homo sapiens
ccttggcctcccgaagtgctgggattacaggtgtgagccaccacgcctggccttttatgacattttgatctaacaaccaatgctccatcagcccagagaggtcaggtccatgagtgcaccgtccaccccagggcagcacaggtgacggttgtgccaactgtgtcccggagcatagccagccatctttccagcctcagtgtcggcttctttcctgtccacccattaagcaactgtcccatgttttagatttggagttatggcagaaccccacttctggtactacttttgttgttg

SEQ ID NO: 176436 - DNA, 701 bp, Homo sapiens
aaagtatggaaaacttttcatttagaaaagtatttgttcctgtattttagaattcagttttgcgtctttgctgtagaattcctgttttgtgttaatgttttttactatgtcttattgtgttgtgtgcaatgcattgtactggggggatgcacttgagtgccatttctgatactgtcattgtatgactgctgatgctcgtttatgttgttctttggaagctatagtgagcctgatgttttcacattttaaaaaatgcttcctgagacttctttaagctcctctaacttcttcagtgcatttgggatcaaacttagctcttagatcagcaaacctgacttgcttctacttttgcaatttttcaggccttaccatatttcttatctctgtcttcccacctgataggaaaatcttgcagatttgaaacagtggtttctggcctgctgctgcagcaaattccctatgtttatttaagaagtcgggcctatgcttttaacctacaaatgatgagtaatttacttgcaatgaacacaggtagcctgctgctgtttataacctgttgaggatatttatagcaggcaggaggcaggcctagtgtgttattgacaggtgactttagagaatgtacattggccgggtgcggtggctcacgcctgtaatcccagcactttgggaggccgaggcgggcggatcatgaggtcagg

SEQ ID NO: 176437 - DNA, 522 bp, Homo sapiens
ccaggacacagacagaaataacaagagcaggacgtgtctccctcccactgtcttgcctggtgttgcacgtgggcacgcatgtcaggtcggctgcggcctgctcccgtgcagtgtctggaggagtggtctctggacacggcccaccatgggttacagcagcccctctccagagccacctccctggagctggcttcagtggtcttctctggtgtgccacttttctgattggcgtgattgggctcaacacaccgaaggaccgaaaaggattaaagggacagcctcttctgcctgttaaccatcatccagggacagcctcttctgcgtgttaaacatcatccagggacagcctcttctgcgcattaaccatcatccagggacagcctcttctgcgcgttaaccatcttccagggacagcctcttctgcacgttaaccatcttccagggacagcctcttctgcgtgttaaccatcatccagggacagcctcttctgcacgttaaccatcttccagggacagcctctt

SEQ ID NO: 176438 - DNA, 483 bp, Homo sapiens
catgcctttagccccagctactcaggagactgaggtggggggatcactgtagcccaggagttcaaggctgcagtcagccatgatcgcaccactgcacaccagcttgggcaacaagagacactgtctcttaaaaacaaacgaacaaacaaaacaaaaaaacctcataaaacatataacccaaagatattaaggtcaaatgtagtggctcacgcctgtaatcctaacactttgagaggctaaggcaggaggatctcttgagcccaggagttcaagaccagcctgggcaacatagtagtcatctctactaaaaataaaaataaaattagctgggcgtggtgattgcatacctgtagtcccatctactcaagaggctgaggtgggaggatcgcttgagcccaggaggtcaaggctgcagtgagttgtgatcatgccactgcactccagcctgggcaacaaagcaagaccccatctcaaaaaaaaaaa

SEQ ID NO: 176439 - DNA, 423 bp, Homo sapiens
gcccccataagcagttaagggtaagaatttggagctcaagagtaagctcaaaatataatctgggaatcataaggacataaaagacaattgaaactgtgaaaatggctttgtgtaagagagttgattgaattctggcactctgaagaaagaaaaaaagaaaaattaaaatattaaaaagaacaaacaaaaaaagagttgaactgagctttagaaaagactaggactttaattgaactagaagacgtataggtagaagctgaagaaaagagcaagtcaaagaaagctatgaagttaggagtaaatggatactgtcagtggtgtgctggtaaatgcttaacaactggctctctagggaggtgaaaggaagccctgatttatagtgtttgctgaattccatggtgtaaatactcccatcacagtcaa

SEQ ID NO: 176440 - DNA, 437 bp, Homo sapiens
atgtcagtgttctttctcttgtaccttactcactctctccttctcaaagagctacatttaaaaaaaattagttatctcactggatggtcacacctatctggagagttaggccagggttagttatctttccaggaaacatacagggaggctgaggcccaagaggaccattaacttgtccaaggtcaaacagtgggtaagtgggatgattatccactggattctcacatagatgtgaatccaggcatctgacccctcacctccccacagtgtgatgccattccccccttcttcaggtggaattcatgtgtgcccatctcagccttctttgccatggggccttggccaggaatcttgggcaagaatcccacagtcacccctcactcaaggcaagagcccttccccacctcactggccatggcaacctccgatcccctgga

SEQ ID NO: 176441 - DNA, 539 bp, Homo sapiens
gggctggctttagctcagcggttacttcgagtacattgtaaccacctctctgggtggttcgagacccgcgggtgctttccagctctgttactgctgaagttcagctccttttccatggggaaccatggagaaatggctgattttagcactgggcaggaaatacagagatggacagggtgcatctcacagtgctagaaagtaaggaagtgcttgaaaaccaaaaacaggccgggcgcggtggctcatgcctgtaatcccagcactttgggaggccgaggcgggcggatcacgaggtcaggaaatcaagaccatcctcgctaacccggtgaaaccccgtctctactaaaaatacaaaaaaattagccgggtgtggtggcgggcgcctgtagccccagctactcgggaggctgaggcaggagaatggcgtgagccattcgggaggtggagcttgctgtgagccgagatcgcgccactgcactccagcctgggcgacagagcaagactccgtatcacaaaaaaaaaaaaaaaaaaaaaaaaaa

SEQ ID NO: 176442 - DNA, 806 bp, Homo sapiens
acagaaaaactcatttcagttaaggggaaaaaaagagtaagtgagccaggattacagtccaactccagtcaaagttagtataagaaataagagaataaatagatcaacatcctcacagacaatgaaagcacaccggaaggacatgaccacaagacagataaaaacctaatatttgccaaaaaataaaatgcaaatatgacaggaaatttatattaattagtacagttatcaataaaagtaggaaaaggggaaaattaaccaagtaccaaacacttggagtaaaaagcaaaataaagcagaaggaaggaattaataaaagcaaaaaagaattactagtagaaaaccaaaacaatagaggcaataataaatccaagttggtgatgggtagtgcggggagttgagtcagataaactaccagctaacctatttaagaaaaaaaggaggaagcacaaatacaaaaatttaaatgacaagggggaaatagtaaaacaggaaatttgtttaaattgactattttgagcaattttacacaataaattcaaaaactattttgagaaaaatgcaaattgccaaaatttactctaggtagataaagtcacaacaaaccaattaccgtagaagaaacaaatagttaaaagtaccccttaccaaaagaagcatcaagcccagattgtttcaaggggatttctaccaaaccttttaagattaaataatcccattcttgcttaaacaattgcagagactaggaaaagaatcttgaacctcaagtgccaaaaaaagaaaaaaaacaaataaagaaaaactcc

SEQ ID NO: 176443 - DNA, 414 bp, Homo sapiens
tggtgaatggccaggactagggccagatgccctgattccctatgcaactttccttccccctaccctggcccctcccatcaccactgcctctcccaccactcagcacctttgcagccctgctgggtcccattgcctccaaaacccttcttcatggtaacttctgctgtctggggctttattttctgatcattcgttgtgactcttcttcttaaaccatcatttgactctttcatatatatctgtctagcgaaaaatatacatgtatatatatttgcaaccctcttaggatatagtatagcaacaggcccataatgagcactgaatatttactgacaggatgagggaataaatgaattgctcttgatgtttgcagagagcactccctaacagttctctcataatttttcttctcca

SEQ ID NO: 176444 - DNA, 2264 bp, Homo sapiens
  misc_feature (1893)..(1893): n is a, c, g, or t
acacccagcaggcagagaaggcagcagcaggcaggaccgccaccctcccatgcaaatcacccccgggagtgcagctgggctcctcccgctcctcctaggcaatgctcctggggagtctgtggggaagatgccatccagggtgctgtgcgctcttcctcatcctcgccctcctgctggacgcggtcggcctggtccttttgctgctggggatcttggcccccctgagttcctgggacttcttcatctacacaggtgccctgatcctggctctcagcctactgctctggatcatctggtattccctcaacattgaggtgtctcctgaaaaactggacctgtaatttggccatgggaagaggagaagagacgcaggtgctgtatgcagacatgtctgtgaacctggggctcttgggcagcaacacgttgcagcttccacctagcaagccacgccgggaccaggtgagtgcacacaagacctacctggcagggtggccagagaggcttggacaagcaggggcaagaccaggcctcctgaggctgcataagcaaatagccagacactgcaccctgactggggatcctgtggccctggcctcaggtcctgctggggtggccagccaagaggacgtggggcaggtgttttctcctccgggcccttttcctcgcagaggctggaaagagagtctcaacagccccttccacccctgatataccacgaatgatcctggcttctgggcacaatgggaagttatccctttacctcggaacttggggacaaaaagaccccatctgcattctctgttgggaagaatctctgctggggagaaaagtctttagcacaggagaggacggaaagttccccaatgactcttgtgcccttgcatacatgaaggggtgtgaactgggccacggtaaaagcaaacagagcagaaccacccagaacggcccctctcgttcacttcctccctgcacctgcccagatgggatacaagaagcggggtagggactactcgcctccatgcccactcagtgcacacacctcctctctctgcagtattcccaccccaccctcactcacactcacacgcagccaacacatgtgcccagccagtctccaaggcccagaagtcaagacagtttggcttcatggatttcatccgctgagttgcatgtcacagctcagtctatcgcgtgcaaccaaagaggcagagagttgtaagattttttcacatcaagacagagtcccagagatagagtggtctggtccttacaaccctgaattagagatggacagctgtctccaggggactgaagtcagagccacggtccattgggcagccataccctcctccccaggtgggcccaacctgcacgcaggtgtatccaggcactcccgtttcttactcccttaccagaagtaagagcaaaggtcgttgctgagttgaaagaaggaaataataattgtgtcttttgtgggggattacacctgactctcagaactcagagaaaagagaagcaaaatgaagaggtctcagtagagtaaggtaagcccatacctaggaaatgatgtagaaagagatgagaagtcagtcccactctgatcttcagcacttgttagctgggtgtttttggccaggttgcacactctgagcctcaggattctcatctgtaagatgaagagaatatttctggcccttattgctgcaaggatcgaaaagagataaggcagggaaaggctgtacaattgatgtggttcttacaccagatgtcaagcatacaaaacacataatctgggatgagttaactgacccaaagtccaaatgtgaagtaccttggtgtctctcaaattggtagtgatgggggtcaactcacactttgcatcaggaaacttcngagcaaaaagggtccctgatttgtgtgctggtatgttggaatgtgtcaggcactgtgcaagacactggggataagaaatgagacacatggaccaggcacagtgactcatgcctgtaatcccagcactttgggaggccgaggcgggcagatcacttgaggtcaggagttcaagaccagccttggcaacatggtgaaaccccatctccaccaaaaatacaaaaaattagccacgcatggtgatgcacacctgtaatcccagctattcaggaggttgaggcagaaggattgctggagcccaggaggcacaggctgcagtgagcagagattgcaccactgcattccaacctgggcggcagagtgagacctgtctc

SEQ ID NO: 176445 - DNA, 414 bp, Homo sapiens
attcggcgcggcatgctgtgtgtctctctctctctttctgtttctctctccctctcctctctctctccctctcctctctctctccctctcctctctctccctccccccccagcatcatgcggggtgggactgttttatcttaagttacaggtggtcaagtccagcccaaggacagcaactctgagggtcaagcctcataggctaactggatagatgttctctgctttgccacccactggagcccgacctgccccactaatttatatttcccctggtctcattttgtactttttatttataattcacccttaaagtgtatgtgtctcttataagctgcctccgatctttcatggtatgaggtggttacctaaataaagaaggagatttggcctttgtttttatgtaaaggacaga

SEQ ID NO: 176446 - DNA, 1162 bp, Homo sapiens
ctagagagcaacatgatcaagctttgcctgtagaagagtaactgagcatcgtgtgcagaatggatgagagagaagcagcagagagacagcaaggccattcagcaagctcaggtggcaggtcccatctgatggaggagaatcaattcaaggagatgcccttcctttacagaacaccctttaacagcatccaggaggaacgagaggctgcaatactgaggctttcaaagtactcacgaggatgtccgagaatggctgtgatgccaggcttctggcaggttccagactccatcacaagcccagcatccctgcaccagatctgacatcgctgctgttgtgccagctgtttatgaagggcctgagtagctagcaggtttttatcaggagccctgctgggggcttagacaccaaaagagaagtctcatcctctgtagttcttcttgtgaatgtccttttagaaaaacaattagaaccaaccacaagcaccaaagtcctaatgggatctcctgcgagcacatatcaagcaggattgttgctatttctcctcactggctctttggacagactgtgtgagctcctggagggttccactgtatctaccctttgacactgaccagttggcacatggtgacatattccaatgtgttgattgcaaatgtgaacgtacagccagtgctgtgtgcgggaggactctctcctcctcagtggggccacaccgtgcactattaatggagccccactcctttgcacagcctggccatgcagtggctcatattgaggttttagccaactgaaatctcccgtgcatttttctgacaagccagctaggcctctgctatgctgtccttgtgtctttcatttgatgaccttaagggtgggactgttttatcttaagttacaggtggtcaagtccagcccaaggacagcaactctgagggtcaagcctcataggctaactggatagatgttctctgctttgccacccactggagcccgacctgccccactaatttatatttcccctggtctcattttgtactttttatttataattcacccttaaagtgtatgtgtctcttataagctgcctccgatctttcatggtatgaggtggttacctaaataaagaaggagatttggcctttgtttttatgtaaaggacaga

SEQ ID NO: 176447 - DNA, 1503 bp, Homo sapiens
acacccagcaggcagagaaggcagcagcaggcaggaccgccaccctcccatgcaaatcacccccgggagtgcagctgggctcctcccgctcctcctaggcaatgctcctggggagtctgtggggaagatgccatccagggtgctgtgcgctcttcctcatcctcgccctcctgctggacgcggtcggcctggtccttttgctgctggggatcttggcccccctgagttcctgggacttcttcatctacacaggtgccctgatcctggctctcagcctactgctctggatcatctggtattccctcaacattgaggtgtctcctgaaaaactggacctgtaatttggccatgggaagaggagaagagacgcaggtgctgtatgcagacatgtctgtgaacctggggctcttgggcagcaacacgttgcagcttccacctagcaagccacgccgggaccaggtcccatctgatggaggagaatcaattcaaggagatgcccttcctttacagaacaccctttaacagcatccaggaggaacgagaggctgcaatactgaggctttcaaagtactcacgaggatgtccgagaatggctgtgatgccaggcttctggcaggttccagactccatcacaagcccagcatccctgcaccagatctgacatcgctgctgttgtgccagctgtttatgaagggcctgagtagctagcaggtttttatcaggagccctgctgggggcttagacaccaaaagagaagtctcatcctctgtagttcttcttgtgaatgtccttttagaaaaacaattagaaccaaccacaagcaccaaagtcctaatgggatctcctgcgagcacatatcaagcaggattgttgctatttctcctcactggctctttggacagactgtgtgagctcctggagggttccactgtatctaccctttgacactgaccagttggcacatggtgacatattccaatgtgttgattgcaaatgtgaacgtacagccagtgctgtgtgcgggaggactctctcctcctcagtggggccacaccgtgcactattaatggagccccactcctttgcacagcctggccatgcagtggctcatattgaggttttagccaactgaaatctcccgtgcatttttctgacaagccagctaggcctctgctatgctgtccttgtgtctttcatttgatgaccttaagggtgggactgttttatcttaagttacaggtggtcaagtccagcccaaggacagcaactctgagggtcaagcctcataggctaactggatagatgttctctgctttgccacccactggagcccgacctgccccactaatttatatttcccctggtctcattttgtactttttatttataattcacccttaaagtgtatgtgtctcttataagctgcctccgatctttcatggtatgaggtggttacctaaataaagaaggagatttggcctttgtttttatgtaaaggacaga

SEQ ID NO: 176448 - DNA, 368 bp, Homo sapiens
taaaaggtgtattaacatcttaaaatgaggatctagctgggcgcggtggctcatgcctgttatcctacttctttgggaggccgaggtggcaggattgcttgaggccaagagttcaagaccaaccaggctaacatagcaagaacctgtctctttaaaaaaataaataaataaaaaataaaaaataagaatgtgaatgggtatttctggaggtacggttggtctctggaccacttgactagaagtgcctaggatgctttttgcacattcatactcataggccctaaatcagacttaacaagtcttctgttgagcatcattaggaaccctaaagttgcagaaacactgccttgcatcctagggtcatagaa

SEQ ID NO: 176449 - DNA, 158 bp, Homo sapiens
aagaatctaaaacaagttttactattttaaaataatgagagtgcttttctttcaagctttcatggtaattcaccaggaagagtaaacttcatgactcagctttttgtgcccactcacacatgcctaaaaggtccactgaaattgcttgctatatttta

SEQ ID NO: 176450 - DNA, 181 bp, Homo sapiens
aagcgtttactgccgccgtggtcgcagtcataaattttgctacaaaccacaatgacaggtgcattgatatgcaccgtgagagctccagctgcttaataaccccgtcccctggtcgctgtgagcgccttttatttatttggtatcatattaggtattgatctctagtagcattaagtgcggt

SEQ ID NO: 176451 - DNA, 1478 bp, Homo sapiens
ggcaggtatggaacctatagggggcctgtcacccagcacgtgcatcgggggctgtcccgggggtcaggggagggaggccagcgggccggcggggtccgccccgaccccatccacgaccccgactcctatccgatcctatccccggccccgctcgggcctttccccttgcgccctggctcggctggctcgacgagcagtaagttcgtagccgccctccgaagccgggcgtgcatgggatggcagagttggcgtgcgtgcgtgagtccaccagtgtggcatgggcatgtaaggtgcgcggagggactgcaccttctccatcaggtgcagaaggccacgtcatgctgaacaagagccgagaagtagaatcgccagtgtcaagccgtccacgttgtgggatgcccactgttcccccaggatcactcaagaccctgtgacttgtggtcactgatgagtggaccaagtgaagtccacaagatggctgctgtggctccaggcatcacgtccacatgcaaatccatccagaggcaggaactgggaataggcttggaggtggccaggacagcaagtgggctgtctgtataaacctcccctccacttgggaaggaaaatcaccccccaagtcgattttctgtccatcttattgatcagagagcgttataaattcacccattaaataatctggacaaggggagcgtgcatgttgtccttggtttagactggttatgatttatgccctgaaattggacatattgccaagcaagcgaaattgagattccatcagccaggaagaaggggtaaggatgatgaatattgggtaggcacatgataggggttgtcacaagttttaagatgctttcaattagtaaataactgtcaagattaccttttgttttcacctgcccagtctccattgtgcctccttcagaaacacacactgggttttctttgggtgtgaaggggcctctgtgtccatcattccagtgtgagcacatgatctgagcccggtcagtgaggtttaatttcaggactttggttggaactcttgggaaagacaagttctccctgacctggggtgtttgaaaagataacatgctagcctggaattgttgggggctattttacctgcctacctacctgaatgaatgaatggttgactgaattaagctgacacaaaggggtggtagagggatgaggagaggagaacagagggatggtgagaaacttggtccaaatgaaattgcttgagaccggtatgcagctgtgacagatgattcagttacatgacataataaatctttccctcatcccccaccttatttttttcttttgtatgtaagttagtttgagttgcaaaagattactgacaggaatggtacctagcaatggagtgttacaagtaatagaccctaaaatgtggattggcaaattgcaggtagaatggaaggcaataaagttctcctatccctggctaagaagtt

SEQ ID NO: 176452 - DNA, 645 bp, Homo sapiens
ggcaggtatggaacctatagggggcctgtcacccagcacgtgcatcgggggctgtcccgggggtcaggggagggaggccagcgggccggcggggtccgccccgaccccatccacgaccccgactcctatccgatcctatccccggccccgctcgggcctttccccttgcgccctggctcggctggctcgacgagcagtaagttcgtagccgccctccgaagccgggcgtgcatgggatggcagagttggcgtgcgtgcgtgagtccaccagtgtggcatgggcatgtaaggtgcgcggagggactgcaccttctccatcaggtgcagaaggccacgtcatgctgaacaagagccgagaagtagaatcgccagtgtcaagccgtccacgttgtgggatgcccactgttcccccaggatcactcaagaccctgtgacttgtggtcactgatgagtggaccaagtgaaggattgtggtgaggagcaaatgaatcaacgcatgagcaaaggatggtcgcatctgtgaaaggaaattcaatctcgggaccccaaaatcctacaccaaagagaaaagtcaagctgggaactgcatcaggcaaacctgcctcccatttaattgctaaataagatagctacaaagatttttta

SEQ ID NO: 176453 - DNA, 973 bp, Homo sapiens
ggcaggtatggaacctatagggggcctgtcacccagcacgtgcatcgggggctgtcccgggggtcaggggagggaggccagcgggccggcggggtccgccccgaccccatccacgaccccgactcctatccgatcctatccccggccccgctcgggcctttccccttgcgccctggctcggctggctcgacgagcagtaagttcgtagccgccctccgaagccgggcgtgcatgggatggcagagttggcgtgcgtgcgtgagtccaccagtgtggcatgggcatgtaaggtgcgcggagggactgcaccttctccatcaggtgcagaaggccacgtcatgctgaacaagagccgagaagtagaatcgccagtgtcaagccgtccacgttgtgggatgcccactgttcccccaggatcactcaagaccctgtgacttgtggtcactgatgagtggaccaagtgaagtccacaagatggctgctgtggctccaggcatcacgtccacatgcaaatccatccagaggcaggaactgggaataggcttggaggtggccaggacagcaagtgggctgtctgtataaacctcccctccacttgggaaggaaaatcaccccccaagtcgattttctgtccatcttattgatcagagagcgttataaattcacccattaaataatctggacaaggggagcgtgcatgttgtccttggtttagactggttatgatttatgccctgaaattggacatattgccaagcaagcgaaattgagattccatcagccaggaagaaggggattgtggtgaggagcaaatgaatcaacgcatgagcaaaggatggtcgcatctgtgaaaggaaattcaatctcgggaccccaaaatcctacaccaaagagaaaagtcaagctgggaactgcatcaggcaaacctgcctcccatttaattgctaaataagatagctacaaagatttttta

SEQ ID NO: 176454 - DNA, 784 bp, Homo sapiens
ggcaggtatggaacctatagggggcctgtcacccagcacgtgcatcgggggctgtcccgggggtcaggggagggaggccagcgggccggcggggtccgccccgaccccatccacgaccccgactcctatccgatcctatccccggccccgctcgggcctttccccttgcgccctggctcggctggctcgacgagcagtaagttcgtagccgccctccgaagccgggcgtgcatgggatggcagagttggcgtgcgtgcgtgagtccaccagtgtggcatgggcatgtaaggtgcgcggagggactgcaccttctccatcaggtgcagaaggtgaggatggggcagggggctaggagcttcgacaggcaggaacttccaggcacagggctgtggtaggcccctctcaatggtaaccaggaccgaaatcgggtttcacaacctacttgttttagggtggaaaaacttgaatttccacagccaagtgccacacagttgctgtacccggggccatcccgggagctgtgagataatgagccggtgagactctgctccaccctgggaaggggagttagtctagaggagcatatcttatggggacaagaagtcacaaaaaggctgtgtggtgtgtagagaaggggagggactctgctgttgaggcttcactcttttttagcacttgcccagcacctccttctctcttccagctgcctcttgagtcactgcccagtttagggagcagtaacataaaccaaacagttgcctccaaaatatgcattctgagaag

SEQ ID NO: 176455 - DNA, 1634 bp, Homo sapiens
ggcaggtatggaacctatagggggcctgtcacccagcacgtgcatcgggggctgtcccgggggtcaggggagggaggccagcgggccggcggggtccgccccgaccccatccacgaccccgactcctatccgatcctatccccggccccgctcgggcctttccccttgcgccctggctcggctggctcgacgagcagtaagttcgtagccgccctccgaagccgggcgtgcatgggatggcagagttggcgtgcgtgcgtgagtccaccagtgtggcatgggcatgtaaggtgcgcggagggactgcaccttctccatcaggtgcagaaggtgcgtttttgcaagactgcgcactcacacgaccattgagaggctcactttgcagtggccctcccaggccctccgtggttgggtgtccgtctttgtcagaaaagggccagcagggggcaccaaacccgcacgtttctgccgggagagggcgtctgggccacgtcatgctgaacaagagccgagaagtagaatcgccagtgtcaagccgtccacgttgtgggatgcccactgttcccccaggatcactcaagaccctgtgacttgtggtcactgatgagtggaccaagtgaagtccacaagatggctgctgtggctccaggcatcacgtccacatgcaaatccatccagaggcaggaactgggaataggcttggaggtggccaggacagcaagtgggctgtctgtataaacctcccctccacttgggaaggaaaatcaccccccaagtcgattttctgtccatcttattgatcagagagcgttataaattcacccattaaataatctggacaaggggagcgtgcatgttgtccttggtttagactggttatgatttatgccctgaaattggacatattgccaagcaagcgaaattgagattccatcagccaggaagaaggggtaaggatgatgaatattgggtaggcacatgataggggttgtcacaagttttaagatgctttcaattagtaaataactgtcaagattaccttttgttttcacctgcccagtctccattgtgcctccttcagaaacacacactgggttttctttgggtgtgaaggggcctctgtgtccatcattccagtgtgagcacatgatctgagcccggtcagtgaggtttaatttcaggactttggttggaactcttgggaaagacaagttctccctgacctggggtgtttgaaaagataacatgctagcctggaattgttgggggctattttacctgcctacctacctgaatgaatgaatggttgactgaattaagctgacacaaaggggtggtagagggatgaggagaggagaacagagggatggtgagaaacttggtccaaatgaaattgcttgagaccggtatgcagctgtgacagatgattcagttacatgacataataaatctttccctcatcccccaccttatttttttcttttgtatgtaagttagtttgagttgcaaaagattactgacaggaatggtacctagcaatggagtgttacaagtaatagaccctaaaatgtggattggcaaattgcaggtagaatggaaggcaataaagttctcctatccctggctaagaagtt

SEQ ID NO: 176456 - DNA, 260 bp, Homo sapiens
gatcattgaaggctactatgaccacctttacgcacataaactagaaaacctagaagaaatggataaattcctggaaaaatacaaccctcctagcttaaatcaggaagaattagataccctgaacagaactataacaagcaaagagattgaagtggtaatttaaaagttaccaaccaaaaaagtccaagaccagacgtattcacagcagagttgtaccagacattcagagaagaattggtaccaatccttttgacactatt

SEQ ID NO: 176457 - DNA, 361 bp, Homo sapiens
cttgagccacagagctggctccagaggcattgggaggagaaacgcggcaggcctggctcactcattatatttcaagatctatcccagcttgtcacaacatggactgtgtaactgagacgattcgcggttggtgttcccatgctgaggcatgtgctgccccggcccttggttgctgcgcaatttgctctctatggactgtacctggggtgcctaccctggacttcagacaagcttcttcaagagtagcccctgccagagctggagccaacagcaagagcagcccagggccactctgcccaggctcagaggcatcactgggaaagaggcaggggcagaaggaactggggcgggaagccctgaa

SEQ ID NO: 176458 - DNA, 157 bp, Homo sapiens
cagttcaccaaacacttaacaagtgctgactttgttagaagatgggaatgccctcaaagatttcacccctacgaagggagatgagatgtgagacactgattcacgggtaaaaggaaggcctacagagattgtggaagaaagttcatagcttccttac

SEQ ID NO: 176459 - DNA, 217 bp, Homo sapiens
tctctactgtgttacacttttgcatcctgctagggaaataatgagttgctttccgatgcagtggcagctccgacatcgtcttgaagctaataatgcataaaatcacttttcagagcttacactcataagaataagcctttcaggatgggttatgtcttgtgtccaaacccaagattgggttgcatgttgaactttatgttagtagtctgtcttaacg

SEQ ID NO: 176460 - DNA, 533 bp, Homo sapiens
gtcgcaggctccacacactcacctaattttttattgagacggtctcactatgtggcccaggcggtctggaactccagaactcacgtgatcctcctgcttctgtatagcctttgagttatgaaggcttttgtttgtttgttttcatttttaagtggttgggggaaaagaaaaaagcagaagacgtgaaaacaatacgcgtttgccctccagcatccaggaataatgttgtattggcacagggccgtgcactttcattcacacggcgtctggttgctctttctggctcacagagcctaggcgttcaccctctggccgtgtgtagagactgcccgccaacccctggcctaactgaggaagaacagcgatagtcaaacagcaggcaactggaagaacccaaaatgcaacgacgattcatcttccaaactgaggggtgagcactgctcgaacaggcccacacccgaacacagagactcacggaccacggcagccaccttcagagccgtgaaacgtgcagcaccaacttttaagtttgt

SEQ ID NO: 176461 - DNA, 388 bp, Homo sapiens
acatggaagaaaaaggaaacttcggtggttctgcagcagacatgggctaggtcatatgtggtttctatgagttcgtgtctcaaaaaaaaaaggagggggggcatctgtccccggtggagctcacctatttggaatatggggcatttgttttttccactgcaatgacttcagtctggttccatcatgtgggaattcgatcacaccattttcaaacaatgttaacatagtccagctttggtttttctatttggagaattttatcaaaataataaaacattacgctggacgcaggggctccatcaaaagactttttaaataaaatacggttctcaccttctccttgtccattgactattctgtttcctttttcatgcgaagatccaggtaa

SEQ ID NO: 176462 - DNA, 516 bp, Homo sapiens
cttatggaaaagcctcacaatatctccagtatacacagcctcttctctcgcaactctcttcattagctggtcctaagtgaaatccgggtctcctttaaacatagtgcttctcccacatccctttcaagtgaagatgttttttttcctctcataaaccttgtactatatactagagatgagatatgtgtctttgattctcagtgcttctcccaaatattgttaatcctttaaaaacattatctgaaaatgcctgccagtagattccatactcatcacctacctacctcctaagccctaagtctcacctctcttttcaataaaaaattttagcctccagttcaccatgtttttcctcacccactactcttatcagaatttttgattacttcaatatccacagggacaatccattctatacttgttctctcagtcccttgatctctttcccaatgctcttaaatgctaccccagctcacctcagtcatctactcccagagttataccctagaccatata

SEQ ID NO: 176463 - DNA, 527 bp, Homo sapiens
acaatttacagggactctctcacattctgtcccacatggtcagaggaataagagggtttcaatgaaaacgtgaaggtgcacagaattccttagtgaaaggttttactgaaattcagtttaattcaactgacacttactaaacacttactctgggccttgtgtactgtgctacccttacctagagtgtaattgctaaaggaaacaagtatgaacaaatattagttttttaaagtgccaccatttttccaagccaggcttctttcctttgaatactctcaactggcatgagccattccacagcaatcaacgatacgataacttgacacacccatgccaaaaagtggctgtctttggtcctctgaactagacagatttaggatgcagagagaacatgatgagtctggtttccacgcctggcagagcaggaggtggaggcgagagctatcagaggcgaatgatcctggtttgtagtctcactgcctgaacagtgccaagctggccttctacacaaaagacgaacccggcag

SEQ ID NO: 176464 - DNA, 683 bp, Homo sapiens
cattttattaaatataaaagcctagacagagaattgtctttttcaactttagtgctctaaatgtgctgttccactttcctttttacttgtactgttttggacaaataatttgttgttatttttatcttcttttcctctatacaaaatgtatctcttttctctggctactttaagatttccctgtatccctggttttgagaaattgattatgatgtatcttaatataattttcttcaagtttcttttgcttggggattcattgatcttgggtctgtcagtttatagcatttatcaaatttggaaaaattttgaccattatttcttcaaatatattttttctgccatctattattttgctaactctaaatatatgtatttagtttgctgaaagttgtcacagagctcacttatgctctcctacattcttaagcctttttttctttgtgctttatttcaaataatttctgttgctatgttttcaggctcactcgtcttttcgcctataatgtctcatctcccattaatcccatccagaaaaatgttcacctcagacattgtagttttcatctgtagaagttcaatttggattccacatctctacttaacatttttaatctttcctccaactttagggacataaggaataccttataataactactttcatcttccagtctgttaat

SEQ ID NO: 176465 - DNA, 792 bp, Homo sapiens
atttaatctgtcaatttaatttttaatataatgattgctttttatttctcaaaattttacttggctttttatctacctattttaatctacttaattgtaagagtgtcttatttctttgggttttattttttgtacttttaatccttttaaaaattattattttctcatctgccagaatgttatgttatctggaattttaggaactctaaatgtggtattgctttgtcttctttttctactggtggatttttttcttcctaaagttttttaaatggggtttgtgggatcacacagcacacacaggtctgaggctaaaacaacttctgtgagattttaactatgggaatccagtgaaaaatttttaaaatttttttttcaaaaatgtgtttacttctgcttccaaaatgtactcttttagatttatcacttggctgagatcaattttttttaattgaccaggttaggggagttcctgatgtttagaaagcatcagtttgtactctaaatccataaggcccatacttatgaattctcagagtagaattttcatgcttctacctgaagcctagccaggaagagagcaatctccttgtcttcaccctgtgctgaatttttctggcttacccttttgttgtgtgtgtagtcctcataagtcccagcgttatgtatgttaggggttaggagcttgttcagttccagccttctgttaccaaaacaccaggggcttggtttaggtcctgctgcttgccacacagatagccaatgcctgagacaacgagtattgccaaggaa

SEQ ID NO: 176466 - DNA, 471 bp, Homo sapiens
taacctactaaaatagaatttaaatgttgtgtgtatgtgctgctctctcctgtgctcctccttgtgacaatctacttttttcatctcagaagtgtcaacaagacaaacatggttaggatctcttaccttagcagggaaagtgcttatatccttttcccatatgaaagggataactttgggactttagtttagaccttgttgctgtttcactgtgttggagacttgcagaagattaggaataccctccactgtgccttgtctagcttccactccacagtcatcaaactgactcatcttctcaatcatttcctcccattagctttccctgtcatcacaatcactcaaagaagctgctccttctgccaccaaaaaaaatgttaatggatagaagggctccccactgccatattctgatcacaacttgttgcctttacttattgacacttgaactctatgccttcctctctcttt

SEQ ID NO: 176467 - DNA, 458 bp, Homo sapiens
catctcctgggccaattactgaactactagtgaggacaatatagtcacaaaattacaaactagctctttgatcatgaaacttataaggctctgatttatgctttacgtgtttattttatcaaactgtaatgctatattttctactactatacaatttaaatacacttccatcaatgcagaaagttctataccttgtaaacacagaattattaggataataaaatggttaaaactaaattaccagaaatgtataattcctagctgtgattaggaagtcagagttttgggtggatggaataaaacttagtgggtttaaactcaagaatttttttctagcaaataatacttgacaggccttgtaagaacaattaagaattacgttctaatcataaattcatagcatatataacataattaacttttcaggtatagtaacatcaattttaaaatttaacact

SEQ ID NO: 176468 - DNA, 169 bp, Homo sapiens
cttgggctataatttttctcttaaaccaagagaaaaataaataaactctgtaatgtttccagttggtataaacagaaatacattaacataaacagaaatctgttcctattgattgagaattgtggggataggggataaacacacagatttctctgttcctgaaaacttg

SEQ ID NO: 176469 - DNA, 622 bp, Homo sapiens
ctacaggcatgcaccaccacacccagccaattaaaaaaaaattttgtggagagagggtctcactatgttgcccaggctggtctcaaactcctggcctcaagcgatcctcccacctcagcgtcccaaagcactgggattatagttgggagccactgtgcccagccataaatgcccttttaagtagcatttacaatggctgcattggatgaaggcataataatttatctaagaacagcagcaatgatgatgaggaggaggaggagaaggaggagggacttttgtgtaggacttgctgtgagccgtgccctatgccaaacccttttacaggaaactcattaggctgtgtgggtgtgggttgtctgcccacctaagtgagacactgaccttcccttagggtgccccaatgtgatttaggggccctccaagttttttgcagttgcccctgggacagatgaggaggatcccagcagagtgaagcctgcaggtaccctaagcctagcagacagaccgggctcacctgggctgcagagcctggagctgccaccttcctgggtgcacctcttccccctctatattccggaaggcctcccggagtttctgaagtggctagaaattactatgt

SEQ ID NO: 176470 - DNA, 118 bp, Homo sapiens
agaccccttcctcaggaaggatggttcaggcttgattcttatgattttctactccaaacaagcaactgtgccataaacaaaaccaatttcttcaactgactatgtccacaactaaaac

SEQ ID NO: 176471 - DNA, 193 bp, Homo sapiens
cccggcccatggaaggtttttgagtaaaggagaaagagattgatgctctagaaagatcagggttaggaggtgagaccagaggccatggagcctccccatctctccccttgccccctgcccactgcccaggcctgaaccaggacccaggttttggagattgggtggagtgagagagtctggcactagaaagcaa

SEQ ID NO: 176472 - DNA, 571 bp, Homo sapiens
tgttcttagttcagtaattgtgttaatcagtttcataggatatctttctgctgtgttttcccctcatgtctgatttaccttgcacccagaatggaatctttagagacagcactgcggcttgtgttacctgtagagaaggcatcacttcttctctgtggctcggacctgcctctccataaaatggccatccagggatttcatctcattgatgctgatcgcatctatcaacacctaagggtaagtatataagttctcacagtgtatttacagaataatcgagtcttttgagatttataaatccttatggatttttaattattcatgatagcatagattaagagtataagccatgacaatttttttttcagtaatttagacttgttttttatttcttaactctttaattccttgcaaatttggaggtgggcaccgtggagtgcatagtgaggtattttctttgaattcaaaatgaagccttgtttatgaatgccttcttcagtgactgaattcctaaatatacgagactcatgcttaaatgccgtattctaccgttttcttattctaaatccca

SEQ ID NO: 176473 - DNA, 221 bp, Homo sapiens
atataatgccaaataaaggacagagtaggtatgctgtgtgacattttttctttgagtatcaatagtgaacatgacaagatattagatcccaaacattgcatagtgtttgttgtagtcactgtaaaatgaacacagatgtactttttcagggatcagtgtcgctcaaggacgtgactgtggacttcacccaggaggagtggtagcatctgggccctattgag

SEQ ID NO: 176474 - DNA, 243 bp, Homo sapiens
  misc_feature (88)..(88): n is a, c, g, or t
cagtcaatgtctttctgggggaatagtgcaaaacagtgatgagacagcccttacaggaattaaggatgtcaaagacagaataactgtnctgggctgtctcatcagtgcagtcaatgtctttctgggggaatagtgcaaaacagtgatatttcatcagcatcccaggcttattctggcatcaaattttcatcagcagtgaccttggcaaacttgtcaatgaatttctgcactgcttcagtaaag

SEQ ID NO: 176475 - DNA, 989 bp, Homo sapiens
atcatgtgactattatatccacccaattaataatccttcttcaatcagcttctgcttcagataacactgcaggcggatgtgtttgggtttgtcttgctgtctgcaagcaactccctgtctgggctttgtctcctagatatccataatgcccaggccagcatctgactgcctctccagttcagcctccccatggtttcaatgaataaggggaaggagacagagaaagtcagacatgaggacagacggaaggatggaaaggcaggaagccttccatgaaagctgctgccagtgatacccactgttcacagggattccaagtatagaatcagaggcatgtttcagaggcttgtttgagctactgatactgttcttttggaacacttgtttgtaaacagatatttctgctaacactgggcttcgtaagggtggacagagtggtgggggggttgaaagtgggggttggagaaaaaggcaggtgtgtcctagagccttggaccatgtgtttgttgttgagaatacaaagacctcactgtattaaatgaaaatgcttgttttacaaggcgagtgggaatatgataggtagatgtcgaaaatgctttggaaactgaaacaaccccatgccacaagggcattctgctacatcatacatccagaggcatacacagaatgtgaaggctcagcatcactaaacaagggctttgggaggctgtgggaaaaaagagtcccagaggctaagtgactagcagctcccttctctggtctcacctaagcctgccctttcccaaagaaaggcttccatttcaaacttcctattgtttttccagtacctgctaacctaagggtagaaactgttattgatctaaaatattactgttgataaaggagcctctggtagtctagatccagactcagagcactaccaggaatatttatatgatagaactatgcaggcagaacactttaacttttcaagtgattgttccccgagt

SEQ ID NO: 176476 - DNA, 350 bp, Homo sapiens
atttaaaaacaaagccaaaaatctcacaagagagggctgaaactattgcgggtaaatctgaatgttgattgatactgtttagaatacatgataaagcagtaacaagaaaatgtttttcgattagtctctgtcttttgttgtcttgaaattcctaccgcattgtgtattttggaagaatcaagattggactttgctcaaagaagttactgatgttggcatgattttaaaactggagatctcatgcacagacttacttagtactttgagtctgttcttgttttttctattaaatggaaatagtatttaacatcaattcattgagataagaaagttaagatcgaaaatatata

SEQ ID NO: 176477 - DNA, 645 bp, Homo sapiens
atggtaatactaactcccacctttacctacaagcatttgttgtggagtacctactctgttacaggacccttgggcttggccaactatattgcctctctagccttggagaaaaagtgtatagttgagtcttttagtgtctgttccatggtgagtagtttgaagagtatcccacagttctgggtccttgccctgcaatgcccctggccattctagagatcactttgtccttgacactgtcagtgagctcagagacctgttagaagtatggtcaccaacttccacctacaatgcaactccaggaaggattaccacaatgctcatcccaattattttgcaaatcccaatgggaggttgcaggtataatgacagagggcaggaaacctcatgtttcttgcagagtgttaggaaaagatttgaaggtgcaggtactgaaaggctgttgaggacaaatgcttattagaatgaagttcattagagatcaaagtcctgcttgatacctcaacgtatccttgatacccttgcttctcttaagccaggccctctgaatcttttcaggtacttggattgagaaattacttctttccttcttagaaaaggctgaagatcccaggcatggtggcatgcgcctgtaatcccagctactcg

SEQ ID NO: 176478 - DNA, 286 bp, Homo sapiens
acactgtgcccaccctggggataggatggctggatgatgatgatttaattctcaagacagcgggtgccaagagggactgcatcaatagcttggtgcatagcttgtagcagacagaagggaggtaatagtcttactcctgttctgaggggagcttggcctggagaaagaggcctatgcaaaccacctgcacccaaaccagctcatttactgaatgtttactgttatgtcaggactttgctaagagtttatgtgaattacccaacctaatcttcatggtagtactcta

SEQ ID NO: 176479 - DNA, 394 bp, Homo sapiens
tactcataatccaaatcctcatttctttcaggtccaactcaaggcctacttcccccacaaagtcccctccctcagcaacccactggaagccactcacatatgatatcctgtggtgctcagacagaacactgcacaccagaaccttggaatctattttgtcttgaacagtcctccaactgttaaatataggtcttataatcccaaatgaccactaaggttcccttagccagacatactctccttctcttcctcctcaaagaggttatacacaaagtacccataaaacccctgcacattaaatactgccttcagcaaggaatgagtaagacaggaatgtgaccaaataggggtagaggcaacaagggtgagctgctagagagccgagttcttggca

SEQ ID NO: 176480 - DNA, 264 bp, Homo sapiens
  misc_feature (1)..(1): n is a, c, g, or t
ntcgactctaagatcagctctaatttcttttgcctgcgggtctacttcacactgctggagttgctttcaggcctagcctgcatggacatcttttcatgtttctcctcttacctgactcaagctggctcaaattctaaccctctgtcacttaagtcatgtctgtctggagagggccttccagagaaccatgattcacatgggccattcaagccagtcccctaggaatagtgggaccagaggggtcttcatgcccccaaccctcct

SEQ ID NO: 176481 - DNA, 591 bp, Homo sapiens
gtaagcggaccagcaggttgattagttcttgaaaagcctaacaaaatggacacatctttagttagagtgaccaagaaaaaagggcagtgactcagattacttcattcaagagtgaaagagggcacatcactaccaatttacagaaataaaaaggattatgaggaaatactacagataattgatgacattaacttagaagaatatatttcaagaaagacacaaactactgaaaccgactcaagaagaaacagaaaatctgaacagacctataaaaaatagagatttaattgatattcagaaagtttcccaaaaagaaaagcactggccaagatgacttcactggtgaattctatcaagtgttcaaagatgaattactgacattcattcacactcctttaagaaatagaagaggagacatcacttttcaaagcatcgagattcctaatcattagtccattgttatcctgctaccaaagccaggtgatgtatcacaaaaaaaccctacagaccagctgggcacaatggcttatgcctatattcccagcactttgggaggccgaggcaggaggattgcctgagcccaggggttta

SEQ ID NO: 176482 - DNA, 328 bp, Homo sapiens
cgatagttcttgaaaaggacagcacctcacggaacagtggtgatggcacttctcaaatatggccaagatgacttcactggtgaattctatcaagtgttcaaagatgaattactgacattcattcacactcctttaagaaatagaagaggagacatcacttttcaaagcatcgagattcctaatcattagtccattgttatcctgctaccaaagccaggtgatgtatcacaaaaaaaccctacagaccagctgggcacaatggcttatgcctatattcccagcactttgggaggccgaggcaggaggattgcctgagcccaggggttta

SEQ ID NO: 176483 - DNA, 238 bp, Homo sapiens
caagtcctggtttcctattttgacgttttgataattcattttgccttgacaaagcataaattactattttatactccaggctggagtgcaatggcgcgatctcgctcactgcaacctctgcctccctggttcaagcaattctcctgcctcagcctcctgagtagctgggattacaagcgcacaccaccacgcccagctaatttttgtatttttcatagaagtgggatttcaccatgtt

SEQ ID NO: 176484 - DNA, 403 bp, Homo sapiens
aatcaccctatcagtcagcacacaccttttttcaggtattttacgttgcggcttgttagggtgattcgaattcggtgaattgccacctccggctcccttaagcggatcagcgctgatctgctcaagaaaaacataacataaacttcataaagaaaaaaacacctctcccccaaaattggccccttatgatcatacacctaacagtcacaaggtgcttttagaatacatcctatttgttctatactaaattatttattaacttttccataatttccaattttgaagacagtagctcacatctgaataatgttttacagtttgccaaagtatttttcacctacattttccctttaaatccctgcagcaaccttatggggtaggcatggccataaccccaggaatt

SEQ ID NO: 176485 - DNA, 593 bp, Homo sapiens
cggagccccagcccggaccatgtggtaaaagtggccgagtacaacaaagtgaagctgagcatcttcattgcccgcctctatcacgactgtgacccgggattccagcacgggcttcgcagactgcaggacacagaggcacgcgtgcacatcatgtcttctaaggaatttgaacactgttgagaagactgtgtacaagagagatgtgccatgtcagccttgcaagggacagcgtgaaaactacccatctccggtcaccaagttgcaggaggccaggagccaggaggggaaaccgctcagtttgcaaaacgtcgcttccacaagcctgatggctgaaactgctcactgtaccctgaaaccagctttacctacagcttctgagataaactgctgcaactctgggacccacgatgcctatcacagtggctcatcaatggaacctgccggctcccaacccttcctagggcccatgaactctctgaaaagaggaacagaaatatttctcctttttgtaaaatctttaaccttccctttgttcttcatgtacacgctgaactgcaattcttcttcccaaataaaacattaaatttaaaaaa

SEQ ID NO: 176486 - DNA, 444 bp, Homo sapiens
tgatataaataggtagtagaaatatacataagtgtgaaagttaagttttgagaaacaccttttgtaaaaaaccgatggtaagtattgggtcattcttgtcacacccaactcaaacagaggccaggagccaggaggggaaaccgctcagtttgcaaaacgtcgcttccacaagcctgatggctgaaactgctcactgtaccctgaaaccagctttacctacagcttctgagataaactgctgcaactctgggacccacgatgcctatcacagtggctcatcaatggaacctgccggctcccaacccttcctagggcccatgaactctctgaaaagaggaacagaaatatttctcctttttgtaaaatctttaaccttccctttgttcttcatgtacacgctgaactgcaattcttcttcccaaataaaacattaaatttaaaaaa

SEQ ID NO: 176487 - DNA, 323 bp, Homo sapiens
accttcctaccatgaagcgccttctgaagagggtgacaggccatcccctctgcctggcgtgcccacattcaggttctgcctcagccggcagcagacctgccctcaggaactctgtgtagcatttctgggatgttctcctgctttccagaaaaccagagtgggttgcctgcaggagtccccacaggcatgcgtggaagtggtgaccgtccccaaccatcccctccacagaagagaggctcatgccttcggtttctatttcctgtcaatttgtgtccataccagtctgtttaaggataaacttaatttatgttagtttaaaaaca

SEQ ID NO: 176488 - DNA, 473 bp, Homo sapiens
gctaccacttaagatttataaaagcttcattttttctttcattctcttaacttgagtcctcacagagcccactttcctcatcacagattgccaatttttggtacgttaaaaatcccatcaagttgcacttatattatgtgacaattagcttttaatgatggataaaggggatagatgcttaaagtcattttgcattctattactgtacccatctaataaagaaaagctttttaataaaggtcagaaaattttcttctttaatcaaactctaaaagacacactaacttggaaaatacattaaattggttgggccaagagatatgtaacagaatgtaaagacttttgtcaataaaccgcagaggtaaagaaacgtctctataatgtattctcttaatttctattactttttaaaaaatttttttttttttttttttttttttttttttttttttttttatttttttttttttttt

SEQ ID NO: 176489 - DNA, 360 bp, Homo sapiens
tccttcctgccaaatcaagctcctggctgggctgacaatgtgtcacatggttccccctgcctctgcttatgctagcttctgttggaccactgacctagcccatcacggcatggctatgccctatgtacgtttaaggcttaccttaatgctggcaccttcttcctagcactttccctgctctctccaagatgtaagttgtctcctccttgaatgccacaactcttttatcagtatcttctgatggcctcactttccatcacgtgttctgtgcatgtcataccacttatcctggactgaaagctactctatctcccacagagagtaagacacaatgcacgtcttgaggagtaaccgaagaat

SEQ ID NO: 176490 - DNA, 505 bp, Homo sapiens
tgctggttaccttcccagggttttggcctgttgctacaggtcctggagttatagcatttcagaggaagtattttgcaacaagtattaagagagggagcacgtaagcagaaagtctttttggggtgggggtggggggagaccaatgatgagatccaggtaacagcagccttaactcttttctgtagctttcccatacagcacaaagcagtgaccattttacatttatttgtgaggttgtgactaatgtctatgccctctaactaatacgttagctctatgaagttaggggctgtctctgtgtttgctcatgacccagggcctaacacagtgcctggcacacagtaggtgcttaataaattctccagtcatctaaaccacacctttaatagtaggattgaggaaagtaaaagtttgataggtcactacatatactttttaagagatttttgtctttggaactagtaaaagttttactattcaaactaaaaattaagtcaaaggtaag

SEQ ID NO: 176491 - DNA, 594 bp, Homo sapiens
agcgccggtccaacctgaagttgccaagataaaaattaaaatgtacaaaacttctgaataagtaaaaatatatacaaatatgcaggaagtaaaaggcagagttggtaaccaaaggtatagaagccattttctatggcaagcccactaatgtactctaatgttctgtagtcattgtgctaaacgacttacatatggataggtgtaaagtaacaactctctccttctaacccctattctgcccaaaaacttatttagatgaaactagtttgaaatggaacttaaaatcatcaaattataacaggttcctttgtgtaaacgctgtattactctttgacccctttaccctttccttcctttatagctctcatcacaatttaacattctacatctaagcaaccaatttgcctcttttgctcatgacataagatacatgtccatacaggtgctagatagttacccaaagactaaactgagaacacaattacaggtttgattaaacttgaagatctgaatacactgatcattaatattttgatattgatgagtcattctctctaatcctttgtttcaaatttacaaccaagaagtgaataa

SEQ ID NO: 176492 - DNA, 482 bp, Homo sapiens
gcactaggtggatccggtaccggtaaccgggccctttccaccccgccacaaaaaaaaaaaaaaaaaaaaagcctcgagtttgaacaacgtcttcccgtggtccatgggacattatactagggacatctttcaaaagtcaggcaagtcatatggaaaagtcttggtggctgggtcattctgagcaaacacatccagtactgactaaatcagatgaggcttggtcaccaaaattgagttaactctgctgcgtgcaagaagcaagaagattgcaggtccccaggacagagcctggaaggttctgaatccttcctgtgtggcccgtgtgtcaccatcctccccagggacccaggctcagcccccccaacagtgagggggggtcaccaagcatcaggctgagaggaagcagggcaaacccgggagggccatggggccttgcaactacgcaagcctcacacattctcctccagtctgcattcatggca

SEQ ID NO: 176493 - DNA, 191 bp, Homo sapiens
gctacaaccagccaatgatgaaccaaaggtgttcacacccagctgacagctgacccctcagctcaggggacaaggccaccaaggatgtgatgtgcactgctccccaggggaactacatgtggaggggagtggggtgtcagaaccaacagtcccactgtcatgtatttacaccagaggttaaggacacccag

SEQ ID NO: 176494 - DNA, 428 bp, Homo sapiens
cagtttgctccttggccagggttctaagtgccactcagctttccccaaatctgacttacgtgctcctgcctggagccatgggcagaaggttagtgagccgctggtgctgatgtatctggtaacgtgtgccatgatacgagtactggggcaaggaccagtggctaatgtccccagttgtcccctgagccttgcaggcaggtatccaaaatgctgtcagcagatagacataagcatgttgtccctcgctccttgtgtccagtgaggtcagtctcttaaagccagaagggactctgaacttcatcacacatgggctcttcagtgccctccccaaccctgaggccccttcttcccagcctcttactccccatcaccccccattctgtctgtctcaccactcacttggaataaccaagctctgacctgagaaa

SEQ ID NO: 176495 - DNA, 362 bp, Homo sapiens
attattagctggcttttgggaacagaaggagcccttattctttcagccatcacacagccagggataatccccacagccagggcagagctgcatttatcccttgatgggctggaaaatatatgtattgtgtctcaagaatgcaggccggctcagcaggcaatgaatcaggtggctgcccccttcttcacgatgctcggtcacttcctgcccagctattttctccaccgccgccgtttgatgttcagtcctgagaacggatgctggggctcccagcctcgcagcatcatgcccaggaccgctgtctgccagagcatgaagtcagccttggagagcacatggctcctggatcaagagcgttctcc

SEQ ID NO: 176496 - DNA, 472 bp, Homo sapiens
tgccctggcaggtgtggggttagggcaggcagatacccagcaggtcgcctgtgggtgggcactgtctcctcagcactgtccctgcagccccaggggcaggtgaggaagggggcagagagttgtgcctaggccatgattgaatttgagccacagactcagggctggaaggctgcggacttacctgccgctcactcctccaggccaggcttggcccctgggatccctggggggtcacagcccccttctgtcctgtctcccgacactgcgggctcctgcggagacccatggagaagacaggactgaggaccttgaacaagctgtcacttccctggcttcctcatctgaaggaggaggctggacaggacttacacccctgccctggagaggagccaggcagagtccacctggccctcgccagccgcctgacctgtttcctcgcctgtcagacagagaggggcacagggataaaaca

SEQ ID NO: 176497 - DNA, 180 bp, Homo sapiens
cagcacaagcaggttagaggcagagtacactctgcttttcaaaacccagtgcattctttcaggactgtgacagcagtcactgggcaaacactcttgaggtagttacaatctgggaatcctggaatctgggagatctagacttgaatcttggttctgggaccatcagtgactgttctctaa

SEQ ID NO: 176498 - DNA, 301 bp, Homo sapiens
cagtctgtgtcctctctctactgaacctcacactgtggcagtttcttctcaaggctggttctccttattgcagaatagttgtcagcaacaactggagttgttaattctcatctcctgggagaaagcaccagcgatttctccacatcggagcttccttctgctcggaccgatttgtgtcacatgctcacctctgagccaatcagaggagacgcaactaaggacaatcaggtcccaccagggtagggacaaggacatctataccacatagctagaaatgtggagtcctgataggaagatggga

SEQ ID NO: 176499 - DNA, 443 bp, Homo sapiens
cctggatgaggggtgaggaattaataacctctaatcacagaataaaaatggaatgagaattccatctacccaaatcagacaattaaaaagttgaaagaggttacagtaaaaactgggtaaaactaaaacttaaaaaataatttcagaggatacatgatatactcgtcacacagaaaactccagttgaaccttatggacttgaggaatggatacctttgtgtctccatcacttagcacagtagctggcaccatgtaagttctcacagaattttcctgaactctccaaccagaggcaacctttcactctccattcacataacatttccttctttctcttcttttgggaataacatatcttgcttgaattatatttatctttatgccagtttaattctctcttttagattcatttacatctttgtatcctctagctcattattttt

SEQ ID NO: 176500 - DNA, 531 bp, Homo sapiens
ttcaaggtgctcaaatgtcccacatcacttctgtgaaaacccaaacacagaagccacccctctcagctgctacaggccagaaatgaaaattactgcaatccccaggagccagggaagacctctgctgacattccctatgaccactgtgacggtgccgccttgggctgcctcccccactccgtacagagagcgttccagccccaggctcccagtgcctgctcccagcgcctgctccccggcctccatcactccatgccccagggacctaaagtagaaagcttagttttctccttgtttgagtgcagttgggataatttttaatacattcctttttgctcttcatcaacttcaaatgtctcaagatgtcctgagggcaaaagagctgatttagctctcagattaaaagagagtggcctaacgcctcactcattttgaaatactgacattaacggggaaaattactcaagctctcctgttacttcctgtgcttaattaagtggctctgcaggtgactcactcccttatttttca

SEQ ID NO: 176501 - DNA, 286 bp, Homo sapiens
ctactgccccccgtcccccagaaccacagacagaccactctggaaaatgctctaatgggagttagttaagactttggccctggggttagctgtgggttcagatcttggctcccatcagccacttagtggctgtgtgacttggcccagctcccttgcctatctgtgcctctgtctcccaatccgatggactagagtaacagtcctttcccggggccagggtggcaggggttatgaatggaagtgaggttacactaccaaaggactgtgcatagagccgggcacagaa

SEQ ID NO: 176502 - DNA, 165 bp, Homo sapiens
taaagaaggcaaactgattaaaagctaaagaaaagaaagattttccctgagggaaaggctgacatcttagaagacaggctagatagacataaactgtttaaaagccagaagatgtgcctaagtctgtctgctcctaaaaagggaatcagacgtggggagggagag

SEQ ID NO: 176503 - DNA, 458 bp, Homo sapiens
tgccatctgttttgtatctggttctgtgcatgcacaattcagaggtgagcctggaatttgtgtcacttcatacacagaactaggaaataactcttttccagctgtcacctctctgggatttctccatactctcgagccgccaagggtcctttttcctggtgttctagctagaatgatggagcttattaatgacacctgtgctgtaattgcagttctgtgagactgcagttgcccaatctctccaagaaagttagagataagaaagagaaaaatgtaattccaattctcccctctgcccacctttcctgatttctctggctggaaggctaaattttctcttggggttttaggtgcccatgctgtcactgccaaagtactgcaccttgactaggggccccaccctcagggcagggccagggaagaaaaaatagacaatacaaaaaaaaaaaaaaagcacc

SEQ ID NO: 176504 - DNA, 435 bp, Homo sapiens
acaggaaataaagcaggcaatagaaactacctgtgggagggcccagatatccagcttaacaaaaacttcacaatagccattacaagtatgttcaaagaaatcaaggaaacaatgattaaagaagcaaagcaaggtaaaatggcattgttgcatcaaacagagaatatcaataaagaaatagaattatctgtgaaaaaaccaaatggaatgcctggtattgaaaatacaataaccaaaataaaaaattcactagagcttaacagtagatcaataaagaaatagaattatctgtgaaaaaaccaaatggaatgcctggtgttgaaaatacaataaccaaaataaaaaattcactagagcttaacagtagatctaaactgacataagagagatttagcaaacttatagattgataaagactgtgcactctgagtaaca

SEQ ID NO: 176505 - DNA, 683 bp, Homo sapiens
tagaactcccatctcttccaaatactgctccataatacagaggctctgccaagggagggggtcagggcaagccttaaagactggcaagaccctggcccttcctgagaggcctgactttatgtggagactaacagcatggtataatacctatagaggaagaccagccagaagtttaaaagggagatcagagaaagagcaaaggaggccttgctaaaatcacggtcatacttggtgatatggaaaagtgtacacatacgtaaatctgcattctctcagaagcaactgaagaaggaattgctttgctattagttcctgactaaatgtgagacaaacttataaactccctgaagtgtgaaagcagtctccaagctacagagcaaacagtaatgaatggaaaccttattggggccaggcatggtggctcacgcctgtaatcccagcattttgggaggctgaggcgggtggatcacttgaggccaggagttcaagaccaccctggccaacatggcgaaaccctgtctctactaaaaatgcaaaaattagctgagcatggtggcgtgtgcctgtaatcccagctactagggagactgaggcaggagaattgcttgaacccgggaggtggaggttgcagtgagccgagatcgcccactgcactccagcctgggcaacagagcaagactctg

SEQ ID NO: 176506 - DNA, 247 bp, Homo sapiens
cccagggtatgtgaaatgatgttattctctagtcctgtctgaattatccctggtggggctcccttcctgtgcctcgagatatacttctaccaatgtggtcatctctagtctttggaactaaagggggctgtgttggagagcttgtggcatctccttcgggggaagaaggtctgcattcttcagggttctcatctaggacacgtacttatcagcacagagatggtgggaatgattgggccactagtta

SEQ ID NO: 176507 - DNA, 190 bp, Homo sapiens
gtaattatattggggttgatgggatttgggggttgatggaagtattctgaatcttgattgtgttgatggttacatgctctatatatttgtcaaaactcattggaccgtatacttacatgagtgagttttgttgcatgtaaatcatactacaataggccgagcatggcagctcatgcctgtagtcccagca

SEQ ID NO: 176508 - DNA, 618 bp, Homo sapiens
tacgtgaccccataaaaattacattgaggatgagatagtgtcgtatgtagagaagaatagattaattcaaagaatagactttaatgttacaccatagttgctatattactttcgataaatgtgtgtgcagagttttttattattgctgaattatttaagagtaaattgcaaacgtaatgcccctttgtccttaattgcttctgcatgtatgttttaagaacgaggagttcttttagggcaatcacagtgaaattctcaaattcaggaatgtaacattgatatggtgctgtttgttatctaatggacagttcatattcacattcactaattgcccattatgattcagcagttcccacccatttgcctacccaggatccaatccatgcttacttgctgcatttgcatttaattgacacgtctcttcagtctcctttaatctgaaactcttccttactttttcttcagtactttcttttattaagcatctagttagatactgttgctaacacaaagataacaggctctgcccacgaggaattcagattatacaatttacttttagcataatttccaattatgcagattcatatgactagctatgtatacttatttctgatt

SEQ ID NO: 176509 - DNA, 806 bp, Homo sapiens
atctgtgcaaagattcttagtgagcagcttccttgtaacgattacatgcagaagttctttgggggaggtaggagaagaaagaagcaagatataattttaaaaggagctgcactatttcagaaggaaattgccacctaaggtgggaggcattgcagcttcctggtgctggaagcactgaagattgccctgtctcctgtgttgcctgtaatctctggccttggttccttcagtctggctacttagagctttgtgattctttagcaggggctgggaggtattaggagcccctggccctgtatttctgtggcattttatttggcctctctagggggtgtattttcgagcagcagctgtgaggtcaccctgggtgcagccagatccccatacctgctaatttagctccttttgtgagctattttatttcggatgccttctgtggaaattttgttccagactgacttgaaagtgttttcagcatcgattctctctttgaacagtataaccagggtttgccacttgtggggaaaaaaggagctcatcttgagctttaagaacagtatgaggtgggcttcctgtgtccagcccaccccagtgagaattatgccatgtgtcttctctccaggataaaccgacttttccattttacataaaatcgaatctcttgaataacaaagagtactgtagatactgaactggcttctcgggactagatggacacccttagtttttcagggctaataattgttttttttccatgatcaagttccacatggacttcgcccacagtgcttgtttttctgtgttgt

SEQ ID NO: 176510 - DNA, 635 bp, Homo sapiens
taactgaataaatatttctggaatatctacctagtgaaagatatgtaagggaatgaaagatagatttttaaaatctagtcagaattaataaatgggttcaatgcctttgtcagacttatttttcagataacactttttcttaacagattttcttagattttaaatgaaccttttcaaatatgtctgaacaatattttaataatttatcaattcacaattacatatttaatttccaaatatgctgcacataacaagtaagctcatatatttttactgagggaagtgatagtggataatcagtctaatcattcctttgcttaaggcatttaaatattgccatataagaatagcacttactagctttgttcacttactggaaattagatggagctgaatacttaaaagtcaattttagccaaaacccttctgctgatattcccactgcctataattgccaaattaataatgaatatgtggactttagaattaaatgtcattccttgcttgccttaagattttaaaatattaaaaacaaaataatcctttaaattgtcaaaatgtgaggactatcatgacaaggaagaggagtgattttctttttttccctatgtagaaaattttccttaactgagttt

SEQ ID NO: 176511 - DNA, 411 bp, Homo sapiens
  misc_feature (354)..(354): n is a, c, g, or t
taacatctagttgcctgctggagatgggagtggatcattcatgaggacggatgagctaccctaagaagtgagtgcagatttaaaaaaaatcctgctaggcgcggtggctcacgcctgtaatcccagcactttgggaggccgaggtgggtggatcacgaggtcaggaggttgagaccatcctggctaagacggtgaaaccccaactctactaaaaacacaaaaaattagccgagcgtggtggcaggcacctgtagtcccagctactcaggatgatctcatctccacatccttaaattaaagaggaatgaaagagagatctgagacatacagtggagaaggccatgtgcagacagnggcagggtttggagagatgcaggcagtagccaagataagccaggagccaccagcagc

SEQ ID NO: 176512 - DNA, 295 bp, Homo sapiens
gcttaagcatgttgctgtctgtgaatcttaacacagatatgccaggtgatatctttcagtgatatgacacaataggtaatctacagaaatgaaaaaatgcaaacaaaacatagtaattattaaaaatgtttcacaaggaacattgtttttcagatatagatcatgtaaccctaacactaataacctgaaggctaaaccaagtttcatctctgttaaagagaagaaaactgaggccaggaaggtaaaatggcccatttagggttacaaagtggtggcccctgaattaggatttctg

SEQ ID NO: 176513 - DNA, 509 bp, Homo sapiens
gattaggtaaggagagtgacttcaaatatatggaagaagaagtctgaaccagatggcaaggttctactaagggcaaagaaccttctgacctctcggacttcctaaggaactttctccagcctccctcccacattcccaggtcaccacacatacccagacagtctgtttgcatcagattgcacgctttgcttgttctgtcggttgcctctgctctctcgtgttggttattaagctcttgtctttcacagccttctatattctgttttgtgattctgcagtttggactctgcaaactacacttctactctgtcagctgtctcctgttagtttctaccactgcatagagattggaagtttggaggagaaagaagggaaatgctcatttcttttcatttgctgttctttcagcaacaattcttcatccccctcaggcagcagcagctgcttccagtggtcattggttatgattttcacttttttttttatttcttcatttcacttacaggccc

SEQ ID NO: 176514 - DNA, 605 bp, Homo sapiens
tcaggtttccttctctctcctctgcaataacacaatcttaccaaagcaaaaataaactatgcactggtcttacttgaccactcggctgtatttgacagaattagccactttctccttctggaaatacagcagtccccccttatccatgggggatgtgttccaccaagacccccagtggatgcctgaaaccataaataataccaaactccatattgactgttttttcctgttcatccatacatatgatcaagtttaatgtataaattaagcacagtaagagattaataccaataactaataacaaaatgaaacaattataacaatttactgtaataaaacatatgtaaacgtggtgcccctgtctttctctcagaatagtttattatactgtattcaccctacttcttgtgatgaagggatgaagtggaatggtgtgagatttcatcatgccacataagaggtactactgggagccaggcacggtggtatacacctgtaatcccagcactttgccaggccaaggtgggcagatcacttgagctcaagagttcaagaccagcctgagcaacatggcgaaacgccgtctctacaaaaaaaaaccagct

SEQ ID NO: 176515 - DNA, 120 bp, Homo sapiens
taaatgataaactgtggattggtgctggttagtgagaaagttttcactgggccttggtgaaatggaagagtaagcaggacaatgtaatgatatcataaagttaaccttaactcagagctc

SEQ ID NO: 176516 - DNA, 352 bp, Homo sapiens
catcctggtgtcaggctccggtcttgctttctccctgatagggtgaccaagaggggttttctgagctcctttccacagggtatcccaaggacacctgatctaacaagggccagactatatatttactataggccctacacagggccagaaggtgagcagaggggtcttcagacattcagagcacacacccataccacagcgagagatggaacctctaaagctggcaggttttaatgcaagatcccctgaccaaaagcaggatgctggctgctctgaggagtcagcgagggtgtgacccccactcccactgcggtggaaggagtgggcatcttttctgtaaacttgagattcc

SEQ ID NO: 176517 - DNA, 333 bp, Homo sapiens
cgaggccccgagaggtaaagcagtttgcccaaaggtacacaaccagtaagggatctacccagggattcagaccaagtcggagggacccacaagcccaaactctttgtcttccattctccttgaaatttaaaaatctaattttttccccttgttttttcctctgtccttatctgtgatgctatgtgaataattagcccgaagttcatggctgtcatctgcatttgataagaactatacctccttgcccccaacactcccccacaaacctgagttgagttagaggcgcagagcattcactcaagaatgttagtctcagctctgctgctcacctgc

SEQ ID NO: 176518 - DNA, 728 bp, Homo sapiens
tcagcacctgaggcaaccaagccactgtttggtagccgtggcggactggaacccaggggtcctctgtcttctatgtcggccaccaccacctctccctggcttcttcccttggaagccagcagagctgacctccagggtctgcaggttcatgacgtcttctggaggcataaggagagaggtgactcttgagggactgacaactgccttgtccagtcagcagccacaaccctccaacgtccccctccctggccccaccagtccactccagagacatcctgtagaaggcccacccgctggcatgggctcctttctggctgctgagccattctgctcgctctgtgaggacagagggaaaaaatgtgttttcctagctcttggcagtcagcactgctggagcctcctccctgctggaaggggagcaaggctggaagaaccaagcaccacagagaagcaacggcctggggttccagccccagttcaggtaccctctcacactcgctgtgtggcctcaggtacggcactccctctctctgggcctcagttttcccactatgccaaacgtcctccgagcctaaggtaccttccaacaatgactgtctctgagtttagagtttcagattctggcccagagctccaagaccaccagcagaatggaggtagggaaaggaaagcggtgaaggcttcctggaggtgggggcatgagacacaaactatcagactatcagact

SEQ ID NO: 176519 - DNA, 524 bp, Homo sapiens
attaccttcctgtacatcacaaataatcctggagggcgtgacaggaagtagccctactcatactaataactcttgattaaattaagatttttttctattggtgttaatgttttaaattttgtttaatgttaaaattatgttgatgtcaaatctagttggattatttggaagttcattgtacccattctttaaacttttctctatttgcaaatttggggaaatactattttggtcctgttctatggatgtgaccttgtagggtctcatttgtgtgctatgcagactcaaaacaatttcctggggtaaagcttacacctgactttggttttcccttgtgggtgagaaagcctttgatacaaccagctgttcttaggtacctcagctttcacaacaggtcaaacctacgtttgaattgtctattaaggcatatggatctgaattttaaacaacacagaatagaattccaggatttcgctgagagtataatctcatcctgtcatcaaatatttattaaaaactcagta

SEQ ID NO: 176520 - DNA, 303 bp, Homo sapiens
ccctaacctatataaatgataaaaaggaaccgaatgggagatattaatgtgatgttgctgggaagagaaatgcctgtcttaaattagtggttgtcagggaccaatcccctgtgcaatattttgattagtggtgtctgggttggggccaaggtacatgcaattaaaataaccctctatagttgaattcagtgtccagccagaattgaaactatatagattaactaatgtcgtatccgcattttggtcttatgggggtaatatttgtaataatcatgcttttggtactgatgttctagtgaagtt

SEQ ID NO: 176521 - DNA, 536 bp, Homo sapiens
taggcttaggtcattctgtctcttgatattatattaggttgaaccaagtgaaattgctatttctgtaggtcaaaacagttgtatacaggttgagcatctctaatctgaaatccaaaatgttccaaaacctaaacattttgagccctgacatgaccctacaagtggaaaattccacacctggcatcttcactttctgatgattcagtgtacacaaactttgttctatgcacaaaagtattaaaaatattataaaaaattaccttcaggctgtgtgtataaggtgtatatgagacaaacgaatctgggtttagtcttgggtctcatccccaagatatcttatatatatgcaaatattccaaaatctgaaaaaaaatccaaaaatcccaaacagttctgatcccaagcattttggataagggatactcaaccggtattggcaatttaatactggttcaccctaatatgttttgaaggatctatactgtatacattcttatttcaataatagaaatcataactttggccttctctctaaa

SEQ ID NO: 176522 - DNA, 544 bp, Homo sapiens
ctctatccttaatctataaacacaggactccattctgacaattgtcacagaattgtcaattcctctgacccacagtgttagatgtccagtggaattgacaggacatcatacatttcaattagttccactctccattgctgtggagggtgaggtgctacctcaccttcacggggaagacccaatgttccaaggatgtgcagcgcgggagggccccgaaccattcagaccatactcatgttaaggcccatgtaacggtggggtgtgctcaagggcggaaaatagccctgtgtgctttgaaggcaagtgtgtgcaaacatacccaataacagacatgttttgtgtatgatactatattcccatattgtcaatttttcttaaattagtaaacaatgactaacagaagtggtaactgcctatatttgaatttatgcaaacatacatgatttattaaacactttatctggagaacataatggtataaatggaggtttccaggcgactggatttgtgtgtgtgtgtgtgcgcgtctataaaggaagactat

SEQ ID NO: 176523 - DNA, 198 bp, Homo sapiens
attattgcccttagaatacattcctagaagtgggtcgaaagggttcatttttaagcttctaacatacactaccaaactgccctccaaagaagtttctccaatttaccctccacccagccatacacaccaatgaccatggaagctatttcatcactccatcactctttgcaacatttgtatcttttttttttttttttt

SEQ ID NO: 176524 - DNA, 717 bp, Homo sapiens
ctgctggttaagatccgttatagtgctttgtttatttagagtgcccttacttagtggcctctttaattctccacggtgctatgagaacaccataggaagtagggttgaaatagggccagggcgcaccacgggtggtggtgaggtcactgtccaggtctgggactcagccattgtgggagggggacatgaacagacactctaccacatcagggaatttgaatactgtctttggatatgttgatgaagagactgtcagccagggcatttcggcttcctatgtgggttctggaaagcttgttggaaacagactcgtgagacacactcaaaccagtttgttttcttcagcaaacacctggtagagattggaattgaacagtgagtgaagaatgacctcacgctgcccagaattctgattccatgtgtaatgcgaattctgagaggcctctgtttctcagcttttgggtggtattcagagaggtctagtaacacttggtgtcacctggctggtgagggcaggctccggtgaccgcaaagctaagtgctctgtagggcacctccctctctttcaggggctgcctgggcctctggtgcacatgatccatggagtcagagtcagagctctcgtctgacaagtgcttttgctttctttctttctttctttcttttttggagacagaatctcactccagcctgggcaacagaatgagacccttccgc

SEQ ID NO: 176525 - DNA, 153 bp, Homo sapiens
ttaggatgcttcatattttatattatttaaaatagcacaattttcaagaaggcaaaacagtagcaattcaaacatggatttgttcactttgggttcttgtttcttctgtcttcccccagacactctataattggatttgcttctaggtttaca

SEQ ID NO: 176526 - DNA, 385 bp, Homo sapiens
tttatttcttgctgtgactatttccttagtattataatgcccacttctctgaaattcaatccctgcacccccttcaacctgcccaccaacatccaacagtcacatctgtccagaatgcaaatctgactctgtcacctctagctgaaagctcttcaataaaatctgaattatttgaaattcccccaaatgcacctggttctttaattatcactttatttacttggcttatcttctatttccagtgcaccattttgcagaatgtttatgccttcccaggattttgccagagttttctctcttctgagaagcccttcataacttccccaaagtgtaacttgttccctaccttgttcatctgttcccactatgctttctgcacactttt

SEQ ID NO: 176527 - DNA, 414 bp, Homo sapiens
ccggcaccatctgtgccatctaagaccctacacagggctctgcatgtgggtggcaaacctggggactgtgaggtttctggcaaaataatgctggcatgctgtggtgggcgtgtcctgctcagataacgtgaatctattccgctttgcttccagagctcctgaaatcaagagtggcaatgataagcttggaagcaacactaaccccgtgcacatgctctccatcctcccaccccatcactggacaccacctataacctgaagtgggctgacaccctgaaaaccacgtccatgcaccttggttttgcccacggtgaccaggtaggagggaacttgagttttacattcttctagggttttctctttctggagcattgcatatcgtttttagaggaaaataacaaaaatggaatcctt

SEQ ID NO: 176528 - DNA, 456 bp, Homo sapiens
attggtgtccctagcatcattcctaggggacattgtgtgtgccaccattacgtgcctcgccagatgtaaagatggtgccacacacacatgctaactgtgatgtgaaattcacaaagacctcacacatgcatgatgccaactaagaccacacgcggtgggtgggcaagccttcaggagagctgggcaggcctggttgactctgttccactcttaaaaccaccttcctctctatcgatttggcatgggaagccaatatgcacgattttgttttttctatggaaggcccattacatgattctctttagtgcaatcaatactaatctaattgaggtaattagaaaatttttacaggtaactggcttacaggccaatgcagcagacaataaaattgccattcgccaccatcagtctcaaactttcacagtattcttcctccacggtaaccagaaaacaagt

SEQ ID NO: 176529 - DNA, 460 bp, Homo sapiens
ctccatgttcagaattaacaccctcagtacatgcttctgtgcttctttaccagtgcctacatccatgccatcctgttgttatccatggatgaacaactcagaatttggagaaatggatttggggaaatctctgagacacattttgaaaccagcgaggaattaggctgcaagcggcagcagcagtaacagtgacagcagcaagaaacagccacctgcatctcaagagtggcacagggcttccaccggctgaggcggacacatggcggatgtgtaagaagcgtgcagaaagtggtcagtcatgtgtgcacacacgaatacatgctcagtgtcaggccaaggccctgtgggcctaaggaaaacaatgtcacgtttcaacatgatttgggaaaccctactctccactgaaatctcatattggcagcagaaaactctgccgatgcctcagaagccaaagataact

SEQ ID NO: 176530 - DNA, 137 bp, Homo sapiens
tgctgggattacaggtgtgagccaccatgcccagcttcgattcctttttaacgctgaataacattccactgtatgcctatactatgttttgtttatatagtcacctgttgatggacttttgggttatttctaccttt

SEQ ID NO: 176531 - DNA, 163 bp, Homo sapiens
gcagtgccatgtttcaaattcagatgcctgacaccgataaccctattccacgcagtgttctttatacctccagatattaagtcatttggttcacaagatggtccggtggccacaaagtctaggcaacagtacatccaatgcccctaactttgcacttaaacca

SEQ ID NO: 176532 - DNA, 703 bp, Homo sapiens
caaaagagaagccggggttaatcggacgagtgtgaaaggcctagcacagcatttagcacactgttaatggtatgtgctaactgtggagataagcaggaagccagagcccctgaggacggacacttaaaccatatcagcttaaaaagaggtggatggagaccagggccttcaaacacatgaacagttttcctaaccaaattattataatgtgggcccaggcaataatcttgctttccactgtatttaccagtttaattactgtatgcccctttgatcagtctattgagacccagaagcttttaattaggaaatgaattatggattcatgaagttagaatataaaatagtcaaattagtttttaccccacagaagctatgtttggtggtgggggtggtgggaagcttgtttttacaatgtagggttcactcgaatggtaaggaaatgcggggaattaatatattgactgcctactgcattccaggcatgtgctgggaactttaatacagggctttacaaactgtccacaatgaagggccaattttactttttccagtcggccatggactgatatgtttgcatcaatatatttgaatgctgtgtcacgtcaaaatgctataaacagccaggcacgggggctcatgcctgtaaccccagcactttgggaggccaggcgggcagatcacttgaggccaggagtttgag

SEQ ID NO: 176533 - DNA, 356 bp, Homo sapiens
tcacacacgcgcatgcacacacacacacgcactcacacactcacacacacccgtttcactaccagacttccctaagccactttaattgaaaaggcatgatttagactaattgacagcagatgggttcggttgcaaaatgcagagaagcatttgttgaacatgatttacagcaacgaggcaaaactttctcctttttatatctttctctgagctccatggccagaacagctcagcagaaatgagaggagaaaaaaaagtaattagtgtttaattttttaacaatttttaactccctttttaattgctttacataaacctgtcctagaattttacagccttcaaatctctgtctaagt

SEQ ID NO: 176534 - DNA, 478 bp, Homo sapiens
atctttttcctcttgtcccctctctctggcgtgccctttgattctccttctctgcttgtttctcagggcctagctcaggggccatataccttttgaaatgttctcttttctatcaaaatcagaattgcccctccttttgaaaagtaaccacatttattcaaccattcattgattagtttaacaatgattgggtcagagtccctgccctgcatatgcttagaattttgtaagaaagagaagattttaagaattaccttcgttgtaaggcagcagtaacacagctatagtagagcgtaagggaatcctttattgaagaaataaatgagttttgagtgagaagagcacgcacagagtggaatccgaagggagggtaggctggctgagaaagctgctgctggtctccgctgcgaagttcttccctcttcctgatgtctcaccttgaaaccaccctatcctggcctgtaacaaacacaacagc

SEQ ID NO: 176535 - DNA, 289 bp, Homo sapiens
gtaggagctataagaagggaaacattttctgatgttatgattaagctttagtttaagggagagactgggcatctggggggttccaaagtgctcctcctctagctgtagcactgggcttgtatttcaagaagattttgtatttttgttttattacactagatgccgtaggcttcaaccagtgtactgaggtgacagtctttgttgcacttccctctgcagattcagactttctaccagggagatgggcatgatggatttggcgagtttgggcaaggactgctgtttcctt

SEQ ID NO: 176536 - DNA, 503 bp, Homo sapiens
tcatccattcacccatccatccatcatacatcatccatccatccatcatccattcacccatccatccatcatacatcatccatctataaatccatcagtaacccattcatccatcccccatctacacatccatcagtaacccactcatccatccatccacccatcatacatcatccatctataaatctatcagtaaccatccatccatcatccatccatccatcatgcatcatccatctataaatccatcagtaacctactcatccatcccctatctacacatccatcagtaatccacccatccatccatctacacatccatcagtaacccactcatccatccaaccatccatctgcatatccagccatccatccatctccacatgtacacatccttcagtcatccatccatccagtcacccattcatcgccccatctacacccatcagtaacccagccatccatctatccattcacccacctggtcccccatccatcggcct

SEQ ID NO: 176537 - DNA, 631 bp, Homo sapiens
agaaggagtgcagctctccccaaatacctcaattttagccccgtgaaggtgcttggaactcaggccagctctactgtgggaattgttttaaaccaccacgttggtagtaatttgttacaacagccacagaaaaaatacagacgctcaccaggtctaagtccgtaacaagtgcttcccatggattccataattgttggcatgactgagattgtagcttctagtatccccattacttattttaagaaaacataggataaaaatatgctgtattacttacccaaggtacctagtagggggcctagagtgggacaaatcgagtgtgcaagtgagtgtgcaagtgaaacggcctcattgtctggggcgataccctggaaatcactgtctcatggctgagaaactaaagggtacagacacacgaagagtgaggttgagagtggatgtttaacaggtgaaaggaggaggacggctccctgcagcagagaagggtcccgaagaaatgagctgctggagccgtggtgaaatgtaggaggttttatagatgtctggtgagggggtggtatttgacttacatagagcacaaaagattggctggaccaggtgtgccatttgcatggggtgtgaaaaactggtt

SEQ ID NO: 176538 - DNA, 631 bp, Homo sapiens
ctgcatgcttgctgtatgagactagagcatagctgtttatttatatgaacacaatgctacatggagcattgagagaatataagaaagcagctaggggctggtcaaataaagcagagaagcattccctaagcttttgtttgttttacttcaaacaaactcacacacaaagagagagcccttgaagccacaagtaaatgatgcagactcttagccaaatggggaaaagtgccttatatgtcatgtacccctgtgctgtttctaatttttcctgctccttagttctaagcataccatacacataagtaaaataaaccatattgggctagagcttaagttaaatatcaaaaccactgcatgctgaccgtgaaaactcactcatgctgaacatttgtgggttatcaggatcaaagaaaacttcgatatttatcaaaaaatttagcccaccgtggtttagccttcattaacctggtatgcatttgaagaattcaatagagttaatgcaggccaagcctgaactaaattttttcgacttaggaaaacacttatcctcctaaaaagatagatatcagtttttaaatattggaaaagggcagaataacataaggttcacacatggttgtctgaatgcgat

SEQ ID NO: 176539 - DNA, 596 bp, Homo sapiens
gtcagaggctttgtcatgatgggaaaaggagacctgaattcatataagaaagcagctaggggctggtcaaataaagcagagaagcattccctaagcttttgtttgttttacttcaaacaaactcacacacaaagagagagcccttgaagccacaagtaaatgatgcagactcttagccaaatggggaaaagtgccttatatgtcatgtacccctgtgctgtttctaatttttcctgctccttagttctaagcataccatacacataagtaaaataaaccatattgggctagagcttaagttaaatatcaaaaccactgcatgctgaccgtgaaaactcactcatgctgaacatttgtgggttatcaggatcaaagaaaacttcgatatttatcaaaaaatttagcccaccgtggtttagccttcattaacctggtatgcatttgaagaattcaatagagttaatgcaggccaagcctgaactaaattttttcgacttaggaaaacacttatcctcctaaaaagatagatatcagtttttaaatattggaaaagggcagaataacataaggttcacacatggttgtctgaatgcgat

SEQ ID NO: 176540 - DNA, 126 bp, Homo sapiens
agaatataaatttatattgtgtacatttagcttttaagcaatttctagattgaaagtatgttttgcaagttaatagaaatgttttcctattcttttcataaagaacctattctgtctatatactat

SEQ ID NO: 176541 - DNA, 466 bp, Homo sapiens
cggcacgaggggacatccctgatttacttatttttatatcatctttatggactgaaaaggccaaaatttttttaaaaatatataaactatctttacatcagatgaaaggaaaaagacagaaacagatgcaaacatcaagtccatgttattaatagaagaaacggctactttcatttttgtttttgttttttttgagacggagtctcactctgtcgcccaggctggagtgcagtggaatgatcttggctcactgcactccagcctggcgacggagcaagactccatctctaaataaataaataaataaataaataaaaaaataaataaaataataatgccagctgtgcagctctgattgcagggagcatgaagaagaagttcagttaggtaattaaaattaagtggatgtttgacctgaaaaaatagaggaggcattcctaaaagatttgctatattaatggtttca

SEQ ID NO: 176542 - DNA, 334 bp, Homo sapiens
agcctgatgaatcctgtttccccacctcctttcattcttggtgagcttctgccttatacttctctttcagtcatctgggtacctccttttattttaaagacaaatgccagcctgtcgctgagctccacctgagtgtgtctagactgtgtgaaatgagcttcatgtactcttgtaggaaataaggaatgttctggaaaagtgacgcttccttgagtgagctagaatgggccctggaatgatcagctccgttttcaagggcagggagtgctatgacaggggtcactgccaagcactttgggtctctacagttttatctactattcctaccaagtca

SEQ ID NO: 176543 - DNA, 386 bp, Homo sapiens
agtgagtggctagaaccccagcatgagcttcctctataccattatctcataatccagctcactgatttctgactaaagaagtgatgaaagcttttgcagaaaacttgcagaatatagaagactttagagagaaaaagaatcactaatagtaccatgtaccagaggtaatcagtagttacattctgttgtattttttttagtcttgtgtgtgtgtgtagacggagagacagttttttttttttttttttgagagagggtctcattcccatcgcccaggctggagtgcaatggtgtgatttcagctcactgcaaccgtgacttcttgagcttaggtggccctctcacttcagtcgcctgagtagctgggactacgggtgttcaccact

SEQ ID NO: 176544 - DNA, 832 bp, Homo sapiens
aaaccgtagctgtaatatcaggttacatactttctgttttattttcccttttctctgtgtttttggttacttgagatggcctcctctctctcactcctggtttgggaaggccttgcttcctctgaaagcttgtgagcagagggctgatctgatcagatttgctcttctgagtggtgctctagaagccacgtggagcatggatggtgtggggtgtgtgctggatgaccggcaagcctggggttctggaggacctttgggtggctgtcacagttagaggataagaggtattgaagccaaaactgagattgaggtagctgggaaggaggagaggggagagtttagaagctttaggtaggaggcagacctgataggacatggtggtggtcttcagatgatgggtggtggatgggatggagagagaagcctggtttttgactttaacactcgcaaatgaagcctttctttctaggttttgtggagagggcagtgcataaggggatagtaagtgaagttctagattgagttttgaggtgcctggagatatctgggaaaaatatgtaatatatatatttctcttacatgtatgagactggcttgggctggggtctgcccttgaaaactggcagctggagtcttgagtactttcctgagtcattttttgagctctttgcaagataatgttaaaaattcaagaggccgggtgtggtggatcatgcctggaatcccagcactttgaaaggccgaggcgggcggatcacctgaggtcaggagttcaagaccagcctggccaacatagtgaaaccctacctctactaaaaatacaaaaaaaaaa

SEQ ID NO: 176545 - DNA, 735 bp, Homo sapiens
aaagataaaagtttcccttttcagtgtgcatctgaagaaccatccccatggaaaataattaaattatgttaaattggcactcggctggaaagtggatcccacagcccctgtgcatgaagctcttgtctgaagttctttcacgggttcttagactatcccaggaagccctgatggtgcttcagggctcagagtggcccctgtgagcccaccccgctggggactcagaagttgggggaggggagaggtctgaaagcctgaattgctttcctagctgttcaccaggtgacccccgggttcgcttagtttctgcatttgtaacatagctgggagaatcctcctgcagggccaggctaaggataaggatgtgggcttatccaggagaaggatatgggctctgttggaggggctgggtttgtgtctcagctcctgcacacaccatctagccactagagtctcaagttttggttgaaaatgaagactgaggtttgaaactaagctgaggtggtccccacctcataaagttgccatgaggatctgaaaagacaatgggtgaaagggctttataaactgtagggtggccgagcgtagtggctcacacctgtaatcccagcactttgggaggctgaggcaggtggatcacctgaggtcaggagtttgagaccagcctggccaacatggtgaaaccctgtctctactaaaaaaaaaaaaaaaaaaaaaaaaaaaaaatcaaaaaaa

SEQ ID NO: 176546 - DNA, 822 bp, Homo sapiens
ccagagaaaatggtgaatcctctctgcagaaaaataacatcaccctgagctactgcaatgttttacatcagtgctcagtaactcactgaaatgtttatcaggtatatcaagaaactgaaccaaaagaaaaaataaacaatagaagcaaactcacagatgacctagatattggagttatcaaataaggacttcaaaaaaattatgatatcagtgacaaggtggaaaatggcactggagggctggaaattgttttaaagcatcaaatggaaattctaaaactgaaaagtatggctgaagggaaatgtgaataggtagatttaatagctgatgggacatagttaaagacaagattaatgaacttgaagttagttcataaaaatattcagactacagcataaaaagaaaaaaaaaacaggaaaaaagcataacaaataaaattgtgacacagtgaaaaggtctaagtgtatctggagcaccagaaagggaagagagagaaaatgggacagatgaatatttaaaagggaaagagcccagaattttcagaagctgacatcaagtaacattcaagaagtagtacaaacactaagcaagaaaatccagagaaaaccacacataggcacattcacaggaaaactgctgaaaaccaaagagaaggagaaaatctttaaggcaggcagagaaaaatatacattcccttcaagggagacaagaccttggggaatattattcacatgacctcttcctgaaggacatggtagacaacaatctacagccaaacaagagatgatagaaaaacttcagccaaaggactggtgggaagcc

SEQ ID NO: 176547 - DNA, 116 bp, Homo sapiens
cacttccctcacagtctatgtaaatttcagctttatctacctttcaaagcccttagctactcaaaggtagagcacactgcccccagaatgcctatggacatcccatttgtttatgt

SEQ ID NO: 176548 - DNA, 507 bp, Homo sapiens
aaggcaatgtctgattaggaattgagataacagtttgtatatatgagtaataatcatacctgtactttatggctttcttatctattatgtcatttgatctttcaaccatttcattagatagctagagcaggtggtatccccattttgtagatgaggaaactgggacttaggggttacttacccaattatttggttagaagtggtgtgactgaacagtaggcataatgtggcagtaggcaggagagtggaaatgggaaagagtctggcagggcaggggctacttagtgaggacccatctggaatgagaatttgtaggaaataagattagaagataggctgggacagatgtcagagccttgaaaacagaatcgtttgcctattgaaaacagcctcaatcatttgcctcttggatatagggctgtaccaagcccaggaaaatgttgggattttttgaaggctttaccaagagcaaaatcagaaagcttcacagtttaaatgttgaattta

SEQ ID NO: 176549 - DNA, 665 bp, Homo sapiens
tccggttgcgaagactgctggcctctaaagcaatttcaaaaacgtttattgtgtacctattaaatacaaggtgttgagagccacatagtagaattagggataggggccctagagatgtggtatctagcagagttgatccaaggctcagctgggaggcagggggtgggggatagcgcccatactgatctcccctcctgggcagtactggtgcgataccagcgggaggatggcaaagtccacgccgtgaacctacagcaagcgggtgagacagctattaaactgttttaagcaaaggaatgacccttggcagctgcagccaagcatgatttgcagagaaataaggataagtctcttcgagaatctataagatagcagctcatttttgttttacaaacaatgcaatttctttcagatgggctacaaagagtagacacaagaaccagcacttaccaactttcatactcagtctaggtccttttttctccccccacaaaacttccaccaggccctactgatagaatatagttgctaagaattaaaatgtaaactttttggttacatgtcacgtgtttactaatcaattctgttataataaaatgccattataaggaaaagaaagtatcttgcgcattagggtaatggggcaatattcagttctataaaag

SEQ ID NO: 176550 - DNA, 450 bp, Homo sapiens
ttcactcacctccccttaagtacccagttgctccaaagaatcagagaaagggctttgtagctcataagcaagacacagaaccagtctccctccctctgggaaggcggcagaaattccacatcagccgtttccatcatccttgaaaaggtggtcaagttggtcaccctggagacctcagccctgtccaccctgactctggctgaaaccattgtatatttctgtcgtctggttatgcataagttctttaaatgatcctaaacattttgaccagcagaagtaaaagtgcagaagagactgaaacagaagagactgaaacatagagggatggttaagttacagtgtcactacttgacagagcattaggcagcctcccaaaacaactgtgaatcctcaatatagaatgtggccaagggcctctaatgttaagtagaaaaaagcagataattgaac

SEQ ID NO: 176551 - DNA, 442 bp, Homo sapiens
aggctaagtaactccttgaaagtctctcaagactttctttacctttcaagaaaggtatccatggccacttgattctgaagctcatggtctttccagtctactcacatactcggcagtgttagagattaaaaggtgctttctataagtatacagacatgcaaacacatatttctttactgttcataatcaagtgtcaattagtccttattagaatgtgggatgtataaatgtaagagaattttcagttaaaattgacagatacattttttaattgtcctaaaatggatttaattatttttctttaatgttatttttatgagaagtgatataactttattgataatgcatacaataactctttgttttgcacattgtttggaaatacaatgtattttgcaagtaactaaagcccaatttaaattaaaattttaaattttcaatc

SEQ ID NO: 176552 - DNA, 284 bp, Homo sapiens
cagctgagtgtaaagatatgccatgttcaaatatttgaagacagcattaaagatgccaataatctcaaaatttaggtcaagcgcagtggctcttgcctgtaatcccagcactttgggaggctgagctgggcgactgcttgaggtcagaagttcaagaccagcctgaacaacatggtgaaatcctgtctctaccaaaaatacaaaaaaaaaattagccaggtgtgcacacctgttgtcccagctacttggaaggctgaggtgggaggattacttgagcctgggag

SEQ ID NO: 176553 - DNA, 658 bp, Homo sapiens
tctgagaaaacgaaaacatacgggatcgtattgaagagggaaactgcagcctaaaatgctgctagcaagcgtgggagaatactaccataaaagttgggacccctgccaaagagcctgtcatcgctgcaagtggtggaatccaggagcaggagggggcttactgaggcaacttgcagagggaggacttggggtgtggcaggggagcagccaagccggcagatgactacgcatctccacgtacacacaggtctccatctcaccctccattatgggccggagagaacatgtttcctgcagtagcgaggataagaataccaagtctggaagagcagccaccgggccctctgctcagcagcacatcgttttcatccgtaatgctgggaaaacactgtgcctctccgtttagtgagaccctcaagcagtcatggctggccgtccagccagggggtctccatgcaaagaggatcacccaacagtgcaggaagaaaacaaattcagagaactcaccactgaggaaacaatggaatacaccgaagctccgtttttacagttttaagtattggagccacccaccggcctagggagaccctagcaactgttgtacaaagtcaggctgatgagggttaaagttagagaacattttacattttttgcaccc

SEQ ID NO: 176554 - DNA, 697 bp, Homo sapiens
tcttgggggcagggtgtggtcgctcacacctgaaactagctctttgggatgccaacgcaggaggactcctgaagtcaggagttcaagaccaacctgggtagcatagcaagatcctgcctgtctctataaaaaattaagttaaaaacaatttgccagacttggtagcatgcacttatagctccagctactcaggagctgtggatctcttgagcccaggagtctgaggctgcagtaagcactgcactccagcctgggtgacagaacaagatcctgtctcaaaaaaaaagaaagaaatcaaatactaggcatgggtcagacatagaagtcagttaggactagatgaccctaaattattggctattttttcctattgaactgaaacttgacaaagttgaaaaactgtcagattttaagagcaaacaggagagaactttgttagaagagttgcccagaactgacatgaccaataggtcataaattgcaacacagggatttttatctatacatggctcaagcattgagacttaggaatctcatcaaggaataccttgatacctgtattgctatatatatatttaatgagattaatctataccccaggcatccaagtttttgaaactttggacaaggtttaagctgctttacatttatactgtctggttgcatagggtaagctaaaggttgtatcaagataaca

SEQ ID NO: 176555 - DNA, 198 bp, Homo sapiens
ttgaaagaggaaaaaataaaaataaaaaactttattttcaaaagcatatacaggcatttctgcttctggctggcaaaattttcctatgatggctatatagatgtttgatataaaatcttagtctcggtatattgtggaatatgtcatgaagaacctgtgtagcttacttacaacaatggttttggcctttactccact

SEQ ID NO: 176556 - DNA, 339 bp, Homo sapiens
tattgtggagatactgaaaagtttttctgtgttaagcttagtaactacaagaagcaaaatatttagaggcagaaaagttggagacaactaaaaaaattaaaaacaagaataaaaccaaaatactatcttcagtcttcttttgctgaaggacctactaactaacgtacaattttgaggagcaagaagcaaatacataatgatcaaaactgctaaacaatatattcaaggggattcaatactacatacaagaccataagagaccttgaacgctttaatgtactgtacaaattgtgacaatgctcatctccacatcacagggctttttacacattgtgtttc

SEQ ID NO: 176557 - DNA, 194 bp, Homo sapiens
gggtcgaggggggtgcccatctctgctcaacagccttctcactgacaaggctcttcaacaaggtgtgccttattactgtgggcaacagaatcagtaaagcttcaaggaaaaggagtcactgtttagggcccacaccaaaagacagacccaaaaggtggctagggtgtgcagaaaagacccagatcccagtccca

SEQ ID NO: 176558 - DNA, 906 bp, Homo sapiens
aattgggatttttctgttttggttggtattggtggtggtatatcatactctgaaatatccagatctatttttgatgtctttcaatggcccaaacattttcagatctggaggagaccccatgaagtttgggacagcatccacgaaggaaaaggttgcttcctgctgattactcagttatagctgtttaaacagacgttcatgaattcaagtcttacagcaacactgcatttattagtcaatcacagacgctaaaattcacttccgaaatgtgaattagaaaatcaaatgccctttttctatttttttttcactttcttttctccctcatcattttcatttgagctataccatctgtcccagcctatcaaataatgtactgtgcatgcctggcaaaaacaagtggaacagtacacctcataaccccatgtaggcaaccactgagcatctataaaagtggtacataacagaatctggccatctggggataactagttatagcaagcttagcttctcagccagcactcagatttgcagacttttaactagttggcaaagcatcaaccagtgttcaagaagagaaacactaacaaacattttttttttcaaaacacaagaattcagatataaattttcaaaggtgtacttgccaatgttgctgacaagaaggcttcaaaagcaaagatcaaggcactgtcatgtccttgaaatggagccagagtcaatccaaatctagcattttgcagcattactaaactttttgggtatgaacatatttttccttccccatattgcctgaatatatacaagcaagggattaaagccgaacagactttgaaccaaatgacatagtacctttcagagacagctccagcagactgggaagagttcctcctaggactacattta

SEQ ID NO: 176559 - DNA, 477 bp, Homo sapiens
cccggcctaacaactctgttattaatatataccataaacatacatctggtggggggaaatcctctctgtaacaaaactcaacacccagttatgataaaaacactcaaggaagtagcaatggagagatacaatctcaacatggtaaaatgtatatgctttagtttcacttatggactagggaagctctagaggcatttccactaagatcacaaatgaggcaaggatcatcactatcttcactactgttcagtaatgtactacagatattagccaatgtagttaggtcgttaggtctacctggccaggtagacctaacaatgaatgcctctccgtgtccaatgagtaacaaggtggcctgggagagagctttaggacaaaggtcctttaatgtatagttttccccccaaataaataagcatacacttatttacagtatggacaatatatttttctttttttctttttcttttttttttt

SEQ ID NO: 176560 - DNA, 371 bp, Homo sapiens
ggtttgagcctcatggagtgtacaatctgcaacgagatcgtccaccccggctgcctgaagatggggaaggctgagggtgtcatcaatgcagagatccccaactgctgggagtgccctcgctgcacccaggaaggccgcaccagcaaggattcaggtgaggggcctggccgccgtagggccgacaacggcgaggagggcgccagcttggggagcggatggaagctgacagaggagccaccgcttccaccgcccccgcccaggcgcaagggccccctgcctgccgggccccccccggaggacgtgcctgggccccccaaacgaaaggaaagggaggcagggaatgagcctcccaccccaaggaaaaaggtgag

SEQ ID NO: 176561 - DNA, 534 bp, Homo sapiens
gaattacaaataagcgaataggtatcaggtggctactgtgtgccaggcataactctaatcacatcatgcagatcaattggatcctcaaaataatcttttacactgatccttttattatctgaggaaactgactcacagtgagggaaagttgttaatttatccaagacaaaaaggctcgtaaaaactggaggtaagagttgaactcaggatggctgaattcagaatccttacctgctggcatatgagtgacttagccccctaacctgcccactctacttctctgtcaagtcctgttcactttgcctcctatgtcctactctttctttcaagcaggtcctactcttcttcatcccctcagctacctctagttccggccaccatttctatcatcttgaagtcctttaagatactctgttcctcctattttaaactcgatagatgtagtatgaacctggtcatatgatgccccgcctcggtggattgccatagcccttgggatccaggcaagactctttaatctggcccaccatacct

SEQ ID NO: 176562 - DNA, 1076 bp, Homo sapiens
agaaaatggttagggataaatagtagacccttcatggaaggttttcatttgaagcccagccaaaggcaacagggtctgccctttgagctcagaactttcgcaggccttaacgacacactgggaccttctttccttttccaaatggcttcagccttgcagtttggaatgatgtcaacatgtggcgtagttttattcaagtcccaagttaatggtttacctttttagaaaactccaaaaacactttcattgttatttaacttttgagttatgtaatgtctaagagtcttgtctctgacccgtgcacctacctgccactgaccaacagtttctcatttccttacgcaacaactagtctggctagcttagagttggtgtgtgattgtttgagactttatgtggaagataatatttaattgttttgttctggtttgttggggtaaattatacaaatggaatgcatcctttctcggccttgaaagaggttatatgacagtacaattataataaattcagtgtatgactttgggtacattctattataaacgaatttttttaaaggtgcagttagaagaaggtggaagaaaaaagaagttgacactccgattttccacatcatctaactaaaatggatttaaactaactttctctaactattaaatctttcttaggtaagtacagttgtatcccagctctagagttaatgtgctgggtgggtttttacaaataaaaaatctaaaacctaaaatagttgtgttttatcttctgtcccaatccaaaacaaaacaaaacaatcatgtgatagtaactaatctctggagatacctgacaagcgtggtccaatagtgacgcgggtttgtcactttggtctttaggtgacattgacagctggtgtggcatatggatcacactgtggtcattgaagtataatgttgcttacttctgagaagtgatcatggggccttttttttgagacggaatttcgctcttgttgcccgggctggaatgcaatggcgctatctcggctcactgcaacctccgcctcctgggttcaagcgattctcctgcctcagcctccc

SEQ ID NO: 176563 - DNA, 276 bp, Homo sapiens
tggagcctggctgtgtgtcaaaggcgagacattccatgctgcccaaggcagagaaagcgtcagcctgcaccaagcctcccttctggggccatcattacagagaaatgggaacagcagaggaaaggaatttggcagtttaagcacaggttttgaaattcctaccagtgagccgctatttgcttgaaagatggcaagaccggtatttccagagagagcaaatcctctgatcaatctttctgcacttttatttttgagtttcagaataatgggcaatca

SEQ ID NO: 176564 - DNA, 290 bp, Homo sapiens
tctccatcctgatttctaggactcctccttaacccaggactgagaatcctacctgccctcccttagcgagcacccagctagtggttgaggaggagattagaggcaggtggtggtttcttgttgttcacttgtaggaggactcggattctcgctatactgaactgggcacctcaaaaactccatctccctggctccccaactcctgtcatttggaagcaaaggtctaattaccagaatctccaggtttctggaactgccatccagaaatgattctgggagaatatctttgt

SEQ ID NO: 176565 - DNA, 428 bp, Homo sapiens
aacaatataaggtataaaaactatttacgtatcatttatattgtattacgtattataagtaatctagagatgcaccaaggatgtgcaaaggttatatgcaaatattataccactttacatcagggactgagcatccacagattttatgtccaaaggaggggctggaaccaatcacccacatataacaagggacaaccgtactttgccattagttgatagaaagctacctcactctcccccttcctcccagatatacacaatagtgcaaaaattacaaatgttaagacctcgcactttccttaaatttcaaattctatagcatatatttttctccagtttcatcacctacaaatgggaatattagaactacctcccaatattggtgtggtaagatttttacttaactgagaataacaaatccaagatgc

SEQ ID NO: 176566 - DNA, 167 bp, Homo sapiens
ggctgaaaaatacttaggaagtagtatcagtaggactggttaagagagagcagaggcaggctacaggggttggaggtgtcaatcacagagatagggaaaatgggaggagaagcaggctttgaaaaagtggcttgtcttgtaaaattatgtgctgttaaaacagtaca

SEQ ID NO: 176567 - DNA, 111 bp, Homo sapiens
agcaagggaaagagagggaattgtgggccaaatcctttattggggtccaaggtgttacctaacccaatttctcttcaggaggttttagttggtgtgtttagaagaaggaag

SEQ ID NO: 176568 - DNA, 215 bp, Homo sapiens
aggttggggaaaatggtggagcaggaagcaggaataatctgtctctccatgcaggtaatactggcagaatctgtcttacttaactccttctggagtctatagaaggcttgcaacttctagaggaaggtttggaatataagttgtggttaatttctgtcaatttcagcacttagcatagtagcaactacccatccctcaccacacatctacaaggc

SEQ ID NO: 176569 - DNA, 301 bp, Homo sapiens
gtagacagattttctgtttcttttgtgtcaattttggtaatttttgtctttcagagaatttgttttgttgttgtttattggcataaagttcatagtagtcccttatgttagttttctgttgctggataacaaaataccataaacttaaaacaacatttacttactagctcagcaatctaggtgtactttggctgcactcctttttgaaagctctgaaagagtctgcttctgaactgattcaagttgttggcccagttctgttccatgtgattgtaggcctgaagtctccaattccctgctg

SEQ ID NO: 176570 - DNA, 463 bp, Homo sapiens
gctgcatttatctcagaaaaatgttgaataatagtaggaatcctggttgtttctgactctgaagtttccttgttaattacaatgtttgttctaggttggcctgcctcttttatagttagaggagttattgatcacataatttgtaataataatatgattaacatgagaatagttgagagtttctactttttgagtatttgtggtgcaagtgtgaattaatgtaatacgttcattaaacaagtgagctaatgagaaatacaatttcaggcacaattatgaagatgttcccttttttctatgacagtaaatgcactttcttgaaagcctggttggaatagatatgacattataatgtaatgtaaatactctttggattgtaaatggtataaataatattgatgaaataaacaagttatagaggcagggcttcgtggcttacatatgtaatcccagcactttggga

SEQ ID NO: 176571 - DNA, 189 bp, Homo sapiens
cagttccctcctgggtggtcatttgggttgtttcaatctttgctattacaaataaagcttcaacaaataactccacagatatatatgctccttgacttatgatggggttatgtctcaagaagcccatcataaataaaaaacatcccaagtctaatatgcatttaatacttcaataaactcattataaat

SEQ ID NO: 176572 - DNA, 473 bp, Homo sapiens
cttggtattagggttattaatataatttttattaatttataatgttttatttattaataagacacattaatttatgtgtcttcttccccctatacccacacacccccatgctggatgtggtacagcaatgaggcgtgaagagaaaataagtctcaggaccactaaatcactaagccaaagggaaaagtcaagctgggaactgcgtaacaggcaaagctgcctcccatttaattcctaaataagatggctacaaagatttttaaaagctacatacctctctcacaattttctcactaggagattccttgtggtccccaagatccttaccctaaaacagttctgtcgaatttcacactgacaatgtaaattgatagatacgggagaaaggatagaactcaaagtcatccctcagctcaactgagacaaatgcatatctgattgcttcctttgccctgtgtttattttatcttatg

SEQ ID NO: 176573 - DNA, 101 bp, Homo sapiens
taggtgtcagggccatcacaaacagagtacagccgacccttaaacattgtggaggttagaggcgctgacccctgcacagccgaaaatccactacatctttt

SEQ ID NO: 176574 - DNA, 592 bp, Homo sapiens
ctatgtagaaaatgccagtaactaagctggaaagctattagaactaagtcactaagaggtagcaaggttgtagaatacaaggtcaacatacaaagaaaccaactttattccagctgggcacaggggctcactcctgtaatcccagcactttgggaagccgaggtgggaggatcacctgaggtcaggagatcgagaccagcctggccaacatggtgaaaacccatctctactaaaaatacaaaaaattagtcagatgtggtggcgggtgcctgtaatcccaaggtgctgggattataggcatgagccaacacgcccagcctggtgtttaaaaaaatacgtatagtcatgtagtcacctccccagtcaagatatagaacaatttcatcactctaaactcatcctggccctgtgtggtcattaccccccggttcccctgactcccgggcaccgctaatctgtttcctggcttatagatggcgttgtatccagtatgtgggctcttgggatctgagtacattttgagattcattcatgtggtattagcattgattctcatgtgtggctgagtaagtagtattccattgtatgggca

SEQ ID NO: 176575 - DNA, 415 bp, Homo sapiens
aactattagagtggctaaagtttaaaagtttgaccaagtgtttgtaagaaagtgaaagaactggaagtctcctacattattggtgggcataaaaagtggtacaatcactttggaaaacagtttagcagtttcttattcatttaccatcatatccagctatttttatttactaagagaaatgaaagcatttgtctataaaaggactttacacaaatgttcatagcagctttatttataatagtcaaaaaatgaaaacaacctaaatgtccatcaacaggtgaatatataaacaagcaatgaaatgcatgtttatcaatggaatactgctatataataaaaagaaatgaactatttgataaaactacaacatgaatgaatctgaaaataatttttctgagtaaaagaagcaaaacca

SEQ ID NO: 176576 - DNA, 338 bp, Homo sapiens
cccgagatgccaaggactgggggagaggggactgccactgatataactgaacacttagtatgttccaggatctgtgctgatgctttaaagcatcattgcagtgaattcctttacaaccccataaaggtattattatttccatttcacagatgaggaaagtgaggtccaaaagaattggcccagatatcagagatgactaaactcgggagccaggtccacctgacacacaggcctgtggccttttctttctagctcaggtatccctccaacacatggggaaggtgagtgtgtgccaggtggggcatggtgctctctggccccctggaatcatgtttatt

SEQ ID NO: 176577 - DNA, 407 bp, Homo sapiens
cgcagccatcatgttttcttggtgtgtttttagccctcatatgaaaagtgttatactgcatccacctttctgtgatatagattttccacccagcactatgttttaagatttatccatgaggattcatatggctctaatgtggttctttttgtttgtttgagacggagtctcgctctgttgcccaggctggagtgcagtggcgtgttcaagcaattcccaggttactcccaggttccgcctcccaggttcaagcaattctcctgcctcagcctcctgaacagctaggattacaggcggctgccaccacgcccggctaatttttgtatttttagtagagacggggtttcaccatgttgaccaggctggtcttgaactcctgaccccaagtgatccgcccacctgggcat

SEQ ID NO: 176578 - DNA, 467 bp, Homo sapiens
gtctttattttataaagacctataatttaacttttcctcctaatttccatctttcctggaaacaagatacaatattcacctgcttctcatggtctcatattctgatattctgtcagccacgcctccgcctctgctgccgtcgggctctgcactccaacggggccttgtcactggagtttgggttctggattcctgtgcttctctttgttttgttgatgtgattttggttttagtcactgcttactgagaatacaatcaaacgcgcccgtttatttactgaaccttgctttccatgtatccccgtgtgctcctcagtttgtatctcctcataggatggcatctctcaagtatcttttggaagaggaatcttgtggtcaacattctgtggtcctttgtactagggaattcctttctgccatcctcgtggtgcgctcggatctcgggccccggcgtgggctccgcggccg

SEQ ID NO: 176579 - DNA, 305 bp, Homo sapiens
cagggtggggccgtttaaaggccattctggaagtggcggagaggatgggtttagagaggtggaagtgaagtttggaggctccaggcataagcctgactcaggcccatgagaacatcaatggggtggaaggagagaggaaggttaaaggcaggaaccgaggcttagtgactgctgagatctgaatgatcactcaagtgaggcagggccctgatttctggtttgggtggccaagttgccgatggggaggttgcggtcaggtaggaaaccaggtacaagtttcctgatgggagatgggagatgacggg

SEQ ID NO: 176580 - DNA, 475 bp, Homo sapiens
tgttcgctcggcccctgccgggacctgcgctccccggggccatcccgggccctcccgagctccgggcgggtccagcccccacctcctgcggcccccgcggctgcagagctgcccgcgcctcggaggaaccaaaaaaagccggcgcgtggtgcacgcgcgagcggcgctgggccctggcgctgccgtttttagtgtgcctgtagcccagaatatagacttcatcacccccaggaaacgcggccataatatttttggttgcataagcaaacgaaattagaaacctggaacgcgttcaagacctttagatgcgagcgctcggcagcgcgggggaccagagaggagacagatggggattaggcgagttgagcatcaggacaataatttcctcttttaatttgggtttcatcgacaagtaaaacagcattagccgcccggttacgtaaccggcgccacagccggctctgataagcggccg

SEQ ID NO: 176581 - DNA, 308 bp, Homo sapiens
atatgaatgcatagcaggtctttctttacacaccagcattaccaagggggtctaccacacgtagaaaatcaatcatgagtccagcttatttaaaagaaagggatcttttccatctgacacctaatggcagcagcaataatgcaaaatcagctttaaaaaaattggtccccattgttctccattatttgggtctttgatgtatcctacattatgaactatcaaagcaaggcaatgcatccaaggtagggaacgccactaatgaaggaaacattaaaaggttatgctttccccccattacttttgtcttc

SEQ ID NO: 176582 - DNA, 222 bp, Homo sapiens
agaataatggcgtgggaatggtctttaacagatttccaagaactgcccttattgtaagaatattgcattatccaaccccttgtttaaatttactgtcctgacccaactgaaatatgaagccttcctgactctccttggcagatagtctcaccttcctttgtgctcctagaatattttgtttgtacttacagcattgtattttaatggtttatatgtgattct

SEQ ID NO: 176583 - DNA, 462 bp, Homo sapiens
gagctcattgaaaaagtagtacctaagcaaaagacatgaaggaagttagagtaagtcaatgtggcaatctgggggcaaagtgccccagagagagggaacaggaagcacaaagaccccaaagtagttgtgtatcttgcatgcctgagaacagtgggctgcgcagagggcatgagggggcagcagttgagaggaaggcagggaacaggcacccatcacaccaggccttgctgactcccaccaagacattggcttaaactctgcactgagcggggagtgagtggaggtttggggggatctttggtaccagaagcctccagttttcaaagtgtctttctcccatcccataggtttcctctttactctgctgattgtatccgttgctgtgcagaagcttcttagtttggtgtagtcccatttatctattttttgtttttgttgcttatgcttctggtgtcatctcca

SEQ ID NO: 176584 - DNA, 341 bp, Homo sapiens
  misc_feature (213)..(213): n is a, c, g, or t
  misc_feature (253)..(253): n is a, c, g, or t
cagcgggaacagacagtaagggcagtgctcacaccaggatttgggcctcttaagtaaatgtgaccttcactagtttatttaaccctaaggctcacctccctcatcagtaaaattgaggtcacagcacctcccccaaggcttatggtgacagtgaaggagctaaggcttgaatattcttagagccagcctgaccctgctccgctttactgaaancggcagcacagtagcacacttcattgaccttgggcgaccncggatgcagcagatgtgttcttgccttgcgaagatcctccaccaaccccccagtcgtctggggtggacaaccatttggaggagctgag

SEQ ID NO: 176585 - DNA, 140 bp, Homo sapiens
ggtgactctacaggatcccgctcaccgctccttagaaagtctataccactaatctttgcaacaactttattcccccttttccacataagtgagccacacaaggattctttttcttgcaatcaaaatgtagaccttatgca

SEQ ID NO: 176586 - DNA, 753 bp, Homo sapiens
acacttttctcattgctacgtggcatgtactctataactgaccaccacacaatcagacataaaacaatctatgaccaactcacagccaatatcatactgaatgggcaaaagctggaagcattctcctagaaaacttgcacaagacaagaaagccctctctcaccacccttcttcaagatggtattggaagtcctggccagagcaatcaggcaaagaaagaaagggcatcccaatagcaagacaggaagtcaaactatccctgtttgcagatgacataattctatgcctagaaaaccccatagtcttggcctaaaagctctcttagctgataaacaacttcagaaaagtttcaggatacaaaaccaatgcacaaaaatcactagcatttcaatacaccaacaacagccaagatgagaggcacatcaggaatgaaatctcattcacaattgccaccaaaaaataaaatacctaggaatacacctaaccagggaggtgaaagagctctacaatgagaattacaaaacactgcttgaagaaatcagagatgacacaaacaaatgtaaaaacattccatgctcaagaattgaaagaatcagtatgattaaaatggccatactgcccaaagcaatttacagattcaatgctattcctatccaactaccaatgacatttttcacagaactagaaaaaaaaactttaaaattcatatcaaactaaaaaagagcccaaatggccaaagcagtcctaaacaaa

SEQ ID NO: 176587 - DNA, 460 bp, Homo sapiens
ttggaaaaagacttacactgtgatatttccagcagtagacaacattttaggcacttggacgggcagatgacctcatgcaattggaacttgagaagtacacagacctaggatccctcactctcgtaggagagccaaaacagcagggcacaagaggggaatgagtcgatattgcctggtgttgatgccgggtggaaactttagagtaactgtttagaaagaagaaatattcctcgtttttcctcccagtgttgttggtgtggcttctaatcttaaaggcaactcactgctggagtgagcctggtagggataggaaatgagaagagaaatgagcccttgtctgtaaatacacgttttacttcttcattgctggacactccagatcactgaacctcagggaactagaaattcccaatgatgggtcagcaactatgctctttgctaggtttgtttaaaatactca

SEQ ID NO: 176588 - DNA, 592 bp, Homo sapiens
gtggatatggtggcgtggggatggctataatggatttggtaatgatggaagcaattttgcaggtggtggaagctacagtgattttggcaattacaacaatcagtcttcaaattttggacccatgaagggaggaaattttggaggcagaagctctggcccctatgatggtggaggccaatactttgccaaaccatgaaaccaaggtggctatggcggttccagtagcagcagtagctgtggcagtggcagaagatttaaattaggaaacaaagcttagcaggagaggagagccagagaagtgccagggaagctacaggttacaacagatttgtgaactcagccaagcacagtggtggcagggcctagctgctacaatgaagacatgttttagacaaatactcatgtatatgggcaaaaaactcgagaactgtatttgcgactaattgtataacaggttattttagtttctgttctgcggaaagtataaagcattctaacaaagggttttaaatgtagatttttttttgcacccatgctgttgattgctaaatataacagtctgatcgtgatgctgaataaaggtctttttcta

SEQ ID NO: 176589 - DNA, 347 bp, Homo sapiens
ccagtagactaacgaggggaggacagagcatgaaaacaaaatccatgcaaatgaaatgtaattggcacgaccctcacccccaaatcttacatctcaattcccatcctaaaaagcactcatactttatgcatccccgcagctacacacacacaacacgcagcacacgcatggacacagcacacacacgagcacagcacacacacaaacgcacagcacacacagcacacagatgagcacacaactcactacacgtaggtctagctgggttaggtctacctgggtgtctctgcatcttgtctctcaccttcaacctttctaagtgggaaggaatttgttaggttgattat

SEQ ID NO: 176590 - DNA, 2005 bp, Homo sapiens
  misc_feature (613)..(613): n is a, c, g, or t
  misc_feature (1784)..(1784): n is a, c, g, or t
  misc_feature (1978)..(1978): n is a, c, g, or t
ctgtggggttcttctcttcattttcaccaccacaaagctggtctaagctgccatcaattcccacctggacaactgcaaaagccttccagctgttcctgcttccactcttgctcctctacaattcattctgcacgcagaagtcagaatcaaaatcaaagttcatcatgtcattctcttgacttgtggcttccctttgctcttaagctaaaagtaaaaatcattatcatggctacaaagtcttgtgtggtctgggccacatcctgtgccaggctccctttcattgtctatattccagtcaagctggccttcaaaatttcagcacattgggtctttctgccacaggcccttgcacatacatgcttttccctctgtacatgtgattttctttcatccccgctttccaaagctaactctgactcatccttcagactgcatcttaatgattacttccttctggaagactcccctaattttcacaactagatgagctctcccttatatgttgaaaacaagtatttcttgtgtgaacagaaatgtttaatgtctgccttcccaactcagccacaagctctgtgaggatggggactcagtctttgcatccctcagagcctancatagtctcagttaatacgtgatagctggagcgtgacatttcattaggaacagtgaggctagttgagaaattatacctcaccagtatataggagagtaccattaggaattcttaatgggatgaaaacctgaattcatgtctagaccctgccacctgctggctgtgctgttttaaataaattgcagatcctctcagagcctgtttcctcatatataaaataatggggatcctaacagccccctcatatggttgtagcaggaatttaattaaataatatatggaaaagcatttttttaactgtaaaaccatacataaatatcctttgtcacttttcccagtgcatgacacactgggtcattaaacatctattggatgggtggatggttggatagatggacagacagattaacagttagggggccagtatgagtgacaagaggagaacttggcatatggaaagcatgatggaagccagaaaaaggagagacttcccagaagtaggaggaggcttgttgattcatccacagtgtcacatgcagtagagcaggcaggagaatgaggggggaaaatcatttaacctgggtggaaggaaatcactggtgacctccagctgattcctcctcagccttttcatgttatctgggctttcaatgacatgccttaattgtaacttaatcactttactgatttctatctttggggggggcggaaatcaaattgatttgcacatatggcaaaattggtaagattactccagctgctgccagcaggtgctgacaagtaaagaactgaatgtcagagaataagaaaatacactaaacatttattttaataaggcctagaaaccttagttatttaataaattgccatggataattggtttcagtttctagagttgtttcatctttaactccctgtgttccagaaggaatcgtgctggatgtgtagacagggccttgtggtttgagacctatctgagctatcacacatttctctgagcattttcctgtctctctgatcacaccccacttcctgccaccactcccagcatccacctgggataggtcactctgacatacacacacacacacacacacacacacacacacacacacacactcactatccaagctgccagtcttcttattggctcctcctccagcgaggaggnttaagcctcacctccctgctgggccctgatcaagctggtctgtttgtgtatgaatcttgggagtgagtggcccaagctggatctgagcccagcatttatcatctcagcgctgcctcccacagaagaaggaagacataatgaataaatgaaaccccatgactgtatcaacattcatcaacccattactccaaacntggctgataaaattgggtacctggatt

SEQ ID NO: 176591 - DNA, 250 bp, Homo sapiens
tccaacaaacgctcctcaatttcaataatttgctagtactactaacagaactcagaaaaacacaagtttgccagtttgttttaaagaatgacccctataatcccagcactttgggaggccaaggcaggtggatcacctgaggtcaggagttcgagaccagcgtggccaacatggtaaaaccccatctctactataaaaatacaggtgcctgccaccacaccccgtctctacctgggttaggtctacctgg

SEQ ID NO: 176592 - DNA, 614 bp, Homo sapiens
tggttgcaccactgtattccagcgtgggtgacagagtgcgactgtgtctctaaaaaacataatgttatatctcacatcaaagttgtataatttcttttgatacataatgttacttcctttcagtataagaatatcactgttgtcctagaccaagattctttgctttccatattattttcaagtgtaataacatgtttctgaaatacatcttctttgtcactagagccattagcattaccactatgaacactaacggtgaaaaagctctccaactgtttaagtgtaagactttgcaaaacaaacttgaatacggctgcataatttgcctttctccagaaaagcctattaaactttgttggcattggatacaaaataaaattcaaaaatttgcattttcagtacttttcgtttcttgacctttatttgaatttgagactaagctttaccaaacaacagaatttacacagtaactagccaaccacagtcctcattatggaatctatgcagtgcatttgttacctaggaaacggaccagagcacaggcagagtgcaatttcagtctagcaaaagaattctccaatcatgctagtaaataaagtccataaatcaactaa

SEQ ID NO: 176593 - DNA, 232 bp, Homo sapiens
tggatgcagtgtgggctgtacgtattacctggacatgactgtgacatggtgtgtatgtgcatgagcttgggagtgagtgttcacagtgtgagagtgtggagtgagtgttcacagtatgagagtgtgcactgtgtatgtgtggagtgtgtgcgtgcgggtgttcacacctgcgtgtgacatggtacacacgagcgtgctcgggtgagtccacacagtgtgcgagtgtgtactg

SEQ ID NO: 176594 - DNA, 367 bp, Homo sapiens
ccttcgaagaccctgttctcacgtcctgatagatttgtatctgtttggtcgacttcctcatattaaagctgttgaaggttagaaaactatcctttttgttctaaactagttctagcctagggttggtaattacagagtgattcctgactattgtgtgaatatgtcatgtgccatgttcccagaagattcttactttatgtccaccttcttgccataataaccgaagcttccttcttctcctgtattaaagatctgcctccactataccacccctcccctcagtggacctcccactggatgccacctaccagtttcagaaatacagcttgcatttccccattctgtcctcttttcctacccttccccg

SEQ ID NO: 176595 - DNA, 322 bp, Homo sapiens
tgaccatttttttcatgtctttattggccatttgttcattctcttttgggaaatgtctattcagctcttttactctattttcctattgagtttttaaaatatattctggacataagtcctataaatacataaataggcttcctttttttaagagtctcactttgtctcccaggctagaatgcagtggtacaatcatagctcactgcagctttgaactcccaggctcaagtgatcctcccaccttagcctctcaagtagctgggacctataggcacatgctaccacgcccagctaattttattttttgaggtcttgctatatt

SEQ ID NO: 176596 - DNA, 550 bp, Homo sapiens
ccttcaaaagatagggcctgatctggacaggacagtttgattctcaggcccaggagcagtagcaagggagcctctgttgcccagcaagatctggcagtgattcccctacctccatctccagccaaagctttgaggagggaaataaggcctagatgtgtggattggtggaggtatgggctgctccaactctgattttattataggtcatgggcccagcctccagtcgtaggatactgagctcctacccctgccatcccctcacagtcccctaccacctgtgttttaattcccatcttccagataatccttctcacttgtttaggccaaaaaggtggagcctagttgctggagttggggaaccagcagtcactttcctgtgggatctacccacacttaaagagtggagtcatgccatctcaggacttggaagagatcaaagagatcaccactccaactctctcattttacagatgaaaaaactgagagagataggcaagtgagatctgcaagattactcaacgttaggagtagacacacacgcacacacaca

SEQ ID NO: 176597 - DNA, 502 bp, Homo sapiens
gtgatgtaaaaaaggccaatgaagaaataaatcactttgataaatacctatgtttaacagaacatcttaggaaggtcatccttaaagaccacgtgttaagttggctgagtatcaatacaatgagtatgcattgattcacaaggaactcatgtccctagggctccagtttctaagagtggtccacagtggtagcttcaagctgaactctgaacgtgaaatgaaatcctatgtcatttgaattttttcttttttttttttttttgagaccgagtctcgctgtgttacccaggctggagtgcagtggcgcgatctcggctcactgcaagctccacctcctgggttcacgccattctcctgcctcaacctcccaagtagctgggactacaggcgcccgccaccacgcccggctaattttttgtatttttagtagagacagggtttcactgtgttagccaagatggtctcgatctcctgacctcgtgatccacccaccttggcctcc

SEQ ID NO: 176598 - DNA, 272 bp, Homo sapiens
gggattacaggtgtgagccactgcgccagcccagaagggatttttaaaattgtcactttgtttgttgcatctgcgtctgcaggtgtcagccgtaggtgtcagggatgcagatgtaggtgtcaccccctctcacaggccatgtccgcggcttcacagagcacctggccattcacacacggagctcatgcttcaggtgggcagagaagctgtgtgtgaagcgatttccccataagagagtttttctctcttcatggcaggccaagaaacccagg

SEQ ID NO: 176599 - DNA, 133 bp, Homo sapiens
ggttttctactttttcatttcttaaactcaagggaaaacatgggtgaaaaacaaaaaattgttctgcatagagtcttctttaatgtctcactttggtgatgtatgaaataaaaaccaaattgttttaaccagc

SEQ ID NO: 176600 - DNA, 297 bp, Homo sapiens
ggaaaggcagtctcctctggtggacatgaagttctagggtatcctcaggaaacatctggggagtcaaaaataacaaggactggggaagttccagtcctggaaatgccacaaaatgtgaccagtacttacctctagtttttattaaagtagagcaaggtctccaatgtcacgatcttggtgatctttcttcttgtttactgcacaatcttctagtctatagctcaattcccaagaacaagtctcagcaggttccccactcttcacagagacccagttccacaggcgtcagtatagata

SEQ ID NO: 176601 - DNA, 234 bp, Homo sapiens
tacattgaatatttaaacatgtttaaaaagtataaatcaaaactgagaaaatccctcaaaagcatataattgcatggaaattaaacaaactgcttctgaatgacttttatgaaaatgataaaatgaaggcagaaatcaagaaattatttgaaactagtaagaaaaaatatacaacataccagaatttctaggacacatctaaagcagtattaaaaggggattttatagtgctaa

SEQ ID NO: 176602 - DNA, 402 bp, Homo sapiens
gcctcttgaggatcccctgactcttcctgccccatgagagttgaatgttgaatgtttactttatgtctacttaattggtttctgagtgcagctttggctgagtctcataatacgaaatatagcgtgataattttggttatttttaaacctacttgtaaatgaccgctattattatttctcaccactctggaattctgtttttggtttcttttttggtacgttgcttatttaggaaagagtttcaaaatcgtaagaaactgatttttttttctttttatcttcttaaacttaggtcattggagattttttttctcctgactttattgctgtggagtcggacattacaactttataattttactattttgcatatatggagggttttactttgggcacgggatg

SEQ ID NO: 176603 - DNA, 676 bp, Homo sapiens
tcagtgattggcacatgagtaggttccagtctgtttacacacccattcagtctacagtttactatgtgaaagtttatgaaaaaacctttagaataggtaaagagacacctttaggctaaacttaatttaacaaatgctactgactgattaagtaagaagactcaagagtgtcctttgggttgttagcatggaggtcgttggcaaccttaaagagacatttcagtggagtgccaggcagggtggtgacactggatcacacagatatgaatgactagagactatgcttttgagaagttttgatgtgaaggggagcaagaaatggactggtggccaagggcacctgaggagtcaagggagtgttttctttttcggatgaatgaatctggagtgtgtttgaaaacttggaagtggtgcagtagagaggaagagattagttttgcaggaaagagaggggataactgcctggaattccttgaggaggtggaagagggtgggattgctgtggtgcaaaggtgtggcccttcacaggagcaggaacacctgattagtgaagacagtggatgaagatgcaggtaggcagatacatttggtgataggaagaggggagagtatttgtctgatgagcaaagccaaaggaatattgcctttacacactatcttttctgatatagggaat

SEQ ID NO: 176604 - DNA, 405 bp, Homo sapiens
ctggaggagaaacagcaacaatgaaaagatgcctcttcatgaagctaccatcacactgcacagtcactaagtgcaagattcgggtcgtgcatgtaagtcaacaactatttcaactctctaggatgaatttctcctagagaaatgtagtaaaaagcttccagcaccagaatcacctgacatgcttgtctaaagaaaaaaaacaaggccaggcccggtggctcacgcctataatcccaacactttgggaggtggaggtgggtggatggattgaacctgggaggtggaggttgcagcgagccaagatgacggcattggactccaggctgggcaacagagcatgactccgtctcaaaaacaaacaaacaaaaaaaacgagtgtcacctggggctacttggccagacaca

SEQ ID NO: 176605 - DNA, 335 bp, Homo sapiens
cctggttaacccttcccccacaggaggacatatgttttcatttcttttttcatatatagctagcaatggaatatcaggttcatatggtatgtctttttaacgatttgagaaattgcccaactgttttccaaaacagctggaccagtttatattcccctctctacatagaagcgttcccatttctctacaacttcaccaatacttgctgatgcatataagggttacttataagggttacatataagggtacgatacttgctacatataaggattcccatttctctacaacttcaccaatattatctgactttttgccaccccagtgggtgtagtct

SEQ ID NO: 176606 - DNA, 470 bp, Homo sapiens
tgactctgtgtaggagttcaataaatatttattggataaatgaataaatccctttttttccttttgttttaacatttgctttttaaaaataatgggaagataattataacacctttctgcacttcggcagttgtaaaatatatatataattttaggtatctttttggaaaatagactattttttagagcagtttcggttcatagcaaaattgagaaggtacagagattttccatatcctttctgcccccaaatacacacagtctaagtaccttttttgcctttaaagtagggtttgaaaaattatcccttctctgttgttcattctacttaggcatgatatgtgtacatatctttatataagaacactttatagtgtgttgaatttttttccctagtgtgtcgaaattttaaactagttttttaatcttaaagtaacaaattattaacagttccaggtattggataatta

SEQ ID NO: 176607 - DNA, 333 bp, Homo sapiens
cttttttccttacttcccataaccaaatcttatttaattgccaaaataagattaaaacttactccctcccttcatctataccttattttagatccctttctcttcttgctaagtcgtaagttactaaattggcatttcgtggcaccagttgttaggcactcctattaaaaaaggattctataaacaagtatatttgagaagggctgcataccatatgcctgtcttgaagactcagaatgaacattagcctctagcacccttgagaagtactactgtaaagaaacctgcggccaggcatggtagctcacgcctgtaatcccagcactttgggag

SEQ ID NO: 176608 - DNA, 249 bp, Homo sapiens
tgataatgctgaatggcataaataagaatggggcggacagcggggtaggaaataagaaatggggaaggaatttacaaagcagaaatcacatttcaaagtaacatttaaactttcaaaggagatatttttattctttggactccattgtgagacaagaaaaatcactaatggatggtataccctcaggagacttttgatatattattgaatcaaaaagaaaattattttcttgtaaatgattccctataa

SEQ ID NO: 176609 - DNA, 173 bp, Homo sapiens
atcacattgtgtgacaactcttagaaaataggaggtatacatagttttgaggatggtcatacaagattcttcatatttcagtcaactatttgctaaagaaataacttggaacttaaaaaaaaaatttttttttctctgagatgaagtctcgctctgtctcccaggctggagtg

SEQ ID NO: 176610 - DNA, 497 bp, Homo sapiens
aaaaatctgtcgtctgtatttgcaacacctaggctggagctttgagcgtggtgggcggatcaaaaactgtttaattggtaggtagtacaacagaccccaaaaatgtctgacctataggtatttaatactattgtagcctatctcagtgggaagtgaacaaaacaatataacttagggtcttaactaacaccaccacttagggtcttcccaccacatcctggggattagaacatgggttcttccatcaacagcctgaaatagcactgcagctgcagtgagggggtgcaacatatgtactggcaagtcttcccagcaaatgctacttccgccccccactctcagcccactgggcagggcagccatctagaggaagactgtggcagggggttgggcttagaaatggcttcctaggtggctgatttgccatcatttattgcaagccactggcttaaaagagttctactgagggtagttcatagtcatgcacctcctgtgca

SEQ ID NO: 176611 - DNA, 347 bp, Homo sapiens
cagtgaagagcagccaagtgcggctgtgtggccctgaccaagtcatttcacttcaattttatgctttggctttcacatctttccacggacgtgaatggagatgatcatggtgccgaccccaaaggatccttacacgtcttaaaaaagtgagccacggaaaggcctcagcccagtgcctagcagagaagcagcacatgggagggaaggaacgaccagagaagacccgtggtgtgccaggcactagacctggggctcggtggcacatgtcagctccttgcaagtgtgaaacaactggagtgcagcgagcatcagtaactcaccctaagtcacacatctggtaaacagca

SEQ ID NO: 176612 - DNA, 352 bp, Homo sapiens
ttttacaatgaagactagagcttggggaagggtggtttttgttgcccatgcttacctgaaattcagaaaacttatcttgaaggagccagagccagttggtatatctctgagaactgtccttagactcttagctgggtggtgttttcctagtccttgtgtaaaaggataaagatggtggaatgtataaggtaaagtgtttttaggatatacgtatctgggtgccacaaagggcatgagtagggaacagtgaaggataagggtgaaaccattcattgatcctaatcatggaaagccttgaataccaggcttagaagtttggattttctcaatgtgcaaaaatcggtagcatttc

SEQ ID NO: 176613 - DNA, 323 bp, Homo sapiens
ctctatggtaggcggagaaacccatagtccagcgtttactgtttccacccaggaaggaggtgaggtggcctgagagacagactcttccatgggtggtgggctcaagggcacagacattctggagggtgaacgccatcatttgtacagagggatacgtgggttgctgaggactgagagagccttgcaaggccgctccccttctccccagctgtgaccagggctgtctgggccttgcctgcctcagggccagactgaagtggaggtggagggatgctgggctaggcctcaccaaggttctggtagaagtggtggaagtggataaa

SEQ ID NO: 176614 - DNA, 460 bp, Homo sapiens
ttttacccacacaaatatattacatgtcattatcctgaaatctcactacaatacatctattctaatattctccctctgtttaaattgtcctgcctctctaatatttaacttcacattatcaatacacatagagaaatacattaaacccaaagctccgaatgctcaaatacattttgcaaaacaactcaaggaaaagtcactccaagttcactttaaaataactggttaaatccttaaagtataagcaaagcacaatttttctatatggcttcagataactttcattttgtttcctactagactaaactccataatggcaagttcatctgttttgttcattgttttgtttagctagtatgcaacatacttcccagcacatagatgttcaataaatattttctaaaggaatagatattctgcgaatcttttaagttctgaagtaagcaaacagcagaagtat

SEQ ID NO: 176615 - DNA, 431 bp, Homo sapiens
atacacttccctattgagcgtaacaacaggcatctaaaaaaaaactcatggcattctggctatacaggaaatcacattcagagactaatctgtaaaaactacttcaatagtacattatagtcaattagtctattacatgaagttgatattataaactctggttcaaatcatgtccttcatgatataaatttccacagtatcattttcattttccacattaacaccttaaaatgtgttcatctgtgtaaaactcctttctctcctactaagcaataagctgcttgtgaatgggtacatcttactcctttctgcgtctaaagcacatagaaggtgctgtacattcagtcacaaatatttactgagcaaataccaatatgccatctataccaaatgatggagtatacaaaggtaacaaagaaaaggtccctgtg

SEQ ID NO: 176616 - DNA, 443 bp, Homo sapiens
ttctatcttccttccttgataaatatatatgcataatgacctggaaggctaggtctgaatttggaatattcacctccagatttctagttaggaactgggcagtgtgtgaagcgttgcctctccagccattatcttcccctcttctctcccacctctaaatttattctgcagcacaggtagcctgttgtttacctgcatggacacttcagcttgcatgtccaagctctgtttacctctcctgcatcagtgtccttggccatcttcacctaggatttggcacaggggtgactcagtttacccccagaaggcaggccataaaagtagtctgaggctgtttaggctaagaattctggagatgatctagagggggtgacagactttacttgagcaagccccatggactccctgcccatggttgaggtcaatggcctgaggacagctag

SEQ ID NO: 176617 - DNA, 449 bp, Homo sapiens
tctagttagtaatttgtctaaccttttttcaaggttcttagcttcctttattatgggggaaggaattaaagaggggaaaatgtgattctgattaaggcaatatactcagactatttaggtttagatgacctgagtaagcaaagggaaattacagtccagctttctgtagtcctttccagagctaatttgaaggaatagaaagggttagaacatgctcctttagctcggaggagtttgttattacccaccttttgaagcctacttctgtcaattcatcaaattcattctccatccagttttgttcccttgctggcgaggagttgtgatcctttgaagaagaggtgttctggttttgggaattttcaggctttttgcactggtttttcctcatctttgtggatttatctacctttggtctttgatgttagtgaccttcagatggggtttct

SEQ ID NO: 176618 - DNA, 492 bp, Homo sapiens
attttttagcacgtgaacagatcctgagactaaaaagtttgaaaactagagccctaagcaaagcatataggacaaccaccaataaattgaccatcaaccgaaaagtataaatgaccactctcaggaaaaagataaagcaagcatgaatacactaagacaaaccaaattaagaagagggaaaaaattaatacaattaatgtgaagaaacacagagatggggcatataatcactcaaaaagggtttgagtgatcagtgctttatttcttaaagagacaaaggaaattccatgtatctttataaatctttaatatttctcaaatttatccaaaggaccctagatgtcaaagaacaatcttattctctacaagtctatttgactttgaaacccgtatttttaaaattcacacaaatttcaagttttcttccataatatatctattcatttagtatttcttaaatgtcttaaattacttaccatgaggttcaaattt

SEQ ID NO: 176619 - DNA, 677 bp, Homo sapiens
ccttgttgtaaaaaaaatggtatggtgtattatcaagcagagcgatggaatcattcaaaactatacttgaactctagtttttcctattacctgtgaaactttaaatattcaatctcctagtgcttcagtttcctcatctgaagatgctaataacacaaactacctcacaagattttcatattatatgtaattgtatgtaaagcatctagaaaatagtaagagttcaataaatggcagtaatcaaccttttttaaaaaaatttaacttcaagggatggaaaaagtaatcaaaagttggcctgcaaatcccagctctcaagtgctggggaagaatcctttaaagctaacagcaacagattgctgctctctttggaacatggtccttctgttcatctgtctcatggaggagtaccatgcgtggctatgctatacttaaccaagtgaaaacataaagtgatgttcaaaactggtcataactggcctatatatagcttttgccagaaggtccccaaagttcttaattgaacgtcttctcaaatactgcatacatccataatattgcgctgacactgagcatgtctctcaaagtgttttaacaaatagaatttcgatgaacatttcctaaatataccttcagtttcataaagtcaaggcatgaattggtgggggggcgggggg

SEQ ID NO: 176620 - DNA, 260 bp, Homo sapiens
caaagtaagataatgcagtgtgagtcatatgtccatggctgaggtgctttggagtaatggctttgggatacaaaagaccataaatcaaggatggctcttcaatggataaaaatatagagacagatgcctgacgaaataatggtggaaaactggaaacagggagaaaacataatgggcactcaaaaaataacaacttattttttaaaattttcttcctctttttggacctcagtttcctaatatataaagtggaatgttgt

SEQ ID NO: 176621 - DNA, 236 bp, Homo sapiens
agttgtgggatattaagcttttatcagatacacattttgattttatcagatacatattttctcacatattatgggttgtcttttcactcccttgatagtatcctttgatgcataaagggttttttattttgattcaatctaattttcctgtattttcttttgttatctgtgcttttctgtcacatttcaaaatacacttaaaactcaaaggtcataaaggtttaccgtgtgttttc

SEQ ID NO: 176622 - DNA, 144 bp, Homo sapiens
gtctcatcactgacatacacacacatgccttcaacgctcacagcagctcggtcacaccctgtagcacacacaccatccctgctgtctcacagtgacagacacacaccatcccggccagttgtcacatgctcacacacccacacc

SEQ ID NO: 176623 - DNA, 336 bp, Homo sapiens
ttgtttcctagaacacttgcttttggagccctgggctgccatgtaaaggttctaactaccacaagatcactggatgagctgcatacaagcactctgtagggcatttctgctgagcctagccttccagcaattctcaccaagtctccagacacatgaactacaccatcttggactctccaaatcagcccatccaccagctaattaacattgaatgacttctgtcaacaccatgcataatgcagaaaacccaccagctgagccctgcccaaatccttgacctaaaaaaaattataaaatacaataaaacagctgttgttttaagctattaagttttga

SEQ ID NO: 176624 - DNA, 766 bp, Homo sapiens
agcaacccctccctattaatccactaaaccttactgtttagttttctccatctgtgtcaatggcaactccatccttccagttgttcagagcagataccctgaagtcaccctcaatccttcgcttttttttttgtttgtttttttgtttgtttgtttgtttgtttttttgagacgtagtctctctccatcacccaggctggagtgcaatggtgcgatcttggctcactgcaacctctgcctcctgggttcaagtgattctcctgcctcagcctcccgagtagctgggattacaggcgcccgccacctcacctggctaatttttttgtatttttagtagagatggggtttcactgtgttggccaggctggttttgaactcctgacctcaagtgatcctccaccttggcctcccaaagtgataggattacaggtgtgagacaccttgcccagctgatgtttcactttcacaccccatatccagtcagacaaaaaatcttgttggctctacctttaaaattttattaagaacctgactactctcctcctctgttataataaaccttgtgcaagccaccactatctcttgtttggataactgcagtagcctctgtggtggacacttctaaaatggcccccagtgatttctgccttctggtattcacacctttgcataatcccttccctttcagaaacagctggacttagtgactttcttctaaggcatagactatgacaaaagttgtgggatgtacttctgagattagagt

SEQ ID NO: 176625 - DNA, 977 bp, Homo sapiens
tcaagcagttcacctgcctcagcttcctgaatagctgggatcacaggcgtgtgccaccacacccagctactttttgtatttttagtagagccggggtttcaccatgttggcaggctggtcttgaactcctgacttcaggtgatccgcctaccgtggcctcccaaagtgctgagattacaggcgtgagccaccgcgcccagctggggttttcctaccgtggttgtaaaaattcatttcttgtcgccacctagattaacaaatctcagattaagaactggccttttttcgcctcctctttgaattcactgtctaaagaaacggccattgccctttccgtaaaccaggacagaggtcatgtctgctttgcctttttgcaccttggcccctgcctgcccctcacctccccactcagctacagtgactggaagggcccacacaggaaagctgggccctgggtcttcatggacgttgctggaggatgtgtctccctgctggtggctctcagtcttcctgtgctcagtagggccttctggaggattctaatttccctgtcctggaaaccaccttgaaaatattcttaaatattcttaggtggatttaagatgtctctgtctagtggttttttgtttgtttgtttgttttttaatccatcttagatttgaatgcccaaggaatgaacagtctcttggatcttgtatctcttccttttgttttttagaaaatagcttttattgatttttttttcttgctacaaagaggttgatgattattgcagaaaatttagggactataagtaggcaaaaaagataaaaaccacctataattattaatattttagtatattgtatagcccccccagaatatttttcaatttcaaaagatgagatcatactgtttgtaccatcttattactttttctttcttttttttttttttttttttttgcttttactttacaacatgtgattaaaatttcc

SEQ ID NO: 176626 - DNA, 433 bp, Homo sapiens
gactctaacgatccctgtggcctgaagcctgtgaagattcagtgattgctccacactagagtagttggagaagctttcttaagagaacataaactttgaattgcacatgaacgtagggatcataggattgaaaatgagcaaggaaaccatgccaggtgagagaatagcaagaggcaaggctaaatatggaattaattgctcagtttattcagggtataattagtaaaaaatattaaggcaggatggaaggaagtgagtgatgtttagaggaataatgatggatatgccagatagagaccaaatttatggaaggctttgagtgctagaccagggattttggatttgattctgcaagtaatggtttgtcatttagtatttttatgtagatgaatggggaagcagtgtataaaatgatttggaggagtgcctgacc

SEQ ID NO: 176627 - DNA, 358 bp, Homo sapiens
agaaagggtcaagaaaaaaaaatcactggtgacatttaattactaagattaagaactatcaaaccttattagtggtattttgactaatattaacgaagatcaagttatttcagctaatttaaaaaatatttatgaaacacattccagcttctgtaccaggtatggaagatcaaaagataaataagacatttataagtttacaaagaataaactgctagaaatgtaaaaataatctttaaagtccttctttgctttaaaattctatgattttaagaaatccctgacttaagtgaaatgaaaccaagctgacaagtgccttcagtgacaggaagtgatattctaggaagtgattacgatg

SEQ ID NO: 176628 - DNA, 471 bp, Homo sapiens
tggtactgcatgaaaagttattaaatgaaaaatattctcataaattatagtgaaaaaattgatgtattttgttataatccaagatatccaatctgcacagatagaaaaatcaataatgagaatgtataagaaacaaatactgtaaaggtgaattgatttgagtgtaaaatgtgacgtgatgaaggtttgtcgtgtgccccggaggaaaacggggaggtggaggggctgctccgcgtgaggcacgttctgctttctctcctgttaccatcatcagtgtcttgatccttaaggaactgtatgggtatctaacacacacacaccgacgtagaaataaatcagctgcatggttatctaacacaccaacgcacaaatcaggtgcatcggtatctaacacaccaatgtagaaataaatcagctgcatgggtatctaacacactgatgtagaaataaatcagctgcatggttatctaa

SEQ ID NO: 176629 - DNA, 410 bp, Homo sapiens
attcccaacccatcctgctacctttgggactttatacctttcaaccctcaaatatattcagatcccccatcctaatgcacattaccacaatcttaccatctcttttagcttttgtcttcctatttccttcattaaaccttctgaggcctggtacagtggttcacacctgtaatcccagcactttggaatgccaaggtgggaggatcgcttgtgcccagaaattcgaggctagtctgggcaacaaagcaagacctcatctctacaaaaaaataaagttacccagtcatcttgtgcacctgtggtcccagctacttgggagtctgaggctaaaggatttcttgagcccaagaggttgaggctgcagttacccagcttgggtaacatagtgagaccttgtctcaaaacaaaac

SEQ ID NO: 176630 - DNA, 997 bp, Homo sapiens
gctttctctgtgcccttcctgtctaagcatagaaatgtagggacggggctgcaaagacactgagcactgaagtggcagtgagacggcaggaagcatgacttggggaattctgtagggtcagcacagccagccatcttaaaaaccttacctggggccaggcacagtggctcatgcctgtcatcccagcactttgagaggccgaggtgggaggatcgcttgaagatcacttcaaaaccaacctgggcaacatagacaccatctctatgaaaaaaaattacttttttttttttttttttgacagagtcactctatcacccaggctggagttcagtggcgtgatctcggctcactgcaacctccacctcccaggttcaagcgattctcctgcctcagcatccctgatagctgggattacaggtgcgcaccaccacacttggctaatttttatatttttagtagagacagggtttcactatcttggccaggctggtcttgaatttctgacctcaagtaatctgcccgtcttggcctcccaaagtgctggaattataggcatgagccactgcacccagccctgcaaaaaaatttttaaaagttatccaggcatggtggcacatgcctgtagtcccagccacctgggaaactgaggcaggaggatcacttgagctgaggagttggaggccgcggcgagctatgatcacactgccgcgctccagcctgggtgacagagcgagaccccatctggaaccatttttaaggaccccataagggggacttttgcatggtctgtctctgttattgattttttattagcacaatggtgtccttaaggtcttagggaccaaactgataaaatcagtcacgagtcccacggtgtttagtggtgtcttttgattttataattttttactttttatcttaagtatgtagaaccagaagagacagtgcctttttatgtttttggttttgtagcacttttgtttgttcatgttgggtc

SEQ ID NO: 176631 - DNA, 704 bp, Homo sapiens
ggaatgacgggaaccgtcttgaaatcccagttgccaaacaccaacggagggccgccttgcaagctggcctttctaaggatagcagtcaggcctcctgtgttaattctttcttgtgcaatagggaatgggaatttatgttaagcttaccacaaaccatagtgaccagtcaaaatattttgttaaatttgatgattgtgggcctaggcataagggggtatgggtgagttgaatggtactttctggggcctagagatcaaaggaatgtaatttgggcaataatcctaacatttagatcccagcttggtgttacaatatatacttgtgaatttagaaaaaaatgaagtttcagtgggccattggtgtatatcttttgtacctgattttgtcctgaccactgtgctgggtataggctgtaaaatggtgaacatgtatgtctgtgttcctgaagattatagtctagtggaggagagagatactaaatgaatgaacacagaaataaaactataattacaaaaataaaactcttttacaggaaaagaaaacattcattttctactcaatacagtttctttatatacctggtttatggtagtaaaacccctaagatgagacagagcttgggtagtgagctttgacgcagccaggagatttgtgtggcaggagccagtgaatgggggagagggatgagggtgttaggttagagt

SEQ ID NO: 176632 - DNA, 1044 bp, Homo sapiens
ccagttccttttcaacacactgtattaggaaaatgttattttaactgcaactctgttttaaatttttttttaatttgaaaatgactaagtcataatcattccacattggctcataattttgacctcagtcaccttttggagtaactcaccaaaaggccagttatggtcgtgtgtgaagaatctgtctgcttggcccgtgttgccaaaatgtcgttttgtaatttcctttggcaatagtgtcttcgtcagtgattctcaactaatatacttcctctttctacagccccagtacactagagggactgtttttcctctttttcaaagctgtgtcattgacctctgaagtgaagaaattggcccttttagactttgatctgtgagtcccatgtaacagagactctttaaaaaagaagctaagtgtgtgttttgatatgtttatctccttcttagaaaatgaaatgaaactacagcagacttatttttaggagattttaggagtgttctattttaagaaaatgacaccatacaagaacatcttttagttaaacttcttagtactctgcttgtgattcttacttaaaacctgcaagatacttttatttggaaaattaatgaagaggccttgtctcactaataagtcatttaatttggtctggcaaaagtttaccatccattcaaagatcttcatgaaaatgcaaagataaggctgtttaggcttgagcccaggagttcaagaccagcttgggcacatagcaaaaccccatcttattttttttttaaagactgtttaggcctgtgcattctggcaggttgccccacttacccagagcaggtgcatcagattccagattcccagggctggagagaatatggaatttattttgtttgtatacccacttattttgcctatagggacagacttgaccctattctcaactcctcatttctctccttttcctgcatcacaaattgaggggtcctgaagagccactttacctttttggtgctataaaaggagctggggatcataaatgcaaagacgag

SEQ ID NO: 176633 - DNA, 757 bp, Homo sapiens
cactggcccccttgacaattcctcagccccagctcctcctttcagactggtgcctccacctgccagacccctagctttgaaggccaatctcatcttcgtctccttcctctctggctccttcattcaggtgacaagtatacatcaaatgcccaccccaactccccctcccaggactccaatctggtgtctttctagcggggagtctaggttgctccctctgctctggagaggcttggcaaaatgcctgcagagctccttgagctccacctctgaactccctttcagcagccggcacaggcataacagcccagcccacaggtaccactgccactgaggcagggacccctaaggtagggctacccccagccacaggggctggctggactgcaagaggctccctgcagccagacaagtatgaaaatgccttgttgttttgtgctgaggccccccaaaacacaccaaagcagctgggccctcttggcatggtaggttctgcaaagcacccactgtgaggagcctgcgtgaacatcaacctgatagggccaccagtgcaaaagcatcttcaacaagttacagtcaataaggaaacacatgtgtagacacatttttattgcccattcaagctgtttttatttgctgaattcagaatcctttaacatagtaactcacaaataagatagattttcatagattttcaagacctcttttgaggaaacatcttgtgtttggtgatccccatctgtagctgcagcaagcc

SEQ ID NO: 176634 - DNA, 324 bp, Homo sapiens
aatttaaactcaactatctcaaactgttctccttgttaccacccctccctgaccaaacctgcctctactatgctgcccacgtcttagagagtagcgtccccattcttctggctgctccagccaaaacctcctctctttcctcacaccctgtatccaatccatcagcaagtcctgtcaactcaaccttggaaatatatcctgtacccaactacacctcgacatccccgtggctgattccatggtctgaaccaccagcgaccagcgcctcgatctggatcattgcaccagcttcccccggtctcctggcttctgagttttgaaccc

SEQ ID NO: 176635 - DNA, 310 bp, Homo sapiens
cagtatcacacattcttctccctgatgtctgagttagccacagactcacagactctcactctctgttcccactaggaccttcgtactgccatcctgcctctggatatgcagtcagaacactaaaccacttgcaaaagtcactgtactcccttactgtaaagggttacactgcttaaaatacagatttgcaaaaattttccaaggatgccataatttttaggtggtcatcctttcactatcaggcccaataacaacagtagtgaatttttggcttgttgcttcccttttctgggaggtggaagtcagtggt

SEQ ID NO: 176636 - DNA, 341 bp, Homo sapiens
tgataagccaactgtatcacattgaaaaagtgtttcaaactgctagtgaggtggcatattttctctcataggattgatcattcttaagaattgccttttatgaattcttttatgaattactcttagctcatctactggattattcatctttctcctattgatttatgcatttttaaatatataaataatgtagcatatgcatacatgagttgcagatgatttgcccactttattatttccttttcattttggaaaatttagcttttaagtaaccaaatctatgcgttttttatttatttttttattccacttctggcttccacttttggcatcattaccat

SEQ ID NO: 176637 - DNA, 670 bp, Homo sapiens
cacagtgggcagcccgattttctgctgagtaggcgctgtgatttcagaatgtctgggcgaggtaaaggtggcaaggggctgggtaagggaggcgccaagcgccaccggaaggtgctgcgggacaatatccaaggcattacaaagccggcgattcgccgtctcgcccgacgtgggggcgtcaagcgcatttctggtctcatctacgaggagacccggggagtcctcaaagtcttcctggagaacgtgatccgtgacgcggtgacttacacggagcacgccaagcgcaagaccgtcacggccatggatgtggtgtacgcgctgaaacgccagggtcgcaccctttatggtttcggcggttgagctgtccccacagcttctctacagactccaaaaggcccttttcagggcccccaaactgtcacagaaagagctgttaacacttcctagataacgggtaaatatcaaccctttgatgtcgccttccggataccggaaatgggatattcgcggcccgagcatctgctcgggattagacttggcgggcacggggagaactagacctcaaggagggggttccgcctgtgcttaggtacgaccctggaggtgccgcgcaacgcagtagtgacctcccaaaatccagacaccggattttgtttagaagagtgcttgt

SEQ ID NO: 176638 - DNA, 372 bp, Homo sapiens
ccggcctccggtaaagctccgtataacagcctcgctctactcctggctctgtccttcctaacttctcattaggcttggcaccccaggatgcggtgtgatccatgccgcgttaactaatctgccccttctctaccttttcttttttcctttcttttcgagaccaagtctagctctgccaccgaggctggagtgcagtggcacgatctcgcctccgcctcccgggttcaagcgattcacctgcctcagcttccggagtagctgggattacaggcctgcgccaccacgcctggctaatttttgtattttttttttttttggtagatacggggccaggagtttgagaccagcatggccaacatagtgagaccccat

SEQ ID NO: 176639 - DNA, 666 bp, Homo sapiens
cacagtgggcagcccgattttctgctgagtaggcgctgtgatttcagaatgtctgggcgaggtaaaggtggcaaggggctgggtaagggaggcgccaagcgccaccggaaggtgctgcgggacaatatccaaggcattacaaagccggcgattcgccgtctcgcccgacgtgggggcgtcaagcgcatttctggtctcatctacgaggagacccggggagtcctcaaagtcttcctggagaacgtgatccgtgacgcggtgacttacacggagcacgccaagcgcaagaccgtcacggccatggatgtggtgtacgcgctgaaacgccagggtcgcaccctttatggtttcggcggttgagctgtccccacagcttctctacagactccaaaaggcccttttcagggcccccaaactgtcacagaaagagctgttaacacttcctagataacggccaagtctagctctgccaccgaggctggagtgcagtggcacgatctcgcctccgcctcccgggttcaagcgattcacctgcctcagcttccggagtagctgggattacaggcctgcgccaccacgcctggctaatttttgtattttttttttttttggtagatacggggccaggagtttgagaccagcatggccaacatagtgagaccccat

SEQ ID NO: 176640 - DNA, 609 bp, Homo sapiens
cacagtgggcagcccgattttctgctgagtaggcgctgtgatttcagaatgtctgggcgaggtaaaggtggcaaggggctgggtaagggaggcgccaagcgccaccggaaggtgctgcgggacaatatccaaggcattacaaagccggcgattcgccgtctcgcccgacgtgggggcgtcaagcgcatttctggtctcatctacgaggagacccggggagtcctcaaagtcttcctggagaacgtgatccgtgacgcggtgacttacacggagcacgccaagcgcaagaccgtcacggccatggatgtggtgtacgcgctgaaacgccagggtcgcaccctttatggtttcggcggttgagctgtccccacagcttctctacagactccaaaaggccccaagtctagctctgccaccgaggctggagtgcagtggcacgatctcgcctccgcctcccgggttcaagcgattcacctgcctcagcttccggagtagctgggattacaggcctgcgccaccacgcctggctaatttttgtattttttttttttttggtagatacggggccaggagtttgagaccagcatggccaacatagtgagaccccat

SEQ ID NO: 176641 - DNA, 450 bp, Homo sapiens
ggttcatcagactgcccattagtctttcccctgctgtctcccaggaagccccactacagcccttctatcctgaccccacccctgggagctgtccctggacgctctccacccacctactttctgctccgcccatgtgcagccactttgaggtctgtcatgaatataaagtgtgtgacatatttttatttcctggctctcttgttcatacgtatctttatttaattcccagcatgtgtcatgttatgtgtgttctcagcttatgtttttacgtttagaagagtttcgcctgttttctgcagggatgagacacttcgggccaacttcaatgttctaattccgagtttggaaatcaacttttggactgaaagctgagcttgtctgagatttgtcagggcccctggtggttggaaaagtgttctgaatccaataaaaggaaagcggtgatttaca

SEQ ID NO: 176642 - DNA, 217 bp, Homo sapiens
ggttagtgattaggtgatataaggggctgccaaggattttgggctgaccaccgtaggagtaaggcggaagatatatcttgatgtacctaccatttttctccattggattacactgtgttatagttatttgcttcttgtatgtctttttactagataataagctcttaaggcataattgtgcttgatactgtttgtgaatagggcaatgtatatattt

SEQ ID NO: 176643 - DNA, 288 bp, Homo sapiens
atccatctgacaaaaatcctacctttcctccaaaattcaactttgaaccttatctttcacaagaaacccagagcttctccaagacaggaattttgttttccacacgtattaatgtgagttaatacacatgaggtacttaaaatagttattggcacataatgaatgctatctactttttttcctacagcttggagtaaagatacatgatctctctgattcttagtttcttcatctgtaaaacgagataataaaattatccacctatgaggactgcaagaacattaaatg

SEQ ID NO: 176644 - DNA, 759 bp, Homo sapiens
gctctcatgtgcttctctgcatctctgattcagccatgatctaattatctcagtctgtttccctatgcgtgcctctgtctgtctgtgggtgtctctaagtctctgtagatagacaggtaggtagggagagagaaagagacagagagagagaaagatccactctttctcttccctgccccttcttccttgcctctcctctcctaccaacttcccagtactctcagcatatccctcctttctagagctaaagaagtagagcaattccactggggaagcagcgtctaaagggtatttggtcaccttctccatgtgcagcctttgcagtacgctgcccctccagtctacagcaagtttttcagcttatgcacctgttgcaggggaagggggcaggagcactgtggtccagcagcatggccattggcggagctgtctccatggtgagcagcagagcccataggagccaggggagcacgtgagcagccctaagggtggatggagaggctgcctcaggtcagaaagccatgcagctcttgaggctgaggatccaatggcactcctgggaaatccctcccaggccctgtactcatctcttcctttcaccttccttcatgaaagcttttgccactgctcttctagagaagattgtgagacccttgagactgggggtttctgacatcgagagggagatcccagaatctgtggccaaaaacattcttcccaaccccagtgctgccttctacacccagctgcctccttctt

SEQ ID NO: 176645 - DNA, 466 bp, Homo sapiens
aggcaatgacccatcttgggaggtagggaagggtggtggcgaggggtgaagaaatagcatgtgtttcccaaaactgccgagaaatgtgtccatattgatggtatttgctgattgttgcccaattttcttttcactagatagagtcaatactttttagcatattttaaaaattaaatcatatctacatcataccactgcctataagccatgttattacatttttgcccataaatttggcatgtggcttcaagctctttaaacacagaggcaaatcatgcatcggcctgggagaaaaccacaagtgacattctaagccaacccttccacacaaagggttgagtcatttgtcctgcttgctgaagtggcagtcacccagagaacaacatcctggcctttcatatctgccaagtccttcctatggtcagaaagcctgctccttcctcaaccttccttccaagatgtatgg

SEQ ID NO: 176646 - DNA, 325 bp, Homo sapiens
agcattattggagggatgtcctggaatagacaagaggaggtggaatctagtacctaagtggagaaggagatgtcagctttaggagcatggcaagttcactagtggtaactggcaggaagtcaaagtgtgaggtgtatatgctagtaaacaggtagaagtgatagtgagatttatgaaatcgtcttctgattgcttcattgttctcagtgaaatagaaagcaagatgatcaaatgagtgtgaggatggggcaacaggcagtgggagtctgaggacagagaagaaggtatgaaatagttgtctagagagaagagtgactagactgtg

SEQ ID NO: 176647 - DNA, 482 bp, Homo sapiens
atgaagaaatccaattactgaattctacttgaagcacatgatgaaattatataaaactagcttcttgtcactgtttaattttttcattttgctaataaacatattaacagcttttcttgaaattaaagatgtgtaaaatccatttatatgaataatcacttgatctaaatgaaattttagagtctacagtgacgcataaatataccttctactgcaacatgtgttaaatcacaatcttcaggcacaatcatctctagatagctaactgttagaattgctactgatgctgtctgaacagatttgccttttttggtttctttgtgtccagtgatatcagcacaaccctcatggtgaatgggaaagttggaactacattttatgtcagtaacacaatttcaattcctattgtttttttattaatcatgaaatttttaagtccattgctgctaaaagagtttaaggaaagaaaaacagggttatca

SEQ ID NO: 176648 - DNA, 311 bp, Homo sapiens
ttttcatgcttttgaaccgtactgtatctgttcatttgtaatacattatgtttgtgatatttgtatgtgtttatataaatagatgtccattttcattgctatattaagcattagtattagatggactttggggttattaataaggctgctatgaacatatgtcttatactgtgtatattcaagagtttcttgaggtcgtacctaggtatgggatgtctggatcttagggtatgtacatcttcaactttactaattaattccaaactgagatattctagtctgttctgagaaagctgtttgtttcctgttca

SEQ ID NO: 176649 - DNA, 244 bp, Homo sapiens
gggaggagaaggtggtggcgattgtggcgggggctgccaggccttgcggggtggtcaaggaggcttggttttggaatcgccaggacatcacagaaagcacagagccccgtgtgttgcttgtggacacctcgtgtaacacgggtgtgggtgttgccctagagccggcatcagcatctccgtgtcctccatggtcccgtgtcctcctcggcccgggaccccgtccaggacctcacacctcagtggt

SEQ ID NO: 176650 - DNA, 294 bp, Homo sapiens
tgagggcgagccccacgggcgacagacgcagccgcagagctctcggtgggaaaacaagtcaagcagaaggatcaccttgtctcgctcctgacggtccagtcgaaagtgcttgttgagtacaatcgtaaatggacatagaggaggaaagtgttgaggatttgctgaaattgggtgacgggttcaagggatttgtttctgcgttgtttctcctttgtatgtttgacaacgtctgtgattaaaaatagccataaaatataaggcaggtacactttggctgtactagtgcgtatcctg

SEQ ID NO: 176651 - DNA, 129 bp, Homo sapiens
accaagctaactacagtaggcaagacagccaatagcaagtgtgggcaggatgcagagtgattggaaccctcattcattgccagtgagaatgtgaaatggtgtggctgctctggacccagttcaacagtt

SEQ ID NO: 176652 - DNA, 305 bp, Homo sapiens
atgaaaacttaatcgaatcaggcagtggcaactaatgacctagaatcattaacctttaaagcctctcaatagatgtagtctttagaaatccgtggtctgaattccagaatcgcaagtcaggtagctgagaaacagaagctactagaggagtttttaactttttagaaggagaataaagtattcatcctggcattagaaaagagcaaatgcaaaagaaaagagtgacgtatagggagtctcttgtctataccgtgaaacatctgggcctgtttggccgtggccatacattacgcaattcagctgcc

SEQ ID NO: 176653 - DNA, 386 bp, Homo sapiens
tgacatgtaaccaaaaagtttacattttaattcttagcaactgtattctagaattatgttcttgtcataatattatatcacagggtatattcaggctgggatatatgttaagggaagaaaaggggatgcagagaagtaggcaggaaggggagaaaaaaaataaggatgagaagaatgaggaaaaccaaaatttactatctgccaagtttttagattcaagaacagcccaaaagtagtggaatcaggactcaaagtcagaggccaaactttgcttaaacaccactataatttttttaattaatgtccaaacaattttcatcttgaattattctaaggtaagatattagaacccatccaggcaagatggctcatgcctataatcccag

SEQ ID NO: 176654 - DNA, 505 bp, Homo sapiens
gaggatccaggaaacacaccacagagctaacaactgactataaagtgctgaagacgcatcatgaggctgtgggcagcaaccaggcaggcatgaggaacactaagtggggtgaggtcagtctcctggcaaccaagaaagaccattagagaaaacagaccgaggggtcaatgcgcccagtgccacagattacaaggaagaccagggccacacacctcagaacctggcagtcccatagagaccctggtgagtcaatccatgattctgggacacaaaaagctacatgaagaagccacaaggagcaggggattagagaccaacagtgggacggaatggggaagcctgctaccacagaaggcgaagaagcagctagagtagacgttccaagcaaaggtgctaatggggccaagcggcggcactgaagaaatgcacagcaggaaagcctggtgccttacaagtgagtgagctccttaggaaagcaggaaacctgcccagcacaagaaccaca

SEQ ID NO: 176655 - DNA, 922 bp, Homo sapiens
ggaatttttgagtcccccttagatatagcataaagatggtcttctagcctttgccaagtagacatttaatctaattgtttaagagtgcttgtcatgtatagaaaagactaacatactttgcaattatttacattaaaaattatgtagaggtttgttttagtgtaattttaaaaataatttgtctcccaaaagctgtaaccagtggattaaagtaaataagctaaaataccaaatcttgttttataccattgttctatagcaaacagtgctgcagaggatgtaactactttttaaaatttatcctccgatgtaagtagggccaaagtcatttgtttgtataaaatattctattaattatatatgacctttataaataatatcttcgattttattattatgatcactttttgagctatcacagtgctcagttgttctcctattcctgagaactgaatttggcctttagtttggttttctgatggacacaataatgtagaacttgactttggttagaaagagatctttgagcttcaggaatctctgaaggtgcagtaggatctacaggtgaaaaccatttgaattgttaagcattagttaggtgaagaaactctactggtccctgcagcatatagcagctattatcgtagcggtctactttttgctatcccagttttttttttttattttttttttcccttttcccaagaagcacaaattccaaattagcaaaaatgtgaagggtgaaattatctctagtgatactcacaaactggggggccacatattggacaataactttgcggaatcactaaggataataccggacaactgaccatttattatctttagagaagccccaaaaaaagacttaagggaatacactggtacacctaaggtggtttcacataaaactattaccaga

SEQ ID NO: 176656 - DNA, 745 bp, Homo sapiens
gggaggtggaggttgcagtgagccgagatcatgccactgcacactccagcctggacgacagagcgagtccatctcaaaaaaaaaaaaaaaaaaaaaaaagttgtgataaaggggaaggaaggcagggaagtgctcctggagctgagaggtctggcaggttcaaggaagatgaaggagcactgtgcagaagtccagagatggaattgttcagtatcgctggagattagggtgttttggggatagaaaagttggaaaggtatagatgcctctggggcaactcagagagatgagaagaaggtgcagtttgggttccagatcctccccaacccagtgccaaagtaattcttctatttaatatactgtgatttcacataagacttaatttgaaaaaaaaggggggggggcggaggggggactgtgttgcttaagaaaaaaatctcagtatcagtagactagtgggacaaaagccaggctgccctgggttgaacagtgactggaaggtgaagaaatggaggcagtgactgcagactccctactcaagaaacctgggtaataggggaagaagaaacatagtgtctaggtcagtaggggctctttgaactattgtgtgtggctggagttaagtggaggagctacacataaaagccgtcagggtacagatgtcctgaaaccaagcaagatgactgagaattaatgtaaatagagaggtccatagcctgagccctcggggcactcctgtgtttag

SEQ ID NO: 176657 - DNA, 458 bp, Homo sapiens
caaataatctgcccaccttggcctcccaaagtgctgggtgcacagttttgcccttaggggattcacagtccaattgagtggcaaaaggatgtggaaaagtaaaccctagtgcaagatagtcagtataagccaagaactcaatgagtcaccagaatgccagtgctggaggaataaagaagaaatcaaacgtgtggacgtcctatttgggggcaggggagggggcttcacagagatgctggtgctgcctctcctcctctagattagggaccacatgacagcgaggaccatgcctatctgtccttttagggtctcacacagcacttgggacatggtggcactggacaaatatttttgaatggatgaataacattttccctgaggattggcaggattctgatagatagaaagaagggacagagaatggcagggtatgggcctaacgcggaggcaccaccagg

SEQ ID NO: 176658 - DNA, 141 bp, Homo sapiens
tgattaatggcaaggagatgaactactagattattttaacagttcaggagacagataatgaaggtgtggactatggaaatagcacaaagaatagaaaagacaacttctggaagagcaccatcctcaaataacacccctcgg

SEQ ID NO: 176659 - DNA, 111 bp, Homo sapiens
gccagtttctgaccactggatctcttaaggacagaagttttcttgtactgcatgggccccactctaagatacatgagacatgtttctcttatgccaccttaaggccattga

SEQ ID NO: 176660 - DNA, 350 bp, Homo sapiens
taattttcagttaggtacatattttgaggctattgcaaataaaatattttttaattataattttcataacttatgtcctaaaaacaattgtagttaccatgtacttttaactgaatagaaatttcaaaaatattaagccctgtatctaagtaaatcgtgtcattttagagatgggaaaatggagtcagtcaaaaatcaacaggagaccttagaacgtactattgttttatgactcctggaggtttgagtctagatccagtcttgcctcttatgttttaagtgagagctgctaagagcagaaaggatttgcagcaccttctctgtattattagaatatcgcaggtggtagt

SEQ ID NO: 176661 - DNA, 378 bp, Homo sapiens
gtttaaatcacagacaactacagactttcagctatcaaaaataaaaccactgagggagaggcctttctaagtacaaccttctgacaatgctaatgttattcaaaaatccttacttttaaagttgtttaagcctatcatttcttttaaaattctagtgaaggaataattgaaaacggaaattactatggaagtttatacgaaagggcttatagctgtagtaaaactatattcatctttttcctacatgaaagtatgtcaaccagcctggccaacatggtgaaaccccatctctactaaaaatagaaaaattagccgggcatcgtggcgtgcacctgtaatcccagctactcgggagactgaggcaggagaattgcttga

SEQ ID NO: 176662 - DNA, 700 bp, Homo sapiens
aggctgacttagaggatccccgtactcttaggaatatatccaaaagaaaatgagtgcctttgtctaccaaaagaaacaagaatgttcacagcagctttattcatattagcccaaagtgaaaacaacccaaatacccatcaacgggtgaatggataaacaaattgtgacaaattcatagaatagaatactaataacacatgcacaaacactgaagcctgcaacaacaaggatgactctcaaaatcggtaaataaaaaagctcaatggtatataatgtatgattatacaacgaaagagtacacaatgtatgattacatttatatacaaaagagtaagcaaagcatgccatttaaaaggttcaaaaactgacaaagctaacctatggtgacaaaagttaagagaaagagttgctggaggggaatcctgggcttcactatccaatacatctggctatttaatttaaataaattaaaattaaaaatttaattccttagaaacattagccacatttcaagcactcagtagttacatttggataatggctattgtattgaatgggaaagacagagaatgtagagaatttccatcttcacagaaagttttatttatcagcactgttctaggatgatgggaattttctgtatcttgatctgggaagtagttatatgcatgtatcaatatgaaaaaattcaccaagcagt

SEQ ID NO: 176663 - DNA, 721 bp, Homo sapiens
acccagtcacgagcgtcagtataagcgccggacactcgactctgtcaactagatcctagcgaaattgagtgccttagtcgtaactaccagagacaccagaatagctgcagtgctgctttattcatattagcccaaagtgaaaacaacccaaatacccatcaacgggtgaatggataaacaaattgtgacaaattcatagaatagaatactaataacacatgcacaaacactgaagcctgcaacaacaaggatgactctcaaaatcggtaaataaaaaagctcaatggtatataatgtatgattatacaacgaaagagtacacaatgtatgattacatttatatacaaaagagtaagcaaagcatgccatttaaaaggttcaaaaactgacaaagctaacctatggtgacaaaagttaagagaaagagttgctggaggggaatcctgggcttcactatccaatacatctggctatttaatttaaataaattaaaattaaaaatttaattccttagaaacattagccacatttcaagcactcagtagttacatttggataatggctattgtattgaatgggaaagacagagaatgtagagaatttccatcttcacagaaagttttatttatcagcactgttctaggatgatgggaattttctgtatcttgatctgggaagtagttatatgcatgtatcaatatgaaaaaattcaccaagcagt

SEQ ID NO: 176664 - DNA, 535 bp, Homo sapiens
ttatttttcctatggaatttaccagccagtgccactcagattgcagaattataaaaaaggaagacctagaacttcaattctatacttttgtagttttgcaagcatgaataaatcacttattttcctcctctataaaatggaaataacccctgccttgcagagttgttgtgagaacagaatagaatgatgctgtaagggaaacaagtgagatgaccaagacttacaatatcgttccccacaccaggccttgttctgtgttgtccatatgctgactcatgatcctaggttaggtgctgttatcttcccattctacattttaaaaagctttatagtaagtaaaaatgcttaatggctctgatgattatttttcttataaactttatcccctaagataggtagacctttagttttgctgccattctattgtatcaccacactctcccacccctctgaatatagtgtaacatggggcaagagaatgtcttacaattgctttagtacaagactttaataactaaaacaaaacaaaatataa

SEQ ID NO: 176665 - DNA, 735 bp, Homo sapiens
tctgtgcctcccaaaggtgcttggggcaggaatgaagagcggaacagcccccatcaatccaataggattgtcgttttacgctggcgtggagcctcagacatcaaaagggctggagagtgaagccacgtgtgagccgtgaagttggtgaccctgaggcacagaaagctgagggaatttgttcgaagtcacacagctgggtccttgcagatgtaatcgggtgaagatgggttcatattggattggagtgagtcataatccactgtgactggtgtctttaaaagaaaaggacacacggaaattcagagacagaaagacccacagggagaatgccatgtgatgacagaggcagagactggagtgatgggtctatagccaacggacaccaaagactctcatccaccagaagctggaagaggcaagaagtggaaaagcatttgggaggaagtggaaccaaagcagatcctatccaaggtgaatggcaagcagctatatgaggatggccttgctcccagccggatctcccatcctcaagaaggccagcccaggcttcatcacacagcagtggaagagttctgatttaagagaagaagagtggaagctgcaggtcctgttgagacctggactaggaagacacacaatgccacttctgccacattctagttgtcatttctggttgtgaaagcaagtcccagggccagtcaagattcaaggaaagggtaaataaactccattact

SEQ ID NO: 176666 - DNA, 424 bp, Homo sapiens
cttaccaacagactatctcccgagccataaaacaacgacaaacataaaagaattaggattatagagaatataatctctgactgcaatggattcaaatttgaaatcaatacagaaagataacaggaaatgtttcaatacttgggaattaagctcactattacatctatagtagtaatagccagaataaccactttaaaaatatataaagatatacactaaaaaagagtctaagaggaacctcggagagcattgaactcaatgaaaatgaaagtgaagcatgtttaaatttgtgggacacatccaaagcagtattaagaagaaaatgtgtagcactaaaaagcttatattagaaaagacagaaagtctgaaatcggtcatccaagctctcaccttaaaaaagggagcaaaataaattcaagccagg

SEQ ID NO: 176667 - DNA, 441 bp, Homo sapiens
agtgctgtctcttttccctccagcgccccctctgtgcccccctccaatccctgctccccccagtctctatagctgaaggctaggacgaactgtggggttgtgaatatttacgcaggcaggcataggactcagtgacgcagctgagagccacgcaagtgtttggtgactcatcagaccttctccaaagacttgtgatatttttctcctctgaagggccgaaagcaatttgcagttaatgatagtatatgacgccagaagagtacgcagaccttccggctcatcttttctgtgccttgggtgttttgtttttgaaaaaacctatgtgaattattttccctttagtaatgtttattttattctgattattaaaataatgtatgctcattgtagaaaatacataaatgcattaaataggaaataaaatgcatgaattatttttcc

SEQ ID NO: 176668 - DNA, 240 bp, Homo sapiens
aataccgtgggaccttatttccttcttattgtgattgaggtggagtagataggcgtaggtagaaatagtggaaaaaggagcaggtttgggagagagcctgggagataatgagtttaagacatgttgagcatgagattcttataagaaatctaagaataaattgatgggagaaagttattttttatggataagatattcatgaaaagattaacagattggagatacagattttggagttgc

SEQ ID NO: 176669 - DNA, 436 bp, Homo sapiens
cgagacaggcgatcacttgaggtcaggagttcaaaaccagcctggccaacatggtgaaaccttgtctctaataaaaatacaaaaattggttgggcatggtggcgcatgcctgtaatcccagctactcaggaggctgaggcaggagaatcgcttgaacctggaaaatggagcttgcagtgagctgagatcgtgccactgcactccaccctgggcaacagagcgagactctgactcaaagggaaaaaaaaaatgagtcccttctcagtgccttgaagctcatggctcctttgtgggaagctgctggtgaaaaagcatagctccagaaggatcatgtcaaaaaaagaaagaaaaatagaaagttaaagcagaggttgcagtgagccaagatcatcccactgcactccaggctgggcaacagagcaagactctgtctcaa

SEQ ID NO: 176670 - DNA, 932 bp, Homo sapiens
tgacgcgtacaggagtggtgagggcactcctagtcttctttcagttctcaaggggaatgcttccagcttttgcttgtatcagtatgatgtcagcatgtgaggtgaaaaccttgctatagagggtcaaaatcacccttgaaggtaccttaggaaggcatatgttgaaattgacatcgtgtctgctcaagaaacccatgagggtccactttttcctccaagcttgtaacatagcactgcacctgaatctgagcacctgatgaagtatctgatattgtaccaaaaagacatttcttcaaactctagaatcatacccaaataagcaagataagatgcctacactacaaaaggcaaacgaggactacaattaattttgagaatgaagtttcccatctttcattacatattcttccgtagtcatatgttcataaagggtagagtgcatgcacaaaacacctgcacttttaaaattctttctctcctcttttgttaagtatatttatttgaacttgcttaagttaaatacatgcatgagacaatatcaacatatgctaaaattatttatcacagctaaagacatctcaccgaattccactcatctgatttaactgtttatgctatcttaaagtttcctgtatttctcgttctgttactttgctaatttcgtatactcaaccctgatttggaacatagacatctacttttaaaattcaattaagatttttggtaacttcttaagtttttttaactgtggtaaaatatacataaaatgtaaccatgaccacgtgcggtggctcacgcctatagtcccagcactttgggaggctgaggcaggaagatcacttgaggtcaggagtttgagaccagcctggccaacatggtgaaaccccatctctgctaaaaatacaaaaattagctgggcgtggtggtgggtg

SEQ ID NO: 176671 - DNA, 1064 bp, Homo sapiens
ctgacagcttcccatcattaaaaacaaacaaacaaacaaaacaacctgatcattgtagaaaattcaggaaagtatgaaggaaacaataaaagaaaacccaactaaaccttggttatatatcctactaagtgaacatttacagggatcataccatatacagtctcattactattttttcactaaagtagagatacattttaaatggaattcagggtttaaagtcagcatgtgaggtgaaaaccttgctatagagggtcaaaatcacccttgaaggtaccttaggaaggcatatgttgaaattgacatcgtgtctgctcaagaaacccatgagggtccactttttcctccaagcttgtaacatagcactgcacctgaatctgagcacctgatgaagtatctgatattgtaccaaaaagacatttcttcaaactctagaatcatacccaaataagcaagataagatgcctacactacaaaaggcaaacgaggactacaattaattttgagaatgaagtttcccatctttcattacatattcttccgtagtcatatgttcataaagggtagagtgcatgcacaaaacacctgcacttttaaaattctttctctcctcttttgttaagtatatttatttgaacttgcttaagttaaatacatgcatgagacaatatcaacatatgctaaaattatttatcacagctaaagacatctcaccgaattccactcatctgatttaactgtttatgctatcttaaagtttcctgtatttctcgttctgttactttgctaatttcgtatactcaaccctgatttggaacatagacatctacttttaaaattcaattaagatttttggtaacttcttaagtttttttaactgtggtaaaatatacataaaatgtaaccatgaccacgtgcggtggctcacgcctatagtcccagcactttgggaggctgaggcaggaagatcacttgaggtcaggagtttgagaccagcctggccaacatggtgaaaccccatctctgctaaaaatacaaaaattagctgggcgtggtggtgggtg

SEQ ID NO: 176672 - DNA, 503 bp, Homo sapiens
cacaccactgcactccagcctgggcgacagcaccactttaaaaaaaaaaaaaaaagaataccaacgttttattgccacagaagagctgaggcactgtgagggagcaactttgcactgatgagagcaaaagaagtagaaggtttctgaaaaaatctaacataaattctggacttgtacgatttgagtcgatttgctgatcacagtgttccttattctttggggattttgtttctttttggtgtagtttgctgctgattcataatagaatttaaatatcatagggtctcaattttttatattgcctagtttcattatctctgaacctcgtagttcttcctcttttggcatggcagaactttagtgttaaattgtaacattgaaatattttgccttctttataaagttcttttttcgaacaaacgaaacgaaatttggctttgcctaaatcccatcagcagattgcctttattcagaagcagtcatagacagcatttgattttatg

SEQ ID NO: 176673 - DNA, 591 bp, Homo sapiens
gggctttgggaagcactgtacctgtggctttgcagggtgcagcccacatggctgctctcacagtttggagtttaatgcccatggcttttccaggctgaagttgcaagcggctgatagatttataattctggaattttgaggggtaaggcctttctcccacagctttgctacacagtgcacccatggagaccccctgcagagctccaaccacatattagtgctcaacattgcctaaataaaagctttatgttggggctccagaccctgagcaggtttctttctgggcatccaggattcctgacacattgtctgaaatctaggtggcaagtgccaagcctcaaccactcttgtgccccagaggactcaggcccaaagctcccctcctctgcttgtcactctctactcatcatttcctccagtgaccaagtgtgtgtcatgcaccttgccaaggctcaaggggtaccttgtacatgggggcttctgcctgactagtgtgggtcgtggagtcgctaagaactaaaactttccacagcttgtttacaatctggtggaaagaaactgatctcaggagaccacaggaattctcagtcc

SEQ ID NO: 176674 - DNA, 443 bp, Homo sapiens
ctcagaggttggaaagcacgtattaggaacgccactgaatcttcatcttgacctcaggtagcctagtgtccaatttcctccccagcctattcttcatcctctgggaagtctagtttctcaatgtttccaacactgtagatgttctttggcttctagtaaaaataattcctataccatggtgctctcctgagatttcaagactcctacacactgaaacagccctcattttcccaagatttgacaaggaacatcatctcatcatcaccctgaagagcccctgaaggacatggggcaaggtagccaaaagtccaatatgccatgtgaattaatgctctggagcccagcttactgccatcctaatgcaaatgttataataaaatattaaactgtatgtgtaattgatgcttactttatagtaagtcagggtcttgcttgtttgaata

SEQ ID NO: 176675 - DNA, 289 bp, Homo sapiens
ggatagagataatagagaacaaaagctctggcaggggaaccataaactcactgataaggaactgcaatagagagaaactttaacaagaaagacataacaaatagctgcataaactgccttcacattttgaatagctcaacaaactaatgtgtttccacacaactactctgaaaaacttctcttcagaatatccctgcaagcagaagagtacataatacttccacttggttccaattaaacaaattgaggcttcagtttgatctactaaaaacagcttgctagctgggta

SEQ ID NO: 176676 - DNA, 291 bp, Homo sapiens
atatatttttcttaaagttccaatgaagaggagattgagtgccctctagtgaaaagatagggtccgatacatctttatttatgaaaccttttgcttcatgtgttctccttttctgagaatttataaaacgggggacaactgacactctcttctgagtgtcagttggtgattttatagtttcacagttcatttgtgttagacccaaagaaaagacatctgactctgaatcactgtggtttagaaaggagttataagccggtctccttgattctatattaattagaaaaggag

SEQ ID NO: 176677 - DNA, 433 bp, Homo sapiens
actgcgaacattagtcttggaaaagcaatgaaagaagccataaatacaagaagaggattattttcacagcctttgagacttaactttaaagcttttattgactgactccctgcatgattctttacaaaatatttattttaatttttattttgagacagagtatcactctgtcacccaggctggagtgcggtggcacgatctcagctcactgcaacctccgcccacggatccaactgattctcatgcctcagcctcccaagtagctgggattacaggcgtgagccactacacctggctaatttttgtatttttagtagagacaggggtttttgccatgttggccaggttggtctggaactctgaacctcaggtgatctgctcgcctcagtgtcccaaagtgctgggattacagatgtgagccaccgctcccggc

SEQ ID NO: 176678 - DNA, 426 bp, Homo sapiens
gatcgtcttggaggcgtgcatgacttgggacaggactgtcgtaagacagattattttcacagcctttgagacttaactttaaagcttttattgactgactccctgcatgattctttacaaaatatttattttaatttttattttgagacagagtatcactctgtcacccaggctggagtgcggtggcacgatctcagctcactgcaacctccgcccacggatccaactgattctcatgcctcagcctcccaagtagctgggattacaggcgtgagccactacacctggctaatttttgtatttttagtagagacaggggtttttgccatgttggccaggttggtctggaactctgaacctcaggtgatctgctcgcctcagtgtcccaaagtgctgggattacagatgtgagccaccgctcccggc

SEQ ID NO: 176679 - DNA, 277 bp, Homo sapiens
tcccctggatccgtgctcgctcattcccaggccaacgactgggtgcttttggccccattcctcccttagtcccctcatcgcctccgagattagacacagtggcctggcacacagaagccgctgcagagggactgaggctgcggaactcacacccggagcctgcggcagccatggcagcaaatctggccttggggcctccaagggtcgggtgcccctgggctcttgctgctggcttcttcgagccatgttttctgtgcccggcccctccttcccctcc

SEQ ID NO: 176680 - DNA, 531 bp, Homo sapiens
tgttctcttatcttatgaatctttcagttatcaaattgaataaggaaggagatgatgtttttctttctggaaattgtggagttggatgctaagctgtatattgaatctcttactaagtatatgatacgtatgtttggactttagttttaaatttttgtcaataatttgtcattaaacaagggtttagtgatgaaaaatgtattattcaagtttaccaattgccattttagcaagtgttggtggtattttactgtaaatttgtattacttttgaagttttataaaatggcaggaaaataattggacatcaatttaattgattttgtgatttgtgcagtaaccttaagttttccttttgttatctgtctatagatatccaggcttgtggttctggtagatagggctttagtttccctgaacttgttttaggaaattgtatttttgtgaaaatcccaattgagtaccttacatgtaattggttcacaataaatgttaattaaataaaaatgtgcagaatattccagttctttga

SEQ ID NO: 176681 - DNA, 336 bp, Homo sapiens
gtcatatgtaagtaatttgggattgtagcttggacattgtgaaggttatattataaatactttggattatgttaaatttatctgaaagttattgatttgtttgttgtagcaaaaattgatctgggaaggaaggaaggaaggaaggaagggagagaaagagagagtgagaaagaaagaaagaaagagccaaactgaacttctagaatttaaaaattcactgcaggaatatcaaaatacagttggaagccttaagaacagactaaaccaagctgaggaaagaattttagaggtcaaagactggtcctttgaattaatccagtcatataaaaataaaga

SEQ ID NO: 176682 - DNA, 392 bp, Homo sapiens
ttttattttttctaatgtagctagtagaaaactttaaatgacgtatgtggctggcattctacttccactggacagaggtacaagggggttcaggaaggcctgatatttcaggacaacagaaatgcttttcttggtgaagatgcagaggtagagtttggcatttggggtatggagggaagatggatacctgtggaaggaggggaagaagcagaactggccagagagaggctgaactgccaggcaaacctgaggccatctcgccaacccaacagggagcaatggagaggccattagaattgtcccatgatgggtccagatggccccacctttctgcccttcacaccctggaagaacagtcacgggaagagggtctgacaggatgtacccttacg

SEQ ID NO: 176683 - DNA, 168 bp, Homo sapiens
aagtctttgatatgtgtcaccataagttgctgatgcctccaaagtaacaggattttcagttaagagatatgaatttctttctggcttggtctatcagtttctctgtttgtaaaatgcagagaataataagtgccactgacctacatggacgttaggagatttaatgag

SEQ ID NO: 176684 - DNA, 461 bp, Homo sapiens
ggtttcttccttttgtgtgtgaatggaaaatgaatttaagttcattagtagaagcaagacacctttagcttggcctccaggtattatttgttttccttctcatgagaattttgaatgttctatatctagattctcgaggctaaagaataatgaagcagaaaatgttttctccattactatatccccttcctatggggattctgaaggtgcggttttccctctaggtgagagaactacattcctttcctaggcagattccattttagttcacactcaggctgtcagatgcacagaacaatgtcacatgggcttcttaagacctcttaaaaatcacttccagtttgacttctgcccatactttactctgttagttttcctcagaaaggcttggcaatagcagaataatctttgattaccaacaatatatttaattttcctatttgataggctgatgccgcaga

SEQ ID NO: 176685 - DNA, 688 bp, Homo sapiens
acacatcattcaaggcctgttatgggggcccagaacatcaggacacagtagctagcctcacattcagctccattgcactagagctttgcatgatctcaatttgaaaaacacacatgtatatcctacatttgtatctctattctaatattatatactgtatatgactttttaaaatattggtttgctgtttctattttgtgctaatgcaacaaatctaatttgttttagaaacagttattactgtttcttgcttcttatcaccccctaccgtttggactctgttgtccatctttctctgcctaattggaccacagcctggtgcctcaatccccacaaaatctgttcccttctagctcaagatgactgcattctctctcagttcgcagtgtactcatgggctgctcattcatctgcccttgtgctctgtgcctttttggcatctgcgggtaaactcagtgccacatatctctattctgttcactcctaatgtttgtattgtcttcccaagggacctctcttatggccctgctgggctcctccccttacccacatgtgccaagcatagaaatcaaggcaacattctcagtccctttaagggaagttccaggtacctagctagtcctacagccagcaattagggaagttaacgaataacctgctaaacaagaagataataatttaaaagcca

SEQ ID NO: 176686 - DNA, 170 bp, Homo sapiens
tggaccggctgtatcggggtcgggacacaatgcatctccctctgttcaccgcccttgtagctccttctccttcctgggagactggcggtgactgcagtcattcctgtgtaatggccgtctccccctctcaaccagggactcctccaggaggttgctcgcattgtgtcccg

SEQ ID NO: 176687 - DNA, 1628 bp, Homo sapiens
  misc_feature (1)..(1): n is a, c, g, or t
  misc_feature (4)..(4): n is a, c, g, or t
  misc_feature (12)..(12): n is a, c, g, or t
  misc_feature (1626)..(1627): n is a, c, g, or t
nccnggtttcanattccagaagccaagatctgccagccctgcctgttctctcaccccgcttcctggatccaagcaagacacgggctgagcacgtcctaatctgtgtcctggaaaacaacactctaccccacagcaacaaggcatggaggccaatggagaagacagggagatggtgctggaagcagggtctgctcttcccctggggaagcactgcatcaccagtgtctgacacaaagcctgggacatgtgggcttccaagtggacctctcctggataaatgaccattaatgaaacagagaaggagttgaagagccccagaggagtgtgagtcccaggggtcccgccagctccactcccaccttccaaacctgtgaaagtcaggtgcctgagtcgcacagtctctcccacccgaatgccatgagctgcagcgacccagcctgtctctgcaggagggccagacatgccgtgacatcaccagctcctctaggaatatgggatacaaggagtggctgagatcggctgatcaccagctcactccgctgcagccgccccagagcaatggctccccgaagccgtgttctggctgtcttggccgctttctgtttgtgactctccctgcctccactccccccaccaccccatgaaatgatctcatttggtcatttaaacggaaaactaaaaagttttaagtgactctaggagagcaggagagaggcaggtctcccagctcagaccccgccccgggacggccccacggaagatgcacatctggatgtaggcgctcaaggcaccgcgcgtgcgccgagtggccttgctcagctccgtccttctgaaacccggaatcctcatgtgtctgggtcccgccccatcctggcctcctacaccactggtccagatcctccaccttcccccaacgcgaggtattgacatcaaagcatcacctcatctggcacaagaatctgaaacacagaccgcaccttacaccaacgtagtgaatccctccttggacctgagttcaacaagcccagagtcggggctctgggttcccgcccaaatgccacgcatgcacacagatggcacctggcgtctcctcaaagggacaggaatcccgggcttcccagaatcaccaggtcgatttaaatggcatcagatgaactggaaaagaatgaaagtgctattgcctaaagtgatgaaattttcagaggatgtatcggtcctgtctggtggacagacggccaccagagggaatgaaccagtcttctctgaacatccatgaggatgaagaacagtcactgaggtgacggtaccaagtcaccggccacctcccagggatcctctcatccggtcctcacagcagcgctgcatggtcggacctcatcacccacattccaccaagaggaagctgaagcccagggccttcatccactcatgtcctccagacccctggcacccatcctgggccccaccccatcatccaggccttgggccttcgacctggggagagtccctgtctcctccatgagccgtccagggcctgaagaggtatccaataaacaagaaagcagaacacaaagagctgtgatggagtggatcttatgtagtaagaataaaattattttgagaaanna

SEQ ID NO: 176688 - DNA, 466 bp, Homo sapiens
caacatatgctgggcatttgattactcatctcatttaactctcagctttccttgattgtaaacagtggtggcatgctggtatgtgatcatgggcgaacacgcacttggcagatgtgggtctgtatgtgtaaatccactcttttccttctcgctttttttccactgatatttgcaggtaataaacttgatagtgtgagactgaacaacatgttggcacacattcgtgttttgtttagtctcatcaaattgcccgttcaaactacttcttgcaaaaaattttggagagtgagaaaactgctgagttacctttgatgattagaaaggcattctttcaatttagctatcaaaactgttgcagttattaaagtggtaaaaaaaaatttcagtgctaatatactcctgtgtttcgctatagtgtttcatgttcctcctgaattaagggaagcttttatcttaattgagatgc

SEQ ID NO: 176689 - DNA, 98 bp, Homo sapiens
cctcccctctccctcccaccccaagccgctttcacaaactcctttcttaccgtaggtttctcccctcccgccgcccgggcgagcgacacggctgcggc

SEQ ID NO: 176690 - DNA, 324 bp, Homo sapiens
caacctcccccatcccaccctccctccgcgggaaagtcggttagacgcggctcgcggaagacactactctccacttctcagaatgggttcaaagttggggagggatgcggctgttggagaacaacagtccgctttccactctctgggccagggactgggagggcgagagcgagaagttggggagaggacgcgcttccagcgcctgtccgcccggccgcgccacaaggggccgaggggcatgggggctgctgggcggcaaggcttgcgcggggtgaccgtggctccgcccccaactccgggctcgtagtgattgacgcgcggccg

SEQ ID NO: 176691 - DNA, 207 bp, Homo sapiens
tagagctatttacagatgtttgctagggatatactcatgtgttgccagcagagtttccataaatgtttatttcttttttaatacttgctacaagatgtaattttttgtttatgcatttacttgtttaatgtttcatgagggatgaacctaatttatcttgttgattacaatcttatgcatagggctagggacataggacatgcttga

SEQ ID NO: 176692 - DNA, 368 bp, Homo sapiens
gccattctcacttctggtccatctatgtcttttgcacattcacattttgttgtatgtatcacgttgcaatgtaattactgattagacagttgtttcccctacttcactgagtattccctgaaaacaggaattctgatctacctttgtatttctagtccctccatggtccccggcacattgaagacgcatttaataacttaaccttgaaatgagccaatagaactctgtgggaaaattgagatgacaagtatggaatagcaaattggaatgagtttgagaaagactttaaaaacacaaatataaaaattttgaacttcgtactacagacaatcgattttattttgttaaattgaaaagtggcctcaaaa

SEQ ID NO: 176693 - DNA, 268 bp, Homo sapiens
gggtttactctgaggaaaggggctgcactaggccaccatccgagggtccacggccactctgctgcctggtttgagaactccaagtacagagattcagagtcaaacgttgctcacatctgtcggagtagcgtttgggtcctcaagagttctaaagccagaaatctagaagctgaggatcacacatgttatgatatgatttctggctgatgtcgtaggcccaatgaataaatgaagaaatcagagcaatgtcaggctgaattccccactc

SEQ ID NO: 176694 - DNA, 699 bp, Homo sapiens
gctccccatgagttcagggttggctctatcctgaacccaccataggggcccagctttcaaaatgtgtgggtggtttgttttcaaagagagagaaggcggtgggcaggaagcaccatcccagatctgctgtcaccaccagataatctgttgtcataaaccccagaactttccatgaggctgctcaaatgtgctcggccttcccaggccggtgttacggccaggccgcctcctgcttgcagctggtgaggacggacagggcatgctgtggcctctgtgaggtcgcaggcccaggcgtgtgaaggaagagaagacacagggtccccatgacctccagagaggcctcctcgccctgtcctggccaggcctgccccggaagcaccccttgcgggcagttagagcagcgacgtccccgagcggcacctggtttcctctccaagctcagctgcagctggggtggcggcaggacctcggctgggtcctcaccagccctgggcctccctggcaaagtgggctgtggacgctgggcaggccagaccccagactcctggctccctcacccaggcctgggagtggttctcagtttgctcagtgccccccagcccactgagatcaggtccttatggcctggagccagggatctgcagctcccctcccctctccctggccctctcgaagcccacggcagaagcaccccctggg

SEQ ID NO: 176695 - DNA, 314 bp, Homo sapiens
gagggcatttcacatgctccaccactaaaacagaaagttttatgcaaagcaactaacacaaaatagaaatataattatctcttaggattaacaaaattatcagtgtcacaacccacataaaagtctaccaagcaggctgggcgcagtgactcacgtctgtaatcccagcactttgggaggccgaggcaggcaaatcgcctgaggtcaggagtttgagaccagcctggccttaatgatgaaaccctgtctctacaaaaaaaaaacacacacacacacacacaaaatttaaacaggcgtgggggagcatgtgcagg

SEQ ID NO: 176696 - DNA, 560 bp, Homo sapiens
aacccctcacatagatggcttgcatagggtgttttatgattgtcttgtgtatacttttaacccccaaagcactcgacgtacatgctagctctgccagagtgctgaggagtaaaaatgagtacaaaggaagcagggaaggaaggatggaagcgaggagggcaaaggaagacaactgtaccaagttaagaagaagcgagaaaagaagaggtagctggatacaaccgcttattccatccatccagtaagcatgcacacaggcctaccatgagccacacactgtgccaggcagtggggaatgtcgaataacaatcctgagcaccctggaaaccagagctgatcagacagcctgtgaagctggcagtggggtaagataggcaggcacgacagtgatgcagtcattctctctgtaggcaggtgttatggcagcagcacaactgcaggtgccaatgactccaaaaagaaaagttattctctccaattcccaaacttgtctctagtttcacttttggcgagccagtctctggatgggattctgatcaacagaagttctcatacacgga

SEQ ID NO: 176697 - DNA, 401 bp, Homo sapiens
tgggagggcaggagctcttatctgttttgtcaccattgttattccctagtgtctacctagtacagagccctacacagagtaggtgctcaaaacattgttgttgatcatctagattatatcagttacgtgatgttgtcgaagtgggtgttattgttgtccctcttgtacagatagaaagcctgaggttcagagaggtaaagccacttgacgagagtcacacagcttctcactggtgttagcgcatccttactttggggtgtgcagggtgtgctggtgtcagctcgggagagtggattgtgcccatctcttcccagtgcagcattcagtgatatcaatagcttgaaattggcatggccaatttcagtaagggtatttaacaccatcaaaattagtaaccacca

SEQ ID NO: 176698 - DNA, 437 bp, Homo sapiens
ggaatcatgagcaatacccttgctgctctgggtagaaatcttttagacccaagcagatatccaagctgctcatttggcccgatgagaagagaaaaacagaaaacaaaagctctgagtgggtagagcgtggggggagcttgaagctgttattaaaggaaggtatgattaactcctaactcacagccgcttcagctcatctccatggctcagccaccaggccagcctttgctgtcacctaacagataattattgtcttttctacaatatgattaagtggaaggagaatcagaacactgtagaactggatctgatatttcttgttagcatatatatatatatttaatctatgtgcttgtccttgaaaacagcacttcctgtacccagcaatcacagagctgctcttggaatttaacaccctggtggttctcaaatgccat

SEQ ID NO: 176699 - DNA, 799 bp, Homo sapiens
ctccaggcatcctccgcggcgggccggaccgggccggcggaggggagcggaagcccaccggggctggcccgccgctgacccgccgcctccgtctgcctcctcccgggctctgggcccagcgcgcccagatgccgggcaggacccctccgcccgctgctggaacaccaatagcagcgttggagcctctgggccggaggaactggggcctccaccgacacctgcttcttccctcacctcgcagccttccacacctgttgatctgacctctgccccgctgccgcccaggagtaacctaaggcttttggcctgattcgagctcactccgtctaaacctctaaatgcggtgcgaaaaaatcctggggaatgtgccatgcaaagcctgggcatttcaagtgcttttctggattcgcatcaactcctatttacaggcatctttatccggaattcagctcgtcccaaaccccacgtggtgtagctctgcttgtgtttttgaatcccggggcctctttgaatcagaagccctttgtatagagataagtatcctttaggccagaatcagcctccatttttttcgcagtcccatttcctacccgtaatactttcttctgattttaaagccatttgatagagaagggacagggaacagaaccttcgccccccgcctgagcagctggtagactagatatcttccaaacattatctcatttacttccctggagttacaaataggtagatttcatgtccgttgaggggggagaaagctgaaactttgggactaagaatcctggccgaggtcagc

SEQ ID NO: 176700 - DNA, 138 bp, Homo sapiens
tcacatttgcatttacatttttaatgcctatcttcctagggaatattctctcaagtacttggtgaagtatatgaactgttaattgtcttattaactgcagatccccagcgcgaagtcagtgccaaaaacaagtcatta

SEQ ID NO: 176701 - DNA, 498 bp, Homo sapiens
tcacccagccaagatcgcgccactgcactccagcctgggtgacagagtcttgctctgtcacccaggctggagtgcagtggcacgatcttggctcactgtagcctcagccttctaagtaggtgggattacagaccagtgccaccacacccagctaatctttatactcttagtaaagatggcttttcaccatgttggccaggatagtctcgaactcctggcctcaagtggtctgcccaccttggcctcccaaagtgctgggattacaggcatgagccacagtacccggccctgtttgatttttttagtgctattataaatggaattttataaaaatttcagtatttgatttttccttgctaatttatagaaatacatttcatgggctggatgcggtggctcatgcctgtaatcccagcactttgggaggctgaaggaggatcacctgaggtcgggagttcaagaccagcctggccaagatggtttagtagaaaccccatc

SEQ ID NO: 176702 - DNA, 346 bp, Homo sapiens
  misc_feature (15)..(15): n is a, c, g, or t
tcgagtcggcccggntcatagtagcgagcatcagtaagcaagagtagtttgtatagccaagtattttgcaactagaatatatagggtggctgctgttttcttgatgaaccctaaatgatcattggtagcttaaattcagccagccagcatgcagcaaagcctgggacacaatcccacaagttttgaatactcactctttcctccctgaaattctttccttctgtttatatagcatgtatagcattgtgcttccgcttatttatcttttgtcttccaaaagctcaggtgatggcccgctgctctttttaccctggctagtgtgcctgagaaacatctgtctgtctcc

SEQ ID NO: 176703 - DNA, 498 bp, Homo sapiens
tctttttctttttcctctgccatctagctacattttactgttatccaggtgtctgactcttctagttgccacacacctaaattccatgttcacttctcatacctccaaattactttctggatagataaccaatttttttatttagtcatttctttatacataatcccctgtagaatctgaaagcagtaagcaagagtagtttgtatagccaagtattttgcaactagaatatatagggtggctgctgttttcttgatgaaccctaaatgatcattggtagcttaaattcagccagccagcatgcagcaaagcctgggacacaatcccacaagttttgaatactcactctttcctccctgaaattctttccttctgtttatatagcatgtatagcattgtgcttccgcttatttatcttttgtcttccaaaagctcaggtgatggcccgctgctctttttaccctggctagtgtgcctgagaaacatctgtctgtctcc

SEQ ID NO: 176704 - DNA, 803 bp, Homo sapiens
ctctgccttaccctgcatgtttctattctagactgcaatagggagggcctgggccaaacatccctacctctggaccctcaccctatttcaaatcctttatgtcaaagaaagtcaatataccctaggtagctacaagtccaattattattgaggtatttagctgtaaaatttgtccttccatcactgtcttgactaaaggttctcctctgaaaattccaacttgttgacctgcaaacagactggagaaaagagcagtaagggtgaaggtgggactgatagtggccaagccccatgagaagacatgtttaaccttgctgtccttcccacaaacatgcattcctacaaatgtgttagaaataggctcagatgtgtaaaaatctacaggctgctttctgtagctctttcttttctcttccctacccactccttcagaatagcagtgagcaagagatagctcattagagtcctggcccggaattcctgtaataacaaaatacagatagcaactccctatctgcagagttaactgctttgagaggaagggagtggggccaggcgtgagaaataatagtgatccttgtaggaacaaatttttagtcgcatgtaagcattttatttcacttcttttcttagagaatctttgcccccaccttttatttattggaaattctgttccattagttagttctaagcctttcctttcggtcgttccatgactccagagttgttctttaatacatgtgttcctgttaatattatgtccaatcacaagtgcctgattggctggtctagaaaagttagag

SEQ ID NO: 176705 - DNA, 427 bp, Homo sapiens
tgttttgcagaagagaccacaaaggctcagagaggctgagccacttccccaagaccacacagcaatacagtaaccactggctctcaacgcccttgaaccccaactccctgtgccttccccacctaacgccctcaactggccgtgagtcttagagggcaaccctgatatttagggcctgctcccagctctggcctctgcagcaagcaacttaacaatgtgcctcagtttccccatctgaaatatggggaagatcggaacgaactttgtcctggggcagaagcttgtgaccaaaccgcaatgccccctaagctgtgagcttcctctggacgagaggctgcaaccactgcctggaattccgcccttccgtgcccacctcagctctgtgaacttgcagacctagttctatctcagtgagattccctgtgca

SEQ ID NO: 176706 - DNA, 495 bp, Homo sapiens
acacccggactcgaccccaggagggaggcggggcactactgtgttgaaagactttacagctcgcagagtgaaaattttccaccttaaaaaattgcgcattgcggagaaattttatttaaaaaaacatatagcgcttgcgggggtggaacaaaaaataagttagaaaaaggcacttctcagaaaaaataaaaattacttcgcaaaaaaaaaaaaccctacaacgaattagagaaaaagtagttcacaggaaaacagaaaaacgcgcattgcaggaaaaataaatcggagaaaagcacttggcagaaaaaaatgcattagattaaaaacgcactgcagaaaaaaattagacaagggagctaacggaaaaaaatggatcgggcaaaaacgctttaaagaaaaaaattagaggaaaaagcccctcgagagaaaaatagaaggggaaaaaaagcacttccaaaaaaggacaattgctttacaaaaaaaaaaataataata

SEQ ID NO: 176707 - DNA, 344 bp, Homo sapiens
gttattttgttatttcagctactaaaatgctgagagttaagataaaggacattttattacggctttacaaaagttaataaaagtatttttaccttattaacccagcatttgaaatattaaaataaggttatataatcaaccaatatatcatagatcgtactgttataaaattcagaagtggtgtggaatatattaattatgtaaatttttattccagtttttatttgtcgtgtgagtgtgagagacatgttcattgtgaaaagatactcctagtggaattaaactattctcacaattgtgaaaatatcgcctaaataatagaaaaggcttaaatcctggcttca

SEQ ID NO: 176708 - DNA, 153 bp, Homo sapiens
cacaccagtccaccaaccttttagatttatttcccccggccaaatcttaaagctggtctaaattctctgcttgtcaattcctctacttggggggtaggggaaaaactcaagacatcttctttaccaaaaccagcgttcaagattaccccttct

SEQ ID NO: 176709 - DNA, 798 bp, Homo sapiens
gcaggagaagataccgaggtccaaacaggcctcagtacctcggggttggggggtgccgcccttgcgccctgccctttcagggcttggccagcaacctatcctgtcagaagaggtgagagcccttctggtgcctgccccagagtgctctgcctgactcacattcagctcctgggcatggatggattcagggcccctggtggcaggcccctcctctcctccttcactgtccacctttgggagctgtagcctccagtgctctgagcctcttggcacccctgctgctggtgcctctgcccctcccaccaccctcctgtcccgcctcccgactcctatgtgctttcctgactgcccactggtaacattccggtccagcttgcaaggtgccactcagacaccccctcctgcttccagctgtagacagagctccctctgtctccttcatgcatatttatttattataaaatatacaaagggccctatagtaagcctccacatgttctccacccaaatgggtaaacagggaggttgggcagtttgcttctgatcactttcttaaaggctagtacacggtagaggcaataggcatcctccagcttcctcctctccctctcccctccacaggggcagccgcagtcatgacttggggatagacccagccctggctgtgtgcgtttatgggacaccagcaggccacacccgccccagtgctggctttgcctgagcggatggagtcaggctgtgcgcagacgcaggtgctcgtgttgttcaccccgaggggtgtcttccacactcttggtg

SEQ ID NO: 176710 - DNA, 261 bp, Homo sapiens
agagcatccctgactgctgtggctgacacacctgcaagtgtctgtggaatgtaattagtgcagcccagccttgcaaaaaagaaagtcttctcttgttgcaggagatgaactggactgacccattcatgattggtggatagaagatatccacctatatttttgtactttgcaaagagtgttcaacattcactaatatgatggtgaccttctgggaaggatgaaaaattctgagaaattctttaagtctgatagcaaattatg

SEQ ID NO: 176711 - DNA, 245 bp, Homo sapiens
tctctctccaaccttcagctaaccgctctgccaccgcaggggctttaaccagcatctctctccaaccttcagctaagtgctgtgccacctccctccagcattcaggggctttaaccagcatctctctccaaccttcagctaaccgctctgccacctccctccagcgttcaggtcagccccatttcagggcccttgtgcttgcctcacctaacctctgcatgattcactcattcacctgagttcct

SEQ ID NO: 176712 - DNA, 304 bp, Homo sapiens
tactccaagaaagtagtttttctgaacttctctgtaattttggttcactgccctcatccctaggcccccaacacatgcatacacacacatgcacttgtgcacacacacaataagtaactcctgaaggacaaattctgtgtgtcataggcccagcacctagcccaatgcctgacacccagttggtaaccctctaaatatttactgaatgaatggatacataaaaatgaacactttcagccaggcatggtggcccatgcctataatctcagcactttgggaagcaaggcgggcaaattgcttgggc

SEQ ID NO: 176713 - DNA, 247 bp, Homo sapiens
ctggagggtaaaaataaaaccttcataaaatttcatttgctgctttctagtgttggagaaagatccccattttctgatccatacatctcacagatacgtgataatatggtattgtggactctcctgtgtgactgcctctcctgtgaagaaccccctctgagcttgtattcactgatgtgagagcttgaaacaacattgcctatgccacaaaagcattatgatttgaaatcaagcatgggtatgtact

SEQ ID NO: 176714 - DNA, 494 bp, Homo sapiens
tttccatgtaagtatagaccttgctataaaggttcagaaaggaagaggaagtatcaaatagatcctacagtgtgctactgtatctatctgcttgcttgttgacttgtttttctgtttctctattgcctcttccccaaaaaggatttgaggcaagctctgtaaagatggatgcaatggaatcggcacatggcttaaaataaaaaggaaatagaaaataagccagaaatatactatttacaaattctgcctaaggtgaaccaactcccagaaatttaaggagtgcattcatacagttgcaaaatatgcatatgtgaatagtaaagcttctgcagatccctaaagaattcagagcaaataatacagcttaggtcaggctgatgaaagccacggctcaaagcaaatgaggatatttctattgggggagtcctctgggagtgaacttttcaaagcactgagcctagttataaaaatatctcacatgttgtattgtgctc

SEQ ID NO: 176715 - DNA, 343 bp, Homo sapiens
ttcactttatatccaaaacacttcatagacatttttctttaaaatgagtggaagaaaagtagtctaactgttgagtctttggacattccaacatttagttgctggggagatgaggaagaatcagcaaaggaaagtgaggttacgttttggagtaaaataaaaggaaagtttcagcatattttttgtagtagttccaggtacagctagtattaaaggaaggcattccttgacatttgggatgaactaactttgacagagtcacacaggtcttttgaatgcaggatgtctgaacctttctgtgctcatgtgcctgtctggctctaagaagggtagaacaaggtgg

SEQ ID NO: 176716 - DNA, 643 bp, Homo sapiens
agcaaactaacacaggaacagaaaatcaaacaccctatgttctcactcataagtgggagttgaacattgagaacacatggacacagaggggaacaacacacaccaggacctgttgtgggggggcaatgagggaaggggacttagaggacgggtgaataggtgcagcaaaccaccacggtgcacgtatacctatgtaacaaacctgtacgttctgcacatatatcctgttttttttgtaagaaataaaaaaaaatcggcacacaagaaagtctgcctttcttcaaaaacagttttttcacaaattttttccataaataaaaaaggtactaaaaaaacttgaatccaaaaaaagaaaaagaaaatgcaccgttagatggtaataaatatatcacatttttggtaatgtaactcgtttattctgaatcatttctggaacttgttaatataaatgttttacaagtaaatacaatatgtaaaaatgctacttaatggactaatatgtactttcactcattcactaaacacatattttttactgaatgcccatataactttttttttcttttttttgtttgagacggagtctcactctgtcgcctaggctggagtgcagtggtgcgatctcggttcactgcaacctccg

SEQ ID NO: 176717 - DNA, 667 bp, Homo sapiens
acggcagcaggtgatcagaggtcctggagggaggactgtggagaggtcttaggggagggtgagatctggaatgcagggaaagggcacagaaggacactcaccagcacctttaccagttattagcctgtgctttgtgtgtagcaacagaagctctcataaaactcagttttcttgtatttcatcttcttcaggagaacatactaacaaatgggtcttctttttctcattacaaattggcatttctgatgagcaaggacctaatccccagatttctaggctctgcaagtgcaggtttcaatatcagacacccacacaggtccagaagggcacatgcccttatccattcggagccaaattcattttgttgaacagtttgaaagtttggacttaacctctgaactggccagcacctgactgatctacaatcgtggcttaaattaattggctttgctcacatctgcatcctgaccaggcatttgaaggagtagctgctgtttaccagtaacagccccagctcatcattcatcaccttttataaaggtttgaggaggaagaggaatttggacttccttgtaatagctgccaccgtcttcccatggcaacttaaacaaagtagccttttcttagatgagactgtgccagactggtgagtcttgtgttataaaat

SEQ ID NO: 176718 - DNA, 477 bp, Homo sapiens
tggcacgggtcggcatctggagaaaggtcgtgagtaggagatacatgaaaacagcgggacatagttaagtctttctacttaagatttgagtagtttacataccacaataacagtgtgattatattctgtgttcttttgtgtatgttctaataccagtgagttttgtaccttcagataatttctcattaacattgttatctttcagattgaagaactctcattagcatttcttgtaggacagatctggtgttgatgaaattcctcagcttttgcttgtctaggaaagtcttcatttctccttcatgtttgaaggatattttcaccagatatactattctaggtaatgttttgtttttttttctctctctctcagcactttaaatatgtcatgccactttctcctggcctgtaaggtcttcactgaagagtctgctgccagatgtactggagctccattgtatgttacttgtttctttt

SEQ ID NO: 176719 - DNA, 752 bp, Homo sapiens
gggagctcgcgtaccttcctgaagttgcgaaatggagaagcatgagagcctgacagacgggcaaagtgaaagaaaaggctggggacaggagtcagggcagagaattaagtgtgattaagtaatggaagagactcactgtggacacaagagttaaatgagctgcagcaaatgctttatttgtaatgaggagatactgaagatagaagcagggagtgattatgtcctaaggtcctgagggggtcagaagcagaagggcccaggaggacggttagctgaggaaaggatatgcaagcagtagaccgaggtggagggtggggagtgtaagaactcttttgctttggctgtgattttcttggtggagtagggagaggccatcctatccattgggtagtggagaggagaggaggaatggtattaggagcttaaaacagaaaaggtttgggatagatgccatgggaaataaaataggcacacggcaatgaaattgtggattgctgagtagagttgaagccccctggagttaggcagagtaaattgtagtggactttactcgggattcgtgttagcaaaagcgttgttgaaacaatggaccaggctgggaagcaaaacaagcaaggctgaaagatggctgatagaagtgtccagaggtgttggtggatgggagatcaagctggtaatgtatagcccagtgagtagcaatggagacataaaagggaactgggtgactatgccacaggaacattctgaatcgt

SEQ ID NO: 176720 - DNA, 267 bp, Homo sapiens
tgtgaatcagtggatagatggatggactgaaggactaagtgatagtgtttactaggtacttaatgagtgagaataaataaaatgataaactcattaaattatatcatgtctgtatttgcttaaagacttagcagcagccaggcgcggtggctcacacctgtaatcccagactttgggaggcccaggtgggcagatcatctgaggtcaggagttcaagaccagcctggccaacatggcaaaaccccatttccactaaaaatacaaaaa

SEQ ID NO: 176721 - DNA, 338 bp, Homo sapiens
aaaagaaaacatcgaataaaatcaataaaacttaggccaggctaaacaagaggaaaagacaaagagacacaaattcccaaaatcagaaataaaaaagaaaacatcagaggtgataccacagaaatacaaaagatcaaaagaaactctttcactaacaaactgaaaaatctagagtaaacgaatacatttctggacacatacaacctaccaaggttgaatcaggaaaaatagaaaaactgagcaaactaataatgagtaatgagattgaagcagtaaaaaaaagtctcccaacaaagaaaagtccaggacaggatggcttcactgctgaattctattag

SEQ ID NO: 176722 - DNA, 287 bp, Homo sapiens
aagactgattttggcccactgtgaagggagatacgtgttttctttccctgaggaatggttatcctctgtgttccttgagtccaaaacatcctattagcccttataactatctctggaaaaaatttcaggtatggtgctaggtcaggtagctgtagtttccaactggctctcttaactggccatcctaccaagaaggcaggctcaaggaaattcctttctttttgaaaggcctgggctgagtgaatgaccaccactctgtggttcaccaaaaaaccacatcaggtttt

SEQ ID NO: 176723 - DNA, 678 bp, Homo sapiens
ctcttggaagcttagagcaaagagccccaggccaagaaaatgcacagtctttatagccaggagttaggaactgtgtgagattcattttcctaaggctacaaacttaagcagaattaggagtgtatgtgaattctaggccacagagttctaaggggatcattaagagaaatagggctacagacagggcatttctgagtttgtatgcaaggccaggtgtccatccttcagtgtgggcagaggagaccagaagtccatggaactttttttttaagtcaatcctgaagcatgctagatgtccttggaatcgtaaaggcctaaggaacttgggttgaaagaccctcagatgtctaggtttccaagactttccttataggtgcttattcctagcctcttggtttcctgggcccagagatttggcttgtgcctttagaatctctgtgtgtatctgaaaggagggagacacagtgagatataataaccacaatactagtaaaagcagctagtgtttactgaggacttactctatgctgtggcctcacataattcatagcagccatgccaggtaggaatgattctgggctccactttacagatagagaaaatagagctcagtgaagtgatcacacttgcccagagtcacatggccagtaagtggtggtaaagggacatatgccacat

SEQ ID NO: 176724 - DNA, 612 bp, Homo sapiens
cccatacctatagtcttcatactgcacattagatctctatacttgttcatactactttgtatcctctgacctacatctctccatttcctgcccacaacccatatccctggtaaccactgttgtattctctctgcatatttgaaatttttttggttccacatataagtaagatcatataatatgtctttctttggcgtatttcgcttagcacaatgggctttcccatgttgtggcaaatgacaagctctcattattttctagggctgaataatattcattttgtataaaccaaatgtggtatacttacagccacttctttctctatttgtccatcatcagacacttaggttgtttccatatcttagttattgtgaatcatgctgcagtgaacatgggagtgcagacatctttatgaggtggtgatttcatttcctttgggtatatgcccagaaaaggaatggctgggtcatatatggtagttctgtttttaatttctttagaaacctctataacgttttccataacggctatacccaatctacattcccaccaacagtggacaagagtcctccacatcctcaccaacatttgttatcttttgactttttgata

SEQ ID NO: 176725 - DNA, 459 bp, Homo sapiens
ggtttttatttgatcaataaaaatcagtaagtctctagccaggctaaccaaggaaaagagagacggcacaaattgctaatgttggaagtaaaagagaggatatcattgcatatcccagggaaattaaaaggaaaataaaatagtactatgaacaaatctatgtctacaagttttttaactgaaacaaaatggaccaatttttaaaaatgcacaaatctgccaaaattcacaaagaagaaatagataacatggacaggcctatacttattaaagaaatttaatcaaaacattaacaaccttcaaaaacataaagcaccaacttcagatgggtttggtgaattctatcaaatatttaaggaaaaattatactaattcaatataattttgtccagaagatagaagcagagggaatactttctaatgtattctaagaggccagcattacccaccccccaatca

SEQ ID NO: 176726 - DNA, 138 bp, Homo sapiens
ttggaaataatagtagacactgaggactacagaagatgggaaagtgggaggcagtgaaacatgaaatactacccattggttacaatgtgtactattcaggtgttgggtacactaacagcccagaattatgcaatccat

SEQ ID NO: 176727 - DNA, 552 bp, Homo sapiens
atgaaacattacatttaaggatgtagtagctttgaatacactgatatggaatcatgaccaagatttatcattaggttaaaaaaaaagtatggtacacaatattatgtattatatgatcccactatttaaatataaacatataagtacaaatgaattatatttgtgtgaatgcataggaaaatgtctaatatactcagttttgtaaacagctacctctgaagagtggaacaatttaaggaagatatttgtattgcttcatttttaaagaaaaatgttacttttataacttcagaagaaacagtaaagaaaaaatgcaaaaagactatcaatactatgtaccagagagatagcttcaaagatgtttattaactatttaaatgttcctttggagaaatttttctccagtcttcttgaaaatacatatcctgggaggctgaggtgggcaaatcacctgaggtcaggagttccagaccagcctggccaacatgataaaatctcatctctactaaaaatacaaaaattagctgggtgtggtggcacgcacctgtagtc

SEQ ID NO: 176728 - DNA, 252 bp, Homo sapiens
aaaaggaaaaaataaaagaaaaaaaaaagaaaaaggataaaaagaaaggaaaagaaaataaaaggaaaaaagaaaataaaaggaaaaatgtaaaagaaaaaagtctggtgcatgtgctgccgcagcccgagctcaccccttccaccggcccttttacccaaatgtacgcattttccatgatgttcttcaaggaagtatttgacaacattgcagcccaggaatctccagccctcttcccggtgagattttcag

SEQ ID NO: 176729 - DNA, 872 bp, Homo sapiens
acaggatcgtcgtggcaaaggctccgacagcttgctggaatagagggtctccgctgcctcgcttctcctgtggccttcgtgtgggacgcacgggacggcgggacccagataaccgttctctcaaagcgagccacagaaaaacattgcctgttcacaaaacttacgttttatcaactttctacgtacaaccactctattttcaagtgtcaccgtgttttataattagggtggaaatccagaatacaaagtgagttacaccccttttctaggaagagtagtaggctgtatcttggaaaaggggctaggaagtttccctcaacttgccactggaacatgttttcagggaaaagaaggagtgtgtttcgttccaagtaacaaaagtacctgcaattggctgggcgcggtagctcacacctcccagcactttgagaggaggcctaggcgggtggatctcctgaggtcccgagttcgagactagctggccaacgtggtgaaaccccgtctgtactaaaaatacaaaaattagctgggcgtgatggcgcatgcctgtaatcataatcctagctatgtgggaggctgaggtaggagaatcgcttgaacccgaaaggcagaggtctcagtgagccgagatcgtgccattgcactccagcctgggcgacagagcgagactccgtctcaaaaaacaaaaaaaaaaaaacaaatacctgaaattaacataacagtaattgttcatgaacagcctccaggagacttgtagtggaaggtggagctcccactcagtactcaagactgcagaccttgctcctcttctccctgtttttccgataaagtatttcaaagcttatctgatgtgtaaggaaggttgttgatga

SEQ ID NO: 176730 - DNA, 397 bp, Homo sapiens
ccttgatatctgaatgaacagaggagatgagagaaaggacagtcctcagattttctgccaagaaagaaagggtagatggtgatgccatgaacaaacaggaaataccttccaggaaactaagagaagtctgctggtcagaatcttatttctcttactcctttcattcagcacaaaattacaacagtccataaaggaactctgcttcctcctcctaagcagaaactgtcaccaaaaattttattttatgaaagactgcctagatacgatcttggatcttcagagtttttcaggttaaattatagcatgttcttggcactgaggacacaaaggtgagtgacagactgtttttagatagctttcattctaacagatgtgatgaacagtacgataagatgaa

SEQ ID NO: 176731 - DNA, 436 bp, Homo sapiens
tggtaaaggaaatgggatcaaaatatcaagatgagcatgccattggcttgaggtatgtgtcagatttattgtggccaagaagattaaaatcagccaccattacgcagggtggtatgtcccgcactcagatgtcaggaagtctgaaaatcatgtgatcaaaccagagaggttcctgggtagatgataaataaaagacatgtttaaaacagaggcctgtagataaagtgatcacttgagtggtggcattacctgtgcctgtggttaagagagcaaagctaaagatagcaagttgaatcaaggtcatatgaaaggatataataagagtgagtagaaaggctgctgacacaggctcaaaaatatggtgtcagggtggggcatcagaatgtcctccaggctacagacctttgcagagaatggaactggagtcgcgcctgcg

SEQ ID NO: 176732 - DNA, 233 bp, Homo sapiens
ccaaccctcagagcgcctgcgcctggccgatggcccccatgggtgcgctggccgcctggaggtctggcatggcgggcgctggggcaccatcactcactccaccatgattcctgaccccaccacaacccctcaacccttcaccaccatgcagcccaccacgatgcctcatcccaccacgacccctcaccccaccacgactcctcaccccaccacaacccctcaccccaccacaa

SEQ ID NO: 176733 - DNA, 271 bp, Homo sapiens
attgtggcagtgggagatggaattgtacccgattaggattatgtcgagagcagaggaaatcatttacactctctagggaggagatggacctgaggcaattagaatttttccacctctaactttagtgattcttgtattacagaggcatacatgatagagaaaagcacctgatttttttgatgctatcaggagaatcataagacttcttttgtcagggggcccctctgaggccccttgcaagtgctgatcttctgagttgcgggggagggga

SEQ ID NO: 176734 - DNA, 364 bp, Homo sapiens
atgagaaaactgaaatagaggttaagtgacttgtgcagtatcatacaactactaatggatgaagttgtgtcttgactgtaggacttatgacttgaaaccatttttctctctctttctctctctttctatatatatatggaaatttcacatatatatgaaatggagagaaagcattttaatttttattaagaacttttccattttattccccattgcctaaatgccggtctgctatatgtcagccattcttccaggtgctaggaaaactgagtaaaaatatgtactacctacttctaaagacttttgaatgtgatcaatagagaaatcagtattcataatattatataagtgccgtgggtgcctt

SEQ ID NO: 176735 - DNA, 512 bp, Homo sapiens
tgtgtgagccaatggttgcaatgcagtgctccaggagtgcctgagcacaggggaagtgggtcctattattttacagacccagaaactgaagtttaggaagcctcagttctttgttaagagcggtccttgtgttagaagcagttccagctgaccccggagtccaagctctcaaccgctgtgcagtccctgaccctcagtgggaaaaccctgtgaacaccaagagttgccaaacaacttttagctgtggtttttctaagcggcggacaggatttgatgtaagggatacctggtaggcaaaccactgcgcaacagtgagcaaataccaattcagatatgagcagagtgggaagtttccaaaataaaacatagaacatcaaggactcatttactgcatttgagaatgggccactctgataagatagaggcattaattaggaggaaaaagtagccgagcaaatgtcggcaggaaggccaggagggtctttaacagcctgacgtaagcccaggaaagc

SEQ ID NO: 176736 - DNA, 145 bp, Homo sapiens
agatttcgcaaataagaatacaggaaggatacccgtataatatttaggatatacttatattaagaaattatttgtgatttttctgaaattcaaacttaactgggtatattctagccactctatctccattttacagatgaggaca

SEQ ID NO: 176737 - DNA, 196 bp, Homo sapiens
tcattacttccaaggaaaaaaaaatagatgtggaatgacagcttaatgtatccagaatatgttttagtgggagaagaagtttaggagggagggatgtaaacctcttattggaaaggggtaagaggggaaatagagcagacttcattcaggaaagggggaatcaataactcatagagaaggaacagtaaaccttatt

SEQ ID NO: 176738 - DNA, 450 bp, Homo sapiens
ggggacttttagaatcaggaaagacagaaacttgttcccccttagttgtagttttatttaccctgggagaaaaacataagaatgctttcaagtgtaaggaagggctgtgtattcagatatcagcatactgctccaagaaagacatcagagagttttgaactgattgaaagcccaaatctattggatcagttgaggagcagagcaaaatatgaccaagcaataaacgagtaccttcaaagcttttaagaaattcttatagtttgtataggtggttgggaggtgaaattccagggctaggaatataatgtaaagccctacaatgaaaaagaagactgcaaattgtggccttaggggactttccctgccccgttcagagacacatgatttttttttaacagaaatccctggaaaaattactttagagccatgttttcttgcattctgcatttt

SEQ ID NO: 176739 - DNA, 658 bp, Homo sapiens
cagctcacatgattttggaggctgagaggtcctatgatctgctctctgtgctggaggcccaaaagccagtggtgtggtcccagtccaagcctgtaggactgagaaccagagaagcccccagtctgagtctgaaaaccttgagaaccaggaatgttcgtgtccaagcacaggaaaatatggtgtcccagctcaaagagagggagagcaaatttgcatcagatgaggaccatccacattggagatggtggtcatcttcactcggtctgctgattcaaacgctcaactctccaagaagcatccacagacacacccagaaagaaggttccaccagctacgtggacatcccttagctcaggcaaggtgacacataaaattaaccatcacaaagaaaatgctggagctcaagagaacaagatgatccaagcttctgcttctgctgtgtctgctactgcctcactggtctgctttgggttgaccccagagtcaggggagaggaagtttgcttggcccactgagagctgggacaaggatgtggatggatggttccattacaggagagtgaggggctgagataaataatttggtctccccagcacatctgtgccagcaactcccaaatatgtttctaggccaggctgtgaccttcagactcactcca

SEQ ID NO: 176740 - DNA, 524 bp, Homo sapiens
ctatttcccaccagacattaaagattcctgaggaaatctatggtcatggtcctttaaaacataatagttactcttttaacagtgcagtgggctctccttggaaactctttagctactagaaatactgttgagagtagaccactcaaccccagatcttcatagttccacccagctgtaattaggctgtggcctgtatttttaatgtacctctcctacctgacccttcttatgcttagcctcatcctctaatggatgccattgttgacctatgactcaaggctgcttgattctgttttctgacttactacatgcatcttgactcttctgcctgacatacttgctcctctgtgtgtccttcacaaatccctcccagtgctcactgccttatgaatgacaaactgaggtgctggacttattccagtgttcacatgaataaatggctggagatgtaaaccaattcgctgtaaaggaaactgtacatctttacacctttgctacattttgagaaataaaatgattatttt

SEQ ID NO: 176741 - DNA, 550 bp, Homo sapiens
atgtttagcaaatgtggagaaatcaaaaattctcacacgttgctgatgggaccatgaaatgtttggcaatttctcaaaatgttaaacacagaattttaccatatgacccatcaattacactcctatgtattcacccaggggaaataaaaataaatatccaaataaagacttatatacaaatgttcatagcagcattattcacaatagtcaaaaaggaaagcaacccagatgttcattaactggtgaatggacagacataatgcagcatatccatatgatggaatactatttggcaataagaaagaaccaagttaagtactgatacatgctacaacatgaatacatggatgaccctcaaaacactgcaagcttcatgcggggatcataattcttggctacacaattaaaaaaaaaaaatctaaacacccctcaaaagacactgagcatgaaagtggtcagatctaggttttacataccaggttataacatttcttctaaggatgtagtattctcattttaatgaaacattctcactagtgatggagcatgt

SEQ ID NO: 176742 - DNA, 586 bp, Homo sapiens
aaagagtgccttttgctcactgcatacaggccctatacaagacagtatatcaaggaattcatctggggccccaatctagtagttgaggaacaagaattaggataatgctaatggaaatgaaaaggagatgtgccaagggaaatcacagatgagtctatcataaaaggtgggaaactaatttgacagaggtggaagagagacaggagcgtttaagactaaagtagaggttctcttatccaaatgcataaggattgacaatttggcttatttttttttaagtcagttaaatttggaagtcataaaaaatgatacatacctaaacaagtcattttaaatgaagctctacaaatatacatttattgtcaatcttttgttatagtgctggagccttttctttgagtatatgtccactgttgtactcaatggtctttcttctataaaccatcccaaggcatcatcctccaagtccaatttatttaaagaacagtgaggttctaaagagccctggaaagtgaagtgcggtagacctcattaccctttacaaatgccccatacccctctctacgtcccgccttgctgaattcag

SEQ ID NO: 176743 - DNA, 698 bp, Homo sapiens
aaaactgatatgtgcccatgcttggcaaggccttgtggtaggccaggttggctctgtctttggtcaggacagtgttttgactggggctgattcaacaacacttttgggttttgggttagaagtagtttgtaggctgggcgcggtggctcacacctataatcccagcactttgggaggctgcggtgggtggatcacctgaggtcaggaattcaagaccagcctggccaacatggtgaaaccccgtctctactaaaaatacaaaaattagccaggtgtggtggtgcatgtctgttatcccagctactcaggaggctgaggcagaagaatcacttgaacccaggagggagaggttgcggtgagctgagattgcaccattgcactccagcctgcgtgacagagttagattccatctcaaaaaaaaaaaaaaaaaaggaaaaaaaaaaaaaagaagtagcttgcagagtttgtcctgtgcttccttccttcaaaacatatttatcaggtgcctgctatcctaggcattagaaatgcagtggtaagaccaggcgcagtggctcatgcttgtaatcccagcagtttgggaggccgaggcaggtggatcgtttgaggccagaagtttgagaccagtctggacaacatagtgagaccctgtaacaaaaaaataataaaaagttagctgtgcttgatagtgtgcatct

SEQ ID NO: 176744 - DNA, 461 bp, Homo sapiens
ttaggaaaattcgtgaaagctgtgctgagccaaatctctatccatcatctctcctccttaccctcgactccaaggctcacaaggcagcagacatcgttctggccagcaaatctggcttaactaaatgtggcagagtcaagttaaggggtgtgtgtgtgtgtgtgaaagatccagtctcgctcagccaggctggatctttaacacaactttgaggttttcgtttttgaaatatactattgactaacacagtaacttccccagaaaagttttgaaagaggaatgatttgatttttagaggttcaagaactcctcatgcttgagagaaggaaaaaaatagagaagacaaataactaaaatatttattatctaccacttggactgatttaaaattgagtttaaaaaacaaattactccacagaaagatccaagatggttatatctaatttatgcaagaaatctgg

SEQ ID NO: 176745 - DNA, 261 bp, Homo sapiens
acaaatcaatgcccctttaacctaccacatttgagaaaaaggcacctcagttctcatattgctctcaagaaatgcacaagacttttgggaacttcattgattttgtagcacttggccaaaaacacattctgtgcaatcatccactaaaggaaaacaaaaagcaggcaactgagagaagagacccaggagggcaatgcaaagtcagttgagtgatggcctctcccttctcatgtaccagtattctactgtacggatgacgag

SEQ ID NO: 176746 - DNA, 320 bp, Homo sapiens
gggggaaacagccctccattcatttgctacaaggtccacagaaccatctcagggcttacggggacagtgtgtcaccagggcaactgaaataaacacgaaagacagatgtgaaggctggaattcttcaaaggcaagagggtttgacacttcataaatcactgtgtcactctgctataacaaaaactggtctcatgtactgtacccgaggctttctctcgctgtacttgcttgtggagtctgtttgcataccacatctggtttgtcactaaaagctttataaaggcagtgaatcaataagagtgagaaaagggtggggccct

SEQ ID NO: 176747 - DNA, 126 bp, Homo sapiens
ttagacttgccttttattgtaggtatgctaattataaaaggtatgctaacctataactaatctatggtgatagaattcagtatagtggctaccttgatagagcatgaaggagccttctggaatgct

SEQ ID NO: 176748 - DNA, 895 bp, Homo sapiens
aaatgggaatcttgtttttgttttttagaaaatgagaaatgccaaatgttaacaaagattttgtcaatattctttattgttggagatttgtgcaacttcatttataaatgaaaatcagatgaaggttgacagagctggagttgttagagggcttggaaggaagtgtctgaataaggcactctgtatctcctatctgagaagctcactgaggtttgctactgtcagcctacagtgcttctgcagagatctgtagccatttagtgccctcgggctgatttcttttggagatctatttacaaatgggaaattggaggagtcacagttttgtagccagaggtagaaacaaaggtcttagctctgtgtactgtctcttagagaaacgagtaagctgttctttctgtaattcacaattagtagaatatgattgtgtgtgggggcctaaggattgtgatgctactgaaagacagaagaaagtccagctgataggctaggcgtgatggctcatgcctgtaatcccagcactttgggaggctgaggtgggcggatcacaaggccaggagttcaagaccagcctgaccaacatagtgaaaccccgtctctgctaaaaaatatataaaaattagccgggtatggtagcatgcctgtagtcccagctacttgagaggctgaggcaggagaatcgcgtgaactcaggaggcagaggttgcagtgagctgagatcagaccactgcactccagcctgggcaacagagagagactctgtcttaaaaaaaaaaaaagaaagtccagctgatgtagaattcagaaaggagcatgatttagattagaatttaccttcttgcattttaatttgctttgatttctttaaatattttatttggcaacttcatggatg

SEQ ID NO: 176749 - DNA, 373 bp, Homo sapiens
gctccagccaggctctcacccccttccttaaaagtgaaccggatccaggaccaacagcttgagacagcactctgggaagctgatccccaagttgacgtctgaggctcaaattctctctgattcaaccccacgaggagccagctggggtctgagccggggcagcagggacagagctgccgccgggggtctgctgccagcgggcatcgccgaggagggcgcagcctgcgggctggatagaaaccagacaaagggcactccaggcccaccgggccggccatccggagggtctacagctaattaagactgaagggagcactgaataacccttttgtggatcaaaagcactctgttggaaacccagctgacaactcca

SEQ ID NO: 176750 - DNA, 520 bp, Homo sapiens
tgctacagagatttatttatactttgagctaagacaagattaattggatctaagatactaagcattttttagaaatagaagctgacaaaaatttaaatttagctttataattggtaaattaagaaaaaatctggtgggtttttaagcagctgaaaaagagcaagtagaggattttgactcttctttaattggtatacactcttctgtcaggaaaacaaacaaaaagattaggatgtcacaatatcaagagtactgacgttaaactcttaaagtctattcacataattcactgaaatctctgtcattctttcttagtctccatgtaacagagaacccacctaaggggaagcatcaggggctgagagagtcataaacgctcctaccatgggccgtatttgtctcatacattcactagttctggttaaggggactgagtgagctagctgcttgcttggatcatgtggtcagaggtgacagcctatcttcagttgatactttgtagggtatttgacaaagtcag

SEQ ID NO: 176751 - DNA, 707 bp, Homo sapiens
  misc_feature (335)..(335): n is a, c, g, or t
  misc_feature (396)..(396): n is a, c, g, or t
  misc_feature (529)..(529): n is a, c, g, or t
ggaaaagccactggggacgagacaggtgctaaagttgaacgagctgatggatatgaaccaccagtccaagaatctgtttaaagttcagacttcaaatagtggcaaataaagagtgctatttgtgaaaaaaaaaacaacaaaaaaaagaaaccaaaaaaaaaaaaaaaaaaaaaaaaaaaaattgtgtgggggcgcgccccggcggcaccggaggaaaagagttttttaaaaacccactcgtgtgtgtgggggcgcgcgggccccccagaatgtgtggttatgatgcacaacgtggggccaagggggcgtgttagccaagaagaaaacctcgtggncaccggaacagagtgggcggtgggtttttctcccccaaataaaaaaaaaggcgccgggggngaacacgggggcgcttcggagacaaccatcaacagcgaggcggtccgggagggacagtacggggggtcaacacacgagggaggcccacagggagaggcccgataaataaaattcgtcccgcgcggtgtagtanaagaccaataacgtacacaaagcagaggcgaacacagaacaacacagagacagcatagaacacgagaacagcacagagagcacacagcagacgagataagacaaagcaaccagaagcacacaaacaacaagacgagacgcaaacagcactaaagcagcaacagagaagaacacgcagt

SEQ ID NO: 176752 - DNA, 316 bp, Homo sapiens
gataaaacaaaagtaataatagcaccataggactgttaagaggattacattagagaaaattcatgtaaggcacatagcctaatgcatggcactcagtaagtacctaaaaattagtagcaactattcatcttcgtcatcattatcatgatcatcaaagctggagcctaggacccaagcctcctagctcagcattcctcttacaacagccctttgaatcaccttcatatgtcgttaatacttcattgggtaccccaatctatattagtttaagtacagactgtggtgacatcattagttagagtctgtgagatgggag

SEQ ID NO: 176753 - DNA, 169 bp, Homo sapiens
tcattcaagttcttcattcgttatgtgagagctcctgagtgtgtgtctctcgctgggcctgtgctggtgtagggtgtcagtgcaaaaaatatgtccaggcctccccctcagatcttaacccccatcactgaacgtgaaatcctgtgtttcccaaagtgtccatgtcact

SEQ ID NO: 176754 - DNA, 162 bp, Homo sapiens
ggctctgagtttttttcgcctttaacctaagtcctcaggactaaaccagcaatacaagctacgctatagccccattttacaggaagaacattgaggcccacgatgggctcagaaagaggctttcttcattaaccccactgaatatcttgttctttggcctta

SEQ ID NO: 176755 - DNA, 174 bp, Homo sapiens
tctccttcttgggtcttagacatttgatatgggagtaaaaacaatccctgtgtataatatattttcagatcatgcattcttgcaaccggggaagaatggcctacaaagcctgattgggaccacatatatcccggatttccttggactgactcaactatttgtcccagctccaag

SEQ ID NO: 176756 - DNA, 356 bp, Homo sapiens
gttactgatgtataatgtccttctatgctcttgtaacagtttttgtcttaaagtctattttttctgatactaggatagctactcccactgtcttattaattactatttatatggaatgtacttttctatccttttacgttcaacatattgtgtctttggtactgtagtgattgtcttatagactgtgtatagttggatgctgtttttctcttttatccattctactaatctctgtcttaataggagatttcaaattattttcttagtcattaccctgcagattacaattaacatatttataatagtcatgttttaattgaaagcaccttagtttcaaaagtgtacaaaaaccgctc

SEQ ID NO: 176757 - DNA, 341 bp, Homo sapiens
aagaatcatctctagacctgtggatggagcagttggatagttggtgcctttcctggagaggtggcctgtaagagagaggtagagaattggaagatgattttgcaatgttatctttgagatttctgaaatacccaagtggagatattaagtaggaagctgatttgtaaatgtggagctcatcagtgtcttagggggatgccaaggaaacaccagatgggtttttaaagcatgagaatgtgataattgtgctacataatcttagacttttgaacttataaactatttctttgctatactgaaatagaggtatgatctattgtattaaattgacatctgaatgg

SEQ ID NO: 176758 - DNA, 556 bp, Homo sapiens
gtcctctgccaccttcaagattgggcaacaggagaggtggacctggccccaccctggccctgcttggtgtatcttatgataattcactttgatgttgtttctttcatttgtccggccattttccattgtatgagtgtatcataccttgtgtatctccttgatgacgtttccaatttcttcctcctgggatgctcatagagcttctgtagagtctctgcctggaagaggaatgctcacagatgttctcaccttcaccctgatcttgacctgaccttcaagctgccattttgtgtcacttccaagtggctttaccaatcttctccagagctggtgggtttttatttgtttgtctgtttgtttgagacgaagtcttgctcttttgcccagcctggagtgcaatgatgtgattttggctcactgcaacctctgcctctgcggtttaagtgattctcctgcctcagcctcccgagtagctgggactacaggtgcgtgccaccatgctgggctaattttttgtagttttaggagagatgtggtttcacggtgttagccagga

SEQ ID NO: 176759 - DNA, 235 bp, Homo sapiens
tatcaggataataatgttagttcactgatatattacaaaacttatagcacaaaacttccagtgtttttctgtaaaaattatatgtgagttaattgacatttcaaaacagcttttaaacatcagcctttaccaagtacattatataggcgttctcttagatgttgggattcaaagaggtgcgagatggtgggctttgtgcccggagagaagctgattgtccacctattagaactgg

SEQ ID NO: 176760 - DNA, 896 bp, Homo sapiens
gttcctaatttggttcctgatttcagaagcataccacataagatttaagcaagctcatctctaggagatgcataatttgtggataacggttttcttagttgggattgtgtgtacttcaggtattatgtaatgctgaacagcttacttgctttttctttttttccccccagagataaactgaggatcacaaatattattcttttatgttaataatggtttccattttctagtatttgttacattttacggctttattcacaaagctgtttatgtatttttgtggcagctctaagttaaaaggcacacttgtaacattacagtcccaattttccctttatcaactttatattataaaattttccaacacatagtcaataagcatgtccatattctagaagtagatattcttaacattttgccatacttcccatttctaattattttttaaaaagaacttacaaacgggccgggagtggtagctcacgcctgtatacccagcactttgggaggccaaggcaggcggatcacttgaggtgaggagttcgagaccagcctggccaacatggtgaaaccccgtctctactaaaaatacaaaaattagctgggcgtagtggcgggcgcctgtagtcccagctacttgggaggctgaggcaggagaatcgcttgaacccgggaggcggaggttgcagttagccgagatcgcgccactgcactccagcctgggcgacagagtaagactccgtctcaaaaaaaaaaaaaaaaaccaaaaaacccaaaaacttacaaacataatacaatcctaaatacttacatagacatctctttatgaataagcaagattacctacataatcccaatgctgccacaattaattaataattctaatttccagtccg

SEQ ID NO: 176761 - DNA, 460 bp, Homo sapiens
atctgcccacctcggcctcccaaagtgctgggattacaggcatgagccactgcgcccagcccctgcaggctgtttttcgaagggattgggtctcactctattgcccagtcagtggcgccagcatagctcatggcggtctcctcagtagcctgaacttacaggtgtgcgccaccatgcccagcttgtaggcttaggttttttgttaaagaaataaatgagacctgctaggactgaaaacttacacatcttcacaaagggtgctttgcatacacatctcaatcttcacagcaactctacagggaagtactggagaattattcccatttttaaaaaagtaaatacggctgggcatggtggttcactcttgtaatccaagcattttgggaggccgagtagggtggatcacttaaggtcaggagtttgagaccagcctggccaacatggtgacatctcgtctcta

SEQ ID NO: 176762 - DNA, 292 bp, Homo sapiens
agaaagagggaaattggggcaggaacatacacctgggagcagggggaggcagaggttggagtgacaacctgggcaccaggagctaggagagaggcatggccctgagtctccagaagggcctccgagggccaggggctgaggaaaggcaggtgcactgaacaactcaacaaccctgccgcttacaagtcagtccctttgcggggccttgcagacccggggagggaacagccgtgctggctgcactcgccagggataactatggcttgcttctcattggacgaagtgcccgtca

SEQ ID NO: 176763 - DNA, 472 bp, Homo sapiens
ttccagaggaaacaggagcccaaacctttggaagtcagctatccttttccaccagttcaagatgtattacccagaactgcattctggtaatggagcaactacaattggtcaagtgattatgtaaatcagtggttcttaacttttaaaggatcatgaatccaataaaactgtacagatctccttcctagaaaaatacataaacataagcactcacaatcttcatggaatttcaaaggcttcgtggattctctgaagcccatctgttacgatcattagagagtcatagacctatacttttggtgtaggtgaaattatttatttcagaaatttgttttgaacagtcttataaatcataaaccatgggccaatttaaatctgatttcttaaaatctgctgctagattggggtctaatttttttttaattaattgctagaatgaatgagatccagaatattagttgtgtgccatcca

SEQ ID NO: 176764 - DNA, 451 bp, Homo sapiens
gaaaatggcagataagaagtactctcgaaagatatcaagtttttagattctaataggaaatagaggacatgttattctctataaagtctttctacccttattagactagaaattacataaagataaggatcatgtcacttttgtcaatactgtgcaaccagtgaaacacagtgaatactcagtagataattgttaaatgagtgaatgaagtcccccagacacagaagctaaggagacttgaaactttctaacaggatagcaggtcttaaagttcctggatagcttcttgtctacttcagccataatgtcaccctgtatttaagaagacttaaaaacaagaaaacaacttcatttccttaggacccatggcagaagaaaggcaattagcaaatagcagtatccttggcttccctttttcgaaatcttctaggcaatgctcatgggtgccact

SEQ ID NO: 176765 - DNA, 236 bp, Homo sapiens
tcctgctcgacaaagtctctgcagtgtagtagcttgaaaattatggcaaagccatcaactgctgccacttaaatagcattttttgaaagcatattcaatcttagggaaaaatggtcatagtaaaagtcatactaaaattctgtaggtagggaagtggggtcatttttttcttcaataatcatatctgtgttttccacctctctagaatgaacattggtcactatgtaatgtaaaaa

SEQ ID NO: 176766 - DNA, 284 bp, Homo sapiens
gaggatcacttgatcccaggagttgactggcctgctcaacatagtgagaccccatctctaaaccataaaaggaggataattgtagtactattcttcttactaaacttttttttgataatagttatttttcattaaaaatgaatgatctgtgttaacatctacttgttattattttagtagttaaatgaattactagtttaatttctccattaaattttaatggtaaacatccacagatataatctacctaaacaaaagttctttatcatcctcaataattttta

SEQ ID NO: 176767 - DNA, 534 bp, Homo sapiens
gtaccaagggtacaataattaacacttctttcccttggggaacttttattttagtagagaatgacagacagtacattgccctttgtacttccttaagtcctagaactatagaacataatattgcaagagaactcagagatgttatttctgttcaatcctctcattttacagatacttaacctgcacagagatagaatttgaactgcccatctcaccattagagtagtgagactttcatctacattgcctagattgaaaaatgtgatttgattcacactgaagggcatagtcactcattgttttaatgtgccttttacatatggggagtagtttgtcatctttggtcagtgttgattctgaaggtagcattttttctttttgttattaatacacccctaccagacttgcctttgaatgcaaacgctccaccttaatggggtcaaatttagggaggaatgcttcacccttagagcaagttcttatctcatataacatgctgctgtctctattcttgcaaactgactatctatcatc

SEQ ID NO: 176768 - DNA, 302 bp, Homo sapiens
gtaagtacataaagaatcatcagtttttaaagttggaaggaatcttagaggtcacacggtgtctacttctctactgagaatgattcaaggtcttcccaccaaagtttgctatccaagctagatgtgaacatttgcaaccaattcttctggaggacaagataatttctcaaaagtatctaaagatacatacatacctatctccttccttttacaaaataaacttctacaatcgcttgccttcaatttcctcctgacatcaggtattcacacttctactatatgatgattcacctctgactcag

SEQ ID NO: 176769 - DNA, 521 bp, Homo sapiens
atgaaaaagcacagtggaaacttagatgcacactgctaagtgagagaagccaatctgaaaaggatctgtgatatatgattccaaccatatgcaagctggaaaagcaaaactatggagacagtcaaaggatcagtagtttgggggttgggggaagggagggataaacaggtggaacacaggattttttagggcagtgaaacagctctgtgtgatgctacaatgatggatacatgtcatttatacatttgttcaaacccagagaatgtacaataccaagagtgaatcctaaggtaaacaacggtctttgcggatgattaatgatgtgttagcgtaggctgattgtaacaaacgtaccaccgtgatgcttgatgtcaatagtcagggaagttatgcatgggggaagggggctatatgggaactctctgtacttcctgctcaattttgctaggaacctaaaactgttctaaaaatagtttattaattttttaaaaagattaaaatgcttacaataatttaaaacc

SEQ ID NO: 176770 - DNA, 361 bp, Homo sapiens
aggatactcaccttggccctggtgggctggacagtgaagtggtggagcagccttctctcctgcttggcagcctcagacagttctttgcacagagtagtaattctagtttcatcttcttattcattaaccaattgtgaaattagcaacttattttcttcctagttatttccctttgaagttccataaaaatctgaactctccctcactcctgctccacataaaacagagcaaggctgcgacccccatctgatcagaccagccatctgtgttggaattgtccgaggagagtgagccgggtgggcagggccaggctctgcaggactcctggacccctgatggccgggcccagcctcagcggccg

SEQ ID NO: 176771 - DNA, 370 bp, Homo sapiens
acaaagctgccattgcggttcagtggggaaaaggatgatctttatgataaatggtgctgaatcaacttggtatctgcttagataaaaaccttgacctttacatcaaaccatacacaaaattaatttgagatgggttatagaatgaagtgggctaaaacaataaaatatctggaaggaaacataaggaaatatgtttagagaaggcaagaatttcttgaataagatgcaaaaggccttaaccaaaaaaagattgagtaagattttttaagattaaagtgcatttcaaaactgtgttcatcccaagggggcgtcaaagatggaaaaagtccagttttaaagaatgaacaaaagacttaaaacgaacttgtcc

SEQ ID NO: 176772 - DNA, 694 bp, Homo sapiens
tcagcccagctccacactgactagctctgacttggacaagttattaaatgcatctgagcctcaagttgcccatccgtaaaatgggaataatgttacctacctcacagagtttgtgaaagtggtatgatgtaggcacatctaaatggttaagcccccagaggccagccatagtagatgctgataaaaataccagttgttattaccgtatgtaaaatcttgtgtaattttctttcaagtgactgaactggcctttgcttaaacacttgacttctcaggaaacaaaaagctaactccgggtgtggggtaaattgagaattgcctgtggctggcccctgtcccacgcacccttccctgttagggatctggctgagagtttccattccgttcttattccagggcaggaaatggaaacacaggaagcagatggttggcatgggaaaggctcccaaagacacagccactgtcacccagccccttgtttccctctcagtctctaagggctcccatttttccaaccatcactagcttttctgccaccttcagagccctgtaaatgctgtgactgccagagtctaaccagcggttcattttagttttgcctcaaggtggatggtctctggttcccccttgactagaaatctggggtgtgggtagcctcccaaaaggatggctctgtaagcgggtctcaccagca

SEQ ID NO: 176773 - DNA, 134 bp, Homo sapiens
attgtttatctgattttatgctgttctgctgcttgcccctcgagatcaggtttcatgggtagacaaatgttaagagccatgtgaatctcgatggagcctgtttttgctttgttagttgtgtgtgtgtgtgtgtg

SEQ ID NO: 176774 - DNA, 469 bp, Homo sapiens
tgggcaatgtgtatcccagtacttgggagacgagggggcggatcaattgaggtcaagagttcaagaccagcctggagcaagataagatctgtgaaatgccctctagaatcagagaagatatcagcactaagatatttgagtattaaatacagtgtttcatgatcctagaaaagtggaatgggtacttccaaagtaaactgggcaaatccaatatgcaaggtcactgaaatagagaaacgtcattactgctttctcagactccggcggtggacactggacacagcgtagtaattaacaggacagcctctggaaccaggctgccagggtttcaaagcagctccaccacattcctagcatgtcaccttgagcaagttttcttcacttttgggcctcggtttccccaactataaaatagagaccataactatacctactctcatagaatcatgaaatatagggctgggcacag

SEQ ID NO: 176775 - DNA, 397 bp, Homo sapiens
ctgatccgcttaagcctcccgagtagctgggtgccatcatacccggcgaatttttagtagagatggggttttgccatattggtcaggctggtcttgaactcctgacctcaggtgatctgcccgcctcggcctcccaaagcgttaggattacaggcgtgaggcaccacgcccggcccctcagagtttcttataagtaaagaaactaacaaaggatagtacgttcctcctcctgctttctgacaccctacttggtaatggagtagctccaagactcatcttgaagtcgttcctgggtgagatccaagaaccctttcttgggatctggatcaggcccttcttttttccagcgacattttcattctgtcatccttaagcggatcagagtgtctctttcatg

SEQ ID NO: 176776 - DNA, 661 bp, Homo sapiens
tattaaaaaatacaggatttctttccagaatgatggttgcacacctctgtgcatgtaccaactgaattattcaatttgaatgaagtgtatggtatgtgaattatatcttaataaagtcattactaagaaagaaaaaggctattcaagcctacaacttgcaaagaattagagtggagtaatatataagaggaaagaagaacaggggctactgcttaagcacatccagttggagataataacaacttgaactccttcaatggacacagggaagaagggactaataaagtgaaacactgttgaaagaacagtagtacctgcgactgaatgtgagaaactaaggggagaaagatgactatgacaacccccagctttctacatgggtacctttacactaggcactgtaatcactcaagtaaagcctggctttcccatgggcaggagactttcacatatggtggctgcagtgggtgtgtgacaagtctccttcttgaaagaaaactattctctaagtccaccactggggaaaaactaccaatgctagccagatcttagggatctcagctatgttccatgacacagctatcagccttgatgccagagaagaaccatctgtcaacaagaggatagttgtttttggaagggtacgagctcgattgtcata

SEQ ID NO: 176777 - DNA, 444 bp, Homo sapiens
cagagtgctcactggcatgttctgtaggccagcgtgaggctgtggcaagttcctaggagcataagagcacaaacagctaggagctggctggcagcaatctgttctctctttagaacatacatctgcccatccctctcataacataataaccaggttattatcctcctaggtttaaaacctgaaactccagaaggtgggaccttttcttccttctttttttaaaactcttatctgcgacaccaaaaaagcaagtttaaattcatgtcacctgttctcaaggtaacagaacttgagaaataatacgttcacaatatccaaacagagctacagttctgcaactcaaggctgtaacatggttaggatgaagactctaaaatcagggtgtgggcagtcacttcctctatgaaagcagaaaccgctggcctacagcacatgcctcttctg

SEQ ID NO: 176778 - DNA, 246 bp, Homo sapiens
ctaatttatataaacacatgagggttctgccaaaggaaagcgtcaccgtgatgggtgctgactgctcacggagctattttgcacaagttagagtcaggtggttggaggaaatgaagcttactgcaaaaaataatggtttcaggtaagcaaaagcatcgtgtccttttgaggcctgccaggaggcgtggtgtgtggcctgtcgcattgctcagaacctgatggggcttgaagggcagcgtttctcct

SEQ ID NO: 176779 - DNA, 404 bp, Homo sapiens
tactagatcaaattaacccaatgacagtaaatgaaattatctgctctctttggttccctgatgtgaaatgcttataaatccaaacgttaaatctttaaagcgatcagaagctcttcttcttaagtttctcaaacgggtcctttcttcctcttgctctaccctccccacctcctgtaaagtagttagcagtataactataaataactgtttgtgtttataaggaggctgctagttagaaacagatctgtcagaaatccttatttaaatcatagagctctttcgcactatgtataatcaattctaattatgttgtttagtgtagatactaatttattacattttatgaaagccttgtagagggccacaccacagacttaaaagtacactaaagagttaatttcagg

SEQ ID NO: 176780 - DNA, 778 bp, Homo sapiens
aaatgtgacatgtggttataaaggtttgcaatggaaggaacctaaaactgagggttctggaagattgtctcatttgactagtggtggaaaaagaaatgcatgagtggattgcccaacatgcatttggaaaattaaactccttatccaatctccctcacccctcccacttcccccttctaaaagaagactttttcctaaaagctctcctgatcctagcttttagaatagaaattgacgtcatttttagcagattatatgaccattcacatcctttaaactttgaggctgatttaaaatatcccacttcctgtttaggagggggaggggctcatattgcaaaaaaattaaaaaattctgctttttaaagagtgatctacagtaaagcctgattaactggaatctagctaactggaaacctcagctgcatgctcttgctcccttccatttttagcaaaaaagaaacaaagaaaaaaaatcacatcagaaatgtaaaatggtttttcttccagggtagtttgcattgtctcacttagtctccatcctcctgcaacttccacatctatgaggaccaaacaataagagttgatcttcacagaaaaggccatcaagcaatcagtataaatgataaccaaggaaagattcaatcaggtcttctaccttaagactttcaggcaggaaagtggctcaggagtctagcaaagatattcactcatcatccatgaaacaaaactttcctccatggccccactgttcattaagaaagtcatataattcatca

SEQ ID NO: 176781 - DNA, 308 bp, Homo sapiens
aaacagatatgcagacacatgtacacggtagttcaaagccaaaagtaattttgctactttcttttcttagagtgacagaaaacactcagctcagctgcttaaaaaaatataaacacaatgctccattctataaggtttattggaaaatacaaagaatactaaaaatatgcttcagagcagctaggaatgaagaaagagagcatggaaaagagggagagaaagaggagaaagcaaggaagagaagaaaatgagaggataatagagagtcagggagaggaagcagagaggagacagaaggagagacttag

SEQ ID NO: 176782 - DNA, 212 bp, Homo sapiens
cagttagaatagagggtctccaaggaccttttcatctagaagaaacccaccagtctcctgaaatgtgatgcccatcttgatctaactagatagacacttatattctgaggtcaaaacttgaccaaatgttcattctccagccataggtgttagacaatacaagtgcctttttaaaaaaagaaatattaaggctaggcatactggctcatgta

SEQ ID NO: 176783 - DNA, 472 bp, Homo sapiens
caggcttcagttccctcctaagtctatttggtatatatagtagcatccagaatattaaagcaaaatcattacagatgcagtcctctatggtcctcttggctgcaccacagatggcaagatgcgatcagagaggaaagataaatgcattaaacttctccttgcttatatcccctggtaggaagagaagtaaatggaaagcaatagtttagtaaatgacttcaaaatgtttcttaggtttttaaatagccaagaatacaagcaagaacttatggtcctaataacttaaagaagtccttggcagatctagaaagaaagctctctgtggagggtgagaagagagtgacacagaatgtacacaatgaacataaagcagaggatctaaaaattaatactgtctacatctctgctcttcctattgagtttgtttttcaatgcatgctagatgtgaaggcatccttagggcctgtgcagt

SEQ ID NO: 176784 - DNA, 354 bp, Homo sapiens
ttcaggatttcttgggggcaggattttgctacatactttgggatgcctggtgatgtgtgaggtgcttccacactttctaatttcaaatttcaaggatcttcagtctggctgcagtgaaaagaaactaaaaaactgacttcgcaattctagcattgtaaaagacatgtacatacaactgtctctcaccttcatgacatccttggtgaactcttatgtatcttttaaactgctgttcaaatgtcgccttctcaatggagccctccttgaccactcccttgtgaagttagaggattcttcctttgagtaagaagttaaatgtttcactttcttctcacaataccctgtattgtactt

SEQ ID NO: 176785 - DNA, 205 bp, Homo sapiens
tttctttccttaacacacacacaaaggatttccaaatttccatttttaaaaagttggcttctctagttctctccagaaggctacaaacatatcctcatctgcgtaaatgtaaggcactgcacacatactttaattcctgaggtacttaaaaaatatacatcaacaaccaaaattcttcacgaacaggttcttctaacatatcaga

SEQ ID NO: 176786 - DNA, 428 bp, Homo sapiens
gtaaggattcggcacgagggggacgggctaggtcacactctgtctatgtgccagacacttgcacaaccagggtgaagaaaaccaggcatctaccgatggtctttcacacttggctgtcctctctgtccccatgcatctgccttggttcaggacttcacatcctgaatgttggccccggctttctcagtggtctccctccttcctgtctctctccctcacatccagtctctgcatctatcacagagtgaccaggtgacccctgcttaaatcccttgatccttaggatgaaaggggagctccttagcttgatgcaacaattgacagtcccctgaggggcctcacccccacccaccagtaggttgtgattcaactgaaccatttcaggagcacctactgtatttagatacagtgctaggctctctggggga

SEQ ID NO: 176787 - DNA, 778 bp, Homo sapiens
gccttgaaggagaaaaacagtttccaacatcatggcctctgattttgtcatcttctctgggactggttacatattctggcccatttttgtgcacattttaaactgatgggcaaattacaacaagaaaaattcagagttcaaatggttaacctacactgtggagttaagtagaatcttctttagctctctaccttcctctcttttctgcctgctttaaatctgctgttattaaactgctggcgcgagacaagactcattatttatggtctaaattgaatataaacattgaaaactcatttgaaactgaacagcaaaaaggggaaaagatttaaaaagaaaaaaacccaaactgccatagagactgctttaccccaaattttggctgccagctttccttggattacctatcagggcaaacaaagttagccacgtggacagcttccagttttgtcagaaaaacaacttgaagccagcttttataggtcagtgagtttgtgatgctatctcatgattagagttctcagataaaagctcttagacctttgtttgtgtatggatgtatacatgtttagatatgtttatgtaatgtacatgttatagttatgttctgtcgtgtctagcatgctaccaaattggctttataagtaagtgagtacacataaattaagttcaaatgctttccaagttcgcatgaatctttgataaataaaactggcttcaaaaattattagtaaaataaaaacaaaaatgccttcagaatcatcagcatacatttgtg

SEQ ID NO: 176788 - DNA, 595 bp, Homo sapiens
gctgttttcaggaagctcaatgaacttcaagaaaacagagactgaatttacaaatttatcagagaaagttaacagattgaagtaatagaaaaaatcaaatggaaatcttagagcagaaaaatacagtgaatgaaatgcaaaaatgaaagagagagcattagtagcagaactgatcaaatagaaggaggaatcagtgagctcaaagacaagagtatttgaaaatacacagagaagaaaaaagaaaaaaaatgaaaagaaatgaagaaagcttacaagatctatgggacaacatcaaaagaacaaatattcaagctatcagagttaaaaagggaattgagaaaaacaaggcagaagaagacctattcaaataagtaacagcaaactttccaacctggagaaagatagaaatattcaggtacaggaaggtcaaaggtcaccaatcagattcaacccaaataagaataagacatactataatcaaaaaactctcaaagatcaaagagatgatgtcaaaagcagcaagagaaaagaagcaaacaacattttggggagatccaatatacctagcagcaacttctcagcagaaaccttatag

SEQ ID NO: 176789 - DNA, 769 bp, Homo sapiens
ctgaaaacaaagcatgctgacaggtgctgagggcaagactggagccaaagctccaggtcacttttcatcataagcctgaaattatttaagaaggattaagtctcaaaaggccttggcatatatcataatttatgccagaggaaattcataaattcaaggccaaacataaaatggctcaactttacacagtaactcacataatatagcaattggaagggtccccagagtccagtctctaatttatcaccaccaccctcctcctacctctcaaatctctcatctacagtttgagaaactgtggcccagagaaataagacttgtccaaggccacacagaaggtcagaaatgaaccctggaataagaattcagaacttactccaagagcccttaccctgcacggcatgtgctgtaggccagcgttgtatgcaaaaggccaacacccagagtgtttggttcttttttccctgatttattttaaaacattttattgtaaattggtaatttatagttgtatatatttatggggtacaaaatgatgttatgattcatgaatataaagtggagcaattaaatcaagctagttaacatatctatcaccttatacttattttttgtggtgagaccacttgaaatttactcacagcgatttttttctgttttgcttttgagacagtctagctctgtcacccaggctggagtgcagtggcacaatctcggctcactgcaacctccacctcccgagttcaagcagttctctggcctcagcctc

SEQ ID NO: 176790 - DNA, 875 bp, Homo sapiens
attttagaaatatcactttgatcacaaaaagacaggtcatggggtagtgtgtggtatctttgggggaagggaggagagtcaggggctgttgtcagtaatccagatgagggctgacagtaagaagatgttctggagttaccgtgtgccttagttggcactactccttctgacaatgccattcgtttgggattaatttttattagggttgtatttattagatctccattttaatatacatgtcttctaaaataaattacaggctgggtgtggtggctcatgcctgtaatcccagcactttgggaggccgaggccagtggataacttgagatcaggagttcgagaccagcctggccaacatggtgaaccccgtctctattaaaaacacaaaaattagccaggcatggtggcgcacgcctgtaatcccagctactcgggaggctgaggcaggagaatcacttgaacctggaggcagaggttgcagtgagccagaatggtgccactgcactccagtctggacaacagagcaagacttcatctcaaaaaaataaagtaaaataaaataaaatgaaataacatacaaactccttgaagactaaaataaaaggttaaaagagtaaattttttaacatgtatttcgtcacagtttaaaaaatgcaaaactggcccaggcaagcatgcaccttgccgccttcatgaacaactccgtaactggctgagccgccccagggctagtcaaaacacagcagagaagaggtcagccggaaatgtcccaaggtgcacttacttcccccatgcagtgccaagaatgcaggtcctaatgctggctctgccacagcttgtaatctgacctcaggcaagtctctcctcccctccat

SEQ ID NO: 176791 - DNA, 303 bp, Homo sapiens
gaattcagctataaatgctgagctaagaagctgctatttcagggctctttttggttagtaatttttaaattactgattcaatttcagcatttgttactggtctgttcaggttttcacttcctgcctggttcaatcttgggaggttgtgtgctcccagtaatttatccatttcctccagattttctatgtagcatatacagaggttttcaaaataatctctgaggatctttttttatatttctttgagatattctgtaaatccatctttgtcatttctggttacacttgtacgtatccttcttt

SEQ ID NO: 176792 - DNA, 192 bp, Homo sapiens
caatattggaaacgactgttgttcacggacaggctggaaacagttggtcaaattgtgcttggtgcggccaggccagcccagcccctaaggccagacaacacgaccctcccgaagggacaacagggttgatgagatcataggtgatgtgctgccctcccactgatggagtgtgttctgtggtgttaaagagga

SEQ ID NO: 176793 - DNA, 110 bp, Homo sapiens
caccaaaatctcactcaggatttgaatgtcacactggcagatgcacataggaattaagacctattaaggaacagtaaattcaggactcctggctcatactcactccaggt

SEQ ID NO: 176794 - DNA, 398 bp, Homo sapiens
tctaacaactctcgaagtctctaataacagagcaccttccttctgtggaagtaaagcagataaatacttggcaaaagaaaggaaactaccagggtgaaagtaggaagagaaaagacagagagggaactaggtttgacaaactgctgtgtgccaccattcttgattctcagagtgctgttaagggcttgctatccctttggggaaactgaggtgggaatttatgccacctaaattcatacagctaagaccgtgggctatcttgatcccaagccagtgctttttccatgacaacatgcctcttgaccaaaaaaactgggccctgtaaattttctgtaagcttactataaggccatgccagccttttccatgtcatttggatttatatctgtatactgtca

SEQ ID NO: 176795 - DNA, 561 bp, Homo sapiens
aggatagccaaagcacaacaaacatcaaaatccagataaagaaaaggacatctggaatcattagtcaacatttttggcagcaaggcgatgcaaacaaaagcaaaagtagtaatagataaatgtgttttttaaaaaacaaattacaattcagaacacagaattgatttaaaaaccaattgagaaaaccttttacaaagagtcaacaacaagttcaatatcccaagtgcaagcagacaaccggaggaaggcaaattttaatataatgtgtgatgacgtgaaaaatggtaagaaacgtcctatccccaatcctagttgcacatttgacgatgcctttcaatgttgttctgaagttatggaaaatattaaaaagacaggttttcaaaaaccaacacctattcggtcacaggcatggccaattgctctgcaaggaaaagatcttacaggggtagcccaaactggtacaggaaaaacattatgctatttaatgcctggatatattcatctggacttccaacacacagagaaaaaaggaatagacccgcatgttagtccttatgccca

SEQ ID NO: 176796 - DNA, 585 bp, Homo sapiens
tcaaacttgtttcaggcatagtttttgtctatgtggtactacatatcttctcttgtaatcagaagactcttaatgaacaataatagcctctgaatttacagacaagtagactttgagctatttcaattatgttactctatttgaattcttgcatttttaaatagtgctcaatatttgagtgaactactgtaagctgcaagattttaataattttgataaaaatgcaaattttattaaatcaaaataatttatataattttaaatttatgatttattaaaaagttgttcactctttctaaactaaagaataaatcaaacacatcacacctactagggtggctataatcaaacaagcaaaaactacaagtgttggcaaccatgcgggcaaattggaacttgcatacgtcgctgctgctgatgcacctactgtgaaaagctgtttagtggttccttgtaaaattaaacataaaattactatgtgacccagcaattctattcctaggtgtatatgcaggataactgaaaacatatgttcatacaaaaacttgtacacaaatgtttataacagaactattcataagagca

SEQ ID NO: 176797 - DNA, 550 bp, Homo sapiens
acaaaacttacctaggaaaaggaatatttttaagtgctcgaaaccagtgtgtccaatggcagtagtgaccttgtcacttaagtggatgtggcagtgaccctcccgtaggttcaagactctacaagtacttgaggtaactacttttaaaaatattttaggccgggcatggtggctcacgcctgtaatcccagcactttgggaggccgaggcaggaggatcatgaggtcaggagtttgagaccagcctgaccaatatggtgaaaccgcatctcaactaaaaatacaaaaagtagctggatgtggtagcatgtacctgtaatcccagctactccggaggctgaggcaggagaattgcttgaacccaggaggtggaggttgcaatgacctgagatcgcgccactgcactccagcctgggcgacagagtgagactacgtctcaaaaaaagtatatatatatattttataactcagacttgtaaatagtttagatttgtcatctttgaattactctgaatccaagagcgcttaaacctgtgtaagaaagtcacctc

SEQ ID NO: 176798 - DNA, 416 bp, Homo sapiens
cattcgcgaataacacagggcaacggcaaaagtaagtttattaaggtaaagtggtgaaagaacagctactccatagacagtgtagtacttcccgaaagtaaaaggaggaacacgtccaccctaggtataatgctatagtgtgtgtgtgtgtgtgtgtgtgtatatgtataaaccagctgtgctccattgacgtgtgtgcacaagtgcaggtgttgtattcactgtggatatttttgttaccaaatcttccaggggtcagaagggatagaacctacatttctctactgtctctactgtttaccatggagagaatgtgcagagtgatccctgataggagaggttgctgggtcatttttagcttagcgtttactgtttgtatgaatggctgaaatacagatagccctcctgccttatgt

SEQ ID NO: 176799 - DNA, 432 bp, Homo sapiens
tattttttagtagagacagggtttcactacattacccaggctggtctcgaactcctgaccttgtgatccgcctgcttcggcctcccaaagtgctgggattacaggcgtgagccaccgcacccagcctatttattattcttcacagttctcggggataacgggctcagctgcgaagttcttccttgagcatctgaatttggttgtggtcagatggtggataaagctggacttatctgaatcttctttcgtcacatgtctgaagtgtctggagtggctggaaaacagcttcctcacaagttggccaagtggctggaagtccacctacaatgggcatgccgtcctggaacatctctcttctctatcttggattcggttctatgacggagtcttactgtagcacccaggctggagtgcaggagcacgacctcggct

SEQ ID NO: 176800 - DNA, 138 bp, Homo sapiens
cttcaatatgttttcatataattgaataactctatttttggcatagttattatagatattagagttattagtgtactactggaattcttattcaaagtttggagaggtaattttataaactgtgattcaaggaatcca

SEQ ID NO: 176801 - DNA, 785 bp, Homo sapiens
accaccatagaatgggagaaaatttttgccaccatgcatgtgaccaagatctaatgtcccacactgataaggaacttaaaccaatttaccagaaaaaaaaaaatctcattagaaagtgggcacaggacataaacaggcacttcaaaagaagacacacatgcggccaacaagcatatgagaaaaagctcaatatcactgatcattagagaaatgcaaatcaaaacccggaagtatgtagacaagtaatacttaatgatttatatatgctcataaatttattcctgatacagtatttaaatttgtcgaggagagttttgcttgtagtaccttaaattttccttcatgcttcccctctggttgcagttctggttattaatcacatgaaactcacacctgctgtctcccaggcctgagtgctgcattctaggttggcaccttgtggtggctgttgctttccagtctggaagcacagcattttattcatttcaggaaaacatcggtcctaaacctgctggtgcattcctgctgttagtaggtagaaaggctggcatttggtatttggagggcagataagattttacaggagtacatgagttaaagaagggactctcatgaaagagagtatagagtgtatctggaagtgtaagtatcaggatagttcatgtggaaggggttagttagataatatttgcaatcaagatgagcaagcttcttctcagaaatacacttgtaatgataatatagttggagcagcattgtagtttctgcaaactgttcatgattga

SEQ ID NO: 176802 - DNA, 111 bp, Homo sapiens
cacacttagcttggcattggtccccgcaacatgctcctccttcctgtctcagctgcagatctaggcacccacctcgctgcctcctccctcaccacctccactggcgagagg

SEQ ID NO: 176803 - DNA, 525 bp, Homo sapiens
gtttttcctctgtgtgtgtgtctgtgtctaaattttttctttttatttattttttttttgagacagagtctcactcattgtcgcccatgctggagtgcagtggcactatgtcagctcaccacaacttctgcctcccaggttcaagtggttctcctgcctcagcctcctgagtagctggaactacaggcacacgccaccacgcccagctgatttttatatttttagtagagatggggtttcgccatgttggctaggctcctctcgagctcctgacctcaggtgatctacctgctttggcctcccaaagtgctgggattatgagcatgagccaccatgcccagcccaaattttttcttttgataaggatacccaatcatattctatcaggggctcactctactccagtattacctcatcttaactaactattatatctgcaacaactgtatttccaaatagagtcacattttgaggcactggggttaggatttcaaaacataaatttgggtcatgagaacataattc

SEQ ID NO: 176804 - DNA, 663 bp, Homo sapiens
ctacctgcctgtccccaaactcttccccaaaacagcccagggcatgccatccccactcccaccctgtgcttcatttgtggttgttctggattagaaattccactctctgccctggctggattgaataactggggtttgcaaaactcccagcctagctccttcacagcctggaatgtgctgtgtgcctgtgggagtcttaaatcaagtatctgcaactattgccaacaggaggggtagcaaaacagactggtgtgcccactttgcttcctagagaggtttgttttccaaaggctatgtttgtcacctttgaactgatgaacccaagacgttagatgtctttctccagctcagacaccatggaaaacttgagggaggcaatgagaactgttgttaaagaagccataattctttaaagaaaccataaattaagaagggattatttatttaataacattaataaagggataatttacaaataataaatatttatttattatttcttcacttaggagcaggaagacctgctagagtagaaatgtcatttctccccaaacggatctatagattcattctggttccaatcaacgtccagttcagttgatttcctcccgagacttgagaagatgattctaaaatgtgtatggaagattcgagatctaagaa

SEQ ID NO: 176805 - DNA, 495 bp, Homo sapiens
catctgcatctctagaggttccagtggggggatgcaagcctgttgctgaggttgccttttatggtgtttgaatggaatcatggcaggaaataatactggaaacagcctaatctaactgtattctgtctcaaaaggatacagggtattccctttgcttacttatgttggtttcaaggggaaagaatgggtaggcaaaagctgggtgctttaaaactttggacaatatgggtgggcgtggtggctgacgcctgtaatcccagcactttagggggccgaggcaggcagatcgcctgaggtcagcagttcaagaccagcctggcatggtcttggtgaaaacccgtctctactaaaaatacaaaaaattagccgggcatggtggcacatggctgtagttccagctactcgggaggcagaggcaggagaagcacttgaaccccgggagcggaagttgtggtgggctgaaatcgcgccattgcactccagcctgggcaataa

SEQ ID NO: 176806 - DNA, 709 bp, Homo sapiens
ccagatatcgtgggaagaaaaaagatatatttagcatccacaaaggggaataaatggttaaaacagtgtttttgagtgtctaaagattaaagggtgaaaaagaacaatgttaatagagctaggaagacaaggctgcaggaggtttacactgcatgcagggctttttcagcagtgagccaccactttgtcctctagattgtttggagatcaaactgtaaaaaagctaaaaatatttggagaacactaggtttaaattaaaaggaggggagatcaaactggagaaatgcccattatggagaccaaagtagaagtatctgcatcagagaccttttacatatacccatgtatcccaaatagtagtgaagtatttgcatagctatatgcatatatagctatacttcaaggaaaatcaaggcataggttacatggagagcaggtaaattcccaagctaaaggggtgcgtcagggaattatacagtattttctttccattccagagaaaagagtaggattgaactagcaagagagggtaaagatcctctggctttgagaatattataagagccaaaaacaagaacaaatccatgcctttttaattttttttgttttttgacttctagctttagggttcatggcaagtttgctctctagataaattacatgttggcggtgagttgatcgaggcaagatgatctcctcgggatcctca

SEQ ID NO: 176807 - DNA, 447 bp, Homo sapiens
gcatacttttctactataaagttgtctcgcatagattacgtagaattgtccaagtgtattattttataaacgtgcctttcttggttattagtagatatttcttattttcaagatggtgatcatggtgtctgtataatttctgttagaatatcagagttagtgtacctggatactaaggagaaagatagaaaagataaaatatgtatcttcaacattttgtattctgtgatgaccctaaaagctaatgtgggagttctattgactgttataaactattacagaagaaaaagtgaaagtggagagttaggtccactgtgtgtgaacaatgggagggtctatggaatgatgctttcaggtaggcagaggcctcgtggagggtggccccacactcacccccagaatccagaagccattcccacaggaacttcagagggagagcatttacat

SEQ ID NO: 176808 - DNA, 403 bp, Homo sapiens
tcttgattatcccaagcctggtggtgtcgcagcctggtggtgtcttcctgctatttttcattgtgcttttttcaattccacgaatgccacgggcaagatgaaatgtaacaattgctgtaactattgctttcacttgtaatgtgagctgcagccaaaatcttggagagcagagatgggatgtggatgaaactccgcacttgagtaaactttctgtggtcatcaactacactgccgttcctgcccctcagaactggatagccacagggggctgccctcacagtggtggctctgcacacttccacctcaccccactgtgaaggcctgcttttgcagtgatataacctacactggtccccccagagcatagtttccttttctctagaaaggtcttgagccatatgcg

SEQ ID NO: 176809 - DNA, 174 bp, Homo sapiens
tagggaacaagcacagtgtgggtagagatgcccggcgggggaggggggttggggagagaaaacgagctatatgctgctttatgaaggtagggagggtaagagagaacgggaactaagcaccaggtatcacatactcatgtgctctgagttgcaagacttaacacctcagggcag

SEQ ID NO: 176810 - DNA, 298 bp, Homo sapiens
tgctgggattaaatgcgtgagccactgtgcctggccttgcctggttttatcaacaattttagtgagttctactagggtcagattcatccactctttcttttctttcgtaatctttctagcccctagctcagctccgagctaaaatgtctagaggtgcatcctagattatataactgcccccacattcaacaattgagtgtcagagccgagactgactgttgccccaaattctctctgcaaatagctctaagacaccttcctacagggaagctaatgtagaggaatgttgcttgtctgg

SEQ ID NO: 176811 - DNA, 196 bp, Homo sapiens
ttgtgtcagacttcattataggataaatatgggataaatactgggtcaaaggaaaatttcaatttagagaaaagattttgatgagagagatgctattacgttttccaggtcaggagtagaaattatgggggctggtgtgagatgagattgctgttttggatctgctgtgaaaggagtattgtgtataggggtgaca

SEQ ID NO: 176812 - DNA, 297 bp, Homo sapiens
agggaagggggaccagaagcccgcaaccccttgaagccccccagttctgcccggggcagactgctcccgagctagggctcacacgttctgggttctctgttagtgcctttgctgagagaatccacacatggtcccgagagccaaggtgaagcatttttttttttgcttaatcagttttacttagtataatttgtatacaatagaaggtgcccattgtaagtgtgcagttccatgagattccaccagggtgtatagtgctgtctgtggacacagcagaccaagataaggaaacggccc

SEQ ID NO: 176813 - DNA, 204 bp, Homo sapiens
gccatgtgtccttaagatgaataaactgaaactcagaaagtttaaatggcttgattgaaaaggtacaactagaaaataataaagcttcaatctctacacatgaaggctccttttttttttttttttttttttttttttttttttttttttttttttttttttttttttttttttttaccccccccttaggggggtccggggggc

SEQ ID NO: 176814 - DNA, 295 bp, Homo sapiens
tgtaagtaatcccagcacttggggagactgaggtgagcacatcatttgaggccagcagttccaagaccagcctggccaacatggtgaaaccccatctctactaaaaatagaaaaattagccaagtgtggtgttgcatgcctatagtcccagctactcaagaggctgaggcatgggaattgctggtgccctggagacaaaggttgcagtgagacaagatcgtgtcactgcactccaacctgggcagcagggcaagactgtctccaaacaaacagttactgtcttggtgttatcaag

SEQ ID NO: 176815 - DNA, 442 bp, Homo sapiens
ccctagcacttcctgtactagtccattctcacattgctataaagaaatacctgagactgggtaatttataaagaaaagaggtctaactggctcacagttctgcaggctgtgaggcacggctggggaggcctcaggaaacttccaatcatggcaaaggtatatggcatgttttcctggaaaagttttatttaatctatgtacaatgcctatagtgggtagaaagcattataaaattagtttatctttgctctgtctggaagtaaatagatacgtatgtcttgttcttttgtgattggcatattggcatatatgttgaatgcctacttatatttctgaaattagatttttcagttttccaacttggaaaatctatttgcagttataggaatccttttttgcaaagtcatcatcccgtgctatgaaaccatattagtacttttta

SEQ ID NO: 176816 - DNA, 253 bp, Homo sapiens
cctcatcctgcagcgtctactagaatgaagaacacttttttctttacccatgaaaatgttttgtgcttcatacccacaagtgcaatttgtgttaattctgcaaaatttgccgcataactctgcctgtattcttagcatttttcctttgagagatttctcagcacatcatctttggactatgtggaattggaaatttacttagagtcaacaacaagtacaggaaagtcagttcttagtcaagagttaggttttc

SEQ ID NO: 176817 - DNA, 405 bp, Homo sapiens
aaaataaggataattacctcctccatttctctgtcccctgaatgtgtactgggaaattgacgggagtaaattttctttacatagtcaatgcaattcagcccagcaagagttaaagctggcttcctgtctctgctggggagccaggctggatggggctcctcctgaactgggcgcagatgccgccatgctttgttgattacaatctcccacaccaaggaggctttgactaggtttgacataatcagctcacagcctctgcctgcactctttcacaaacaggccattttcacatctttttcatagaatccgacaagcggaaaaataattaatgttacctcagcccaacaatgaccctggctctgattcaaaaagaaggcatgttgcataaactgccctttaattgag

SEQ ID NO: 176818 - DNA, 523 bp, Homo sapiens
cacttgcacagcttatttgctctttaaagttaatcgattttgttttataaaagtaaggacggtgaggtgtttttcttgccagaggtatcatatgttagactggtttcacaagaagatcaaatatccaaggtactcaaaaatgagtagagcccaagggttttatttgtattttagatcccaattctagttttcacaggtatgataagatagccactaaaaaaatttttagagtaaaaattttactgttaaaggggtttaaattttataaaaatttatttcccaacttaattcctattaattggaacctaaaaatggcctttgttcatctaaattttaaactttttaacaacttcagaaaatgcctcacaatgacaaaactaaagaaataaaacaaaagtaaagaacaataatttactgacaacacaatggtaaataatttacaaacaacaagcatcttaagactgcttgacagaagttaataaacactagcaaaatgttatattgggatatgatggtaacagac

SEQ ID NO: 176819 - DNA, 675 bp, Homo sapiens
tagtttcaaagcaacacaggcccagactgttcgctctcaactctcccgagaccgcagccccagcctgagctggcttctccataaactcctggtcccttcctttaaccagccccataaaaagggagtggggcaggagggagtctggctgcagactttgtaatttggcttggaggtggctcctgttcgttctaaccaggctgtaattacggctggcacccgacaccccctcattaccggagcctggaaggaggactctaattatagcatactgggtccgggctggagtgggttgggggagggagaccacagtggaggcctgtgtaggcagagagagactctgagctggctggggggatggggcagggccaggattgtgggggggctgtcctgggctcctcatttgtcttgctttcagagtcatcgttgggagggatggggcatagatcgaatccaggccacttccttggggagaacaggacccagaggagcccgcccgggagactcattcattcatgcacgaaggatttattaagcatctactgtgtgccaggctggcactgggttacagcagtgggtaaacaggtgccatccagccagaaatgatgttcaaggagaaagcacattaaagccatcttgctgctggaaatatctgaagaagtccacattgatggcaaa

SEQ ID NO: 176820 - DNA, 474 bp, Homo sapiens
ctggccatgtgcatccaggccctgcagcgggaagtggcagaggaggacctggtgcaggtggacagagccgtggacgccctcgaccgctgggagatgttcacgggccagctcccggccaccaggcaggacccacccagcagcagggacagcgtggggctgcgcaaggtgctgggggacaagttctcctccctgaggaggaagctgagtgcccgaaaactcgccagagcagagtcggccccccgtccctgggatggggaagagagttagtacagcaggggctgccctacgtctccttccctaaggatgctggccagcactgtccagtagctgaggccactactgacctgccagggataaagaggaagggtctgcctgggtggtggctcaggcctgtcatcccatcactttgagaggccaggagtttgagaccagactgggcaacatggtgagactctgcctctacaaaagaaaaat

SEQ ID NO: 176821 - DNA, 151 bp, Homo sapiens
taagtcagaaagtcagttttctggtacagagagcagtcttggccaggaatgagagctacatgcatagtttttcatcaagcttcactgtccctcaggaaagccaaccatggagattccagactgagacattctgatcaccgaatcaagattg

SEQ ID NO: 176822 - DNA, 194 bp, Homo sapiens
gactgctgatgctgaactttgcatgtaacttgctctgttctttgggatactttagaagtgaagtataaatatttaaaaaggaaagggttattactgtgttcactttgattgatataagtgaggaaggaaacctgaaaatttaaagatattctatatgttctctctttgaatcaactgaaatagcgtcaactcta

SEQ ID NO: 176823 - DNA, 671 bp, Homo sapiens
catggcgaaaccccgtctctatgaaaaatgagctgggcacggtggtgtgcacctatagtcccagctacctgggaggctgaggtaagaggatcacctgagcccaggaggtcgaggctgcagtgagccgtgattgtgtcactgcgctccagcctgggtgacagaatgataccctgtctcaaaaataaaaaaaaaacacccccagggcgtgctccctgcacataactaggctgctctcccttttcaagcttgcacactgacccctgggctcacttggtgagcacaggcccagaaagagttggcctgaaagagcactggcttggtgacaggccacccagatctcagacctatctctgtactcaatagcgtggacaagttagtaaccctcagccttgatgttctcatctggagcagtttaaaacattttatttattggctgagcgcgatggctcacacctgtaatcccagcactttgggaggccgaggcaggcagatcacaaggtcaggagttcaagaccagcctggtcaacatggtgaaaccccatctctactaaaaatacaaaaattagccaggcgatgtggcaggcgcctgttatcccagctacttgggaggctgagataggagaatcggttgaacctgggcggcagagcctgcagtgagctgagattgcgcc

SEQ ID NO: 176824 - DNA, 112 bp, Homo sapiens
catcttgggtatgtctttattagcagtgcaagaacagtctaatacaccagaactgttctataataaatgctaaagggagtactttaatcagaaagaaaatgacatcaatgaa

SEQ ID NO: 176825 - DNA, 710 bp, Homo sapiens
gataataccaagcgatttgagcccaggcattactagatagtaaattcacattggccataatcagctatgctcatagtgaatttctgtgatcgatagcactagttgcttggatatctcaccaatatataaaccactgagtgataaacatgaagtatgtgtagtaggattcactgtgtcggagattgttgaaggactcttttataggaagtacataatctatcaagagacgtttctatggcagaagcatctgaaggatcacagacataatagcagtataatactcacattttaggggattcagtattttaaagatattctttcccaattgatgtgtaggttcaagaaaattctaataaaaatttctacagtaaattttacaagctgatcttaatttatatgaatatgcaaaagacaggataagccaaaggacccatgaagaagaggaaggattgctttacttgatactaagactttttgtaacacactaataaattaagtcagtgctgtattaccacagaaacagacaaatagaccaatggatcagaatagggaacccagatacagatacatgattaatatggacaggttatttataacaaaggggcatcacaaattagtgaggaaggaagtctctttcaacaattgtgctagaacaattagacatactttaaaaaaaaaaaaagaaagacctaatttattcatgtctactc

SEQ ID NO: 176826 - DNA, 1050 bp, Homo sapiens
gactctagaggaccccgcgcgatgttgtactttttttatttctgtagagacagggtctcactatgttgcccagggtggtctccaactcccagtctcaagcaatcctcccacctctacctcccaaagtgctgggaataagggcttgagccatctcctagggcctcaaaaaaatccattaaaataacctacttgaactgtctccttgccaaaagtctattttctccgaaactcagaaactcatcttacttcctacaaaagccctagaacagcaatttaggtttcaacatcagtgaccaaggaatcaaatgaaggaacactttcagttcttcgatcaagtcccatttttgtagttttctcccctgcctgaacactttggaccgccacctctgtctattccttagttctcgggtgaaagttatcctttccaataaaccttccgagtttttcaaatcttaatgagaatcctttattttgtgctccaacaagccccttcatttccccaacctcagcactcatcaacgaaggggaacccaactgtcttgtctttgttaccccagcacctggcgtgtaacagcagcgcaacaaatgttcttcaatcagttgaaagtagatattaagtcatgtacaccatctccatttcataggagtcataaagcatgataagctctactaatgattaatcttataaatgaagaaaccagggtacagagagaaaaattaagttgtcctgggttctaaaacagtaaacgacaacagaatatagaacctgagactccagagtcagaagctatttgtactctaccacgctgcttccacttaaattctaggtcctattgacacagctgaccctgttggctctactgacacaactcagattgggccgactaaaatgttcagagtatatctgggtgcggtggctcatgcctgtaatcccagcactttgggaggtcgaggcgggcggatcacttgagatcaggagctggagactagcctggccaacatggtgaaacactgactctactaaaaatttttaaaaattagccgggtgtg

SEQ ID NO: 176827 - DNA, 971 bp, Homo sapiens
tggcggtccaaagtgttcaggcaggggagaaaactacaaaaatgggacttgatcgaagaactgaaagtgttccttcatttgattccttggtcactgatgttgaaacctacttgaactgtctccttgccaaaagtctattttctccgaaactcagaaactcatcttacttcctacaaaagccctagaacagcaatttaggtttcaacatcagtgaccaaggaatcaaatgaaggaacactttcagttcttcgatcaagtcccatttttgtagttttctcccctgcctgaacactttggaccgccacctctgtctattccttagttctcgggtgaaagttatcctttccaataaaccttccgagtttttcaaatcttaatgagaatcctttattttgtgctccaacaagccccttcatttccccaacctcagcactcatcaacgaaggggaacccaactgtcttgtctttgttaccccagcacctggcgtgtaacagcagcgcaacaaatgttcttcaatcagttgaaagtagatattaagtcatgtacaccatctccatttcataggagtcataaagcatgataagctctactaatgattaatcttataaatgaagaaaccagggtacagagagaaaaattaagttgtcctgggttctaaaacagtaaacgacaacagaatatagaacctgagactccagagtcagaagctatttgtactctaccacgctgcttccacttaaattctaggtcctattgacacagctgaccctgttggctctactgacacaactcagattgggccgactaaaatgttcagagtatatctgggtgcggtggctcatgcctgtaatcccagcactttgggaggtcgaggcgggcggatcacttgagatcaggagctggagactagcctggccaacatggtgaaacactgactctactaaaaatttttaaaaattagccgggtgtg

SEQ ID NO: 176828 - DNA, 140 bp, Homo sapiens
agcaggaaaggggatcctcatgggtcaggaatggggatggaggaagaaatctcgtgtgttgtttgctttgtcttttctccttttctcttgctctggccctccacgtaattgtgtagtggtggagacagcagtgacattgg

SEQ ID NO: 176829 - DNA, 425 bp, Homo sapiens
gctaaataggttgtcctagaaataatcagaaaaagagtgagaactgtgcatacataagtgtgcgtgtgtgtgtgtgcatgcacatgtgtaatgtgttttggagtagtactcttccaaaactgaagcagaaactcttagtctcctcctgtgctaaaccacgtgacctttgcctttcaggatccagaactctcaattcatgatgtctctagtgggctagctctggaaccttatcattggcattactttctactactaaagaaatgactctaacttaaactgaaaaaaagtgtacacaatgatggccagggtatttcatggagtggaagaaataattgtacaaccaaatcttgatttgggatgtgactaaggcatgtttagaaaccttaacagtctttgactacacaaaagaaaacaaaatatattac

SEQ ID NO: 176830 - DNA, 256 bp, Homo sapiens
attagccctagtttaaacattgctggaacctacctaacaaatctcaaaagcaagacctgaattcaggaatcaagctgtttctaagtaactgaagtgtatcccagaacaaaacccaagaacattaacagaaatccaaaattaacgagcacccaaaaatgtaaaattcacaatggctggttttccaataaaaaattaccagtcatgcaaactataacccatcataaggagaaaaatcagttgaaaccactacagctga

SEQ ID NO: 176831 - DNA, 389 bp, Homo sapiens
cctttctttcccctgaagagtgattcaattacttcaccttttataaaatacagtttaattgttccctttctgtattatctcagaaacctgatttttttcagtgcctaattgaaaattttaaaacactgcccttctagtatcaataaagttgtttgttacttttctgccagcagcaaaagtcctttttgctatttttgtatctgggtgaggtccgattgctccagaattgtgccatactgtggttagccatgatctacaagaggaaaataaatttatccttctttaaaatcattggttttctaagaaatgcgccatttactataccaaatatgagtaaatcttaggcaaaataagtgttcatattgatatcaaatatgtccagttctctc

SEQ ID NO: 176832 - DNA, 224 bp, Homo sapiens
ctgctttgtaaagcatattttaggctaaaaacgaaattcttatcacctggctttacctatgtgtgtgtgtgagagagacagagagagagagacaaggtggggggcgcatggggagggcagggtctcactctgtcaccaaggcaaggctagaatgcagtggcgccatcatagctcattgcagctttgaatttctgggctcaaacaatgctctagcttcagtctcc

SEQ ID NO: 176833 - DNA, 2668 bp, Homo sapiens
  misc_feature (358)..(358): n is a, c, g, or t
  misc_feature (611)..(611): n is a, c, g, or t
ttttttatgtccaagtgtgtttatcttttttaaaaaaatgtcttttaaaatcattttagtgcagttttaggagaaagtggaactaaatgactgtattcaacctgccactttaaagaggtcttttctcatttgtgtaactgcagattgtcttctcaataggcggtttggtcagaaagtgtaggtgcagtgtgaacaattctgtagagcaggaataagactaaatagaagcatgctctgtctgtgtttagatgcttgtaactgtcatgtttttaagaagaggtaacattgggggtgaagtaaaatatctcttctggaggagttttaagtgcagtttggcctctttttaaaattctcttantctccctgtgcagacagatacccacatacatttgtatattgaaaggggccatgggagttagtatcgtgccacatcttgtgcacctactgtccagtggcttctgtgtcccttttgtataggatattgtcatcatgtggtgtagaagaacccttcaggaaaagcaagactcctctctgctagaggaacgtgggtgctttgagaaaggagattcagagaggatgacagcatctcacgcatgggcgtggggttcccnttctcatttgaaagatgtagggttcattggactagacgagcctttccagttacaaatcttggtcacttgagaattttgaaaatgcattgtattttaattgcttacttttttacatctgggctttgtatattcattatgattttgtatcagagacattattagaagtcatttgaagacttctggtttaggtgtgttgataaggttggctgcccttacattttcttgtgtttctattctcctctttccctgacggctacttcttgaccatgctagctttttcaatttctatgacaaatcaagttctttttcccctctgggcttacacaaatatagttccttctttatgaaacgttgttctcctcattttttttgtctggctaactcctaattatttcagctaagatattttttgttttcttatcccccacagagggttttcctaactcttcatctaaataagatcacttacctcttagatttctttccctctcagctttttgaagtataacggtatacaatctggtaaacttttaagaggcaccctgttctttcccttcatagtgcttctcattgacagtatttaaacatgcatttctgactctgtttactattgactttccttctagactataacttcaatgagggctgtgggcatatcttccttgttcactataaatatctacctcttggcactggtgggcactcagtcaatatgggttgaatgaatgaagagtacaaactcagaggttgatcctactggcacccttttcaagcttcgagaagtcctaattatggtatttgaggtgctgggattagttttttacccccttgcaactctacataaactatgtaactactagcattaaacagacatagactttgggccagatcaatataatctatttattactgccactgtttggtttgttttgtttttcctgtccagttctcttaatctggtatcattaatctagattagccaaagaaaaaatacagattctgggggtggaggagaaagggccaaaccagaagaagaataagggggaaggaggacaatttagtctgttccactagatactttttaagtattaaacagtgttcatgtctttcttctccattcaccagaaaattatgaatttgaggaaaaggacaaggaagttagagagttggtcggtcatcaggtaactttagttactgtttctggagcagtctttgttcttactgtgcctttgaccaggagttcctagaggacaggaacatggctttcacatatttagtcctccacagcagaatttaagttacttaacagttaattatggtggtgctcaaataagatttgttgaatgattaatcatgaacacgatatcaggtttcagtttctggttgggattctagcataatagtttaactaacaaagccctcagcttctgtaaggttatactctaaaggcaaagaactgctcttcggtaagtgtcagatgggccagccagtaaggagaggcaatgattctgggacgttgttattttgccaagggtggtccctaaacttttgttctgtttggaacaaactagctggaatacctttttattccctgatgggttttccctaacaggcagtgcaatgcagtggtttatattgttttgaaagcagattagactcgtgttcaaatcccagatcttgttagcagtgtcatcttgggcaagcgatctctgagcagatgcctttaccgtcatgggggcctgatgtaaagtgtatacctcccaggggagttatgaggattaaaaacaataatcctcccaaagtgcttggaaagtacttcatccaaagtgagcgctcttcatgccattgcagttgttgggatttttgaggagtgtgcaaccaaggagttggaaaagttcaagggaggccaggcgtggtggctcacacccgtaaatcccagctacttgggaggctgaggcaggagaatcgcttgaacccaggaggtggaggttgcagtgagccaagattgtgccactgcacttcagcctggacaaaaagagtcagactccatctcaagg

SEQ ID NO: 176834 - DNA, 215 bp, Homo sapiens
cttctgctttgccccagctggatttgtgtttctccagctcttttagctttgcttcctgcttctgccccccaggtcttaggtgagctatatgctaatgtctaatgtactcagtagtgatctacgacccaggaaggtgatttccaagcatcacatgtcagtctattgtccttgtgtaactccaaagagccacacacaataggcagaagcaggcacag

SEQ ID NO: 176835 - DNA, 644 bp, Homo sapiens
gtggttttgcctcctcagaggggcagcggcgacccaggggctggcggtggatgtcaggagtgcgctttccttctaggccttctccctcatgactggttttgtttttagattacaaaaataacttatattatttaattaaaaatacataaaatatattgtgatagcgcagaataatggccctccaagaatgtccacggcctaatgtctagaaactgttatatggcaaaataaatacataaataaggtggaaggcctttgcagatgtgatcaagctaaggatttttttatttttatttgatattgattgattgattgattgagacagtcttcctctgtctcccaggctgaagtgcagtggcgcgatcccggctcactgtaacctccgcctcctgggttcaagcgattttcctgcctcagcctcccgagtagctgggattacaggctcctgccatcacgcctggctaattctcgtattttagtagagacaggggtttcaccatgttgaccaggctgatctcgaattcctgacctcaagtgatccgtctgccttggcttcccaaagtgctgggatgacagatgtgagccacagcgcctggcaaactaaggatttttagaccggggattaccctggattatccaggtgg

SEQ ID NO: 176836 - DNA, 282 bp, Homo sapiens
taatacctaacgctatatactatgttcttcctagctcaccactgactttaagatgcagtactgacctgagtcaatcaaagcaattctctgagcttcaatttccttagccataaaattgggaaaataatcttggctttggccacctaatagtgtaatggagaaaagaacatgtgtcaggagcagaaggctatacagtagtctttatcttcttgtcctgcccccagatcagtgagatgtttccaaacaaaataatgcgagtataagtgaagagtgttgatttgt

SEQ ID NO: 176837 - DNA, 430 bp, Homo sapiens
aaaaatggggggagggagcaggtggacacatatttgtatttgctcgtatgtgcatagtgtctttggcaggatacatgagagctcaatgacagaggacacccatctggaaggaaaccgggtggtagggggatggggcaggttgcaggcttctcactgtgtccccactcatgctgtttattttgcactgtgtgagggcattaggtgttcagaaaataaaatagtgagaaaaaattcaagacatttttgctatcatagcaaactgcagactaacattttaaatagaatttaggtataaagggaaaaaggctaaagcaatacaaattaaatggatgccgaactacaaagcccatcattgttaacatgagctggggtggggatgggaagaggggtcctcactctcttggtttctacctggaagcccatgctggcc

SEQ ID NO: 176838 - DNA, 351 bp, Homo sapiens
ggtgcctgtagtcccagctactcaggaggctgaaccaggagaattgcttgaacctgggaggtggaggctgcagtgagccaagatcatgccaccacactccagcctgggcaacaagagcaaaactctgtctcaaaaaacaaaaataacacgttatcttaatgttgcttaattttgcattcgtagtttggatgctgtttgagtaagacctacactgagaattctcttaaatacctagaatttgtgaacattctgcacacagctacgtaaagatatttcagcgatgaagtctgcagactgctcatgttcaatgttattatgtgaaattctgactcagcccatacactgacatga

SEQ ID NO: 176839 - DNA, 619 bp, Homo sapiens
tcgtgaggggtcaaacataggtacatagaataattacagtataagtctgaaagtgaaaacgccagaagatggattttttttttaatgcaatggcgattcagaggaaggaaagattctttcttgctgagggaaatcaaggaagtcttcctgtaggaggtagtttctaaaccttatattgaaagatgtagatcctggagagacggaaaaaggcattccaggcagatcactgtgagctggaaagccagtgatgctgtggcaaaatgtattttttacagaaaatagatgggtatctcccatgccccatgatcttttacgatataacctggctgttcctcccattggcggatctgtggaccctcccccttgaatctgtgggcatgtgactgctctgatagaaatgaagctacatgatatcaagaataagtgaaaagaagaagaagaagaagaaaagaagtccataccacttcctcctagttctcttgggatgcttgccgggagggaagctagtttccatgtacagaggctactaatctgagaccacttgtgtaagcgaggccaacagagatgctctggtccacagccaggctcaaccgcggatcacatgtgtgagccgtcttgc

SEQ ID NO: 176840 - DNA, 116 bp, Homo sapiens
gctcacgagtgaatggcttacattctgcctgagtctggcgtaaggttatgacaacagtactgagactgggctggatgtcagaataaacgagggcacgtcacaccagctcaagggaa

SEQ ID NO: 176841 - DNA, 613 bp, Homo sapiens
ttgacatttaagcgtctctgacttaccaggaatattgaaattttccatgaattcaattgagcactgtaaataaacaattgtttactaatagcctttgggaggcagagtaagatttacagaatttctttataatatgttcctagtaatccctctgaacacagcattctcaattcttagtattcaccctgagtcactcaggggaaattggtatctctgtaaacaggcaaatgaaggtgctgggtggaggtgcatgacattgtacagaaatgatgtccacacgcacctataagggccttaatttaatggactgttagttacatggctacatacttactgaatctagtcatactatcttttgtcagctaatgacatttgttacctattaattcaatataattatttgcttggctgaaaaataaatcctttaatttattctaaattgagagattagatttgcaatcttcaatcttttaatgttaaatcagagaaaagcaatgtatgtatatagtatgcattttcctacccatgaaaattatttgtattgccttgaaaaccctaggaagccacctaaagaatactctcttcaaatcctttagccaggattttagatttc

SEQ ID NO: 176842 - DNA, 718 bp, Homo sapiens
agaggggaaaagcaggaaagaaggatggatgcctataatgggccaaacactgagataggcacctcaggtacatctcattttatctttccaccatccctttaggatagatataattagaagcactttagagaggataatttaagtaatttatcaaagggtatataatgatttagtagtgaagctgaaattttagcccaggattatctgatttaaaaccagtgcctttatggaatgatgtttacattgggaatacggaggaagagaacattatatgcttgctcttaaagctctctgtttgattggatgactcattctacaaatactgacaatttgcttgtaggcactaataaggagttcagataaattcacatatttgatatataaaataagattagaaaggtaaataatttactgtaactttgatgtgttctaaagacaaattataaagaattttgagatgaattttgttctggatttctatgccagtgatttctcccattaaaaatgataacttagagctgcagaatttatgacaaattataggaaagattgatagtgtgtcactttagggaaataaacttctttccctatatgtgtaactagtattaatccaaaatactagttacaaatcgaaatgaagaaaacaatacaaaatgaaagaaaacgttggtattttgaaaagttaaacaaaattgacaaacttttagccagactaaga

SEQ ID NO: 176843 - DNA, 1062 bp, Homo sapiens
cacaccacctgagtcgtaactgtatttttatttgtgacatgtatataccacctacctcatagtaagccctgatgtttgaatgcatatatttacatctgctttttgcaaatctcaggtctgagtgttccactctgtagcatttgggtatcacctaggaatatgtgatttattgacatacctgctttgggtgggattgagaactgtattgactgcatgagcacatttttttcaaaccctgttcttggactcaggtggtgtgcacaccacctgagcctaaagaatttttaaaaagctgctattgatccctctcagttgggtagagatcagtctcttgaattatctgcctccctggctttatcatcacaagaaatgatttcaaaggtttctgttttgttttgttttaaatcttagaagtccagaaaggatctcataaatgtagtgaagttctgtaaaagtatgttgttatagagcacttataagaggaaatgtgttttatgaaatcaggtaggaaatggaatattctagcacacagaagttagtgaaaggagagaggttctgtggtcttcttctccccctttcatttatgtagttacattcctggaatcattctagaatttgcctcttgagaatgcggattttcatacccattaacaaaggaagaataaaggaggagaatttatgactaaacacagttgtagaaaagtctaggaaaggaaggagctaggaagggaatgtacatatgtgtacagtactgcttcttactgtctggcttggatcaggagtgagcatgcctgagtttggagatgtgctgactcagagcagtgatgatgctcagcacttttgggacagcttattacaaaataatacaatactgctccatggaagtagccgtttttgactgtcggtattatttcagtactggtagctaagaacacatccccctcaggaacagtaatagctgccttggtgctcatttcagttacatcatagatggtcaagagtcataccatttgccatggtgaaccttcctctacctttttttaaacaacaaacagccatggg

SEQ ID NO: 176844 - DNA, 898 bp, Homo sapiens
tcagtttctccagggtctagtgtcctcagtggtaaaggcaggaagttagactagatgatcgctgaggtacatcctagctctagcattcattggtttcataattctgagcctaaagaatttttaaaaagctgctattgatccctctcagttgggtagagatcagtctcttgaattatctgcctccctggctttatcatcacaagaaatgatttcaaaggtttctgttttgttttgttttaaatcttagaagtccagaaaggatctcataaatgtagtgaagttctgtaaaagtatgttgttatagagcacttataagaggaaatgtgttttatgaaatcaggtaggaaatggaatattctagcacacagaagttagtgaaaggagagaggttctgtggtcttcttctccccctttcatttatgtagttacattcctggaatcattctagaatttgcctcttgagaatgcggattttcatacccattaacaaaggaagaataaaggaggagaatttatgactaaacacagttgtagaaaagtctaggaaaggaaggagctaggaagggaatgtacatatgtgtacagtactgcttcttactgtctggcttggatcaggagtgagcatgcctgagtttggagatgtgctgactcagagcagtgatgatgctcagcacttttgggacagcttattacaaaataatacaatactgctccatggaagtagccgtttttgactgtcggtattatttcagtactggtagctaagaacacatccccctcaggaacagtaatagctgccttggtgctcatttcagttacatcatagatggtcaagagtcataccatttgccatggtgaaccttcctctacctttttttaaacaacaaacagccatggg

SEQ ID NO: 176845 - DNA, 208 bp, Homo sapiens
aagacaccgcagagatttgagggactcagaagtcaaatagagtaggttaaaaacctcttatttttcaaattaattgttttaagaaacaagcatacctgtgtaagtgaaatatcttaatttgtgttgaatcaagttaggagacagagattctcatgaatgtgtcctgtgttctcaaagcagctgctagcctgtgggtctctcctacctg

SEQ ID NO: 176846 - DNA, 337 bp, Homo sapiens
aaagggcagtgtatctaaccaaaggacagagcggaaagctgtaatttctcatcacttcaggaagggtttgggtcctgccgagagcagagaagagcatgaggaaggtcaatctaatactctgtggcttttccaagccttcagatccttcctcactccatgggaagaggaacggtgtgtctggtcaagagggcaagtcagcaagggcaatggtggctgcctggaggattgctcaagaatagtcattcactccttagaaaacataattgtgtttttatgtattttgcactatggtagatgcgtgggctacagaaattcaagtccctaccatcaaaaaaag

SEQ ID NO: 176847 - DNA, 360 bp, Homo sapiens
gatagatggtggcagagattggagtgatatgtgaacaagccaaataatgccaaaggttgtcaacagccgccagaagctggacgaagctagtaaggattctcccttagagcctttggagggaatgtggccctgctaactccttgatttaggacccatggtctttagaaccatgagatagtaggtttctatagttttaagccaccaagtttgtggtaattttttatggtagaactaggaaaccaatacactgggtgaagtgaatgttagaattctttgtactgttttgtgttacttttctataaggtgaaattatataaaaataaaaagtttaaatactatccaacaatatcttcagctttg

SEQ ID NO: 176848 - DNA, 222 bp, Homo sapiens
aatgttgtgactaatattctatacatgcgagacattttagatattttcatctctaaatctgttatctaagggggctttttagaaaatcattgaaagtttagctttgttatccagggaggcttttttggtaatctttggaagttcaagcttgcttaaaaagatgtcttaaatgacatagaaatatttgccccatccttaagcggaagttcaacagccactcta

SEQ ID NO: 176849 - DNA, 257 bp, Homo sapiens
ccatttcctcttgtatccttatcccattttgctttctcgaatctatgggccctggaagaataggggcaagagaagcattacttacccttctttctatgttcaggataatgatcacagatagagctaataggtgaaatgatctactcatctctcacaacccgaaggcactccaaattactgacgttcttatcattaccaggtcctgatcatttattaatggatatgcttcagtgaggcaaatcagttagtttacctcc

SEQ ID NO: 176850 - DNA, 203 bp, Homo sapiens
tatatgactgagaaaaaattctgatggaactaagaactcagtttttaaacttttaccaacattgctcagccagatggtatgtctattcaggggtagctaattaaccagatgggtggtaggaggataaagagcaagtgagacataagagcaaaactggagtcgctgaccattgagaagtaagcatttttagggaggcaagtgtt

SEQ ID NO: 176851 - DNA, 311 bp, Homo sapiens
ttctcatcttgggtcctttatcagatttactttatgaaattgaatataatttctgcagcaataaaatggaaataatagcatttgcctccctcctaaagaaatgtggtgaacaagagttggtcagcaacacctagaatctggagtatctctcatgggttccataaatagttggcataattaataattgctagtaaagagattgtgttattaatatattactgaggattaataatcatgtattataatctttccagaaatgacaaaatgtcatcactattaaaatcttcttcaaaaaaatacctaatgttcca

SEQ ID NO: 176852 - DNA, 768 bp, Homo sapiens
tcctcctcattgaacacagtgccctcctagtttaattagtgatggttatgccaggggctttacaatgaaacaatttaccttcaggcttcttatgccagtccttattgggccagtagtaaagacacatgacatggtacttattcaagctcagatatgatagaaacagaaaaagtggtggctggtacctattcttagtcttagcctttgttttaatttctactgctttaaaattcttttttttttttttttttttgagagggagtctcactcactctgttgcccaggctggagtgcaatggtgcaatgtcagctcactgcagccttcgcctcctggatttaagtgattcttctgcctcagcctcctgagtagctgggactacatgtgcctgccaccatgcccggctaatttttgtattcttggtagagtcggggtttcaccatgttggccaggctggtcttgaactcctgacctcaagtgatccgcctgccttcacctcccaaagtgctcgggttacaggcaggagccaccgtgcctgacctctactaattaaaaattctttagaacaatgtcctttgggatagacaaagcaggtgatattctttccatctttagaccagtattttaagtgtccaaaagaccagtgatacttccaatttctgaatggaattggaacttggggcttttgattcttaagccagttttcattagcatcataccatgtagctaacacacttgcagcctaagacagaatgtcttgaagagaagaa

SEQ ID NO: 176853 - DNA, 356 bp, Homo sapiens
tcaaaatttatgaaatgtagctgaagctgtgcttagaggaagatttacagcttttataatgcctggatatttgaaaaggagaggcttaaagcactaacgtaagcgtccattgtaagaaactagataaaacacaaactaatccgaagtagctggatgtagaggtgtgtgtttcttgggaggctgaggtgggaggattgcttgagcccagcagtttgaggctgcggtgagctatgattgcatcactgtattccagcctgggcaacagagtgagaccctgtctctgaaaaaacaacagcaacaaacatctgaagcaagtataaggaagaaaacaataaagattagaatggaaaacaacg

SEQ ID NO: 176854 - DNA, 240 bp, Homo sapiens
attcagactctgcatgaatatgtccaatgacgaagcactcactttctcacaaatcatcctttcccactatgggacagctgtagttattagaatgctttccttatgctgagctgaaccagacctccctttaattcctagcaatcctttgacaaagaaggactatttatgtgacagcgagctccacaagggaaagtgccagtccatcttgcctactgctctggtcccagtgtctagcacaag

SEQ ID NO: 176855 - DNA, 739 bp, Homo sapiens
agtttttctagtttttagtagagatgaggtttcaccaacttggccaggctggtcttgaactcctgacctcatgatccacccacctcggcctcccaaagtgctgggattacaagcatgagccaccgcgcccggccccaaactacaattctatggtgactatgtatcttttcattttaaattctgctttcaattttgatcatgtggtcacacaaactaaaatatacatgaaattactgtctatcacaatttaagttggtctacattccaagtcaaaaaggaaagagactggtttttcttacaaatgatccataaaggacacaacgaaaatatctaagtttctgtttttaaaatgattctaatttcactcatctctgagctttgcttctaccacataaagaatgagtgttaagagcatcatgggagactttttagtttatcacaaagaactgtttacaatggaaatctggcatacaaacttctcttcaccggcacatagcagttcagtatagtctaagtaagaacaatattttcttaaagttgtctgtttcgttcctgattattccaagaattaattagcaagattaaaaatacttagctccatctaacaaaatacacatataatccctcaatctaaaataaggtaaaaaattaaaatattggcgaggtgcggtgatcatgtctgtaatcccagcactttgggaggctgaggcaggcggaccacctgaggtcaggagttgga

SEQ ID NO: 176856 - DNA, 326 bp, Homo sapiens
agctcttgtcaggcattaaaggtttgatatccaggtgtggccttgagctgagctgacaattagagctgaggacaagcttgaataagaggtgccatgggagcggcagagggacacagtgaccctgggcaagaaccagtcccccaatgctccacagccaagggcggggattgtgtcacctgtgtgtgccggcctacttcccagacaggacggcggacctgggtgcgcagacacgaagcgggcacttcccaggaaaagcttctgcaccccaaaatgcctgagaccctcaggacagcatcgctgctttggaagttccagggctgtgccca

SEQ ID NO: 176857 - DNA, 493 bp, Homo sapiens
aacgagtggtggatttcaggggcaccttactgctttgccagggctgtctgtgccagaatcttctggcaggggtgggctgggaggtctccccagctcgggctgatgcagggggattgtgagcaatcctcctctctgggcctcaactgtacagtaagggtttggacacatgacctcaggcctcctcatcattgacattctcagggtgcccagggacctccctgcaccaacaaaaaccttccctcattgctcattgccctcagagtgaagttcaagctcttcagcatggtattcaaggccctccatgaactggtccctgttgagtttgcaatctcatatcacttcccaccaccttccttaggctccaccaacgtggaaccagctcctgggtcacccttcccttgctgacctgctgccctcaactccttatgcagatatgacatcctcctggaagccctccctgtcctcatattccagcagttactttgtgctgcct

SEQ ID NO: 176858 - DNA, 585 bp, Homo sapiens
cactgtaacctcaaactcctgggctcaaaccatcctcctaccttagccttctaaagcactgggattacagattagagccgctgtactgggcctgatttgggttttaagacagtttccatgtgattaagtgaacaataatctatttctacttgttttatgaacaattttatcaaatattattctagaacctgtagagatactcatatgatttttttcatctattaatatcagaaattatgacttactaagccattctcgtatctggtttgaatcacacctggtcacttgggtttattcttttaatgtgctagattctatctgttaacatttttcacttagaattctttgccccatattcatgtgatagtccaatcattctattttgtctttattctatttttgtcagtactctgcatcactgttagcctagcttgctaaaaagaatttggaagctttccctgtgctctgagacattaaatagtacagattgagtatcctttatcctaagtgcttgggaccagaagtgtttcaagatttttttggattttggaatatttgcaaatgcatattgagatatcttggggg

SEQ ID NO: 176859 - DNA, 586 bp, Homo sapiens
tgcagcttggctagggtagggattcctgaccaacagtcccataagatcttatccagtcaggaggtactggaccaatctgaagtgcagccaagaccgggagccacagacctggaacctgggtactcaaagagttgtccacgtgccagcagcactggcccctccaggagcttgttagaaatgtagaacctcagagcctacattaaagatattgaatcggagtctgcacgtcacatctgagaagccatgagctaagctgatgccattcagctgggtagcatcgcagtcactgtgcaacttttaaacctacagctgcccaggcccactgcagacctgctaaattcgagctccttgtagtggggccagggccctgggacttcacacaaaactctgcaagtcatcactgatgagaaaaccaagactcgatgagagtctcctgagctcgggggaagaagctgcataaccggcacacttccagaaaggaccgaggaagagagcgtcgcttcagctagggatctgattagtcatgcctggtaggctctgctgagctgggggctcttgggttttgcttgttgagctgaattaatat

SEQ ID NO: 176860 - DNA, 230 bp, Homo sapiens
taatgtaaggtcgacctcacaacagtacatcagcgaaggcttttaaaaatttattctcccagtgaaaataatttcattccctgagataagtaaaaggtggcatggtttgcaattttatccctatagctacacactgctatctactgcttctgagttctaacaagccatctcttaccattttaaataacgccattaaaaattaaataagctactagagactggctaagagg

SEQ ID NO: 176861 - DNA, 486 bp, Homo sapiens
tagccaaaggtacccaatgtgcctggacagacatatctgctgtgtcaagtgctgagagaattgtcatagctagaactacacttaccttccacaggcagccgccgtcgcatggccaagcgttccattttcctctgtgtctctgccagactaaaaagaactccatatacatattgacgagctgaccggaataagagagcagctggaggcagctccatgttacactcatcctcaatacatacggggatcttaatttcaccctaacaagagaacattccagggaaaaggaaaaaatgagttacctcaaggtttagaactgagctgagaagagccaataataaactgtagcctctgtggcctactaaatttatttgtatttagacagtttcatactaaaaagaagctgtaacaagcttagctgattgcagcctacttataagctatatttcatttttaaagtctcaacggctgggcatggtggctcatgcc

SEQ ID NO: 176862 - DNA, 259 bp, Homo sapiens
gtgagtgggagacaatggcgtagtgttttttcatgaaggttgctttctttgggtttctaagaaattactgttaattaatttttgttgttttattataagttcagttgctggcaggtaaactaaagctacggggtcaagaaacataaatgtgagaatctccttcttttattaggttagtattttggttttatttatttttattttttgagacagagcctcgctctgttgcccaggctggtgtgcagtggcgcaatcttgg

SEQ ID NO: 176863 - DNA, 358 bp, Homo sapiens
aatactgagccccagtaggttcaaggttatactccttgacaagtgtggtctgttgtgctgtatgtagactgcaaatgtggccatcgactcctcctgtcccagtacccaagtgcccctgccctgtagatctgagtgccttctcattgacttgaagctccgctgtgtgacttgctttggtccatgggaagtgagcaaaggtgatacaagcaaaggcttgaaagatgctcgtgcattggggcttgcccccatcgctgctctttgaaaccctgccaccctgtgataaagtgcagcatagctgctgggggatgagaggtcatgtgaatagaggcccctgggccccagcccagcccatcatcaa

SEQ ID NO: 176864 - DNA, 288 bp, Homo sapiens
atgtaccgggtgtatgtgcatgtgtgcatgtgtgtgcctgtgtgtgggagtatgtgtgtgcgtgtgcatgtgagtgcctgtgtgcgcctgtgtgcacatttctgggagagatgccagcaggggataggataagaataatcagctcatccttttccttttttgctgtggcttcttggaacctcagacacttattttgtgacctaattatgccaatgactctatctttaaatcctgacaaaatggtcttctgtcttttctctatggttttaaactttcttctatatcttg

SEQ ID NO: 176865 - DNA, 391 bp, Homo sapiens
ttaatcctggttaagataattccatttttatgccctagaatagactgtctacattctccaacagaattttattttaaatgttaccctgagaagccctaccagtaaataacttggtgtgcattactttccctgttagctgaactgcacaaaataggggtttattctgccaccaccacctcttttccccttaaaaggctcttcaatgagaacctgagaacctgttgccccaacaggagatgcctggactgtggcccagccataccctcagtgggatttggaggaggagagaagactgtaatgcagtcaaaagagccactgtcgatcttgaaagaacatcaatcatacagatgccacaaagattctcctccccgcttcagttacaagacacacc

SEQ ID NO: 176866 - DNA, 546 bp, Homo sapiens
acctttcttctgttacagtgttaacttatcttccatcatctttttttaaaaaataagctactttctgtgctaattttctaaagaccctgagcaaaagttacaataatgcactttaatgtgggcagtgaactgtcaatatgtaaccacacatttatacagccagaaggacacctttaaaatctattaaatagccacttcgaccaccaaaggagatttaaggggtccaaaaagtggaaaatatgtgcaaagttattcttaacaatccactaaagcaagacatatatcttgacttcttttttatttttttaggaaatccacaatctaattggtatttaactacaacagaagcgtaatagatgaacattcaccactgcccagaccattaagattttagcttaaattaaaagaaaaaaatgctactgtaaactaggaaatatattcagatcagcatccacaaggcttctgagtttatctactttaagactaataacttcaaatctctaatatcagaaaaattattttcaatacataagtcaacctatgtca

SEQ ID NO: 176867 - DNA, 886 bp, Homo sapiens
cggcagtgggattactcagtgttgagagaaacaacacggaaagcccagagcagaggagggagaaggccccattctctcagctttaatctactgcacctcggagggcagagctctaaccagacacgctgcaagcatcagaatcgggatgaacatcgaggtggggaacatttcttatacaggagccatcatctcctggtcgtcctcggagccctgcctggaggactattaccatattatgtacaggcccaactggaacagcatcttctctggctatcttcgctacagcttccaccacgaggagaaggtgcctcgaacgatcagctccgtggtgctggaacatcttgccccttccactctctacttcctgtgcatcagctgtaagaaggctgccttcccttacaggcactactgcaccatgttccacaccctggataagagtccgctggctcctggaagctccctggtagacccccagatctccctttgggtgctgatggccattctgctggcctgcttcacagccgtcttggccttcatctgcctccagttctggtgtgtccgttgccatgagccgcgatggtcttacagggctggccacatggaggaggccaatgggttggtgagatggccagaggaggccccggatcttggtcagagggaggaagacctgcaggggctccccctggtggaaatgccacgcaagaactccagagatggagctgaactggatcccgaagccaaccaggatgcccctgatgcgggtgccttacagagggggggtggtgacccacccgctatactgcctcattgtggggaatgagagtggggaggagagcgcccgcatcatgtagcctaaagctttccacacagtaggtcgtttgtacaa

SEQ ID NO: 176868 - DNA, 1046 bp, Homo sapiens
cggcagtgggattactcagtgttgagagaaacaacacggaaagcccagagcagaggagggagaaggccccattctctcagctttaatctactgcacctcggagggcagagctctaaccagacacgctgcaagcatcaggtaagacatatagatggctcttcttggaaatggaaatggcttcttttcacactctgcttggagaagggccgggcaaatgaatagttaaaaataggggagaatttagaaacggaaacagaggaagaaaaatcaataagggagacggacctggtcctaaaagaatcgggatgaacatcgaggtggggaacatttcttatacaggagccatcatctcctggtcgtcctcggagccctgcctggaggactattaccatattatgtacaggcccaactggaacagcatcttctctggctatcttcgctacagcttccaccacgaggagaaggtgcctcgaacgatcagctccgtggtgctggaacatcttgccccttccactctctacttcctgtgcatcagctgtaagaaggctgccttcccttacaggcactactgcaccatgttccacaccctggataagagtccgctggctcctggaagctccctggtagacccccagatctccctttgggtgctgatggccattctgctggcctgcttcacagccgtcttggccttcatctgcctccagttctggtgtgtccgttgccatgagccgcgatggtcttacagggctggccacatggaggaggccaatgggttggtgagatggccagaggaggccccggatcttggtcagagggaggaagacctgcaggggctccccctggtggaaatgccacgcaagaactccagagatggagctgaactggatcccgaagccaaccaggatgcccctgatgcgggtgccttacagagggggggtggtgacccacccgctatactgcctcattgtggggaatgagagtggggaggagagcgcccgcatcatgtagcctaaagctttccacacagtaggtcgtttgtacaa

SEQ ID NO: 176869 - DNA, 457 bp, Homo sapiens
actgattctcaaccagttcttgccatcatgtcaatggatgctaagaccacagtgacccgaccaggaaccactgcatttcaagcgaactgtagaacaaaagacttgaatatgaaaggaaaacaatttttttttcaagctttatgtttacattattagttctcctactttggtgtaaatcagaaccacctggggaaattatccaaactgctgtttacaggctctacctctcgacctttctcctcagtaggaagagtccaggaatctgcatttacaatgaagcctgaaagtgaatgactaaaactagttgtatacattagttttcataaaaattagcttgaacgtagcagttttttcccaaattaagtcacatacatgattccttcttaaaaggatctccaatacaagggtgtttttatttttatttttttaaatagcttttcttacatttttttcccca

SEQ ID NO: 176870 - DNA, 453 bp, Homo sapiens
  misc_feature (326)..(326): n is a, c, g, or t
tatgggaagacatcagaatgcaagcaggagaccagcttcataaaggcttgcaattcattgtaaggattttagcatctacgctgcaagagatgggaagctgttaagagtattttgaggaatggctggacatgatacatgttttaaaaataattactgcatatgtaaagaggaaaatggtacctttacagttgagaaagctggccaacactaccataaccaagtgatcaaggttaacatcaccaatgatgccatgtggataccatgtattacccgatgcgggcgcgtaaaggcgtaaggttagcgaggcttgctagaaagtcatcaanaaagctattaggtgggtgtagagtttgaagtccttgagagaggattatgatgcgactgtgagtgcgttcgtagtttgagtttgctaggcagaatagtaatgaggatgtaagtccgtgggcgattata

SEQ ID NO: 176871 - DNA, 169 bp, Homo sapiens
gcttgcctgttctgtcaactttgtgctgtcgcctttctcagatccaggtccccactcagaaagataaaattgtcaaggtgcaaatgcaaatacaattgctcttggcatttccagacggctgctgggcaacaccaaagatttgctcccttgttttacaaaaggagggatg

SEQ ID NO: 176872 - DNA, 440 bp, Homo sapiens
atagacagttatatttaatgtccacgctgtcttctaaaggatagcttgatgcagaaatgcttgcttaactgcctgaaaacctgttctttgtgatttctgatttgtctaactggtctgaagttcccaatgactaaaagttgatagtaattgaaagttgggtgcaaatatttaccttagagggacacatatatgacaagagctgcctataagatagttagagaaaatagtaactactcaactaacatatgattttattgtagttaagtggtacagagtgttgtgtggatccagagggagaaaaaggccattggtgttaatggatttggcttttaaaggaacaatggaagtcaaataagcaaaggtaagaagagaaaatgcattttaggcagcagcgcatatgcaaatcatgcagttggatgaacttaggatatgcctaaaga

SEQ ID NO: 176873 - DNA, 581 bp, Homo sapiens
acttttccaaaaaaaaaaggtatacaaatggttattgtgcaacgtggaaagatgttcaccaatattagtcatttaggaaatgaaaatcaaaagcacaatgagttaccagttcacactcactcagaaggcaataatcaaagaaatggacaatagcaagggttgggaaggatatggagatattctcccacattgctggtggaatgtaaaaatggtgaaggtgaaggtggaaaaacggaaatgaagtattgagagggagatggaatataagaagctttctgacagataacccaatggaacaaactgactgactgggcatctgaaatgagtaagaaggagtcaaaaatgagcaaaattatgcttctctgtggatgcaaatcatatctccattacttacacccaggagaacttgtatgaagtagttaacttctctggattttagctttttcatgtgtacaatggggggtttatgcctcatagagttgtagaaactgcaaatgagagacttatgaaaagcctactgaatgaccttatgaataataatatcatcagtggaaggtgatttgaggatgtgatgctgttat

SEQ ID NO: 176874 - DNA, 228 bp, Homo sapiens
ggagtaagctctgaaacccaaatattgtggcagggttaatgataccagtgagctatattgaaggaatgtccatcataaatattcagtaaaaaacattttgtctcaaaataccacagaatttgaaattccaccttttaacatttactattttgatttctgaaaggtttagttcttcaaatttccctaaataaaacataagtaaactaaggacaacaagctcttgcgggg

SEQ ID NO: 176875 - DNA, 972 bp, Homo sapiens
gcttttgtggcacaaagcttagcatctaaggttctttctgacaaagttagtttgaaaacaatggatattgtttagtacagagtcagaaagttaactagttaaaaaactggatacgaagaagagtcatatataatgtaaaggtattttactttttattgatttgcagatgtaatttctagtaaaattacttcaagatgtgaatagggtacttggggtatgaaacaaatttttttaaagaggtcataaacttaacacttgcaggtattcatttattttaataacacacttcaaaagactccctatactggtgattggttttattccctatggaattttgccctgtttttggggggtttcacttctattgtacaaactcaagacatcgaagatatgccctaagatataaagcaattaaactgtatgttagggcctgggtagagcttggaattgttaatcattctattaggatttttcgtctttttttgtttgtttgttttgttttttgtttgaggcagagtcttgctctgtcacccaggctggagtgcaatagcacgatcttggctcactgcaaactctgcctcccgggttcatgccattctcctgcctcagtctcccaagtagctgggactacaggcgcccgccaccacgcccggctaattttttgtatttttagtagggacggggtttcaccgtgttagccaggatgcgtcttgatctcctgacttcgtgatccgcccgcctcagcctcccaaagtgctgggattacaggcgtgagccaccatgcctggccaggttttttcaacattatagagataaaatggttcattgcagctctagttgaagtcgtgaataaagatgagattgaaactaagatatggatttgccaagtatacgaattaaataaactcttgatcttgactaggttttatttgttggtaagctacttttttgtggaagagtattttgatacat

SEQ ID NO: 176876 - DNA, 170 bp, Homo sapiens
ggagcactcagcattgacttcaagagtcctaaaatgtgggaggagttctgggggcctgactgcaagcctcagtcttgagaaggcagaggtgaaggtccttgttagatggtgacagttcagtggtgctgtggcctccatcatgactgatggagagcagctctcctgggttt

SEQ ID NO: 176877 - DNA, 323 bp, Homo sapiens
tttgtttgttggtttgttgtattttactttggtagttcttatatgtaatgtgtctggaaatatgtacccccaagtaatcactgtaattatttttcagtgctcatattttggccaacataacatttacctgttttttagagcttttctatgatgagtttagactccctgtgtaatttagagcagacaaaaattgcaggctggaatatttgctgagaatgaaagctgtagagtcccccacccctagctgtgccactaggctccttgttgagactatttgaaatgtgagcctggcactcttggccaccgtgggagcttgcgtgcca

SEQ ID NO: 176878 - DNA, 415 bp, Homo sapiens
gaatatggggtctctttccttagtatatttatgaaggaataatcgtaaaatatctggtatggtatgatatgtggtcatcatcgttcatcttagcagagttgggatgagttagaaactgaaagaccattttaatactaaggaaagagaccccatattcccagcaagagttgggtgccaacctagttggcaaaaacagatgtaattcctattctttgcttatggcaagagaacagaattagagtattaaaccagcttcagatacttcaaagtggaggcaggagagacagacaccaaatcatcccaagagcactcaattggaaaatggcacatgaaccaaagtccacttcactcctaacactatgagaacaatcataattttatattataattacaaacgcttatggggcatttgcta

SEQ ID NO: 176879 - DNA, 297 bp, Homo sapiens
taagccaagtatatgaatatgtatctccacatttatgggtaccataaataataatgcccatttcatagatgaggaaaccgagggatggagaggtcaaggaacctacccaagatgtctcagcaagaaagtggtagagctgagatgggaacccacacagtttggcatctatgactcttttttttcttttgagatggagtcttgctttgtcacccaggctggagtgcagtggtgcgatcttggctcaccgcaacctctgcttcctgggttcaagcgattctcctgcctcagcctcctgag

SEQ ID NO: 176880 - DNA, 149 bp, Homo sapiens
ggaactgtcctggcagaaacaactcttttaattcaaacttcctcctttcttttcccctttcttcccttctgccactattacattattactgaactactgagatatatcatcaatcataaaattctagggatggatataaagaaatatga

SEQ ID NO: 176881 - DNA, 488 bp, Homo sapiens
gagttgtcctggggagagtcagagcatgtggattttcagcctggcacttccacgccacaagctttgtgaccttgagtattctacaggagtcatctaacatttcattacatgaagaccaggtgatcagaaaggccccttcgtctccagtcttaccagggtccaccagggcctgattcatttgttccagtgatatcactgtggggtgtcagcatcccaatggttcactcatagatccttcaggtctcctccagccaccgcccgtgtaccatgacatgacatggcatgtaccatggcccgatgtcatatgtaccatggtgtggtgtgatgtgtaccatgacatgaccatgttacatgacatgctatgacagtgacctccctcagcctctcccaggcacacagttttaccccttctcctaaagcaggttcgcacgcccatctaaaggcaacttcagtatttgcttttacttctctttaaagattacagcctt

SEQ ID NO: 176882 - DNA, 255 bp, Homo sapiens
attggctcagtcatgttttggcctaaagacagagagctggagtatatgactttcctatcctttcctgctctgtgataccctgattgtcctttgaggtgctgaataaaggaataaagcatctcagcttttccatctataaactaaggatgttaacacttgccactctcccactttgtaactgacctgggaaatgcagctatgtgatctacagctagacatttagagttgaacggaaaccactccccttggacagtt

SEQ ID NO: 176883 - DNA, 172 bp, Homo sapiens
aatgaacacacactattgcaaaaaaaaatcaacaaatcacaatgaaaaacatcaagagaagaaaaaacgtattatcattgcaatcaatgcttaaaaaccattgacaaaatccaaaatttttaatgataaaaactctcaacaaattaggtatagatggaatgtacctcaacac

SEQ ID NO: 176884 - DNA, 349 bp, Homo sapiens
tactaaaccctgtgtggcaggcaaaataatgggctcccccaaaaatgtctacttcctaatgcccagaaccttacctggcaaaataaccttgcagatatgataaagttaaggactgtgagataagggcattatctggattatccaaatgggctcaatctaataatatgcatcctttaaaagctgaaaaactgtccaggctgtggtaagaggcagatgtgactgtgaaagaacagtcagagagatgcaacattgctggctttgaagatggaggaagggatcatgagtcaaggaatatgcgcagcctctagaagctcaaaaaagcaagggaaaagattctctcctagagcct

SEQ ID NO: 176885 - DNA, 543 bp, Homo sapiens
gtaaacccgtattgtagatatggactctagaataggattgcgctgttatcccatagggtaacttgtttccgtatggtcaagttattcggatcaattcgagctatatgctagattacgctttgactggtgaaatcttagcatgtactgctcggaggttgggttctgctccgaggtcagccccaaactgaaatctattaatgcaggtaaggtaatctaggacctgtgggttagtcaggtactgtatgcattaataaattaaagctaccatatggtcttctcgtcttgctgtagttatgccctcctcttcacgggcaggtcaatttcactggttccaagtacgagacagccctcatactgggtcctagctgtttgctgattcaagctttctagataattccaaattgttaccatgcttggctttaagtcacagatttttaagtatcagatttgcgattagttttctaatgagtagtatagtctgatttgaatttgttttatgtgtagtatagctttaaatggttaaatactggcatctattacaac

SEQ ID NO: 176886 - DNA, 229 bp, Homo sapiens
agccactatgcctggccaagaagctttcttttatacaatcacacacagatggcaagtatttgacatgctcttactacaggtatggtgtatttatgaggttttttaatatatgtgttgtgtctgtctcaatgctactgcaggagtctttgttactgaaggagataattggtggaaaaagggtgattttaaatgcattcattcaagatagcaaataatagggacaaaatgg

SEQ ID NO: 176887 - DNA, 325 bp, Homo sapiens
attctgagagctagaaaagggaggaaaatatcttcccagaggtgaggaccacatgtgcaaaggcatagagtgggtggtatttggagaacttgaaagggcccgtgtagctgcagcatatggttcatggaagagatagagatgaagcttagaggtgggatgggaccagatggtagattccagaatgcagttgaagtaagtttggattttattctgcaggtactagggagccattgaaggtttttgaagtaaggaacatattgatcatattttgttttagggagataactctggcaacagagtggagggtagatttcatagatcaggg

SEQ ID NO: 176888 - DNA, 457 bp, Homo sapiens
gaagagggatcagggaccctctggccgaacaaagagctttccctgatggcacaaaaatgaagagggggggtgacaatgagtttcaatgactccaataccagccagggaactggaccttgaggagctgatcgcctgcagatctttaagctggggttagtcgttgtcagtttccagggtagaaagaccttactggttgccaatcgtgaggtccagagtgagcctctagcttcttggacttcctggaaagttggggtgcatttcgagttgacacaatgatgaaaggggtaagtcctagggaccggggctggtcctgggtggccttgcaatagaaaggagagtctcacaccacaaagaaaggaccctcctcccatgcctcctgccagggcctattgtggctgcaaccatgctcctaataacctaacccaagccctaactcgtttgtcatataaacttaaag

SEQ ID NO: 176889 - DNA, 454 bp, Homo sapiens
acacctgcttaccagataacaaaaacacatgccagtaacccaagcctctgcagaggacttagccctgttagtatccacacaatgacccatccattcctttgccctgcagtttttcacgattttcaaagaaggaaaaagatttagattattctgccaacatgcttattagcaaccctaccttcttccaatatgataaagtcactaagtcattcaacacaacataacttttttcactttaaaatgacttttatgttctcttattttttcctaaaaaaaaaccaaaacatttaatcagctcttttaaacacatgaaaatttaatcctctgaggggacacggtatgggtttgtgccagaagagaaaataattcaaacatttatttgccttaactcttaaagatatacatgacaagaatataaataagcctacaaataaataaatgttcttgagtattt

SEQ ID NO: 176890 - DNA, 532 bp, Homo sapiens
aggagactgcagcaccagcatgaactaagaatcctctatgagcttttgagaagccacagctgcagcaggaagaacaaagaatgagggtgggccctttgcttgggtaaaaggtgttgtgttaactgagaaccaaaaggaaacaaaattattcacctgctatttttgcttctggcttcaccatcagagaaactggtcagacaggaaagaacagacggaatgaacggtagaggggcctgctggcataagctctcacctccgaggctagaagactttgcagacttgaccgtggagccagcccctgtaagatctgagaaatcagagatgggagtggagggtgctggagaagggccaggcaactacggagcagttcgaggtcctcacatcacgactttctccagcttgactcataatgatagaatccattaaccaggatccagaggatcatttcgagttcagggagatttgctaggaatggagactttgagttaaaaaagcactagggaggttcatcctacactgatctattgagcca

SEQ ID NO: 176891 - DNA, 934 bp, Homo sapiens
gggggctatagatcaagggaatagcagagtcaggggaggtgtttttagggtgcagagacaagcaaattttaccagagtaaaatgccagttaatgcaaataagatgtaagtgaggccaggtgcggtggctcacacctgtaatcccagcactttgggaggccaaggtgggcggatcacgaggacaagagatcgagactgtcctggccaacatggtgaaaccctgtctctaccaaaaatacaaaaattagctgggcgtggtggcatgcgcctgtagtcccagctacttgggaggctgaggcaggagaatcacctgaactcccgagacggaggttgcagtgaaccaagactgcgccattgcactccagcctagagacagagtgagactctgttaaaaaaaaaaaaaaaaaaaagtaagtgaaggaagagcccaggaagggggttcaacgtggcttggagaagggacctttctttcctcacatgtgtgagcaggggcaggaaggtgagtggaggcacagagacttaaatctggaggggaggaggattaaggtgctgtccacagcaagcttccatctccagaagtgggggcagagtgagagctcttggctgagcgtggggcaccaggattggcaagagagctgggggaaggaccccatgggacaatgttctgaggagtatgaggttcatcccaaattagagctgactggggtacccaagcagcaagagtgtgggactttgtccagccagtctccactgtctgggagtgaaaatagagaagcagatattggagttatttcccagggctgaggctggcaaagcagccatggtgggagttaaagggcccaggcattctaagaagctggcaaggggcatgtgttgggaggccagtaggagactccaaattgagtaggagacagcaggcaaatacagaaacatga

SEQ ID NO: 176892 - DNA, 144 bp, Homo sapiens
tgaagagtgagtgagtttatgtagacagtgtcccgttttacatgttcacagctatgcccatttaccgtccctcaaattgtcctctctttctatatattggtcaaaaaaacataactagtttaaaaatttatattctgatgtaaa

SEQ ID NO: 176893 - DNA, 265 bp, Homo sapiens
cagggtttgctgaccccttcctgggcttgattggcggtggggtttgtagcagaatgccacctcctatctagagccttcggcatctctctctgtccatgtctcctgtagttggtgcgcaggatggcatttgagctcacaacgctaatgcaggcaaatcatgacgtggtgcaggaaaacatttgcgtaattttttctctttagtcccagttcttgtaaaaaaaaaaaaaagaaagaaagaaaaaatataattttttgccatcttttc

SEQ ID NO: 176894 - DNA, 207 bp, Homo sapiens
tttaaatactatttttaagatttttgtcttgacatctgtgagattagcctgtaattttctgtgtgtgtggtcttcgaaatcaatactgtgcctccttgtgaaaaagaattggcatgtttcttaggctctgaagttgtgtgagtagccctgaagctagctgtctgtttcctgaaaatctgataggattgccttcccaaaatcacttct

SEQ ID NO: 176895 - DNA, 149 bp, Homo sapiens
attaaacacctgataaacattagctattaataatgcctcttctgtcttctacctgtatctacctttaaactcttgatagctctaaagtgacactaaactgattcataatatcagtgaagaagaaaaaaagtggagagaagagttttaag

SEQ ID NO: 176896 - DNA, 869 bp, Homo sapiens
tttccttcaagttttattgctatgagattgagaactccaggtcccagcaatctactaactaattccataaaaaataagtatcctcatggaaagcatgtgtttaacccttcttaccacacataattccctttaacagcaatcagcagggaaaagaatctaagaatatggtattaacaatagtatagcttttagatgtctcaaaaatcccttacagaacaaattttttaaaaaatagaagcacaaactgggatattcctatcacaaatctatatcccttgtgaatgccaaaatatgaacaggtgaagacaaaccatcaatagtcccaaaacgtgtatggcatccgaatctgtgcaggaaaaaaggtaaaagtaacaggacatcagacagacatggcaactctgaaatggctaacagaaactcactggagaggtcagcatgccaagataagaacagtagctgaaactgagagaggtctacacaatttcaggtaagtacaagcagtcttcaataaggagtcagtgggcccaaaaaactctaaatactttccagataaagcccgacactgaggacaaattgctgggaaaatccaaattgaccaaaccagagacaatagagagagaagaaagagagggtcaagataaaagtggaagaagtaaatgaagtcagaaaattataaaatgttgccactatattttttttatcagacaaaaacacagaattttaaaatgagagaaaaaaactatcttaaatgactcatttaaaaagtttaagagaaccaattccatgtaaaaacaacagaagcacattagttgaatcccatacaatgctattatatgaaaaaagaaggaccagaatgcagccctaagaaa

SEQ ID NO: 176897 - DNA, 244 bp, Homo sapiens
tgagccactgcatctagcctaagcaatttttaaaaagccttttggtaaccaaagaacaaaaggttattcttccaaggcccaggtgtcccatatgaagcctttcctgattattccagcttccactgccttctagcccttctcctgcaacacttacagtctgtcatgggtttagtactggtcaaagggcagtgctccacattttataagtatgtattttttcatatcccttatcaagcacttacgt

SEQ ID NO: 176898 - DNA, 408 bp, Homo sapiens
tctctagcagggtagggaggggcttgggttgccctggaggggctggcctgtggcctgtgctgggtgaagttcacacctgggtgtgccctcgggaaaggggcctctggggacagggtgaccatcagaaaggctcagggctcccagtgcaccatgctgtcctttgtcccagctctgattctgtgcttactgtgcccaggttcccaggtatggaattgcagggtagcagcatggggacttccaggtgggcccctcctagcaggtgggggtttgagccaatgaagaattcagtctgctgacacaggtctccctccaaaagggcgtgtctctaggacagaggcagcaattccacagccatatcactcactttctagttttttgttttgttttgttttggagagagggtctcgc

SEQ ID NO: 176899 - DNA, 675 bp, Homo sapiens
ctgatcctgtgacattgactactcggctggtctttatagctaggctgatggcctagtagtggacgaagtactggcatcgacggagtatggcgaggtgtcggcttcggtttctctccgtgggaagaaccgcatcttcccagcctcggctgcggggagcttgatgttccaggagagctcccctagagtggggccttgaggggagggggcaggggcttcgtgactggacgggggtcctgtccctaaccttgaccgggccacagtctctgtatctcggggtcaggggccattctgaggaatccaggtccagatctgtaccttataaacgctgcttctctttgggaccgatggagtctccccttggcctgtcaagctcttgtagcttagagaacaggctcagttttgaccattataatgattttcacccttattccgacttaagttcgtcttatggtagagagaaagagcggctgcgtctggactagttagtctcgtcccgttatttatatggaatgtaaagttcttcactctaaaactgtgttttaggttgggcctgatgtcagatttgtatggctctcttttacacttttaaaatgttggggttattccttattatcattttgtgggtgaagtgatggctaccttgtagtacctatttttaagtaaattactttgttg

SEQ ID NO: 176900 - DNA, 435 bp, Homo sapiens
ataaacaggtggcatggacagcttccatccctataaggaccaacaggcgggtttctgaggaccagaaaaatttccagctcgcccaagtatgttgatttggtgcctgggctggtggctccctctgatgtcacaccccagtgcagctccccagggctcctctggaaccttcggggaactccagccaacttctgtgaaccttgtttccaccccaactctccctccagactcacatacctgctcaaacgtgcagatgctgctttcattgaacctcagatgtctcaggcatgtagggtgttttaaatttcagacacctaaaataaagtgtctgaagtttaaatgttaacctgtgccagtaaaaatagcagaagtgcctgaggaaggcctgtggtgggtgggtaagaattgttggcattattgaagaaaaaggaaagagct

SEQ ID NO: 176901 - DNA, 392 bp, Homo sapiens
acgtttttaaataaaattagtgccttaaagccagtgcagagagacagatttgaggtggacttccatttccctgtaagtagacttgcaataaaaagcttttctttcctcaaaaacctgggacttagtaatggcttctagcacattgggcagcaagccccttttgctccataacactgtaggaaataaatttctgttgtttataagctacctagattactgtattttgttatggcagcttaaagggactaagataccataccacgtatttcattagattataaatgtctgcctattcccccaaaagttccctgtgggcagggcctggatctttgtaaccttgatatcaacctagcacagtgcctggctgataggtgttgaatatttccactcta

SEQ ID NO: 176902 - DNA, 854 bp, Homo sapiens
  misc_feature (500)..(500): n is a, c, g, or t
  misc_feature (573)..(573): n is a, c, g, or t
  misc_feature (593)..(593): n is a, c, g, or t
  misc_feature (735)..(735): n is a, c, g, or t
  misc_feature (742)..(742): n is a, c, g, or t
  misc_feature (752)..(752): n is a, c, g, or t
  misc_feature (757)..(759): n is a, c, g, or t
  misc_feature (761)..(761): n is a, c, g, or t
  misc_feature (765)..(766): n is a, c, g, or t
  misc_feature (770)..(771): n is a, c, g, or t
  misc_feature (774)..(774): n is a, c, g, or t
  misc_feature (776)..(776): n is a, c, g, or t
  misc_feature (778)..(778): n is a, c, g, or t
  misc_feature (790)..(792): n is a, c, g, or t
  misc_feature (795)..(795): n is a, c, g, or t
  misc_feature (799)..(799): n is a, c, g, or t
  misc_feature (803)..(803): n is a, c, g, or t
  misc_feature (805)..(805): n is a, c, g, or t
  misc_feature (813)..(813): n is a, c, g, or t
ggctggaagcaacagatggggactgcagaggaggtggtggtatgggatagtgctgcagccaagaacttaacgactgaaagtaactgggatatcttcataattatctgaaggtcacagtgggagaacaaaattaaaagaactgagaagacttacaagagaacctcctaagagtcacccaaacaatcggctgagaatgagaagaggttcaagtgattcttgtgcctcaggctcccaagtagctgggactacagtagctgggccagcacacccagaaagcctcacattgtgcagtggagaagctgagagaagaggaaaagaggagtggcagactcccaccactacccaggaccaactcctgctcctgaatcttctgatgggccccacaaggtgacagtgctggctacaatgctatccagccggtggtggccaagttcctgggggatcctagggctgggcccccgaagccctcctcggggatcccagctctgtgccctctatgnctttacttatactgggcagatggcagcaggtgtctctggctgaaggggataggttcctactgcttcgaaagancaatccgactggtggttggnaagagcctagaagctcctccactctcgaccatcttcgtcccagcagctatatgatagaggaatcatcccttccagagtcaatacgtcaatccccggcaattgtctggactcctgggcgaaatgttcatggtcctggagaggntcaggcncccaagaggncaggnnntngaannctcnncantncngaaaggtggagnnngangaantgancnaatttgancttcgaggacagggaacctcggaatcttacagaagccgcat

SEQ ID NO: 176903 - DNA, 792 bp, Homo sapiens
tttttttttttaagtggagatggggtttcaccatgttggccaggctggtcttgaactcttgacctcaggtgatccaactaccttggcctcccaaagttctgggattacaggggtgcctttaactattttttaaaccaaccacataggagagcaagaccttgattctaggaggctacaagtcctagccctgctgtgactgcagccttactttctctttatcctgaatcaccacgattcttctgtttgtaatattggcagatggtggatgtggtgatcccaagttcattcttggcaacttattttgaaaaatctgctgttttattcttcctgctatactcccatatcccttagttaactcctgtattgaagtacttagcacacatgacttgaatagggattttgtcataatcatttgtgtttccttagcatctagcacatggtcacttggaaaatatttgttgacacatgatgatcactttccaatgctgagatggtgtgattttgtgatttctccaatgaccttgacctagattgtgatactagtggtagtcttgtataggtccctctctgtgttgttcttcttcgtaggtgctttgttctcaggctctggaccattctcttgttttgggacattccagggaacaggagagaaaaatttgcatttaaaacaaaaggagtatgttacatcgatgttcctcattgccaggatcactggaatgttccagttgctatcaggatgaattcactgttggtaacagatgccagggactcattatatttttgttattcttc

SEQ ID NO: 176904 - DNA, 317 bp, Homo sapiens
tttttcaatgttaactatcctaccaagttttctacttcttattgcagttttcataacttaagtttattagaaaagcatccacctcctctttttaaaaaatatgttgattagagttgtatgaggtatctttttatcacttaaaaaatcatattgatatctgtggttatgtctcctttctcattctggatcaggcagtcttacatggagggaaatcttgaaaaatgtagattccacatggccatttattttctaatatggatgacatagcaactcagggaagcagacttctttccaaacattgaaataattaaaacctt

SEQ ID NO: 176905 - DNA, 746 bp, Homo sapiens
tccatgtttgccccatacagagtattttccacacagcagccagtgtaactgtttacatttcaagtcatagcatgtttcctctctgttcaaaattccaatggcttccccaaagcccttccatgcacaaggccctgcctatctggtcatctgcctcctctctgacttcatttcacctttctactctcttggctcttccttcgctctctatagttactctgtatgggggatctcgagatcccccatacagagtattttgttttcaattagggagatagttggtattaggattaggattgttgtgaagtatagtacggatgctacttgtccaatgatggtaaaagggtagcttactggttgtcctccgattcaggttagaatgaggaggtctgcggctaggagtcaataaagtgattggcttagtgggcgaaatattatgctttgttgtttggatatatggaggatggggattattgctaggatgaggatggatagtaatagggcaaggacgcctcctactctgtatgggggatctctatctgttgtttacaaagatactctttggcattctgttttcctttggccttggggactcttgttactcctgatatccctcccacctctctgatgactgtctgctccctatggcccgttatacgcaactcgtcgcccagcccacatccctaatgctcgcgactccctgatggatgcagatcttgcgtgatcctcttcttacctctgtatgggga

SEQ ID NO: 176906 - DNA, 521 bp, Homo sapiens
aaatcatcatgagttgaaatttaatgaagattaacatcaagacttagattcattagattgaaataatcaaattacgtgagtactggattgggaagatctaggtggacagggttttagttgaccataaacttagtatgagccaattgtgtgttaagactcagatacaggaaagtactggtactactgggctgcctgtttgaaataaaattgctaaggcattttgtaggctgttgataaactcagccacatcccacaactgagatggtggaaggttttaaaaacaacagttaaaaaaaatactgggttgtttaatctgaggagaaagtaagtggagacatccctgcctagagatggtagaaggctgtcctatgggattagccgtattgctccagagggaaggcctagtatatagtgggtggaaatcaggagatgtatttcagtttaaaatgacctacttatgatgtaacagctcttggatttatgcatctcttattatggaatgtattcagataaagcaggat

SEQ ID NO: 176907 - DNA, 307 bp, Homo sapiens
  misc_feature (17)..(17): n is a, c, g, or t
cagtcacctcggccctnctttctcttagaatagtgcaggggacatcattattcctcagtcagtagtggtcagtattataacgagatccttggcatctgtggatgtaacaagtttcgcaattctctagggacccctctggtccatgacaggtaatggtttgttgttttgctgagacaaaagttaactgctctcatggaatgatattatgacaatttgaaaacacacacatacacttctttgtgaaaagtggccaccgcgcccggccagcttttggcgaaccttctaagagacgtaggtcccgagctta

SEQ ID NO: 176908 - DNA, 316 bp, Homo sapiens
ctgtgtgcagactccacagagggggaagagccaagctcttttcttttgcagctgggaggtgggtagcccagggcaagttttcaagcctgtcatgctgtctgcctggaaacggattgggggctgttgcagggggcacagtgggagtgaaaccagcccttcggtttgcatgggagctgggtgaggcctgtgactgccggctttcccccacttccctgacaacctgcagagacagccataatcctcctagagataggcagcaacacaataatagtgggagatttcaatactccactgacagcactagaccagccatcaa

SEQ ID NO: 176909 - DNA, 652 bp, Homo sapiens
agaatccggtaccacatttatcaccatctccttctggagttttcagatgttagaaaaatgacaactgttgcgcagcggaatggatgtttttgctgccccgactcagaggaagggcatgtgtatgcactgttagaagccaacctcccacccaagggcctggctgtgtgctttcccaggggctggagcatccaggggcttttctggagttccaggatgggactctcgttctccctgtccagcatatgacccggtgccagcatgaccaggcaaagccttatgggccaaggtgagtagagctgatgcctgctacccttgaaggtatcttccctgcttttctcacggttctccaagcctggcatactaaggaagcctatggtcacaagcccatgatcaacctgaccctcaagctctgaaacgttgagttcctcagtaaagcatgcttgggtaggacctgcagcaggcatatagcactaggctctgggggcagtgcctagtgctattgtgccctcagtgtgaggttcattcagctctaaatcccattctttggactttgcccaagttccaatccaggctagcagctgtcccccatgtttcacagatggggacaccaagagctaagggcagtaatgacttgccagggtattgaaatggg

SEQ ID NO: 176910 - DNA, 364 bp, Homo sapiens
attcattgttattccactcaaattaggaaaggctgactgctgacatgggggaagggaggttttgccttggcaactagtcttgcctggcaaggcagccatcacggttggaatgtccaatgcctgcagagaaagcttcagaagaggcttgttcagctggaaggccaaagggccaactctccacccccagcactgtatcagaggacagcggaatggggctctctcttccagacatctgtagtggctgccctgcacattctgatgttgaaacagcgggacatggtgtctgaaaacacctagccacactctaacggatattaattcgattcccctgagaaagcaagtcagagctccctactggggtgtg

SEQ ID NO: 176911 - DNA, 717 bp, Homo sapiens
gagtgggggcaacgcagtactgcagaaatgccatagaagctacctttgcagtaggcctggactttagccagagcctgtagatacagcaaggctaccttctactacagtatgtaatttacaactgtgaaaccacagcatctgcactggaatccttccaggtgttaaaccaggagtactttattacagaggcagcacaacaaagtgctgatgtatgtggaatcagaagtcagacagactagggttcaaatccaggccctgacacttatcagctatttgatccaaactttggaccacgtatctactctgtgcctcagcagcctcctttataaaatgagatcaatgcccacttcacagggttatgaagagtcaatgacatgatacatttatcatacatagcaccgtgcctggcacatacaaagtattaaatggatagtaaccaacaatcaaaattaaacgaatcaggccgggcacagtgcctcacacctgtaatcccagcactttgggaggccaaggcgggcaaatcacttgaggtcaggagatcgagaccagcctggccaacatggtgaaaccccgtctctactaaaaatacaaaaattagctgggcgtggtggcgtgcacctgtaatcccagctactcgggaggctgagacaggagaatcacttgaacccgggaggcggaggctgcagtgagccaagatcatgccactgcattccagcc

SEQ ID NO: 176912 - DNA, 381 bp, Homo sapiens
ggtcaggcactgaagcctggtcaggcactgaagctggtcaggcactgaagcctggtcaggcaccgtgcctggcacatacaaagtattaaatggatagtaaccaacaatcaaaattaaacgaatcaggccgggcacagtgcctcacacctgtaatcccagcactttgggaggccaaggcgggcaaatcacttgaggtcaggagatcgagaccagcctggccaacatggtgaaaccccgtctctactaaaaatacaaaaattagctgggcgtggtggcgtgcacctgtaatcccagctactcgggaggctgagacaggagaatcacttgaacccgggaggcggaggctgcagtgagccaagatcatgccactgcattccagcc

SEQ ID NO: 176913 - DNA, 469 bp, Homo sapiens
acagctataccaggaaacagcttatcaccaggaaacagcgtatacctgggaatcagactgtaccagggaaccagtgtacaaccacataaaccagtgtatgaccagcgtaataacctttagatcactcataccagtgctgtcataaagccatcattactgatagaaaaaacaatgcacatttcaagtgtttatgatagtggttgataatatcatcttggagtagaagaacagcaaacctcctatgtcaaacagagcagcacagaatgacaggtctctccatgcaaaagctctgtatggactcctcagcaaacctggagatccaggaagagattcaagctaaacgattgactttttggctatcagttaaggagttcatcaaatgcctgagcccctgtcatatgctggactctaccttgtgttaggtatacattttctgagccttaacaaaaagattcttccttaatttatt

SEQ ID NO: 176914 - DNA, 466 bp, Homo sapiens
aggtgagggggtaggggagtgctgtaacagatggctttagattgcctcaaatagggttgtaaatttgactataagatgagtcagttttctgtgttcatttcatgaccatgcatggcacctctaaccttaagtttctctcaaatgctgtcataaagccatcattactgatagaaaaaacaatgcacatttcaagtgtttatgatagtggttgataatatcatcttggagtagaagaacagcaaacctcctatgtcaaacagagcagcacagaatgacaggtctctccatgcaaaagctctgtatggactcctcagcaaacctggagatccaggaagagattcaagctaaacgattgactttttggctatcagttaaggagttcatcaaatgcctgagcccctgtcatatgctggactctaccttgtgttaggtatacatgacacctgggatcctctagaacgccaca

SEQ ID NO: 176915 - DNA, 289 bp, Homo sapiens
agcttatgcagggaaactgccagttttaaagccatcagatcttgtgagactcatttactatcatgagaacagtgcaggaaagacccgcccccataattcaatcacctctcaccaggttcctctcatgaaacacgggaattatgggagttacaattcaagatgaaatttgtgtggggacatagccaaaccatatcaatagtggcattaaaacttgtgtggttcttaactaaccaccttccagtgggaaagctgatggaattaacacaattgtgggctgggatcttttctg

SEQ ID NO: 176916 - DNA, 458 bp, Homo sapiens
tatttaggcattcctcaaatcaataactaccactgttttgaatggcatcagaatgtaagctctatatatatgtaaggactttgtcttctttaccccaacgaaaagtcccacacatatggcaggctcttaataaatttgttaaaaaacctgtatgatgaatcagatgctttacacatgatgattctaaccttatacaacccttgcaagcaaacatcccctggttactcatcaggaaacagacacaaggaagttaaatagggcctggtgcggtggctcacgcctgtaatcccagcactttgggaggccaaggcaggcagatcctttgagcctaggagtttgaggccagtctgggcaacatggcaaaaccccaactatacaaaaaaatacaaaaattaggcatggtggcacacaactgtagtcccaagctaaggcatgaggatcacctgagcccaggctgg

SEQ ID NO: 176917 - DNA, 256 bp, Homo sapiens
aatctaaagggatgctcattaaggccatgcagatatccccctaccacccctagatttacatcccattaatgattctggcctgaactattctttttttatagactggtcaacacctcattccataaaatggaaaaagtgttcctgcaactattctttattctgatagttgcaaaatgattattttccaaacctagcactctcagaggagaactcttttaatgccaaaaatatggagatgggattggctcttgccaac

SEQ ID NO: 176918 - DNA, 544 bp, Homo sapiens
ctgtggatccttaccctccagctccttgggttgtggcaccaaaaacgtggctggatctggtacccaagctaatgtggtagaggaaaataattagtgaaaaccatcagcacactccctctgttctggcttctttgtgcattttaacagtggagtctggaaataatagtcccacttcagctatttaacccaagactgactggaatgctaggaatgtcaaatcaggtagggcagaattttgtcatcagagcaagcaaatgtcaggtgaactggaagacaaagcaggacgtaggtaagaatgcagattctgagtcaaatcagttgggttcaaatactggcttcatttgctagctgtatgaacttggactagctgattaaccactttgtaccttgtttcttcatctatatagtaggtgttattatagaacatacattataggattattgtgaaaatgaaaacaaaataatctataaattagtgatagatcggaggtcatcagtaaattgatgaatggataagagtagatgcctgattgcagaggactga

SEQ ID NO: 176919 - DNA, 439 bp, Homo sapiens
tacaaaattacactcattgcttagatgctgggctcacacctagacaaatggtatgtttttaaaaatacatgcaccagagttgcttgaatctctcaattgcttttcagcagtttataaaacagtaaaagaattaaagactctaatgtggtttaatgtcagggattaaattagaaatgctaaataaagaaacctgctcttattcaaagaacatgcatttgcatgtaagattccagcataactgttactaagtcttttatttccatctcatctaaaatgacaaagaatggaaaagctcaggcaatttgtccaattaaattataatatgggagagacatggtggctcatgcctgtaattccattttgggaggccaaggtgggatgatagcttgaggtcaagagttcgagaccagcctaggcaacatagtgagacccatctcta

SEQ ID NO: 176920 - DNA, 660 bp, Homo sapiens
aacatgtaatgtaaacgttgtcggaaaaaaggggaattctttttacctttaacttttctaatttaaattatggtatggcagtaattccatagcaaaattgctttgctaacaggtgaattctcttttgttctttcaattattctacccatttatttagaatatgctgaaatatatatctacttctatacttgtagagttttaaacagtaagtgttaatagcctctcacagactattattctaagtgaagtaattcaggaatggaaaaccaagcattgtatattttcactcataagtgggtgataagctttgaggatgcaaagacataaaaatgacacaatggactttggggactcaggggaaaagggtgggaagggggtgagggataaaagactacaaattgggtgcagtatatactgctcaggtgatgggtgcatcagaatctcacaaatcaccactaaagaacttactcatgtaaccaaacaccacttgttccccaataacctatggaaataaaaatattttaaaaagtaaagtatactgttgaagaaaaataaataaataaatagcctctcacattaaataaaattcccagtgaagaacagtaagtttaaatgaaagataatagaaaaaaatttttaaatatacttgtttcataaacc

SEQ ID NO: 176921 - DNA, 430 bp, Homo sapiens
attgctaacattatgaggtatttcttctgaaaaagcatccagaggttgaagaaaaacatactgagtatattatttgaaagtgtaatgaacatattaaacttatttaaaaataagtttaccttttggttcctgatttttaaaataacctatataataaaatggttccaggattcattatctggttcacttctcaacacaataaactctctgaacacttgaagtatggaactctaagttagactaacacctgcctcacactagataaaataaacttttatgtttccgcattatatttataaactggaatatatccttatatcttaaaaatattataagattaagtcatgtttaatttcaggtttactatgacctacttagcaatccccttctgcaataagcttttatttagaaattttcccttagaatgaaa

SEQ ID NO: 176922 - DNA, 195 bp, Homo sapiens
gaagtttatatggctttattttttgcacagagtagttattcaatatacgctgactgaatatattttaaaacttcagggagtaattaaatcagccaaagtaaatttagtctacacatacatttatagaatgtacaccatctccagcctcagacaactgcactcaagttgcccctttcccgagccactttctggcta

SEQ ID NO: 176923 - DNA, 493 bp, Homo sapiens
ggtccgctctagagtatccccacgttgacacttcagaacagtgttttttcacattctagtcatataacggactagtaagctacgatcagcattttgtgtacatgtacacaataatagaataaaatcagcaattgtatcacagagcatcatatataatgtaaaaggtatttctctgtgaggcaaggtcaaagacgtttgaaaaacattagtgaaggagacagcattcaaataattacacaaatggacatatggttaccaaccattcattattaagggaaaggtaccatggcacctggtgccatggcagcatctaacaggtaaccaattttagtctggggagagaggaagagggaagagatcctggaaactcagagatagtaggtaaaagtgaggggaaaggagttttccggacagaatagcacatgcaaatgggctgaggtttcgagattttttttttgagatggagttttgctcttgttgcccaggctggagt

SEQ ID NO: 176924 - DNA, 517 bp, Homo sapiens
caacttgggcattaattctattctaataaacaggagtttaaaacatttttattgaaggtttggaactggacacacaacttcttccctgcctcctcagacccagagatcagctaagggtgacccccgtggcaatggcagtgatttcaccatccccaaactgggagaagttggagggaggtaggaaagcttggaaagggtattaggagatgatctcctcctgaacagatgccacagtgaaattcagccatccagccatgcctgaaatgctcatgggccccttgtactttacccccagcacatggccctcctgtccctctcaggggtcccagagttcccaaggaccagcttcattgacacagccaagtcctcaagtctcaagcagctttcttagacataattgcttggggtggatgttaagtcacatggtttgggaggcctttttccttgctcaacagcagatgcccctgtttagagagaggtagcatctgtcatcaaccagtgaggccagatgtatctg

SEQ ID NO: 176925 - DNA, 369 bp, Homo sapiens
aaagtaatggcattaagagatggggcctttgggagacagttagtgcccttataaaagaggccctcaaaagctcagtagtcccttccaccatgtgaggacacaggaagaaagttttgcttgtaagccagaaagtgagtgctccccaggcaccgaatctgccttaatattagactttccagcttccagaactatgagcaataaacttctgttgtttgtaagctccccagtttatgggatttgttatagcagcatggagaggctaagatgccatccttaaagggaggacgaggagagggcgcttcctcccctgctgagccccagctctgggttgtcaggtagcagagcatttagggagaggagctcattaag

SEQ ID NO: 176926 - DNA, 467 bp, Homo sapiens
aaccatctctttagggaatgagtaattcaggtcttgttaggaacaatggagactgggacagtcttggcatggtaatgactgttgcctaatcattttctgacaagcaatcaaaattattttagttcagcatactccctcatgagacatattgttctgcacaatcgattccttctagcattttggaggggtgtgagtatgtgtgtgcacacatgtttgtgtgcacacatgtttgtgtgcatgtgtgtgccagccaaaaacagaccttggcagtgatccacactcccatctttgaactaagaaactgacatacagaaaaatcaaaggtttgaatgaatggtcagggaattggtagacaacttagctgcaaaacataccccaggtgctcctgtgagaagggagaaatgcaggactagcaggaataagtgccataaacctcaccatagcttacatttgcacagctcacccca

SEQ ID NO: 176927 - DNA, 542 bp, Homo sapiens
gaggaaaggcagtgctagctggtagacaaactcaagttctaatcatactctgacacctatgagtcagttatatgacgttgggcaaaataaaatctttctctagccttattctcatcagtaaaacgaggataattgctctttgtcctcatcgcaggccttttgggtttgtttgcttgtttaagaatcaaatacatgatttcagggggaaaaacggctttgcaaactgttaagtgctataggaacacgaacatattgaacatacatttattaaatccctcttactcatctaccaccgctattactaataaatatgaccatttactcgcttgaaacccatgctggaatttgacatgcaaatatcctgagtgttgctcatttgcattggaaaaagggaaagaggtgggaggccttttgaagccttttaaaaattgagctaaggggatgaattcttatcactgggcccaagatataattgattttctacacaatggctcacaggtgctacatttaacaccctgagtagtaggaggatggaaacgtat

SEQ ID NO: 176928 - DNA, 407 bp, Homo sapiens
ataggaaacaccagaggaggacagcaaggactgtagttttttttactgtggataagcccaactccctactgtggcattgaatcttggccaggcaatagtttgattgctgatttccttagaagggaaggattcttgtgtaggattaaagtaaaagtaattccatgacaacttgttactgaggaagacagccaaatacatatttcatgagtaagcaacagtcattttggtggaatatggtgtgttacgtaaagcttggtgctagattaatgcccaggtgaccacttggaggacaatcagtgtagccctgtgaaagatacaaagtattgcctgcctaagtctcagtttctttgtctgtaaaatgtgtgtttaagtggagctgtgagacaatgagaatatatgtaaggtgc

SEQ ID NO: 176929 - DNA, 415 bp, Homo sapiens
tagacgggagagctggaggcactgttacgaacagatctgtcaggaccacaatcaccagtgttgattcaaggacttcactggcccagaaataccttcctttgaatcttactggacataatctatccctctaaagtggactcaactcaccattcaagtcactcccagggtcaggatgaagaaattaatttcatgttttttgctagggtgtgcatacttcttttaccaagaaggctatgagtctccctgggttaccttagtcagaaagtgtactttgcttgccctgcctttgaggatcagtcatgaattttcaaagccctgtttccaggcaactgatattttggcagaatggtttctatccatatctctagcttcacttcctatgaggaagcagacatttcaggcatggaaggaggga

SEQ ID NO: 176930 - DNA, 361 bp, Homo sapiens
tgctgggattacacgtgtgagccaccgcacccagcccagctcatgttttatacaaatgttgaggtgttttggctgtacttaaacaggaggaatagaaaaaagtaccagttcattcctttttttattcaattgtttggatataccacagtttgtgcattcattaactaaatgaaggtctacatttaggcagtttgtaattttgggcaatgatgaataaagatgctataatcttttttttttttgagaaggagttttggtcttgtcacccaggctggagttcaatggcacaatcttggctcactgcaatctccgcctcccgggttcaagtgattctcctgcctcagcctcctgggattacagg

SEQ ID NO: 176931 - DNA, 256 bp, Homo sapiens
ctgccagattactaagtctagtctatctcttgggtgtaaatacattgatcaagctcatagaaactcatacattaaaaacccaaccaggtgcagtggctcatacccgtaaatcccaacacttttggaggctgagacaggaggatcacttgaacccaggagtttgagaccagcctgggcaacatagtgagacccccatctgtgaaaaaaaaaaacctgcaaaaaacctaatatataatctgtcatgagattacagtta

SEQ ID NO: 176932 - DNA, 555 bp, Homo sapiens
agacatatttctgtaagcgtacacatccttattttgtgcagacttttctttcatgctcctgtttcttttccttttgcttgtagccagactttttggactcagtgtctatttctcactagtgatgtggattctgcagtttgttttctaccctagctttctactaaagttgttcttttcatggttgtcactgatttcctacctgttttcattggttgtttgcttagttttcattttcctggagctttctacagtgatttaagaccattgatttcccttttctttgtaataacctctcattagctccatgtcccagttctgtttcttctattcagtatgtttgttttttattgatttctctcttttctccacttagttgtagacatttcttttttctttttttgagacggagtctcgctctgtcgcccaggctgtagtgcaatggcgtgattttggctcactgcaacctctgccttccgggttcaagtgattctcctgcctcagcctcctgagtagctgggattataggtgcaccaccatgcccagctaatctttgta

SEQ ID NO: 176933 - DNA, 556 bp, Homo sapiens
aactcttaatggcacacaattcgcatttactttcaggtgtctgtagattagttgagctcagctgggtagctctgggttgctggttgggcccacatctgttccacttattgctcagcctcctaggaccagtggtctaggtatgcacactcttcttgtggagatgcaagaggcccaagagacaaatggaaacaaccaaagcttgggctcagaactgacacatgatcccttcaccatctattggcctaaacgaggctcatggaccagcccaaagccaagggacttccagctttggcaaagggaactaaagagttacacagcaaagggtgtggacatgagaagaggtgaagaattagaatgatgactcaaccaacttcttaaactattacaaaacaacacctaaaaggtagtttgatacttgccacagctgacactactccttaatcacagtgacagccatgtacatgttctcttcctcaaaagctaaagttccataaggatgacttctacatctgagatgagccttttaaccccatccactctcataactcaatgtagt

SEQ ID NO: 176934 - DNA, 463 bp, Homo sapiens
tcccaagtggctgggaccacagagtgcaacatgcctggctggatcatttgttctatagaatgtctgccaatttgaattattctgatactttctcataattggaatgaagttatggatttttggcaagaataccacagaaatgatgttgtggtgtcctcagggcatcatactaaggggttgataatctctgtgtcttattattgatatttactttgattgctttggttaagtgggtgtctgccatgttttttactataaagttaccatttttccctttgtagttagtatgtatcttagggaaatatgttgaaactatgcaaaatctattctcaaactttcagccacaaatttttgcatccatgagagtaccttatctgtctgtgacagttactattgtggtggttgcctaatggcgattatggttttttatctaatacatttatttaaattctactatgaggaa

SEQ ID NO: 176935 - DNA, 557 bp, Homo sapiens
tgttaggggaaggaaggagaaagcctgagggaagcaggaggagagagctgggagaaggttctggagtgaaagtcttgccagccagtggacctaggctggacagagcagatgctgggttttgaaagagattgatgacaaccccttcactcccggcagcattgggaccaggcgacctgtggccttaatcagcctcttttaggggacagagagcttatggaggagagtcaggacataaaagaaagacacttggatgccagaaaagattcgtatgaaaacatttagaggaatgcagtggaaaagcaggttaatccattgtctggtatgcacctgtgtatatggtactatgtaaagtttgatgcatcctgcttcttgtaactaatggtttattgtgtatcatttcccctgttcattcagtgctaatttgtaagattgtgtaatcagaccctaataggtttgggcctttgatgaataacttttaaaggaccttctaatttttaaatgcttttatttttgccattgaattatggctatatcttcttccatagccagccccagca

SEQ ID NO: 176936 - DNA, 406 bp, Homo sapiens
agccacatgcgttctctctcataccattaacagacacactcagtacagtaccacattttattttcttcatagcacttctcagtatttgagactaattacgagaaatgcatttattttgtgtttctcaccgttgaaatattgttccataagggcaggagcttggtctctctggttcaccactgaatccttacacctaaaacactccttggcaaattaagcacgtgattcatatctttggataaattttgaaaagaatgagatagatgtgtataagctaaaatggaaagatgcctaagatcaaccacaaagtgacaaaatcaaatcacgatataaattaaatgatcccattatcataaaaatggatataagtacatacacatacatagaaatagcaaaggtataccca

SEQ ID NO: 176937 - DNA, 773 bp, Homo sapiens
ttggggttgttatgaggataatacgtgagaatactaatacaaatgcttagaataaattactattataatgactattctataaataaagaaactaaggcttagaaaagttaagcaacttgtctatcatataaagcaggtaatagtagagcagggattaaaaaaaccaaaccaggtactacatctcactccaaagcctgtatttccactatgttgtactgtctcctaccatgtcttgtcataataaatccacaaaaatttaaactcacatgaaagatatatctcagaagagttagtttacacagtgagaacagcttatttagatttcatattttaacacaggttttttgtggaatgttaaaaattataaagcaataagtttaatgctaaatattcaaactatataaatgtaaaaaacataagtggcttctattctattccctgattctactcccctatgtgtgttctcatctactgtaataaatacttcttctaattagccacatgagctaatgtgtcccttatgtgaaaaatggggataatgatgccatttgaagtttctaagattaaaaatatgaatacaaagcacttagcagagtgcccaacacgtaggcacccaacaaatgttacatgtcattacaagaaagtcggaaaaaactctccaatttcctcatcttttctttttaaatttttttttgaggcagggtcttgttctgtcacccaggctgaagtgcagagttcacagcaacctcaaactcatgggttcaagtgatcct

SEQ ID NO: 176938 - DNA, 666 bp, Homo sapiens
gtgcagagacctagcggacagttttccggtggcagcaatgctcatttcccggacacagatggtttttggcccctgaagaactctttaatccctgcgttttgtagcgctcgttctctggctttcactcctgggtcgaaaaaggtcaccaactcctactaaatcttaaacattaacagcaactgaagcctcatcttcagacctaagagaagatgaaaatcagaagaagctgcattcacaagacctgtgtccagaaaattaaactattcaaccccctagtcccagggactattgcagaagaagtgggtgtttggacttgtaaggacctactttaagagagaaagttagttcagtatttctctataaacagtggttttgttttgttttgttttgttttgttttgttttgacaggaactagctctgtcacctgggttggaatgcagtggcatgatcctggctcactgcaacctccatctcccagacacaagcgatcctgccacctcagcctcctgagtagctgggactgcaggtgtgtaccaccatgcctggctaatttttgtattttttgtagagacagtgtttcatcacattgccaaggctagtctcaaactcctgagatcaaggaatccacccacctatgcctctcaaagtactgagattacagatgt

SEQ ID NO: 176939 - DNA, 797 bp, Homo sapiens
gagggcctgccctgagtcacctcattagcatacacatcaattgtgactggggtccatcatggataacaaagatacccatatcactcaagaaattccaagagttaaaatgttacctcccaggaaatggggatgccagactaattcttcattacacaatgataaatacacaaatttaacaactttcttacagagcagaaaaacatttagctctttggatttctgtgtgtgaattttgaaatgaaatgagaaaaagtggatggccatagtttataaaatatctataaccttcattctccactacctttattaaaatagataaaacccaataccatactattcatttattagacttccacttttttaaaaaaggaggaattcctttctgctgccaaaccattaacataataataataatgtgagcaatatatttttgtctgaatcaaaagcttgaaaaatgaaagcataaactataagcttaagaatcaatgagaactcaaaattgatcaaagacttgaatttaatagctaaaaccataaacttttcagacaaaaaacttagagggataatcttcatgtccctggatttggtaatgagttttcagatataataccaaaagtacaggcaacaacaacaaaagtagattaattgaacttatttaaaaatttttgtgcatcaaagattattatcaagagagtaaaaagacaacccatagaatgatagaaaaattttgcaaatcatatatctaatattggtttaatattgagaataaatgactcatacccttccaaaacaaaaac

SEQ ID NO: 176940 - DNA, 192 bp, Homo sapiens
ccatattacagaaatggcctctttttaaaatctgtaaataagcttaggctccataaggttaggggactgaggctgccatgtctaacagcctcactgcagcgcctggctcataagaagcactcaatgaatactccctgaatgaagaaatgttaagcttttattgagtgctgaccatgcaccaggcacagagta

SEQ ID NO: 176941 - DNA, 450 bp, Homo sapiens
ctgtagctagaacaaagttgacgggtgagacgttattttgtaaatattttttacacctcatagtcattcaaataggtacacgtcctttttgactcgttaagaaaaaaatagaaacaaaaaatggcatgtcacatgcaatgaacaaatactatgagaattattatgcaagtgtagaatcaatgaatacttaaggaatgaaaggagattgtgattaactgcatttcaggtcattacttttgaagaaaaaaaggataataatcctagtgtcttctggtaatctcacattcgctaaattcattttggcagttgttaatgtcaaaaatgttactgtataatttatggaaggtatgtgggtagaaggtggaagttgcaaacccatttcttgaaaatattttactaaaatgttttgcattgcatcttgttactttttatttctaatatgtgtttcat

SEQ ID NO: 176942 - DNA, 722 bp, Homo sapiens
actttctaaatgtttccatcacgtcatggatatatgaaaattcagcagcacttttggaggccaagctgggaggattctttgagcccaggagttggagaccaatctgggcaacatagggagacccccccatctctaaaattaaaaattaatccagatgtggtgacatgcatctgtagtcccagctacttgggaggctgacatgggcgaatcccttaagcccaggactttgaggctgcactaagccatggtcacgccactgcactccagccagggcagtagagtgagatcctgtctcaaaaaaaataaaatgctaggcatggtggctgatgcctgcaatcccagctcttttggagactgaagcaggtgggtagcttgagctcaggagtttgagactagcctgggcaacgtggtgaaaacctgtctctacaaaaaatacaaaaattagcctgtgtcccacatgcctgtagtaccagctacttgggaggctgaggcagtaggatggcttgagccctggaggtcgaggctgaagtgagccatgatcatgtcactgcactccagcctgggtaacagagcgaaatcctatcttaaacacacacacacacacagagtcattgtctggaatttagcttttagttcattgaaaattgaattttaaatatacccacttaagtctgctagttttccactgctagttttatcagttttctctaagtcctgactaa

SEQ ID NO: 176943 - DNA, 129 bp, Homo sapiens
gcagcaccgagcttaatagtctggagctatttattaagtaaaaggtcctcccaggtaaatctaaaagtagcatacaacaaaaccaatgtcttgtaatgtaagtccagggcaccgaagttattctcaaaa

SEQ ID NO: 176944 - DNA, 274 bp, Homo sapiens
atctatagtggatctggaggactctacttggttgtcagtgttcctttctgttgtacagggttcgttggaattgggaaaaaccctgggcggttcaaatccatcagcaaattcctgttgcttctttatctagtaaaaaatgattttttaaaagatatcactgagtatagtgatactgttgtagtaaaattggtttaatcacttagcaggtttaacaaatagatacattccattgttaaattatagtatgatggtatcaggcaccacaatagtattc

SEQ ID NO: 176945 - DNA, 523 bp, Homo sapiens
tcagtgatctacctgcctcatatcaaagtggtgggattacaggcatgagccactgcgcctggcccaatacttagtttttaaagaaattacaaaattaattattggctgtatcattttacattactaccatcaaagtatgagaagtctagttttcccatattctcaccagcatttggtattgtcacttcaaaataattattttagatgttctaatataactgaacaaaagtctggctgctcactgcttgaggaccaaaacatgagaaagaaagagtggtgaaaggaaagcaactttattgaaatgctagcagttggaataggctaggcttatgtctccaaaagaccatttcaagtgttaggctgagggaaggggtttaaaaagaggagacttggtatgggaaacataagagtaacacaggatgcaggttcctatgtgttgttccaaggactatctcgaattattgtctgcctggagtacaggctggtgccattttatttgctgctgagttacagattatcagtt

SEQ ID NO: 176946 - DNA, 452 bp, Homo sapiens
tccaattattgtgctgctaagcgtgatcacctgatgctgctatcttaatctttatactgcaccaatcatttcattccctatgtaaatacctttaatgaatgtcagccttcatactgaagtccgtattacttagctcgctattcaaagtcttccacaagtgattgcaacttacttttttagtctcatgtagcattatcctgacacatatgctctaagcccttgccaaattgcctttggctgagtactgatctgcacacatgcatgaaaaactactggaggcctgggaaaaaccagcagaagagtaagtatatgtcccccaagtttggatactgtctccaaaaggagaggaaagagaggaggggacagaaaaaaaaatccgaggaaatgactgaaaatttcccaaactgatggagatataaacctgcaaacccaacaagctcaatgaaccacaa

SEQ ID NO: 176947 - DNA, 277 bp, Homo sapiens
ttgagagcttgccattcattgaaactggaaggttcaatgacgcaacagagagttgcaggagatggggtgaaaacaggacacggcagacactgtgggataaccagttatttctaatccccttcaccagtgctgccttccacttgatttctcagccctgatggcagctagggggtgtccaagacagagttctagccaatcagacataaacagaaatttggctgggtgccgttgctcacgcctgtaatcccagcactttgggaggccaaggtaggtggat

SEQ ID NO: 176948 - DNA, 291 bp, Homo sapiens
tcatagaccagtgaggtaaaatagaatgtaaagtatgttatgaaggtggcatcactgagaaaaagatggacctttttcaaatgactggataatcgtttgataaaattgtataattttatcatacaacatctccaatcaaggtcactattattcacattttatttaccataaattagttttgcctgttacaaaactcatataaatggaattacgtagtatgtgttcctgtgtctggctatttttgctctcataacaccacaagttcatccatgttgtgtatattagtagttc

SEQ ID NO: 176949 - DNA, 693 bp, Homo sapiens
tagagaacccagaaataaacccaaatacttccagtcaactgatctttgacaaagcaaacaaaaacataaagtggggaaaggacacccttttcaaaaaatggtgctgggataattggctagccacatgtaggagaatgaaactggatccttatctctcatcttatacaaaaatcaactcaagatggattaagggcttaaacctaaaacctgaaactataaaaattctaaaagaaacattggaaaaacccttctagacaatggcttaggcaaggatttcatgaccaagaacccgaaagcaaatgtaataaaaacaaaggtaaatagctgggacctaattaaactaaagagcttttgcatggcaaaaggaacagtcagcagagtaaacagacaacccacagaatgggagaaaatcttcacaatctatacatctgacaaaggactaatatccagaatctacaacaaactcaaacaaatcagtaagaaaaaaacaaataatctaatcaaaaagtgagctaaggacatgaatagacaattctcaaaagaagatatacaaatagccaacaaacttatgaaaaaatgttcaacatcactaatgatcagggaaatgcaaattgaaaccataatgcgataccaccttactcctgcaagaatggccataatcaaagaatcaagaaacagtagatgttggcgtgg

SEQ ID NO: 176950 - DNA, 437 bp, Homo sapiens
  misc_feature (87)..(87): n is a, c, g, or t
  misc_feature (95)..(96): n is a, c, g, or t
taatagctgacatagatatttttgagccaggaatattcaagagtgtcttggaaaataggcagcagtaaatagaatgacgaaaattanagagattnnaggcaaagtgatgtgtaggattctggtatgttctagggaagtgtagcttgctctctttggctagacagaggcagagtcactgtgaagctaatgaagattgcacaggccccttccaaagctctgtaactaatgttcaatcacaatgtcgtattattttcctcagagagtctttcagattgcataagcctaagggctggaaaaacctggttctgcccctgggctaacacttggagtaagcttggggaaaaaaacggtgagatgaggctgaagaggtaagcaggtgccagatcacagaaggatttatgatcaaggcaagaggtaaaataggtgctgagataggg

SEQ ID NO: 176951 - DNA, 400 bp, Homo sapiens
cggcgcgctcagtgctcagccccgcgggggtgggcggcatggggcttctggggcccggggggctccctggcttctacacgcagcccaccttcctggaagtgctgtccgacccgcagagcgtccacttgcagccattgggcagagcatcggggccgctggacaccagccagacggccagctcgggtaggtgaggagaggttgcgctgctgcctgactggggggcgacagccgggagccccgcgccgtcggctctcgcttgctggaccaggcctccaggcggaaaagttcctgccaggccgggggtcgccgcctgggccttgggccgacgcgcctggtgatggggcccgggaggatgcttcggcgtccgcagggtttcggccccaagcgtttcgggcggccg

SEQ ID NO: 176952 - DNA, 109 bp, Homo sapiens
ggatgtccgggattactttccacgccccgaggcccgcccctagctgggagcctctagggagcctcaggccccgcctctccgaggcaggcccctcccctgagacccaggc

SEQ ID NO: 176953 - DNA, 496 bp, Homo sapiens
ttgcattccccatgtcggccgacgtggtcgtggtacgtaattctttttgtatgctactagattcggttttctactaaggcaaccactattaattattaaaaactgcacagatgatctgaacattgtacaaaaacttaagcagaattcttctatggaaggctttgttttcaggttaaaataaggcatgttcacaattagtaatacatgaactattatcttctagtaattcttgcccgtatgagcataaagccactacagatattccggaaatgaactcagaccttgacttgcacatagtaataacagaaaaaggcactgcgaatccccaatagccgccttataagaaaggaatctgagtcaaattcttagacatcagtttaaagtctagaagacaaagtaacctttaagaaaaagacctaacatcagccgggcacggtggttcaccaatcccagcactttgggaggccgaggcaggcagatcacaaggtcaggcgtt

SEQ ID NO: 176954 - DNA, 536 bp, Homo sapiens
ttgcattccccatgtcggccgacgtggtcgtggtacgtaattctttttgtatgctactagattcggttttctactaaggcaaccactattaattattaaaaactgcacagatgatctgaacattgtacaaaaacttaagcagaattcttctatggaaggctttgttttcaggttaaaataaggcatgttcacaattagtaatacatgaactattatcttctagtaattcttgcccgtatgagcataaagccactacagatattccggaaatgaactcagaccttgacttgcacatagtaataacagaaaaaggcactgcgaatccccaatagccgccttataagaaaggaatctgagtcaaattcttagacatcagtttaaagtctagaagacaaagtaacctttaagaaaaagacctaacatcagccgggcacggtggttcaccaatcccagcactttgggaggccgagtgaggcaggagaattgcttgaacccgagaggcagaggttgcagtgagccaagatgacgccattgca

SEQ ID NO: 176955 - DNA, 357 bp, Homo sapiens
cactctttcctgacctacagaaattgctgcctttagtgacaaagtaattcgcttcatgttatgaattgtgacactgttgctgtttcaacatatttccacttagacgtgaatacacaccaagaaagaacagttttgaccacatgaacatcatactcttaaaagatttaaacaaattttacaatgttattatgtgctattaaaagacctagtcctacattagagagtcacttcataattaacccaaatgaagtcatcaagcaagaagatgaatgatcttccaagaggctgaagggacaggggcactatatcatgtgaaatctcatgggaaaatctccctgcaaactgaacaccagattc

SEQ ID NO: 176956 - DNA, 340 bp, Homo sapiens
tgcaagctgaaaacaaacaaacaaaaatacatcaaattacacttgggcagtgaattcattttgtaaaaataaatttgaaaagcctaattctttctgttatccatctcagtatgagttaattcggctctgagttttttcttcagctgagtattataagctacctttgaatttagtgctaattaatattcttgaagcttcatttaaaggaagactatatgtcggagaagagagaaagtctctccgtttgctgaccttagagaaatagaacttagaggaaaacctcaaaacgcttgagtgatgttttcctgacagtaactcccacatgttggccaaatatgtg

SEQ ID NO: 176957 - DNA, 199 bp, Homo sapiens
attcagaatgtagtgtggggtctgccaacttgggaaaccatgttacctctctgagactaatttgtgtcatctgtcaactaggcataattataccttccctgtctaccacataagatgactgatccagtgaggtgaagatacaggttagcatatagtataaactttatccttactaatctcttaaaacctggcagacagg

SEQ ID NO: 176958 - DNA, 444 bp, Homo sapiens
agcaagtgactgactctagagaagtagataaagtagtgggagtgtgcattagtgatatggtttggctatgtccccacccaaatctcatcttgaattgcacctcccataattcccagtgtcatgggagggacctagtgggaggcaattgaatcatgggggctggtttttccaatgttgttcttgtggtagtgaataaatctcgtgagatctgatggttttataaaggggagttcccctgcatatgctctctttgcctgccaccatataagacgtgactttgctcctcttttgccttctgccatgattgtgaggcctccccaaccatgtggaactgtgagcccattaaacctctttcctttataaattacccagtcatgggtatgtctttattagcagcatgagaatggacagactaatacaattagttttctattattatttcta

SEQ ID NO: 176959 - DNA, 345 bp, Homo sapiens
gggagaccagatatatcctgatattttaaaataagagaccatttcttatctattacaaacctttatcatgtttgctaggaagtcagctgtcatgcagggaatcccccaagcttgtccaacccaggacggctttgaatgcagcctgacacaaattcataaactttcttaaaacatgatgagatttttttgcaattttttttaaagctcatcagctatcattagtgttagtgtattttatgtgtggcccaaacaatcctcctcttccaatgtggcccagggaagccaaaagattggacacccctgtggctgaaggagtgagccacaggcttgctgttaaccctttcc

SEQ ID NO: 176960 - DNA, 660 bp, Homo sapiens
ttattggccccggttgaactcttcatttcggccagctgtctctcaaattctatgggtcacaagggaaacctggctagaacatttggccagctcaaggcaaatgtgtcactactaacaaagcaaaacatcatgaacagttgaccaatttatgatggttcattggtattttctctgtgttaaagactgcgttttttacagacatactctgttgtcctacccacctatcccagtgacatctcctttggccattctccactcacctgtctacagaatcagagttctagggtgaccccaggtcagctgcggggaccagcacacccaggttcccccatcggcatttgttaccacggaagccaaaccgaaggattcagaagcagagcatgttgcattattttggtttcctgtccttttcatcattaggtccacttaaggggccaatttctgtttgttttgtttaatgattgcttaaggaatcctacaagatatagttgctatttatatgatggttataaactgacaaggcaagagctggtaaaaatagccttgtgcagtgtggattacaaatggggatttctggtgtgcttggatggaggtaagtgacctctggtgctcctgtcacttagctcacccagaagttgatagcaagtaagtaaaaatagg

SEQ ID NO: 176961 - DNA, 332 bp, Homo sapiens
ctctcctgtttctcatctttacttgccattaacatcaatccagatacccaagctatgagctgaaccatctattgctggtttttttaagaccaaaaaattaaatacaattcaacctgatggaaacttctcatcagtatctctgacctatttctctacctgtttccctcatatccaatcagtcaaaaagccttaacaattccaccttcctatgctctcttcttccatcctgtcatttcctttcccacccattatgttctctattcctacaacagatttttcagttttactggtcttccatctctttatacatctataatattatctccagaaac

SEQ ID NO: 176962 - DNA, 382 bp, Homo sapiens
ccctcccttctcccaaggtctctagcaatttccacactgaagaaagcaaaaacagcaacagtgtcccaggggccagaccagaggtaaacggattaaaacaaccacttctcggcctccctgaatgttactgcaacgtctagtgaaatccagtgagcagccgtgaaaatggctttaactagatgggatatcagagttagtgccacctcgtaactccctgcctcactccgccaacaagtaagaaaagcaactgggacgctcggagcactgacagccgctttgtcagtcacgggacacgcatttcaccgtccagcagagggtgtctgctaatgatttccgaaaagttcttcaaaacactccgaagtacagaacaagtctacataca

SEQ ID NO: 176963 - DNA, 342 bp, Homo sapiens
ttctaacacatgttggaaatgtcgatattttttaaacacctgaaatccttctcattaaacataaaaaaaccccaaacaatacaggaaatgttactacatatacaaaactgaagataggaattgcctgtgagtgaagcaatgaagtctgagcacaatatggaaagtggaaatcagaggttgtattttaaaaatctccacttttcttcagatagactggtgattattttacctactgtattttatctatcttaaacagaatgtaaggaacctaaagagaaaggctgtcagcaattgatctgtcctctcaatgaacagtgaatgccagtggttaggtctacatgg

SEQ ID NO: 176964 - DNA, 573 bp, Homo sapiens
acccaccaagacaggagataaaggtagatcgtgcttacgggagtctagtcttgtagttgacgtacccatcttggccacttcctcttctagcatgccagtgccccttctctgctggctctcctgcctccagggtggtgtggagattcagaaccacgttgcacctgggagagtgggtcctggagccgggctgcctgtgtggagagctggctccactggttactcgccacgtgaccttgagccagcttggtgatgatcctgctctcagagttcttgtttgcgtgatagacatgatgaaagcggtgctcattttgcagtttaaatgagatagtacatatgacatgcttaacagagtgcctagcacatactaaacactcaaaaatgttagttatttttatggttgttgttacgttcatttgaactggcctttttatcttctcacttgatttttgtgctattgacgtatatggtcacttttgtggtcattgacgagtcaaggacttacagatgttttcctggttgtgtcctgtggtttccagcagtaggcaggtggaggagagacagctggtgaaagca

SEQ ID NO: 176965 - DNA, 245 bp, Homo sapiens
actgcactccagcctgggcaacagagtgagactccatctcaaaaaaaagaaagaaatagcttctgggtctaggtgacttctctgtcctcctttaccattagttccttattgatcttgcctttaagaatgtacagtcctgtacctgtttgcccgcagatcaagtcctcacccttcccctactctaggctgtaacacaggaaaactaatccctctaggaagtgttttttcaggcttccgtggctact

SEQ ID NO: 176966 - DNA, 186 bp, Homo sapiens
ttagtctcttttttacacgttaggaagaaatacacaaacctcccagtttcattaatgaaaaaatcttaataaatcactttcatggtttatcaccagtaaacacgaacctgcacaaattgtatcaaggagcttattttaaaagcctttgagatacaaaacaaaaaccttatttctcagactataatt

SEQ ID NO: 176967 - DNA, 528 bp, Homo sapiens
ttcagagtcctagaacaatggtgcccaatataacatgagccacatgtataatttaaaatatttttataataacattgaaaatgtataaagaaataggtagaattttaataaaacaatttagtgatttctgccaataattaatataaaattatttctttctgtaccagatttgatgtatattttacacttaacagcacatgtcaatttggaccagacacttggcaagcgctcggcagccacacacatactggacggtgcagctctccaaggtctcacatgtgttttaaacactcctttgtaaatgcagtcacaaagtttcagagttctagaagcggtctggaatgtagaaaatgtttctcaatgattccgcagtcacaaagttcttatgcaatcctctctctgtatctgaggaaagggggattggttccaggatcccccatagataccaaattctgcggatgctcaactcctttgtataaaatggcatagtagctgggtgcggtggctcacgcctgtaatcctagcact

SEQ ID NO: 176968 - DNA, 360 bp, Homo sapiens
ctggaaaggagaagcaccaagaacatctcctggtgcagtgggaagttaacagacatttttagtgtgctcttgttgctgagaaacatggcataggaaaagccacgaacaaagatgaaaaacacaacttgaagtttatctgtttcacgtcctgtagtttgtctgtttgttttaaaagaaagtagctgaaataataagggtagggtaaaataagtaaacagtgaaagcctgggatgacaataacgaacagatcattgtacctagtttctgtgcatgttgctagaggtgggctttggattaagctttaaaatttctagaggcaaaggcaaatagaaatattagttaaataattaatgattgtta

SEQ ID NO: 176969 - DNA, 168 bp, Homo sapiens
acaaaataccaccactggatattcctaataaaatacttttaagaggcaaggtaccacgtgaccacatacataatttcgaacatttttgtcaaaataacaaatatgagattggctggctgatcctaattgtgctgaacaaagtagagaaaggatgagctcagagatctg

SEQ ID NO: 176970 - DNA, 344 bp, Homo sapiens
tgagcagaagtgacaggaaagaagcacagggaagcatcatgagacacagcccacgagaaggttaaatacactggaattttatgcatgtgagattctcagacagcatttggctgtgtgaccttgggcaggttgcttgacctctctggtgcctcagttccttcatctttaaaaggagagggctcaattttaaaaaaattatgggccacgtggtggctcacacctgtaatgccagcactttgggaggttgaggcaggcagatcactaggtcaggagatcgagaccatcctggctaacacagtgaaaccccgtctctactaaaagtacaaaaaattagctgggcatgg

SEQ ID NO: 176971 - DNA, 302 bp, Homo sapiens
cacaaatttagagaaaagagcaactccattacccccagactgcctcacagttaagtacatgtcttcatcctgctggtttagatgagatttctcaataatacatctctttgaaaaaaagctttctttctcttcaattccatagctgttcttagaagagaaataggaaaattcaccaacatcaggtatcatttcaattgatactcagcactcagacaccatgtgaagtaggttttgcaacctgaattgagatggaaatggtcattacgttgccaaggaatctttgctgtccattggcaatacag

SEQ ID NO: 176972 - DNA, 459 bp, Homo sapiens
gacctaaacaagtggagagatatcaaactatgttcatagactaagacttgatatgattaagatgtaaattcctaatgtcagattgagctatatattcaacacaatcccaatctcactacagatgtgctttttgtagaaactgaaaagctagttttaaaatgtacataaaaatacaaaagacctataaagtcaatagtgatcttgaaaaggaaaaacaacattgggaggaattacactttctgatttcaagacttataataatctacagtttgtattggtataaggatagacataaagactgacagaacagaatacaaagcccagaaacagaccttgcatgcatgtccaactgagtttccacaaagataacaaagtaatcaaacggggaaaggctagacttttcaacaaatggttttccaacaactggatctctataagaaaaaaaaatgcctcaaccct

SEQ ID NO: 176973 - DNA, 154 bp, Homo sapiens
ggaactccacccccggtcccagttcaagcatttctcctccctcagcctcatgagtagccgggattacagacagaaaccacaccaagtaattgaacagagagactttaatgttaaccagggctgggtgtggtggctcatgcctataatctcagca

SEQ ID NO: 176974 - DNA, 1027 bp, Homo sapiens
ccaggctagtcttgaactcctgagctcaagcgagacacccaccttgacctcccaaagtgttgggattacagacattagccaccacgcctggcctgtaaacaggaataactttcttgctgtgtgattcaatgttatttactgctttgttcatgtactgcctatgttgattatcaccagtggtatggatcctgcacattgggaaacactgcagtgttatttaattttgttcactgtgtttacagtgcagttttagtcacctgaaattctaagagaaaagatcaatatggttttgccaatcaaaggtcattaatacttggaatgaaagataacttctcctggtgatgaacacatgccttttgaaaagcatcagtatctccttaaaatgtataaactactgtaatcaatgaggaagactttttcttatcagatttattaaactcatttaccatacaaatagcattataacattaaagaaaattttttaaaaattctgtaccataaaacaattactggttccttcctacctgtttttaggtttgcagatgaataatgtgtggatttttggcagacacactgctgaaaatttttcactttgttgggtgagcatctcaccctatctccatttgtctccctgctcgtgagttctagagaagaccaccaataagcaagtgaaattctttggccaagtcactgatatcagaattccccagaggcaccaagaactttgatttccagaaattgtttaggcacagccactcattcaaccttatattttgtatctcagagttaaggttgcatttgggctacctagcctgtagactctattttaagacaagcaggcatttaatagttgtcggttggttgattagagcttctagccaatttttaaacaattatttgaatagataaggcattcactggttcaaaaaaaattttttaatcatcacttccacccatccagttatcactactgaagtaacctctactttttgtttcttgcatattctttctttcttttttttttttt

SEQ ID NO: 176975 - DNA, 391 bp, Homo sapiens
atccatccaccatccatccatccatcattcatccaccatccatccacatcttgactgaaggtctgttgtagacccagtcttgtgtatgaagtaagagagtggcagaagacacactgtcctgccctctttttcatttttttgtccatctagctggaaagagatggcaaacacccacgaaaagacaacatacaagttcccttgtgatcaggtgccccaaagcttggtcaaaggaaacactgtatagaaatttccaggacagggagatcagagtggtctggggtggtcagggagggctatgtggaagatggggcactagagctagcccttgaaagatgaagactgtttaaaaagagcagaagcaggaaggagatttggggtggaagggatggtg

SEQ ID NO: 176976 - DNA, 296 bp, Homo sapiens
agaatgatatttagaaaccaagatctgagcattaagggtactcagtgaccttgcttctaggcctcactcagctcactcagcatatagcagatggaactaggaagggagaaagagaaagagagagagagagagagtgtgtgtgtgtgtgtgtagctgtttgatgcatgagtttgtgtcacagcttcttttttttttttttttttttgagatggagtcttactctgtcacttaggctggagtgcagtggcgcaatcttgcctcactgcaacttccacctcctgggtccaagcgattct

SEQ ID NO: 176977 - DNA, 594 bp, Homo sapiens
acctagaggataccctcgaatcgacggtttctcgaagcatgataaagtctgaattgaggccgggcccggtggctcacgcctggaatcccagcactttgggaggctgaaggggggcggatcacttgaggccaagagtgcaaggccagcctggccaacatggcgaaaccccgtctctactaaaaatacaaaaaattaggccaggtgagatggctcatgcctgtaatcccagcactttgggagtggaggcaggaggatcgcttgaggccaggagttcaagaccagcctgggcaaaatggcaagactgcctctacaaaaaaaaataataataaaactggtcgggtgtggtggcgcaagcctgtagtcccagctagttggggatatcccttgagtccagtagttcgagactgcagtgaactgtgatcgcaccattacacttcagcctgggccacagagcgagatcccgtctctaaaaaagttatgataaataaaaataacttctaaaaatgtttttcatgtcagaagctcaaaaatcagtttcatcttatatgttgtttaaagggaagaaattggcttatgtcatttctgttctgaaat

SEQ ID NO: 176978 - DNA, 520 bp, Homo sapiens
ccttagagatacctcaataatgcgttcagcaccgtatttagagtatgggctatataagtgcctgacaccaggataggtgttggggacacgaagatgatcaaagtaagctttctgctgcctccaatcttatcagaaagacagctaactccaaaacaatgtgatctgtgctattagagttgcccttgtttgccccggactctcctagttttagcactgaaagtctcacattctgggcaacttcttcattcctgcctggactgggacagctggtccaccttaactgtcctagaggaatgtgtgtgggcaggggtgaatttgtatggggtggtgggggattgtgcagaagagattagcaaaatcttcacaaaggagcttatgtcttgtgtgtagaatgattaggaggagttctttaagcaaaaaatggagaggagagggttaaggaagagcattcctggtggaagaaccagggagcagtttaggcaaaggctcggatggaaggagtttagtaaagttaagagtc

SEQ ID NO: 176979 - DNA, 637 bp, Homo sapiens
cagctgggattacaggcatgctccaccatgcccatctgatttttgtatttttagtagaaacagtgtttcttcatgttggccagactggttctcaaactcctgacctcaggcgatccacccgcttcggcctcccacagttgtgagccacagcacctggcctattcactgatgttttatcctcaactcctaaacagagtagatgcttaaataatattcaaatgaatgaaagaaggaacaaagcaagttactaagaaaactgccaaggcctagtgcagtttgacactcagagcccagtaggacccattgagtagttttccgatgttggaaataacaccagtggatctgggctcgatcctccttagtcgcatgcgtgtgtgttttcttcttttgtatcagccaggataatgcagggtgtgttccaggcctctgtgattaaggtttcagtaacactctgatgtcattttacaaaacaaaactacctttgatggaaacagcttattgtgtctttagcttttgttgtttttattatttacatctcttgactttgttttttggtcaaatatgccagagacatgaaaccatatacctcaacaaagtcctgtaagttagatactcagctttgtttacacttcaggta

SEQ ID NO: 176980 - DNA, 559 bp, Homo sapiens
ctggtgttaagttgccccaaatacccagtctcctgtttcacatccttaggcaaagatcccatggccaaggtgccctttcggcttagctttcccaccggctgcttgcagacagataagcttctaacagtagggaagggggaaggtcggaggtgggcagaatgctgagcagacccctttgtctgcaggcatagtgggctctgcagctccccagtatcgtgttggatggggcaggccctgggtggtgaccagctgcctgtccccaatcctccacttctttagtggcaggtggaacatggcttggctggggcacaatcgtacatatgctccggctttaccttggggtggaaattggaggctgaaagtttgtaagtgttgagaggcaagcaaactctgtgtttgtgtgagctggagaatgcaggggctgcctgagccaggctctgtctctgcagagtctgccctggctgtgccagactccctgtccagacctctcagagatgtttcattccttgggctgggttgaactgagacatagccctgccgcgagacaggagggagaagg

SEQ ID NO: 176981 - DNA, 127 bp, Homo sapiens
aagggaattcagactgggaaagccaatgagctgtgtttattggtactgattagttagaggctttaagaaatacttggaggcaagagagagatgctggaggttctaagctggcctgagtgtaattggt

SEQ ID NO: 176982 - DNA, 532 bp, Homo sapiens
aatcacgggttgtgtgtgaattgggggctttctttgtgaccacagcctccatggatctaattagaggttttctcatgcctccttgaaagagaaagggtaactgtcaaacgtgtgagtcattgtgaggcaggagaattgggaattagggtaaccaagggttaaggcagaagcaaaagaacagcaggtgcagccagttctaggcaacattaagcagcatacagcatacatcctagctcctgagataacaagacagaagtttccacttcagcctctaattgaccatgagccaagtctccacttcagccactgattggtcacaggccaatccttcatagggtgtgaccaactggaggcctctaaagggcacctaggggtgttaccaaactaaataaaaattaataaatatcttaataaaaatcttaatgggaggggaagctcttgaaccacttgctggagcccgctcctacaagagctcctacaggctcctactctgtgaaaagtacttttgctttaataaatctgtgcttttgtt

SEQ ID NO: 176983 - DNA, 428 bp, Homo sapiens
cttcctagctatcaaattttaaccaactcaaaaaatgtcagccttctattttctgctttctatatataatctgtacttcaccaaagtaatgataataatagctaccatttataaaacacttcctacacagcaaacgctactctagaacacattttatgttttgttcaattctcacaacaacctataagagttactatttacattcttcacacgagtaaagagcagcacaggaggtcaactgcccaagtgataaagttggtaagcactgaaggcagaactccacccaggcagtgtgaccggcaaaccgaagcacttacgcactctactatactgacttcctcagcaactactcactttatgggaataactggttatttagataagcaatactatacagaactgcagaaaaagttcatgtttatctgtat

SEQ ID NO: 176984 - DNA, 625 bp, Homo sapiens
gtggagaacacatcagcttcaaaggcagagagaatcgaaggtgctctccagctttggacacttcctctgcttgaggacaccttgactaacctccaagggcaactaaaggatcaagaaaggcccagcacagcagaagatcagctggatctagctcctgcaggagatgtgtacaaagacaatcccagtcctctggggatgtttcctcctgtggaatctctatgtctcatcctctcagaccatttaccctggaatcaaggcaaggattactcagagggcacttgactatggtgttcaagctggaatgaagatgattgagcaaatgctaaaagaaaagaaactcccagatttaagcggttctgagtctcttgaatttctaaaagttgattatgtaaactacaatttttcaaagtaagtaaaaagaagagcattttgcctcttataagaagctcaaaggaacacaccacccacacaaacaaaacaccaacacaacactttgggggcggcctcggcgcccggaaaaatttttaaaacccttctggtggggcgcgggggccccatggggtcacgccaacctggggccaaaggcgggccccagggacacccggggccacgaccaaggcgcggc

SEQ ID NO: 176985 - DNA, 408 bp, Homo sapiens
tgaggtaactctccggatctttgaatcacagcagattcacagagactccagcacagtcatgtggtggaagaagatttgtagacaaaagggaagtggcataccgaaatcggaagtgaggtacagaaacaactcagcgtttgccttgtttgagcacagtttgaacatttggcagtgcctgagtggttgaagtttggccattgggattgaccaagatgtagctgttgtttgaggtgcatacactcaagttaggttttcattcttgtttacctattaaggtaggttgcaggtcatccacaaggactcatatatataattatggagtccttctcaggacatacttagttcactttaacaatgccttccctttggttattttctcaattttgagagattggccaaaacttcagt

SEQ ID NO: 176986 - DNA, 458 bp, Homo sapiens
tccacattaaaggcatgtgcatgcagatggattgaggagagggtattactatagcatttggaaactttccattttatcttaactcatctaattcctctttctcttgttatttaacttggggtttctcagcctcatcactaatggcattttggcccaaatattttgtttgtttgtttgttcgtttggggtaagagcctgttctgttcatcacagaatatttctcagcattcctgacctctactcatttaattccagtagcactacgttcccctatccacactgttgtgactaccaaaaatggctctagagcagccaaattgatcccagttgagaacacttttaactcattggcttcttattcagtaaggctttctttgaaaatccagtgcagtgtaggcactagattagtcatgtggataaatgaaatggattcatcttgaggataatagggccttcct

SEQ ID NO: 176987 - DNA, 725 bp, Homo sapiens
ggctggagtaagtgacatgatctcggctcactgcaacctccacctcccaggttcaagggattctcatgcctcagcctcccaagtagctgggattacaggtgcctgccaccacacctggcttatttttgtatagtagagacagggtttcactgtgttggccagggtggtctgaaactcctgacctcaagtgatcccccagcctcggcctcccaaagtactgggattacaggcctgagccacggcgcagggccaggccggtgttcttggagccttgtctctgctggggatgtgtctccagggatggattctcgggaagcaagtgtgtgccctgcagcccccaggcacctctcctggactaggaggcccctgatcgcccactgctctccctcacagcaggcctctgctgttgctgtgtgctctgcctggaccaccctcccgctgggtacacatggaaaagcctcttcatccttgggccctctctgctgtgccgcctcctcctctaggaagccctcctagctccccagggaggctctgcccctcctcagttccagccctgactgcctggggctgggaagggctccatgaagttcaaggtaaactcaggaagggtccccacagcccctcagggagcctgctgggaccgatgtccagacggggccctcttgtgtgtgggtggagtgacgtcagcctccaaactagtatgttatgggcggggctcgctgggc

SEQ ID NO: 176988 - DNA, 330 bp, Homo sapiens
acagggactcaattctttttggtgtaaatgtcactcctgctagctctttgtataaagaattaattcccagagtcatatttccttctaatggaaagattactctactgattgctaggaaaacagggtaatggaaggcactcaattaaaccaagccgtttccaaatgcaatgtatgttttatgattggcttgtgataggcgatgcttcatgtgtctacttggtgtttccctttgagctttgaacttatgtcaaactttgttttcattgttctgttggcctagtgttttccattgtcagcctgtaattcctgctcagttgcagagggaattat

SEQ ID NO: 176989 - DNA, 419 bp, Homo sapiens
atactccactgttgggattttactggcattttgttgttgttgttcaagtgaacatttattgagcccctcacatcctgcttgccctgggctctatcacagcagagatcagtaggtccccagcctctgtcttctgagagtgtaatcaagtagagggagatgtgggtacagatatggtttaaaaaggagtcccacatcatgggttctgtggtggaggtgtgagcagtgggcagagatcagagccagaggagagagtggccagagcgtgctggagggggagggtcagctgtcggggaaaggagcctgccgcctcacctcatgggctagagtggggtggatagacaggtcacaattcagaagcacagcagcacgtgagggatgagtgcgcatgccttctgcatcctcatcttcacgcctagtat

SEQ ID NO: 176990 - DNA, 588 bp, Homo sapiens
atactccactgttgggattttactggcattttgttgttgttgttcaagtgaacatttattgagcccctcacatcctgcttgccctgggctctatcacagcagagatcagtaggtccccagcctctgtcttctgagagtgtaatcaagtagagggagatgtgggtacagatatggtttaaaaaggagtcccacatcatgggttctgtggtggaggtgtgagcagtgggcagagatcagagccagaggagagagtcaccacgtgatagcagaaatacctttagccttggaagttctgaggattgctctgaaccagccacctgccttcatggtgagagataaaggaactgctatctgggagccctgagaggtatacactgtgtaggaggagctgacaaatgaggtagtactaagaagacggttcgagcctagtcggaaattcaggtacgtctaggccatccagaaatcgtgaacaagtgattcttctatctaacttggtacgttgaatgtccttgtgggcttaacactgatattcccgggcatccaaagtatccagtaggaaggaagagctcgtgaaaccattctgtgaca

SEQ ID NO: 176991 - DNA, 533 bp, Homo sapiens
ctcacacagctttttcagggagtaagtatgtgaggtggatagtgttactgaggctatggaggtaacacatgaggcttagtgcacctggcgtgtgattagatactcagctaatccgtccttgatttctgcaaggtcagaaataggctttagtgtataggatggtttagaattttaagtgcaaaatggctctttctctggagaccatatcgccaagtaatgctgatacgtagacactttggacttcaggtgtccacatttatgggttgaagaaggcagcggttgtgttacatggaaagggtgggtataagtaagacagttttcttgtggagtgcttgattctggtctaggattgaaacagttgctcctgtgtctgacatgtgtgtctacacgatgatctcagcagtgggcatggaaggtggtattgagggtgtttctttctttttttggcaagattttgaaaaagaaatggagggattttcttaaggcactttaatgaagggaattgggtgaagggaattcaaattgtaattgtc

SEQ ID NO: 176992 - DNA, 523 bp, Homo sapiens
ggagttaatggttacatgccaagcaaggtagatttttttcctaggaagtgacatctcaggtggattttataggacagatgtaagtttccaacactggtaggtggtcggtggggtggaaggcagtgtatagcaaactgagaaaactgcgttatctaaagcacaaggggaccaagcacagtggctcacgcttgtattaataatctcaatatgttaggagcctaggcaggagggtctcttgaagccagctctggcaacaaagccagactccctggctctacaaaaaattttaaacttagccaggcgtggaggggagtgcctcttgtctcagctactcgggaggttgaggcgggaggatcatttgagtccaggagttcaaggctgcagtgagctatgaatgagccattgcactccagcttgggcaatagaggccttgtctcaaaattagtaatactaaaacacaaaggtatgaaaccagagctaacaggagcgccacacgttttaacaacaataaactacgtaaagg

SEQ ID NO: 176993 - DNA, 263 bp, Homo sapiens
tgaatttgagtaaaacgttcagtaagcccagcatataaagtgcaagagaatcaagaaatagtaaaaataatggaaatattaaatacttgtcacttgtcaagaccactataaactttaacttacttctctaggctaggtaattacccatttgcatttgttcagcaccatgtggttttcaaagcactcacatatgccaacacattggatccctacaacttagaggctttcggacagaacacaaaagtaggcccatggccgggcgc

SEQ ID NO: 176994 - DNA, 615 bp, Homo sapiens
ttctcaggagtgtatgtagctgacgggtgaggtgcggctgggcagtgactccctagtgcttcctgcttatttccgttttatttgaagccaaggaggagtttgtttttgatgtgagtcatatgcccaggacactaattccaatccattctcttatcacctccctgaccagttcctaatcagaatctgtacctcatggaggttacagggatccaaggtcatgataactgaggcttgtactgcatctggactcagaacagagcaaatgtgtgcctggtctaagtacttccgtaaaatacccagtgtcttggtgtccttctgcagcacagtctctgtcgtctttgacataagtatcgagattatacacacatcactgataagggataaaaggcaccctggaaatccgtaaataaaggactagcagtcacggcagtgcactgcattgagtctggtttggttgggtctgaaactgtacctgaaatggtttctttaagtatcttgctttctctatttctcgatgtttaataaaggaagggacacggacatgtagagaaggctaaaataagaaatgctgtgtgaggccatttttccccacacaaaccaagaaagaaataaaga

SEQ ID NO: 176995 - DNA, 724 bp, Homo sapiens
  misc_feature (259)..(259): n is a, c, g, or t
  misc_feature (295)..(296): n is a, c, g, or t
  misc_feature (568)..(568): n is a, c, g, or t
ctccagcccgtttgaacgctccccgcagccaccgccacccattggaatggccaacaggggacctgcattatggcctgagccaggaggtgcagcagaagattgagaaacagtatgatgcagatctggagcagatcctgatccagtggatcaccacccagtgccgaaaggaatgtagaggccaggccctcaagccctgtgactgcagcagaacgttcgcagaaagcatggctttcaataggtaatgtgcgacggagtgtcntattgcatgatgctctacttaattgtcgacctggtnnaccccgcagggcgccagtgcccgccagctacacagacacgatccgaaggccatccgagccatggggccttacaatggcgagcatgtgacgacagaatcttctcgagattcgctggcacagcatgcttgatgcggctctatgacgcatttaactacccacgtgactatcgttccagaacctgtgcgacctcgtgggcaaggacgagacacatggctctagtgtgcaggcggtacgtctgatgaactctggcgtgggctggcagttagcccgangatgatgcggctcgttctctggggatcccaactggttccctaagaaatccaaggagaatcctcggaacttctcggataaccagctgcaagagggcaagaacgtgatcgggctacagatggggggcatctcaggcaggcatgactggctactggatg

SEQ ID NO: 176996 - DNA, 256 bp, Homo sapiens
agagcctaactataaaagccaaaactataaaagtcttatgagaaaacaggttaaatcttggtaaacttggatttggcaatgaatttttagatatgagcaaaaagtacaagcaatgaaaaaaataaattagactttacaaacttttgtgcttcataggtcactatcaagaaagcaaaaagacaatccacagaatgggggttaggtccataccgtggggggatctccttcaaaagttcgaccgtgcaggcattgcaag

SEQ ID NO: 176997 - DNA, 162 bp, Homo sapiens
  misc_feature (7)..(7): n is a, c, g, or t
agccagnctttctgtgggtcctctttccccaaccaccttgagattaaggatagagtctaccttatctttctttcagtgcctacctcagatcattcttcacagaaaatgagacacagaagtctgggaaaacttctattccaacttctgcatttatgtatcaga

SEQ ID NO: 176998 - DNA, 327 bp, Homo sapiens
  misc_feature (28)..(28): n is a, c, g, or t
ctccgccggttgaaagcgcgtgtttgcntcgggttctgttggagtgcgttcggtgtgccgtgggtccgcgctgcttccacccaacttcctgttgactggacctcactgtgggaacaacaagatcaacaagaggagcaagaacaacatcaagagtcagggcccgggggtcctgacgggtacaggatgggtacagacccacacaggaatcccagagtgtgttccacagcaggacacgcctgcgctgaaagagtggacagaaaggagctgacctggcaggacatggagaggaaaacagtcactctcccgtggggagacctggcaggcctc

SEQ ID NO: 176999 - DNA, 1097 bp, Homo sapiens
  misc_feature (28)..(28): n is a, c, g, or t
  misc_feature (1005)..(1005): n is a, c, g, or t
  misc_feature (1036)..(1036): n is a, c, g, or t
  misc_feature (1039)..(1039): n is a, c, g, or t
  misc_feature (1062)..(1062): n is a, c, g, or t
ctccgccggttgaaagcgcgtgtttgcntcgggttctgttggagtgcgttcggtgtgccgtgggtccgcgctgcttccacccaacttcctgttagctgcaggacaagttcgagcatcttaaaatgattcaacaggaggagataaggaagctcgaggaagagaaaaaacaactggaaggagaaatcatagatttttataaaatgaaagctgcctctgaagcactgcagactcagctgagcaccgatacaaagaaagacaaacatcctctgctgccccctgccccatacacgtgatggagcagaaaacgtgctgtgtgaacctgtgacttcagggcctgttgacgtggtcgtgcttgcatactctctggactggacctcactgtgggaacaacaagatcaacaagaggagcaagaacaacatcaagagtcagggcccgggggtcctgacgggtacaggatgggtacagacccacacaggaatcccagagtgtgttccacagcaggacacgcctgcgctgaaagagtggacagaaaggagctgacctgggattatgatccaaacacagctgggcctcccctccctgccccaggattgtggagtgagaacgttgcagcaggagagaacaacgcagcaaagcacagcaggggaaccggaaatgctcaccttttgacagggtacttttagttctggggccttatcttaaggatattccaacatatacaaaaagattcatgcacagagatatttactttagtattatttaccataggaaaaaagttggaaacaatacatttgatgttctgtaaaatgaaagaacagctaaataaatcatggctctaagacgactccagggctgtgtacggaagttcagggacagaatcaggtgaagctgttccacctgagcctaagcttcctctgctgtatgtcgggaatcaagtgggggccaagcgagatcaccacagtgcaggccagtgtgcaggcacaggtgggcgccagggagggacnccgtacatccccatgctctctccaaaaacgngcngcacaatttggaagaaacatttncttggttataaagagcaacggctctggcctaattg

SEQ ID NO: 177000 - DNA, 345 bp, Homo sapiens
ggaggtgtagatttgggagttgtgagcatacacgtgacatctaatgccttgaacctggatgtcataacccagggagtgagggcaggtgacgagggctgacctgtggtgtatccctacctaaaggggtcagtctgatgagaaggaaccagcagaaaagagaagaagggatcagtaggtaggaagaaaacgtagagtatagcttcgggaagccacgaggaaaggggatctcaagaagggaagggagttattaccagtgtcacctctgctgtgttaggcttagtaacatggaggtcagcatttcccttgatgagagtttttggggccaacgtctacctgggtttgaga

SEQ ID NO: 177001 - DNA, 831 bp, Homo sapiens
agggactctggcgataaagctgccagagtctgcggtggaggcagccgcggcgagcaaggagctggacaaggaacaatgcaaagatggcttttcagagcagccaatcgggatcttgaaactattaaggcctaaaatcattagcactgttttctccctctaagacatatgtggcttttcactttattttcagctgaatgcttttgctgttttgggtttagcaagcttttggtcttaaaaatatccaacaatgcagttaagaggccagatgactttatgcatgaaacattgttaagatgaggaattttcccatagaaaggtgaccagatttgaggaaattatttagtcagtataaacttttctctggatgtaaacagtacagattttactttcaggctttcctaataaagtttctaacagacctggaaaggagaaggaagagtaacatctgttgcaaaaccccagttacgtgtaggacaaataagaatctgggagagaggtgacttgcccaagtgacacaccgatttgggatatattagggagaaccattaattcttgtccataaggcttgatttagaattgttttttattttaatggaagttctgtagaaagaaaggaatacttggaaaaattgagccacttgtaaatacttggaagatgagaaaagagaatggtttaaaatcttcttaccatatccctattctcctcctcttcctcctcatcatcagaatcacagtcagtcagtcaaggttggcactttattagtgtgaacaaggtcagtatgaaaacacaaagtatagggaagttgtgacacccaatgtgtacaatttcta

SEQ ID NO: 177002 - DNA, 537 bp, Homo sapiens
cagtacggatgtgcgggccagtaggttattgccttgaatcaggaaagagtatatgttttactaagtttggtatctctcttgccggccacagtgcttttcccctatagaaagagattaataagcacttgtatgttaaatcagcaggaaaccaggcagaagagatgtgtcttgtgagcctacaaaaagccctaggtgcaccatgccatgtaaacctgataaataggaagctgtgtaatatcttagtgtcagcaaactctaacaccagtgtcagtgggacagatcatgtgtgtgtcaagcaagaagatggtgtggcatataaggttgatatgtatatgatgataccaataagcaaatgatgaaacaaacaaaggccttccttctcaagatttggtgtgtgaactaggagtatttttttttcccgagactgagcctcccactgtctgttgcccaggctagagtgcagtggcatgatcttggctcactgcaacctccgccttccaggttcaagcaattttcctgtctcagcctcccaagtag

SEQ ID NO: 177003 - DNA, 455 bp, Homo sapiens
agatcacttaaatgccattttgccctgtgatgaaacatgtcactaactctacatttgagctgtttccatgtttacttgtttattgagttatttacgtgtttatgaagagtggtaattgtaaattgagagcacaatcccacaaaaggtattggagagccctaggtgcaccatgccatgtaaacctgataaataggaagctgtgtaatatcttagtgtcagcaaactctaacaccagtgtcagtgggacagatcatgtgtgtgtcaagcaagaagatggtgtggcatataaggttgatatgtatatgatgataccaataagcaaatgatgaaacaaacaaaggccttccttctcaagatttggtgtgtgaactaggagtatttttttttcccgagactgagcctcccacttgcactccagcctgggtaacagagtgagactccgtctcaaaaaaaaa

SEQ ID NO: 177004 - DNA, 837 bp, Homo sapiens
aaaatgcctctgtgccacagcttccagtcagctctgtgtacgtgtgcctgtccccctgctctgacccttaggtggatttaggaggagccctggttggacaaggtaaagggacctggactgttctttgaaccgtgaaaagccctggctcccctcctgaagtagttagggaaaggcatgatcctttgctgggctagggagaggggattcctgtgatgggttgtggtgtcccagaagagatgagtcctggatggaagtaacagatgaatggagttttaaagagctagattctttttcatgcagatgagagcagagagtttctacaacaagaagaggaggatatgctgacacaggcggttgatctgccaaagcaactagttggaggatagagggaggggaagggtggaggccccagaagaggaggctcagcttaacaagttggacctggctggggatccaagcaaggtcaggattccagagtccatgaggagaagcttcaacttgaacctgctaaaacctgatagaaaaccagtgaccaggggggtgagggatatgcctcaggcttggacagggcagggagcaaaggtgaaccagcaagacagagcagagggtccagtgacctcggctagctttctaggtggccaaagaaaatagtcagtcattggctgggcatggtggctgatgcctgtaatcccagcactttgggaggccaaggtgggcggatcacttgaggtcaggggctcaagaccagccaggccaactgagtgaaacctgtctctactaaaaatgcaaaaattagccgggtgtggtggcagacgcttgtaatcccagctactcggg

SEQ ID NO: 177005 - DNA, 635 bp, Homo sapiens
aaaaggctgcaggtagaatatagaggatcgcccacggactgactggtgcaagtgaccgatgaatggagttttaaagagctagattctttttcatgcagatgagagcagagagtttctacaacaagaagaggaggatatgctgacacaggcggttgatctgccaaagcaactagttggaggatagagggaggggaagggtggaggccccagaagaggaggctcagcttaacaagttggacctggctggggatccaagcaaggtcaggattccagagtccatgaggagaagcttcaacttgaacctgctaaaacctgatagaaaaccagtgaccaggggggtgagggatatgcctcaggcttggacagggcagggagcaaaggtgaaccagcaagacagagcagagggtccagtgacctcggctagctttctaggtggccaaagaaaatagtcagtcattggctgggcatggtggctgatgcctgtaatcccagcactttgggaggccaaggtgggcggatcacttgaggtcaggggctcaagaccagccaggccaactgagtgaaacctgtctctactaaaaatgcaaaaattagccgggtgtggtggcagacgcttgtaatcccagctactcggg

SEQ ID NO: 177006 - DNA, 252 bp, Homo sapiens
ctccccagcatacctgaccagtgctggtccccgggcaaggacctggaagtgggcacagccctagggcagaggggttgggtcggggcaggggcagcagagacagccactcacaacaggatctgagggggccaggcagccacagggcctgcaccaggaccactgtgtgcacccttggaggtgactgagcctccatgcctgggtctagtgctgccatggacgtggggagcctcctcgccagagttcctgggccct

SEQ ID NO: 177007 - DNA, 474 bp, Homo sapiens
cggccccccccctcgttgcctgctgttcttgatgtatccctggtatgcagacaaggatgcccccaacctcaatgactgagcatggaggaatacaagacccctcaattgtaatctatgttccagagtaaactattgggctgatcaagtctttctcagaactctatcacagttggggctctcactacccagtcctttgatctgcccccattcctttcataagcctcatttcagtatcagctctcaagtccttccctacatactctttttccttctccactttatctttcataggcattacctctattaaacctcttgtacatctaaattcatcttggcatctacttcccagaggacatgaattatacatctgtcagttgcttctgactaccttcagccaatgagatatactgtatggggcttgcagggaggaaccaagagtgacactggggaacaatttctctctctgctacagga

SEQ ID NO: 177008 - DNA, 642 bp, Homo sapiens
agtgggggaaatattttagtctctgtctcaataaccccttgcactgggctttaggggttaaagatgcatccagggtgacagcacgtaggttcttgcacagcacaggctgaggactatacatctgcctgggatggaaggagtgtttctttgtgggtttctacttctgcaatctcctagtccaccttaaaattccaaatcagaatagcagcaaaagagcaaggcttaatgcacactgcagtaacactgaccagcttaatcaggaccatttgtctcctacatggggatctggacattctgagaatgaattacacagtggcctcaattcccttctgccttaaggcccggtggttttgcactgatttctcaaccgaaagagatcatcatcagctttctgagggtggaagtgtttcaaacagagaaccaactgcctctgcccatcaaggtcactttcctgcctttacctatctgtcttcttacctcgaaatgctttaagaacaatttgttggtcacaacaaactctgaggcagcgaagggcagggaaagagagggcattcagaatcaaaggcctaagatttgagccctggtgtctccacaaactgcttgtgtaagctgggcatacttcacctctctgacccattcccc

SEQ ID NO: 177009 - DNA, 330 bp, Homo sapiens
gaagtatggtgctggcatctgctcagcttctagggaagcatcaggaagtttgccatcatggtggaaggtaaaggaggagtaggcacaagcaggagcaagaggggtcaggaggtgccacaccttttaaatgaccagatcttgtgagaactcactatcacaaagaccgtaccaagccgtgagggatccgcccccaagatcaaatcctcccaccaggccccacctccagcattggggattacatttcaacatgagatttggatggggacaaatatccaaactatatcatgggatctggggagataaagaggaggaaaacactgttcttgcttg

SEQ ID NO: 177010 - DNA, 1713 bp, Homo sapiens
cccagcttccctagcaaccaagcaggcgcaagaagcaaccagccgcgctatccgctcccgttgctaccggaatgcctcttcaggttagcgattacagctggcagcagacgaagactgcggtctttctgtctctgcccctcaaaggcgtgtgcgtcagagacacggacgtgttctgcacggaaaactatctgaaggtcaactttcctccatttttatttgaggcatttctttatgctcccatagacgatgagagcagcaaagcaaagattgggaatgacaccattgtcttcaccttgtataaaaaagaagcggccatgtgggagaccctttctgtgacgggtgttgacaaagagatgatgcaaagaattagagaaaaatctattttacaagcacaagagagagcaaaagaagctacagaagcaaaagctgcagcaaagcgggaagatcaaaaatacgcactaagtgtcatgatgaagattgaagaagaagagaggaaaaaaatagaagatatgaaagaaaatgaacggataaaagccactaaagcattggaagcctggaaagaatatcaaagaaaagctgaggagcaaaaaaaaattcagagagaagagaaattatgtcaaaaagaaaagcaaattaaagaaggaagaaaaaaaataaaatataagagtcttactagaaatttggcatctagaaatcttgctccaaaagggagaaattcagaaaatatatttactgagaagttaaaggaagacagtattcctgctcctcgctctgttggcagtattaaaatcaactttacccctcgagtattcccaacagctcttcgtgaatcacaagtagcagaagaggaggagtggctacacaaacaagctgaggcacgaagagcaatgaatactgacatagctgaactttgcgatttaaagaagaagaaaagaacccagaatggttgaaggataaaggaaacaaattgtttgcaacggaaaactatttggcagctatcaatgcatataatttagccataagactaaataataagatgccactattgtatttgaaccgggctgcttgccacctaaaactaaaaaacttacacaaggctattgaagattcttctaaggcactggaattattgatgccacctgttacagacaatgctaatgcaagaatgaaggcacatgtacgacgtggaacagcattctgtcaactagaattgtatgtagaaggcctacaggattatgaagcggcacttaagattgatccatccaacaaaattgtacaaattgatgctgagaagattcggaatgtaattcaaggaacagaactaaaatcttaatgactattagaagtaactaagtattgttataagttttttaaaaacaactggaggcatctttgtacatattatggccagttgtacagaatcgctttctgtttagtactttagttctgttgagggcaaaatattataaatctatagaaaataaactgtttgacttgaatcatttctgaataagtaaatctaaataagaatctattttaattccttatttcttcatattaatacatatgtatacttttttgtgttactgaattaagcttgcccttgtaacaaaatatgttttggtatagttaccaggacacttactgattaatttttaacaaggtagaattttaaaataaaagatttataaataaaacttttgtttgtattaa

SEQ ID NO: 177011 - DNA, 1682 bp, Homo sapiens
cccagcttccctagcaaccaagcaggcgcaagaagcaaccagccgcgctatccgctcccgttgctaccggaatgcctcttcaggttagcgattacagctggcagcagacgaagactgcggtctttctgtctctgcccctcaaaggcgtgtgcgtcagagacacggacgtgttctgcacggaaaactatctgaaggtcaactttcctccatttttatttgaggcatttctttatgctcccatagacgatgagagcagcaaagcaaagattgggaatgacaccattgtcttcaccttgtataaaaaagaagcggccatgtgggagaccctttctgtgacgggtgttgacaaagagatgatgcaaagaattagagaaaaatctattttacaagcacaagagagagcaaaagaagctacagaagcaaaagctgcagcaaagcgggaagatcaaaaatacgcactaagtgtcatgatgaagattgaagaagaagagaggaaaaaaatagaagatatgaaagaaaatgaacggataaaagccactaaagcattggaagcctggaaagaatatcaaagaaaagctgaggagcaaaaaaaaattcagagagaagagaaattatgtcaaaaagaaaagcaaattaaagaaggaagaaaaaaaataaaatataagagtcttactagaaatttggcatctagaaatcttgctccaaaagggagaaattcagaaaatatatttactgagaagttaaaggaagacagtattcctgctcctcgctctgttggcagtattaaaatcaactttacccctcgagtattcccaacagctcttcgtgaatcacaagtagcagaagaggaggagtggctacacaaacaagctgaggcacgaagagcaatgaatactgacatagctgaactttgcgatttaaagaagaagaaaagaacccagaatggttgaaggataaaggaaacaaattgtttgcaacggaaaactatttggcagctatcaatgcatataatttagccataagactaaataataagatgccactattgtatttgaaccgggctgcttgccacctaaaactaaaaaacttacacaaggctattgaagattcttctaagacaatgctaatgcaagaatgaaggcacatgtacgacgtggaacagcattctgtcaactagaattgtatgtagaaggcctacaggattatgaagcggcacttaagattgatccatccaacaaaattgtacaaattgatgctgagaagattcggaatgtaattcaaggaacagaactaaaatcttaatgactattagaagtaactaagtattgttataagttttttaaaaacaactggaggcatctttgtacatattatggccagttgtacagaatcgctttctgtttagtactttagttctgttgagggcaaaatattataaatctatagaaaataaactgtttgacttgaatcatttctgaataagtaaatctaaataagaatctattttaattccttatttcttcatattaatacatatgtatacttttttgtgttactgaattaagcttgcccttgtaacaaaatatgttttggtatagttaccaggacacttactgattaatttttaacaaggtagaattttaaaataaaagatttataaataaaacttttgtttgtattaa

SEQ ID NO: 177012 - DNA, 1481 bp, Homo sapiens
cccagcttccctagcaaccaagcaggcgcaagaagcaaccagccgcgctatccgctcccgttgctaccggaatgcctcttcaggttagcgattacagctggcagcagacgaagactgcggtctttctgtctctgcccctcaaaggcgtgtgcgtcagagacacggacgtgttctgcacggaaaactatctgaaggtcaactttcctccatttttatttgaggcatttctttatgctcccatagacgatgagagcagcaaagcaaagattgggaatgacaccattgtcttcaccttgtataaaaaagaagcggccatgtgggagaccctttctgtgacgggtgttgacaaagagatgatgcaaagaattagagaaaaatctattttacaagcacaagagagagcaaaagaagctacagaagcaaaagctgcagcaaagcgggaagatcaaaaatacgcactaagtgtcatgatgaagggagaaattcagaaaatatatttactgagaagttaaaggaagacagtattcctgctcctcgctctgttggcagtattaaaatcaactttacccctcgagtattcccaacagctcttcgtgaatcacaagtagcagaagaggaggagtggctacacaaacaagctgaggcacgaagagcaatgaatactgacatagctgaactttgcgatttaaagaagaagaaaagaacccagaatggttgaaggataaaggaaacaaattgtttgcaacggaaaactatttggcagctatcaatgcatataatttagccataagactaaataataagatgccactattgtatttgaaccgggctgcttgccacctaaaactaaaaaacttacacaaggctattgaagattcttctaaggcactggaattattgatgccacctgttacagacaatgctaatgcaagaatgaaggcacatgtacgacgtggaacagcattctgtcaactagaattgtatgtagaaggcctacaggattatgaagcggcacttaagattgatccatccaacaaaattgtacaaattgatgctgagaagattcggaatgtaattcaaggaacagaactaaaatcttaatgactattagaagtaactaagtattgttataagttttttaaaaacaactggaggcatctttgtacatattatggccagttgtacagaatcgctttctgtttagtactttagttctgttgagggcaaaatattataaatctatagaaaataaactgtttgacttgaatcatttctgaataagtaaatctaaataagaatctattttaattccttatttcttcatattaatacatatgtatacttttttgtgttactgaattaagcttgcccttgtaacaaaatatgttttggtatagttaccaggacacttactgattaatttttaacaaggtagaattttaaaataaaagatttataaataaaacttttgtttgtattaa

SEQ ID NO: 177013 - DNA, 1607 bp, Homo sapiens
cccagcttccctagcaaccaagcaggcgcaagaagcaaccagccgcgctatccgctcccgttgctaccggaatgcctcttcaggttagcgattacagctggcagcagacgaagactgcggtctttctgtctctgcccctcaaaggcgtgtgcgtcagagacacggacgtgttctgcacggaaaactatctgaaggtcaactttcctccatttttatttgaggcatttctttatgctcccatagacgatgagagcagcaaagcaaagattgggaatgacaccattgtcttcaccttgtataaaaaagaagcggccatgtgggagaccctttctgtgacgggtgttgacaaagagatgatgcaaagaattagagaaaaatctattttacaagcacaagagagagcaaaagaagctacagaagcaaaagctgcagcaaagcgggaagatcaaaaatacgcactaagtgtcatgatgaagattgaagaagaagagaggaaaaaaatagaagatatgaaagaaaatgaacggataaaagccactaaagcattggaagcctggaaagaatatcaaagaaaagctgaggagcaaaaaaaaattcagagagaagagaaattatgtcaaaaagaaaagcaaattaaagaaggaagaaaaaaaataaaatataagagtcttactagaaatttggcatctagaaatcttgctccaaaagggagaaattcagaaaatatatttactgagaagttaaaggaagacagtattcctgctcctcgctctgttggcagtattaaaatcaactttacccctcgagtattcccaacagctcttcgtgaatcacaagtagcagaagaggaggagtggctacacaaacaagctgaggcacgaagagcaatgaatactgacatagctgaactttgcgatttaaagaagaagaaaagaacccagaatggttgaaggataaaggaaacaaattgtttgcaacggaaaactatttggcagctatcaatgcatataatttagccataagactaaataataagatgccactattgtatttgaaccgggctgcttgccacctaaaactaaaaaacttacacaaggctattgaagattcttctaaggcctacaggattatgaagcggcacttaagattgatccatccaacaaaattgtacaaattgatgctgagaagattcggaatgtaattcaaggaacagaactaaaatcttaatgactattagaagtaactaagtattgttataagttttttaaaaacaactggaggcatctttgtacatattatggccagttgtacagaatcgctttctgtttagtactttagttctgttgagggcaaaatattataaatctatagaaaataaactgtttgacttgaatcatttctgaataagtaaatctaaataagaatctattttaattccttatttcttcatattaatacatatgtatacttttttgtgttactgaattaagcttgcccttgtaacaaaatatgttttggtatagttaccaggacacttactgattaatttttaacaaggtagaattttaaaataaaagatttataaataaaacttttgtttgtattaa

SEQ ID NO: 177014 - DNA, 1739 bp, Homo sapiens
cccagcttccctagcaaccaagcaggcgcaagaagcaaccagccgcgctatccgctcccgttgctaccggaatgcctcttcaggttagcgattacagctggcagcagacgaagactgcggtctttctgtctctgcccctcaaaggcgtgtgcgtcagagacacggacgtgttctgcacggaaaactatctgaagacgatgagagcagcaaagcaaagattgggaatgacaccattgtcttcaccttgtataaaaaagaagcggccatgtgggagaccctttctgtgacgggtgtgagccccagactacctaaagagttttaaagaatcaggttcctgttttttgacctcttacttcctctgtgactcattgacaaagagatgatgcaaagaattagagaaaaatctattttacaagcacaagagagagcaaaagaagctacagaagcaaaagctgcagcaaagcgggaagatcaaaaatacgcactaagtgtcatgatgaagattgaagaagaagagaggaaaaaaatagaagatatgaaagaaaatgaacggataaaagccactaaagcattggaagcctggaaagaatatcaaagaaaagctgaggagcaaaaaaaaattcagagagaagagaaattatgtcaaaaagaaaagcaaattaaagaaggaagaaaaaaaataaaatataagagtcttactagaaatttggcatctagaaatcttgctccaaaagggagaaattcagaaaatatatttactgagaagttaaaggaagacagtattcctgctcctcgctctgttggcagtattaaaatcaactttacccctcgagtattcccaacagctcttcgtgaatcacaagtagcagaagaggaggagtggctacacaaacaagctgaggcacgaagagcaatgaatactgacatagctgaactttgcgatttaaagaagaagaaaagaacccagaatggttgaaggataaaggaaacaaattgtttgcaacggaaaactatttggcagctatcaatgcatataatttagccataagactaaataataagatgccactattgtatttgaaccgggctgcttgccacctaaaactaaaaaacttacacaaggctattgaagattcttctaaggcactggaattattgatgccacctgttacagacaatgctaatgcaagaatgaaggcacatgtacgacgtggaacagcattctgtcaactagaattgtatgtagaaggcctacaggattatgaagcggcacttaagattgatccatccaacaaaattgtacaaattgatgctgagaagattcggaatgtaattcaaggaacagaactaaaatcttaatgactattagaagtaactaagtattgttataagttttttaaaaacaactggaggcatctttgtacatattatggccagttgtacagaatcgctttctgtttagtactttagttctgttgagggcaaaatattataaatctatagaaaataaactgtttgacttgaatcatttctgaataagtaaatctaaataagaatctattttaattccttatttcttcatattaatacatatgtatacttttttgtgttactgaattaagcttgcccttgtaacaaaatatgttttggtatagttaccaggacacttactgattaatttttaacaaggtagaattttaaaataaaagatttataaataaaacttttgtttgtattaa

SEQ ID NO: 177015 - DNA, 1495 bp, Homo sapiens
cccagcttccctagcaaccaagcaggcgcaagaagcaaccagccgcgctatccgctcccgttgctaccggaatgcctcttcaggttagcgattacagctggcagcagacgaagactgcggtctttctgtctctgcccctcaaaggcgtgtgcgtcagagacacggacgtgttctgcacggaaaactatctgaaggtcaactttcctccatttttatttgaggcatttctttatgctcccatagacgatgagagcagcaaagcaaagattgggaatgacaccattgtcttcaccttgtataaaaaagaagcggccatgtgggagaccctttctgtgacgggtgttgacaaagagatgatgcaaagaattagagaaaaatctattttacaagcacaagagagagcaaaagaagctacagaagcaaaagctgcagcaaagcgggaagatcaaaaatacgcactaagtgtcatgatgaagattgaagaagaagagaggaaaaaaatagaagatatgaaagaaaatgaacggataaaagccactaaagcattggaagcctggaaagaatatcaaagaaaagctgaggagcaaaaaaaaattcagagagaagagaaattatgtcaaaaagaaaagcaaattaaagaaggaagaaaaaaaataaaatataagagtcttactagaaatttggcatctagaaatcttgctccaaaagggagaaattcagaaaatatatttactgagaagttaaaggaagacagtattcctgctcctcgctctgttggcagtattaaaatcaactttacccctcgagtattcccaacagctcttcgtgaatcacaagtagcagaagaggaggagtggctacacaaacaagctgaggcacgaagagcaatgaatactgacatagctgaactttgcgatttaaagaagaagaaaagaacccagaatggttgaaggataaaggaaacaaattgtttgcaacggaaaactatttggcagctatcaatgcatataatttagccataagactaaataataagatgccactattgtatttgaaccgggctgcttgccacctaaaactaaaaaacttacacaaggctattgaagattcttctaaggaattctgttctcttgagggcattgaatgtcaggcctctgagcccaagctaagccatcatatccctagtgacctgcacgtatacatccagatggcctgaagcaagtgaagaatcacaaaagaagtgaaaatggccggttcctgccttaactgatgacattaccttgtgaaattccttctcctggctcagaacctcccccactgagcaccttgtgacccctgcccctgcccgccacagaataaccccctttgactgtaattttccattacctacccaaatcctataaaacggccccacccctatctcccttcgctgactgtcttttcggactcagcccgcctccacccaggtgattaaaaagctttattgctcacacaa

SEQ ID NO: 177016 - DNA, 270 bp, Homo sapiens
accaacaaaatctgtctccaagcccaactcctccagcttggtgaagaactgatattacaggaataactactggtctgcaggcacgtattctgtgctaggaacttaacacacacaatcccactggctcctcccaacaaccccatcagctttcaccaaggcacgatgaggcttagagaagtaaggtaacttgcgagagtcacatgcctatggatggctggaccagggtttgaatctggattgtctgatttctaaatccttgcttttcacctt

SEQ ID NO: 177017 - DNA, 349 bp, Homo sapiens
aggccgcctcccaggaaaaagcagaacaccggaaaagaccttgtgaagacttcttatcttcccctccaaatggtgtctcttgctttggctcttgtcgagttggggcttgttggaagaccaggtgaaggcccagctgctaaagcttcccctttctacttcttgttactctattactcaattaggactggtgctgatttaggggaaaaacattatttgaaaacacagaggttccctctgctttgatcctacacaggcagagatatctccaagcagagagatccaaaaaagagcgccccctgcgggaaacgttcttttaatttagactttgccgttcctcctgtggagacgt

SEQ ID NO: 177018 - DNA, 315 bp, Homo sapiens
ggttcgcccaaaacctgggagaagcaagggcacattctatgctggcagcctctgcctgcccagctcatgcccacactcaggggcctttcctgggctttgggcagattgggtgggattcaggttgtctttatgaggcttgagcacagcttgagttcctcctcccatcctccaaccccttcctttgcccctacctcctagcccccaccttctacaatctgttatttccttttatatccaaagaattataaacagaagtccttccctcaagggaacagcaagattcagcaataaaggccagtggggtcacaaaggaca

SEQ ID NO: 177019 - DNA, 132 bp, Homo sapiens
caggtgagacaggtccagaatctggggctggcagttagcagcctagagtctgccctgggccctaacacagaagagttttatatgttcaggaatttttcctttattggtttcttcctttaagcatgaggtcta

SEQ ID NO: 177020 - DNA, 514 bp, Homo sapiens
gtcatttcacttctttctgccgtggtttttccatcagtaaaatgtgagtgataaccatattaatagtatcagcctcctttcattgttgggaggagctgatggtgtaatacagtgatgcaatgtaatgcctggcacatagtaagtgctcagttagcagtagtgatggtggtgatggtggtggtggtctttggtcaggttccctagaagcagagactgacatgaggattctggtgcagtgattcattgagggaaagctctcaagcgaaacccataaggaagaaagggcaacaactggggcaggggacaaagctaactacagatgtggtttcagctgagccccagcctcagcccagtcccatggggacccctagagtgtgaattgcatcactgagttggtggtgccttgaggcaaggagacctgagtgttgtgttctgtattggtcagtcattggctgtgggcatctggacatagccttcagtaagggcagttctccagaggagggtagagctctga

SEQ ID NO: 177021 - DNA, 2094 bp, Homo sapiens
aaatagcccaggcccgaggcagccaggccgcagctgtggactcctcacctcccggaggctctgctggtgcaggccccgcattggagggctcgattggctgcccggctggcactgacgtccccttggagctgggtggcagaggagataaacagccatgtgcaactctccacactatatttaacagctgcggcggagaaggcagggaggcagccacggtggcggctctgggggcagctcttgtcttcggggagaaggcccttggagccgggctggcatcggccttctcggggtgagcgaggtcaccatgccagcttcccagagccgggcccgtgcccgggaccgcaacaacgtcctcaaccgggctgagttcctgtccctgaaccagccccccaaggggggcccggagccccgcagctcgggcagaaaggcctcgggcccatcagcacagcccccacctgctggtgacggggccagagagcgacgccagtcacagcagctgccagaggaggactgcatgcagctgaacccctccttcaagggcatcgccttcaactccctgctggccatcgatatctgtatgtccaagcggctgggggtgtgcgctggccgggcggcgtcctgggccagtgcccgctccatggtcaagctcatcggcatcacgggccacggcatcccctggatcggaggcaccatcctctgcctggtgaagagcagcacactggccggccaggaggtgctcatgaatctgctcctggccctgctcctggacatcatgacggtggccggcgtgcagaagctcatcaagcggcgcggcccgtacgagatgagccccagcctcctggactacctcaccatggacatctacgccttcccggccgggcacgccagccgcgccgccatggtgtccaagttcttcctcagccacctggtgctggcggtgcccctgcgcgtgctgctggtgctctgggccctctgcgtgggcctgtcccgcgtgatgatcggccgccaccacgtcacggacgtcctctccggctttgtcatcggctacctccagttccgtctggtggagctggtctggatgccctccagcacctgccagatgctcatctctgcctggtgaagcgcccgccggcccacacaagcctctgggggcagggctggccctagagaaggggcagggggtggcgaggtggcgggcgtgggtggaacagagcggccaggagtcagagcggccacccccacctcatcttcccctcctggctggaggctggcgaacccaggccacccctcccggagacaagcgtgtttggcagtgccaggcctcttgcccctttgcttggactccaagtctcctctctaggcagccaggacccacccatggggacagccctatttagcttctgctctgggaacagcaaaaatcaggatggtgggaggggccgagtcttgtcttgtcctttcatcatcatgactgttgagttcttggctgtgcccatcacgccacagcacgacgcctgccaaaatgcccccaacctactgcctgatgcaggtgccattgccattagcggtcatcgacagcttagggcagcactttccaacgggtgcccatgggacaccagcctgcgagatgcttttgggggaaaggggttttgtggttcaataactttcggaagtgctgcacactctgtccccaagttggacattcacaaaggccgttattgccgtaaaggctctgacaagccctatagaaaagcttcttgctaaaccttctttaacccatgttttctaaacttatttgaccacagaacccttttcttggggaacagctattaacccccaaggaattattggttcctcaagtgcgttttgggagctgctgccagagagctaaagggcctggggtgtgagctgactctcctctggggaggccgggtgcacacgccacagcccgaggaaagtgctggccaccgcccgtgggcatcgatgaggctttggcccccaggggccggactccgtgtgacctaataggtcgtttccaagtcacccgttttggatgtgcatttcatgtgacaatacagatgacatgcaaatggc

SEQ ID NO: 177022 - DNA, 811 bp, Homo sapiens
ctcctcacctcccggaggctctgctggtgcaggccccgcattggagggctcgattggctgcccggctggcactgacgtccccttggagctgggtggcagaggagataaacagccatgtgcaactctccacactatatttaacagctgcggcggagaaggcagggaggcagccacggtggcggctctgggggcagctcttgtcttcggggagaaggcccttggagccgggctggcatcggccttctcggggtgagcgaggtcaccatgccagcttcccagagccgggcccgtgcccgggaccgcaacaacgtcctcaaccgggctgagttcctgtccctgaaccagccccccaaggggggcccggagccccgcagctcgggcagaaaggcctcgggcccatcagcacagcccccacctgctggtgacggggccagagagcgacgccagtcacagcagctgccagaggaggactgcatgcagctgaacccctccttcaagggcatcgccttcaactccctgctggccatcgatatctgtatgtccaagcggctgggggtgtgcgctggccgggcggcgtcctgggccagtgcccgctccatggtcaagctcatcggcatcacgggccacggcatcccctggatcggaggcaccatcctctgcctggtgaagagcagcacactggccggccaggaggtgctcatgaatctgctcctgggtgagtgtgcctgccgcccgccactcactgtcaggcccctcgggaggcagcctggcctgcccaaccccaccctggccgggacctgcacagccctca

SEQ ID NO: 177023 - DNA, 323 bp, Homo sapiens
tattatctgagtggtgcgggctcagtgggatgtacagcttctttctagatagtttccacaaagtacttacaaccttggtatcgaagcactcatctttgaatgactcaatggcttcatttcctgcagcatcattactttttcctctgaggtttctcattcacatactagtcttcactggcttgtgacttcacagtgtcaattgataagtagcttacaagaccaaagggatctcatttccactaaggaactataaggaactaaatgtatgttctctcctacttgcttgtgaaaatccagaaataaatgttgtgtaattaccaaat

SEQ ID NO: 177024 - DNA, 183 bp, Homo sapiens
taaaactcttcaatgatttctgttgtcaaaggctaattagccgtgtttttgcgcgtagcatatggagcacccgccagccacacatgatgtgattccccacctgcctcttccgcattctcccttacaatttaaaccaaccagcatcattgtattacttgctcataccacgttgctttatgcctc

SEQ ID NO: 177025 - DNA, 215 bp, Homo sapiens
ctcttctctgacgcgtccacgttctgtagaatggaaatgaggcccatccccagtgttgccgccctcaagtgggggtttggaaggtccgtgctcactcccatgtcacgtggagctggctcctagtttttgccatgagtttttctggccgctccctgctttggggcaacatgatatgtcccctgagaggccttaattttcctcacctgtgaaggagg

SEQ ID NO: 177026 - DNA, 1020 bp, Homo sapiens
accatacaaatgcaacatatgtggaaagtcctttagtcaaagttccaacctggcaactcatcagacagttcatagtggaaacaaaccttacaaatgtgatgagtgtggcaaaacctttaaacggagctccagcctcactacacatcagataatccatacaggagagaaaccatatacatgtgatgtatgcgacaaggtcttcagtcaacgttcacaacttgcaaggcaccagagaagtcatactggagagaaaccttacaaatgcaatgaatgtggcaaggtcttcagtcagacttcacatcttgtggggcatcggagaattcatactggagagaaaccttacaaatgtgataaatgtggtaaagcctttaaacagggctcattactcactcgacataagataattcataccagagagaaacgttaccaatgcggtgaatgtggaaaggtctttagtgaaaattcatgccttgtaagacatttaagaattcatactggggagcaaccttacaaatgtaatgtgtgtggcaaggtcttcaattacagtggaaacctttcaattcataagagaatacatacgggagagaaacctttccaatgtaatgaatgtggcacagtcttcaggaactactcatgcctagcacgtcatctaagaattcatactgggcagaaaccttacaaatgtaatgtgtgtggcaaggtcttcaatgacagtggaaacctttcaaatcataagagaattcatactggagagaagccgtttcaatgtaacgaatgcggcaaggttttcagttactactcatgcctagcacgtcatcggaaaattcataccggagagaaaccttacaaatgtaatgattgtggcaaagcctatactcagcgttcaagcctcactaaacatctgataattcatactggagagaaaccttacaattgtaatgagtttggaggggcatttatccaaagttcaaaacttgcaagatatcacagaaatcctactggggagaaaccacacaaatg

SEQ ID NO: 177027 - DNA, 183 bp, Homo sapiens
tcccaaggtgctgggattacaggcttgagtcaccgcacctggcctagaaatttttaattctaagtcctcgggcaccaggagcatctctaatagagacttttcaaaaatgattttaggtttctatgtgggtgactgcttcctaagcaggtgagtaacaaacccatcttaatagcacagctgcat

SEQ ID NO: 177028 - DNA, 521 bp, Homo sapiens
tctgttccttgtccatgtgctctattagcttctaggctgtatgatgcccagttgtgcctctgatgtagaaacaaacacattccctgcacgttgatttgcaagatttgtaaaggtgaggttccagaatctgatttgcttgtaaatttacgtcacttaagctggattttaccttacagttgtttttcttttaaagccatgctttatagcttggcttgttagaactcttctggagtccacgtagaaaacaaatagggaaaaatgctgagaggtgagaaagccattgggagattgccagttgcagggcctcagttgtgcagtctgtccagcaggcctaggcggcatgtccagtaggcctaggtggcatgtccagtgcatacatccaagcacacctttctctttgaggctgccaatgaaggctcttctcacctcagtgacagctttggatgcttacacattcaatgcagggctcattctacacctcctgttgcgagtgtacaggacccttccccagcccaaacgcc

SEQ ID NO: 177029 - DNA, 319 bp, Homo sapiens
ttagattaaataagagactttgtagtaaggcatgcctaatgacaacaggatgaactctaacagtaaaagaatgaaaatgaaaccatctggcaatgaactatgcaaactagacagtatttcagtatttttatccccttaactaatggccatcaccacagtacagcacgaagacagaaacaacatggagatgtaacgttttatttcacaaagttatctaaacaagtttcagggagattaaggggggcaattatgccctaccacacatttcatacacatggctaggttccaggttgtgtgggtgagcaccttttaaattttt

SEQ ID NO: 177030 - DNA, 295 bp, Homo sapiens
ctacatttaacaaaggaaagattatagataaacctgtttatcaaaagacattccttcagcaaaaaacacagagatgttgctcagacctgcccttagccttctgagaatagggacatatcagcaacgagaaaagggctgtgcaaaaggaaaaaatgatatcaaaatttctattttgtgaacaaatatgttgatatttgaaagcatcaacatgacaatatagaaataacaatagtaaatgtggtcaaaatcattttgttggagcccaattttgtttgtaaacggggaaaggtacagg

SEQ ID NO: 177031 - DNA, 357 bp, Homo sapiens
ccctcgataaggggccaatagagacagggtttcaccatgttggtcaggctgttgatctgctcaccttggccacccaaagtgctgggattacaggcatgagtcactgcgctgggccctcaatcattttcataaagctagaattttcattgtaaatgtttgctctgtagagacagttttgttttgaagaagctagtattataaaatgataacagattaagatcagggtcattttatttaacaatgcaaagttattagcaatggtggatttaggcatagaattttatcttaattttttaatttaatttggccttttagaaaaacagcttttgccattaagcagtgtgtttggccagaggc

SEQ ID NO: 177032 - DNA, 395 bp, Homo sapiens
gttaactgacttttgagaaaggtgctgcagtaggctgaatgatgccccctcactccccacatcctaccaaagagaatatggaacctgtgaatacacatataggaccaaagagaatttacagatgtcatgaagtgacggatcttaagatgaggaggttatcctgggtcatctgggtagactcaacataattacaagggttcttataagccagagagggtggagtgagggagaagattatgtggtgacagaagcagagactggagtgatgtgctataaaaacggagcacgggccacagccaaagatgcaggtggtcccagacgctggaaaaagcaagaaacaaattctcttctcagagtcttcagaaggaactagccccaccaacagcttaacttta

SEQ ID NO: 177033 - DNA, 475 bp, Homo sapiens
tggggccaggagctcactgaaccaaagtcctcaggccaggcctgaggcacagttcatgccaagaatgcctggggcgttgtggggaaatggagaaaatctggatgagaaactgtggaacttgttctgtcccatatcccaactgatctcgtgacacccttctgagctactgagctgactttgctaagtatgaaaagtgcagaatccatcccccaaccaatccagacagctggggttctttttttttgttttgttttttgttttttgacacagagtctcactctgtcgcccaggctggagtgcagtagcacaatctggactcactgcaacctctgcctcccaggttcaagtgattctcctgcctcagcctcctaagtagctggggttacaggcacgtgccaccacgcctggccagatattcttaactgaacaaaaatgaaaatatatcaaaatttgcagcatgggcctaggagttcat

SEQ ID NO: 177034 - DNA, 380 bp, Homo sapiens
agacagtgtggaaatagctgctctatatcaaaggaaaggcccatcatggtacctggggagaaaccaggggaggaagcctcctggaagtaggagactggatggaagaattccttgagccccaggaatgttatcagacagcagaaacctcctggtgtccttccagtctacccttgctccagcagctcataatccaggcacaggttgccgatgcaaagcaggaagaagtgctcttttctttgccagtaacctatctggaactcatctacagtgccagccagccatcagggcagcacgggtgtgcctccatcacagcttcttggatgaccacctcccatatcgacagagacctgcaaactattacaacagacaggttagtgtac

SEQ ID NO: 177035 - DNA, 249 bp, Homo sapiens
atctgtaaagcactactgacgtaaggtactatcattgcaaggttttctccagcttgatggggttcgacaggctagtgcaggtctgtagaagttacgtgaattgaacacaatagtacttcaacctaatcaatacctcctttttctgccattcaaccagtcttttaatttacatgtttattcgttggcccttgccctccctacataccacttcacaaatctatcaatccagtgacatccctcccttaaagc

SEQ ID NO: 177036 - DNA, 332 bp, Homo sapiens
cactacgatggtattaagaacaatgaaagacactggaaacaggaagttatacttccaaagaactgtattttcctcatttctgtttcctttatttttccagatgccagatggcttttcaccaaggttttccttgactgagccgaagtaagcaattcaaagaaatattgtacttttttttatttttgtaaagatgaggtctctgtatgttgcctaggctggagtgcagtagcatgatagttacaggaaaggggtcccaatctagaccccaagagagggttcttggatcttgtgcaagaaagaattcagggtgatgccacagtgtgaagtgaaag

SEQ ID NO: 177037 - DNA, 761 bp, Homo sapiens
tgaaaggtaccaaaagcataacatcaataaaacaaagtttgtaacagctaatgattttactatgcctatgatacgttgaacagcccttatccaaaatgcttgggacaagaagtgttttggattttggaatatttgcatatacacaatgagatatgttgggatgggacccaagactaaatacgaattcatttatgtttcatatataacttatacacataggctgaaggtaattttatacaatattttgtgcatgaaacgaagttttgactgtgtcttgactgagacccaacatatgaggtcaaatatggaattttccacttgtggcatcacgttgctaaaaaattttcagattttggattttcggactagggatggtcaacctgtaatatcaattgttaaactgcctttacttgtgaaaggtcaccttttcatacgtatgagtattcattatacaccctccttcacggttctcacagaccctcatttcaagcatcttactgccttggtggaatctttgtggtaacttttagctagtgggcatgtaacaagaatagctaatacttacggagtgcctgatgtatgccaaatatcttatacatatcatcacccatgaagaaggtactgctgtgatccccatcttacaggtgagtggatacacaagacctcagagctactcggctaggctctggcactcactccatggcccgtggtgtctaacccctatgctatatactgcctccttaaggaaagtcagctagctc

SEQ ID NO: 177038 - DNA, 515 bp, Homo sapiens
aagtaatgctgagcatcttttcatatgtgtgtttgccacttgtatatcattctcgaggaaaaattgtctgtttgaaagttttgtttgccccctttttaactgtttgtataaacaattattgttgggttttatgagttctttacatattctgaatattaaccctttattggatatatgatattcaaatactgatatatgattttcaaatattagaaattaataatttttgtaagttgatcttatatgggacaaccttgctcgatcctcttattggttttagtggggtttttgttgttgttgttgtcattgttgttattgatattctctctgtctctctctttttccaggtagataatagtatcatctgcgagcattgttttgtgttttccctcttaatccttagtgttttatttttcatgttgcttgactaggatcttcaatgctgtgtcaaacagtagggtgataatgagcattactcttaaaggaaataaacctaaatattctcattaagtata

SEQ ID NO: 177039 - DNA, 137 bp, Homo sapiens
agccaattttgatgttttcatggactgatacttgtaataaacatttcaattatatatagcattgatgtagaaatgtaccaaatttacatttttttagcttatggaataaataaatgtttaaactgaaattgattcga

SEQ ID NO: 177040 - DNA, 467 bp, Homo sapiens
agcgcagtttcaagtgaaggatgcatctgtgatgcaaaatcatcgaccatttatttgtaatggtgtgtatgtaaccttcaccaaggtattttactggggctagtgcttttacaggcatttccaactttgtagattgctacctctggatctgagaaactgcagctaaagtgaagtcggctttaatactgtttcatggattcattggtacaccctcccaccgtgtttatttgtattttgcaattgtttgagattattgttttggttttttgcactaagcaattgcttggttaatcctaaacaaccacagtgatgaggaaagcatgtgattgtaactaactgcctagggtgagtacctttcagtgagggtttgatttcagtgttagccagagaaggcactagtagccatattattagaagattgtagtaaattgtaaagtctgatcgggagttttgttattttttatgta

SEQ ID NO: 177041 - DNA, 221 bp, Homo sapiens
caaaatataaaattaaagctcacagttcagttgtatttctatagacttgaacaatccgaaaaggaaataaaaaattcaatttgcaatctcatcaaaaagaataaaatacttgggaataaacttgaccaaagaggtgaaagattggcacactgaaaactacaacatgtttttgatacaaataagtggaaatgcatctcttgttcatggattggaagacttaa

SEQ ID NO: 177042 - DNA, 575 bp, Homo sapiens
ttgtggcactttcactacctttcaagtagagacaaggtcttgctatattgccctgggtggtctcaaactcctggcttcaagcaatcctactgtctccaaaagggctgggattaaaggtgtgaactaccacacccagccatttataacaataaagttggctatatcaattgactcttcctttcataaaacattgctctgtagtatgtgctgctgtttgacagcattttacctacagtaaaactttcttcaaaattggggcctattctctcaaaccttgctgccactttatcaactaagcatagggcatattctacatcctttgttgtcatttcaacaatgtttacaccatcttcagaggaaatagattctatctcaagaaagcactttctttgttcatctatgagaagatatacattcaagtttgaccatgagattgcagcaattcagtcacatcttcaggctccacttctaattttagctctcttgctattggccaccacatctgcaacctccatcaaagtcttgaatctctcagtcatccatgcaggacagaatcaacttctttcaaactccgg

SEQ ID NO: 177043 - DNA, 422 bp, Homo sapiens
aaataagacccaactgtatgctgcctacatgaaatacatttcaaaaataatgacacaataggttaaaagtaaaaaaaaaaatatcatgctaacacttgtcaaaatgaagcctagaatttaatatcagactataaatttcagagcaaagaatatgatcacagacaaagaaggttacttcataatgtcaatgaggccgatttatcaagaggacataacaaacataaatgcacctaagaatatatcttcaaaaaacattaagtaaaaaataacagaactgtaggccacaattattgttgagtatttcaacacccctctttcagtaattgatagtactagataaaaatcaaatatctaataacaaatatctgaataacactatcagccaacttgatctaattgacattatacaataccctatacag

SEQ ID NO: 177044 - DNA, 454 bp, Homo sapiens
ggtcaagtatatgccaagtaagaatgaaaaaaacacacataccgactcagaatggtgagcaaaaaaactttgaccaaaatcaagtgctcttctcttgtccatccacattcatctatttccaggtctttaaatataatctgtgtgagaacggcccctacatttatatctccctccagctctggccaaagctccagacttatatattcaatttggtatcttctcacagacatctgcatctaaaactttccataccccaaacaaaactctttattcccctctttaccataccccctcaatactgctcctccctctgtcttcccccatctccataaattattctacctagctgctcagacaaaaattctgggccacatctgatttctttctttttctcaccacccctcatatcaaaactgctagcaaattccatcttctctacctccacaatatatac

SEQ ID NO: 177045 - DNA, 443 bp, Homo sapiens
tgggtgttagaatgccagggtctattctgaaacaacaacacaattcactagagctgttttagggaatacggaaatatttggggaagtccagaggctgtctcctcatcacgtacaaaaattttgtaacaatttccttcacctccccctcttcccacagtaaagctcagcagtgacatttcctttcccctatctagttatatgaatcacttcttactttactacatttttagggattctgtgtttttaccttgaatcaaaagtgatgccaaattatcactaatacatcttgactcttctgatccccaatcagaatttcccctcccctaattgaaagtgacattttctagtacaaaaattttcacgcaaaatgaggttagactagaataaatatgagtcagatgaacatgaactgaaacagaaaaatgtgctggtgcaatccctcc

SEQ ID NO: 177046 - DNA, 473 bp, Homo sapiens
cttgaagggaaaaggcagaagttttttgccaagtgggcaggctatataggaccaggcagtgatggcttgtctctggagtgctttactactttctaaggccagtcgtttaatcaggaactctccagtcttagtctcattttctttctttcttttttttttggtatttttgggtagcagtggggtttggctgtgttgcccaggctggcatcctcctgccttggccccccacaaagtgtggggattacaggcatgagccaccactcccagacccagtcttattttccaaataaggaatctaaggcttagggaaagggagcagttttcgggtcatgctgttgggggagccaggacccaaatacagaacttcagagttcaaacttcagagtactatcacttttatgtcctgtgactgtttttaacagttggaaaatttacattattttctccttatttctcttttgcttgccccacaa

SEQ ID NO: 177047 - DNA, 252 bp, Homo sapiens
gacttcagaggtcgggaatgtcagacaggtttatccaggccaaggggtagcagtctttgctcccggtgtcaccccttccacccctaacatccttgcaccctgcctcgctgcctccctgtgtgatctacggaggaaactggggaccatagggccgtctggccctcgagcacaaaccggggcctgggctacacacaggggaggggcccaggagcaaaaggtgtgtggtgaccctgctgcatactcataaaatac

SEQ ID NO: 177048 - DNA, 303 bp, Homo sapiens
tgaggcagatcccgacaccacattcttcatctgggtatctcttactggaaagggccccttgtcgtgcaaataatcaaaaatagcttctccaaaatttatatcatcatacattcagccagtgttcatatttcaccgactcttgtggatgatgcttgtttagttggttcaaacgtttagtttgaatcaggttgcaaccacgctgtcccaatccattgcagctggtcaccctgtccattcagtctccgcttctaggagccagcctcggtttccttcctgagaaagctactctgcacagcccatccc

SEQ ID NO: 177049 - DNA, 484 bp, Homo sapiens
ctctatccacatctataaattaaatttcatcaaagaaacttctttatatgttaatgcctcagaagaaaacatatatattccttttttaaaagtttcattctttcagagggaaaatcaaatcatttgagagagacagaccatcaaaaatacaacactcagacataaaaggtgattgaaacatattagataggtaagtacataaaaaaaccccacggcagggtctaagtcactttcatttttgatccctgacatgtaggcacagcaactgcacacaggattcaagcagtgtttgtacaacaaatgaaactattcgtctaatgaataaatacgacctattcactaattaaaagcaaattaagttacatatttaaaaaattaacatcaaagtgtttaactcctggcacataccttagaaaactagtttacaagttttacttttcagaacaccatttaaaggctatatgatcagattaagggatattaa

SEQ ID NO: 177050 - DNA, 428 bp, Homo sapiens
tatttttagtagagacggggttttgccatgttggccaggctagtatcgaactcctgacctcagctgatccgcctgtcttggcctcccaaagtgctgggattacaggtgtgagccaccgctcccagcaaccccgttacatttcttatataaaatacactagcttacgagtgctgattctttctgccatacaccaaggcatgtgaaactcaaaattttaaagtcaacagatctcaacatttatgaagaaaatgctccttgattatgccttccttaaaaaaaaaatgaacaagttgctcacaagcaaatcctgattatcacatacacaaagctgtttacttcagactctgacctcttaagcagatatggttaacagctactttcctgtattgacggttttatattatgatcagcgatatcacgcagttcac

SEQ ID NO: 177051 - DNA, 461 bp, Homo sapiens
agcggtggctgggggtcactggctttatagagcagatgcctcaaatcaaatgccttcccaatgccaagctcatcatggtcatggaaattgattaatgcatgcttcccagtttgctcctgtctctgctttcgttgtacaaaaccaatgcaacacctacagctaagatgatatttaaattaaatttagaagtgaacataagctcctggatgaagtaaataatatgatttcgttataagcacagggaatgtgggatgtttcaatgcagatttatggtgttttaaagaaactttgaggaaaaaccaaccacatacacatatgctgactccatggcttatgtttgctctaccccacctgtcctgctacaactgggactggcaaagtgcggcctgcaggccaaatcccgccggggcctggttttgtccagcaaactaagaatggattttacatttttaagcacttga

SEQ ID NO: 177052 - DNA, 492 bp, Homo sapiens
aagagggaatctggtgtgggctaggactatattcagaggggctgtcctcttcccttcctcagagttttgttagatctctgtttcagtggttcttaagggcatccggttcatatgcctatgtgctggggcttcaaaagacccttcttcccagacctccctacttccctgaggtcccattaaagctgcatcaaatgtttgtagaaccagaaaagattagagcaggtaaagaccttagagtccttgctgtccagccaggaaagctgggatccagagagtgggagagacttgcccaggaccacaaactccttggaggcaaagctgagtctagcacttgagtctcctgactgccacagtccttccccactgctccaccaatcatttgctcaaatggtgctgagaggggaagaaaggaacatagtcatgatcttgggaaaggactttcttcaggatgatctagtgccattaaatttacctgaaagccgggcgcggccg

SEQ ID NO: 177053 - DNA, 341 bp, Homo sapiens
agcggatatgcgcattatttttcgttccctcgagacatatacgggcgcgattgagacttatctgaccaaatcatgttgcacatgataatctcgtctgcaatggctgcactgccgtgggcagtaaaaatcgtctgcgcagattactgggcttcgtatgacaacatctttgggaagggatgcattatttctgcctcacacttctaaatatgaaaagctctgtatggctacaactgtctaaatcaagatttctcaacctgggttctgtggaatcccagggtgtccctgaactcgctaggagctccacgcaaaagagtgatttctatcaatgcactgcctttaaa

SEQ ID NO: 177054 - DNA, 152 bp, Homo sapiens
cctggctactccttatcttgtccggaaagaactgactgacaggtgctgagctcaccgggaaatttatttcaaatttcaaaccctatgtactgctccttgtcttctgataatactcatgtgacccctcttctatggactgtcccatccacttc

SEQ ID NO: 177055 - DNA, 328 bp, Homo sapiens
ggataggagcaagagctagtaattgggtttggcaggcctggtcaaaggggagctttaaggtcaggtatatccaaacatatcaggaagtaggttacatggtgtggtgaaatataccagatgtaaaatctgcagaatgtactcctgctgttgagtccaacttgcaatgtaagtccctttgcagtgaaggtcttgagtatgtattgcatgcagcaggcagaggagcgggaggagaaactgtataatgtatttggtcttgaacatcctttgttttccaaaaccacattcatctctaccttggttgaaatgtataaaactaccattttaagtt

SEQ ID NO: 177056 - DNA, 246 bp, Homo sapiens
ctacccaatgaacactgtccttcctagtcattgtccattcaggcctgcacattttagcagactgagactatccttctgttgtcttagaattatcttggtaaacacatatagctggggacatttctgcctgattaaccctcagtgcaattttgatttcatttagaatctgaagacatgagttgattcaaaacaaatatttcctcactgggcatgctgtttcactcactgacaacaatttgctattta

SEQ ID NO: 177057 - DNA, 307 bp, Homo sapiens
atactcaaattgaaaaccagatacatgaaactcaactgatggtaacaaaatgtcagtaaaataaattcacaagctcttcctggaacaccacaaataaatgacattatttactactctgttgcatcaaggtctaaacacgacagttactacgaatgtgacatatttgttttctttttaagtagtattatcagtctcacccagctagaaatactagtggctggaatccttatttacttaataatacttaactagcatcttcttgcttctatgatcttagcatctttcagaattctcctatgtgtactct

SEQ ID NO: 177058 - DNA, 446 bp, Homo sapiens
gcattgtcatttcttatcctgtacatatttaatatgaacctcagattatcatggaaattgattgtttccttggtagctggttgtggagtgtttttgtttttgtttttgttttttaatttttccctgtaaagaattgaagggtatcagagaaaaaagcaggagtccagacgagataatggtggcttggattacagtagtaatagaggagatggtgagaagtagtcagtttggggctatgtttttgcaagccttgtgatagactggatgtgaggtgaaagaagaggagtcagagataatgcttaggtttctagtttagcactgagcaatccagtggatgatggtttcacttactgaggtgggaggatctactgtgtaaacataatttgttaagaactttacatgcttgatattgcttacttgtggcagggctgggattcaaacccagg

SEQ ID NO: 177059 - DNA, 333 bp, Homo sapiens
cagtcctgccgttgttattcatttgcatcaaatgttactggagagatatgttttgttaagctcacatagtgactatttagaattcagaagagagagagacttctgtgctttctgcattccaggttgttgcaattgatttttttctgcttttctaacaactgccctgattatctgttttgcttccattttctgttgcttcttgccctttgcttgcaaaacaaacaggcaagcctggtaagtaaacgcttttccccctaatttgacacctgcccattgcaaccctttgtttgtttgtttttctatttttgttatttttgctttgtgtattgctgc

SEQ ID NO: 177060 - DNA, 185 bp, Homo sapiens
tatttttccagtgtgtctgtaccatgttattcttgccagcgatgtatgagaggtccagtttctcggcagcctcactatcatttggtgttgacactactttttcttttagctctcctaatagatatgtagtgacatcctgccatggacttattttgcatttcctgtggctaatgatgctgagcctc

SEQ ID NO: 177061 - DNA, 379 bp, Homo sapiens
tacaggcactatcaatacaattgcaatacaattgcaatcaattatagttattatttttatcaatgcccaaattatcgcatatttggccagtgggaacccctttaagctggctcatcttttttgagatacactcattagtctgagcatttccttcctttctgggacaacacagtgtcccaggctcgcctagaatttcctctgccacaatgtggagccagccatttcttcaaggagtttattttcattttcatggggaatggtaatttgaagttaagatctggatgcttactgcttctggagtgtcattttatctccacccaatggacagagctgggaaatacactttatttttttgagacattatctggatctgtcgccc

SEQ ID NO: 177062 - DNA, 317 bp, Homo sapiens
ttgtggtggtgatgatgttggatgatggtgatgatattggtgatggtgattggtgatgatgacatgatggtgatgatgaagataatggtgatggtggtggtggtggtgatgatggtgttgatgatcatgttgctgatatgatggtgatggtgatgaaggtgataacagcaatgatgataatggtgatggtcatgacgatgttgtaggactttttccttagttcagctaagagccaggctgttgtcacaaggtcatgagagattaggcttgcagacactttgaagagtgagaaaaaaggagcttattggacaaaaagg

SEQ ID NO: 177063 - DNA, 396 bp, Homo sapiens
ccacagactatgtcaagttctacacagaaaagaggctatgaaactgtggctctggtgactgtaatctcaggacacagctctcacaccacgagaggaatagagaacaatgatgggcctttggtgaagaaatgtaccacgagggaagtgaggcagtttagctgtggatttccactccctcaagccccatccaacaatctcggggactcactgaaaaaggtaaagtaacaaacccccgagtgccactctccccaggctccttcacagcaggcagcttccgcctcaccctccaacacctccaaggcgctgccatctcccgaggtggtgagtggccccgtgcttgcttctctccaaggctgccgcaccatctccctgataccccaacgcgtggccctatgc

SEQ ID NO: 177064 - DNA, 247 bp, Homo sapiens
aaataaagggaactaaggggaaatttgctttaaaaggaagctggacaactgagggttattaactattgaaacaatatatcaaacatgaattgtggaatatttcatgagggtgctatttaaaaataggtatgcatttgtttgccctggagtaggaattggaaaaatagataatatgattgggtttcttttaactaaattatgtaatgtctaattcaaaaagcacttgtcccttggagaaagcactatt

SEQ ID NO: 177065 - DNA, 348 bp, Homo sapiens
acctaactgactgatgactgactacctgactgactgattacatgactaactggctaactacctgactaactgattgactgactacctgactacatcactgactggttaccttactgactacttgtctgactgactgactgcctgactgactacctgactaactacctgactgactgactacctaactacctgactggctgactaactaactgactcattgattgactgcctgactgactacctaattacctgactctcccactaactgactgattacctgactagctacctgactggctaactcattaactgacttactatctgactgactaactacctgactgtctg

SEQ ID NO: 177066 - DNA, 173 bp, Homo sapiens
ctatttctccaaagtttgggcaagcagagtcaacttgaactcctccaccttctttgctgtgcctagcctttccttcaatttaacctcagtagcatttatgagcttaagaaggggaagcgggtggcagagtgctggcaaaaagagaggagacttgggatgcctctggaagacat

SEQ ID NO: 177067 - DNA, 541 bp, Homo sapiens
attttaactcagttatgaaccttatatggaatgatagttaattcactttcttatttaatggattttattatttagaacagtggttgtttccccaaaacattgggcagataatccacagagttccagcatttttattccaggctggagtgcagtggcatgatctcggctcactgcaacctccgcctcctgggttctagcaatccttctgcctcagcctcccgagtagctgggaatacaggcgcacaccaccacacccaactaatttctgtattttttagtagagagagggtttcaccatattgaccaggctggtctcaaactcctgaccttgtgattcgcccacctcagcctcccaaagtgctgggattacaggcgtgagccaccgtacccagcatagttccccctattctaaacatcttgactggccaggtgctgagccttatacctgtaatcctaccacttaggtaggccaaagcagcaggacagcttggactcgggagttggaggccagcctaggcaacatagcaagaccctgtttcca

SEQ ID NO: 177068 - DNA, 679 bp, Homo sapiens
atctgcccgccttggcctcccaaggtgctgggattataggggtgagctaccacgcccagcctgctttttctttttttaacatttaacgctttcttgcaaaggcatgcaagcacacaccccaagttgctgcctacccctcagctgagactgtcacccacgaagcactgggccgtccttatactctcctgcagccgcagcctcagcctcccaagtggctgggactataggcgtgggctaccacgcctggctaatttttgtatttttagtagagatggggtttcgccgtgttggccaggctggtcttgaactccttagctcaaatgatccacccacctcagcctcccaaagtgctgggatgacaggtgtgagccactgctcccagatctgttttgagtcactttctctcagttgtcctctgtgttctttttacaactgtttgttgaaaccagagcttaattaagcccttgcttgctatgtcactttgtttaaaatggtccctctccccttgccattgatggggatgaaatgggctcatttgtcctgcagggaggcgcccagttttgatttggccaattgctccctcagggcaccagtccacctatgcctcatagctgctgtagcttgggaattgtatcccgtctggaagagtctgattctttttgttgttactgttggtaag

SEQ ID NO: 177069 - DNA, 392 bp, Homo sapiens
ggaaaagctataacaggaaaagctatgatcagtgtagagttgttatcaggtaggggtgtgcaacagggtacaggggtgactggactttttcatcaagctgtgaatagatagtgcagtgggaaaatgttgataaagaaaaagcagaatttagttatgtttcaggtaaagaacagaaagccccaaattataacagtatgtattttttagaaaatcaatgacttgatgaaactgtctgaaattttgctcagaaccactactttccatctgcctattcaggtcgaacaattttttccctcacatttcattttttccttatctatgcttaagttataaatgtaaatctcttaacctctttccaaagatcaaacctacatttccatctgcctgagaaa

SEQ ID NO: 177070 - DNA, 381 bp, Homo sapiens
agttaaggacaccaggctgggcttaggctgcttatcgcattctgggggccaaagggctcgggggggtcctggactttttcatcaagctgtgaatagatagtgcagtgggaaaatgttgataaagaaaaagcagaatttagttatgtttcaggtaaagaacagaaagccccaaattataacagtatgtattttttagaaaatcaatgacttgatgaaactgtctgaaattttgctcagaaccactactttccatctgcctattcaggtcgaacaattttttccctcacatttcattttttccttatctatgcttaagttataaatgtaaatctcttaacctctttccaaagatcaaacctacatttccatctgcctgagaaa

SEQ ID NO: 177071 - DNA, 501 bp, Homo sapiens
tgccctcattttagaatgatggtagtgactgtgaattagctcattttagtacccatctccatatcccagtttgactggatgcagtgatccttcttcacctcatgttatcaggccctcagaattcatattctccatcaagtagactgaaggccaagaaaagggccttgaacatggtgcttctatcacatacccaattcctagtataatagtccccacgaattcatgggggatacattccaagcccccagtggacatcggaaattgcagatagtaccaaacctgactgccatcaattggaacatgtttgtgttcatgtggctcacctacaaattttgtgctttttccctcataactaagtgctatcatgcactatgtccataatgcgtgcacttgaggtgcaacagcaaaactagcatgaatttgtctttcctccttcacaatttcacagaagattcattcttttttttttttttatttttgagacagagtctcactctgctg

SEQ ID NO: 177072 - DNA, 654 bp, Homo sapiens
ttccacgtatctcctgagctccctcagggcagaaaccatgcccgtattcacctttgattctttaataccctggataacaggacacagtgtaggctcaacaagtgtctgttgaatgcatgaatcaacaaaaggcaggtggactaaaagaaccatcctacttctcttctttgggacactcacaccatgagaccacctcataagccttgcccctgtgagtttcaggccgtcttctcaaatagacttacccacccatcgtaaacaaactgcatcatgcgaactcattccttccaggcattactaattctctacaagtccctcccctggaaccttacagtgaaagtactcaaaggtctcccttctgaggagaatatctcactgcaagacaccacctagaattccacaaattgataaaccaaaacacgatgggcatgacattcacatatataacttccttctccacctagatcgcaggggcgaaaacaaaaaaaccctttgctttgtagccttcatcttgacctaaaaacacccagaatcctgattctggggccaaccaaccacctacttccaagcagtaacaattctaggcactctccagcctccgtttatcttccttagtcctttctgattacttaagcagaaaacacatacacacac

SEQ ID NO: 177073 - DNA, 465 bp, Homo sapiens
agcagaggtaatgggcacagcaggatttaggcatctgtggttcctgactacaacaccatcaaacccccaattttctctcacaactggtattagtatttcacatctagcccatgaggcaactgaggctcacagagggcaattgactttgttccaggttacacaactatcaagtggcagaatcagggtaggaacttcaatgtgtctaactccacgagcgctctttccactatgccacaccgcattggagctgagatttgaagggtacacatgatctgtgtgccgcagaggcagaaagaggcaaggtcaccctgtcccactttaaaaggtctgctgagatctcacacacatgcacatgcacacacacacagtccgctgctgccacacctccaatgtcatcaggccagctgtctttacaaaagccaaaaaaaaggaactcctttgccaacactccgtttacaaagaata

SEQ ID NO: 177074 - DNA, 400 bp, Homo sapiens
cgcaaagatagatggtttgcatatggtaaattctctttatggtacacagttctgtgaatttttgacacacgcatgcagttgtgtaaccactatcacaatccagctattgaccaattagtgtgattataatagtggttacacaattaccacgattttttttttttttttttgagacagagttttgccctcgtcactcaggctggattgcactggcacgatctcggctcacttcaacctctgcctcccaggttcaagcgattctcctgcttcagcctcccgactagctgggattacacgcaacaacacgcccagctaatttttatatttttaatagagaaggagtttcaccaggttggccggtctggtctcgaactcctgacctcaggtgatccacccccct

SEQ ID NO: 177075 - DNA, 429 bp, Homo sapiens
ccgggtgaggtcggacaaggggaagaaggaaccgcctccgcgcctcccgcggccctgccccaccgccccgaggccggccggtggaggctctctccacccatcccctggaaaatgaaagtaccccagaagcacaagttggcctgcagagcgcgagagcgcggaaaggccgctgacagcaaggaccgcgcgtgcaccttgcggccccggacccttctcagcccgaggagtttgggcttcaggccctcccagacacggtgcaaggagaggctcgggctgccgcccccgagtccatgagcgccggagcagttcccgccctcgaagttcctctccgggagagagggagagagcgagggagagaatgagacagggagggagggagagaggggcgcgcggcttctgaggcgacccctcccggagatgctgcggccg

SEQ ID NO: 177076 - DNA, 152 bp, Homo sapiens
caaaccatcattttctctcacctggactaatgccagagcctcctgactggtctcccagcttctcttctagttctaatacagtctaattccacacagaagccaggatgatccaccttttcaaaagccaatcaattcatatcattccctgctct

SEQ ID NO: 177077 - DNA, 184 bp, Homo sapiens
cttaaaacttgtttaaattatacagatgagattgagaattttaaaattcctatctatgagacatgtacattctataaatcttggcatcagaggtgagcttccagttggaatccctattcagccagagggttgtgtcttcattcacttgttagacactctcttcccttttcccaggatggaatag

SEQ ID NO: 177078 - DNA, 373 bp, Homo sapiens
tgagaataatagcatctactcagagggttgttgggaggatgaagtccgatgacaggagccctcacagctgagccggcacctggggaggccctagagtgtcgccttcgctgttaaggggcatggcagaggaggcccacccatgacagaggagcttgtcatcccaagcaggaatgccacctggtctgacattaggattcaaaaggcaaatgataaactcctgactgtgaggccgtggtggctgctcggttaatacttgtgcacttgacctgaggtgagcatcctccacacctcccagtgctggcctaatagctaaatgatttcctctgactcacatttattgagcagtcactatgctaggtaggggagatgtgtg

SEQ ID NO: 177079 - DNA, 223 bp, Homo sapiens
tggcattaagatacagccatgcgattatcgtggatgggaaaacggcaagattgtaacaatctgcaagcatgttgattgatcagagttgcaaagtactatgagctggccgatggcatacacaaagtgcagaggagctctcaactctgtaagaagaacaatgccggaggagtagaatagctatccttagcccaggtgctcactgcccctgtcacgtatgctcatg

SEQ ID NO: 177080 - DNA, 517 bp, Homo sapiens
tcctcatatcctttaatctcggcccagagatttttctatatagtgaactgtaacccaactcaatgtgtaaacagattataacatactcttgtatcaatcacaaagttttggccaatcacatgttgccaaatcttcaaaccatgttcaaataagacaaatgccaagctgtaaccaatcggctatttctgtacctcgcttctgtttcctgtacattactttcctttttctgtccataaatcctctccaaccatgcagcagcactagcggcagactgaatctattctggctggggcaaggggtgaagataggggtagtcctgactcataaaaaattacttgctcggctgggcatggtgactcacacctgtaatcctagcactttgggagggtgaggcaggtggatcacctgaggtcaagagttcgagactagcctgaccaatatggtggcatgtgcctgtagtcccagctactaggaaggctgagacaggacaactgcttgaacccaggaggtggaggtt

SEQ ID NO: 177081 - DNA, 326 bp, Homo sapiens
cctcgtaactggagcagctctgttctatacaagttctctggcattggaaaaccgctccgcgatttcagtgcaagcattggcggcctattccaatcgctgctccctgatttgaatggcaggtgatcagtggcccctgtggcttatagacacaccagagctcccaggggaagtgctctgaaaactcatcctggtcagagttcagaaggacatgtggagtataaggtcagatgcagaaataaagggagatggtgtggccctcctgcctggggatgctgagcaggttgctggaggcggtgatctcactctgaaggagacagacacagaaa

SEQ ID NO: 177082 - DNA, 173 bp, Homo sapiens
actgggcatatatagatactcagcaaatatattttgaatgaatcacagagtttaagtttcctctgtcttcctttcttgacttctattgaaaatgtaagccaccgcgtctgatcctgtgctacattatatcactagcacataacacaataacccggacggttaggtctacctgg

SEQ ID NO: 177083 - DNA, 161 bp, Homo sapiens
gtaatctatattcaagaaccgttttaatcttgttggcatcattctgattttagaaagtgctgccaaagccaacactccttgctgattttctgtctagttctatcaattattgaaaaaggcatgaggaaatttctaactataattgtggattcatctatatc

SEQ ID NO: 177084 - DNA, 233 bp, Homo sapiens
tgtatcaccctaatcccactaccctcagactgcctgaaaaactctgttccttcaaaaccccattcaagagtcacttcacctggaaagccatccctgagcctcctgggcagggtgggggatccccctgagggcttccccgtaaacaccccacacactcaacttctgctagggcacacaagtcacacgtggtcgaagttaggtcaatatgtgacgtatgaatgacttgccagtag

SEQ ID NO: 177085 - DNA, 366 bp, Homo sapiens
gggtgtgaatgaacattgttgaaatgacaacaaaggatttagaatattacgtaaacttagttgataaagcagtggcagtgtttgagaggaatgactctaattttggaataagatctactgtgggtaaaatgctgtcaaacagcatcacatgctacagagaaatcgtccgttaaaggaaaagtcaatgtggcagacttcattttatttttgtaggacattttagttataacatcaatttctgtaatagttgcaggactattcagattgtctgtttcatcttggttgagttttggtagtttatagtttttgagaaatcagtttatatttaataacctgttcaatttatgaacttaaagttcttcataa

SEQ ID NO: 177086 - DNA, 453 bp, Homo sapiens
tatctccattaagtgaaccacagagaaaaaagaagagaagagttttacttctgtcatctggtgatacatgcttggtgaatacaagaaaccacaggataagcaacagggctcttgtggtaaattccacaggctctcctgatagggcagccaagtcttttcccagtagccagcccttggcaactaaaacatgtggttttatttctatggatgttgtgagtgtggacctaaacttctctaagagaacttgtatttctcaagcctaaagatgtattacatttttttgtatttgtatttgatccacataaagaaggggaaaaaaaattgtgtgtgtggatagcattccaagaaggaactctagccccaggaaagctgctatttctgctcttctccagctacctgccaacaatttgtcctcaaaagaggctctttctgactatttacagatctgtcact

SEQ ID NO: 177087 - DNA, 773 bp, Homo sapiens
cggttttcctaggaaaactctggagaaaattgaggcaggagccactcattcgtgccccttccagggtggacctcttatcaccctaaggattgtttgttttcctgtcacccacatcaagctgggtggtggccgcagcctttgatctccacctcctaacccctctcccaagtaccctgtgtttgcccagcactgaatgagacagctaaagtgatccctgagagaactaaagtgttccctcaggccgggcgtggtggcttatgcctgtaatcctaacactttgggaggccgaggtgggcagatcacctgatgcgtacgagcaggttctggaccagatggtgaaacactggtgtctactagtcttatgctaaattatgaccgggcgttggaggtggggtaggctggtagtccccgtgtactcgcaaggacacgggacgatgaatgccttgaagacctcaggagatagccggtagcgtgtgaggtggcgatgacgtgcgccgtgtgacgccgatgcaaaaaacaagggggaagaccacagcgggggagagagattgcccccatgaaggagtagtcccccatagatgtgtgggccccgattaccacataacgttattagtcgacaaccaaagggtggccccccataggggggcccctgaattattaaagagcgactgtagtggacaaggggccaggggacttagcaccgacggttgtagacacgcgggccaaaaccggtgcgaaaagggggcacccggggagacactacgcgtaaacgc

SEQ ID NO: 177088 - DNA, 121 bp, Homo sapiens
gttcagaaaacaagaggttcaggaaagcaatgagaattactcttactcaaggtgacatttgtacagcaggctgtgcggtaagcagtccaaatcctagcaggagaatggagcactccccaga

SEQ ID NO: 177089 - DNA, 249 bp, Homo sapiens
ccgcggttgactctgaggatccccctacagagatttaaaacatgatccctttgcctcaagccaataggaaacaagctaaaagcaagcaatcataatgaaaaggaaggatgttttaagtagtaaaggagaaagaaaaaagaaactcaaatggattctctcattctcaacaaacaagcaagtgaaacttctttgggtaaagagagaacaaccagaaagctattctggctcttcagtgctcctactgcaagg

SEQ ID NO: 177090 - DNA, 333 bp, Homo sapiens
cttctattaggcgtgatgggctcaggtatgtatactcctgaggcgagcaggattgaggtgtttagctcaggggtacttctagaggggtttagtgagtgaattcctgtatggtggtcagcaacctcctaattcgggtgttggtgctaggcttgagtggtagaaagctcaaaagaagctgaagactaaatgataggaggccttggatattgagagtaagaaacttgaacctgattctttatgttataaatatcttttgaagggttttgctaaaggagtgtgacgtggaaggggtattttagaatgaagaatctggaagagtgttgctggagaggt

SEQ ID NO: 177091 - DNA, 404 bp, Homo sapiens
gatctaaggatccccctggtacgggagtgggaaactgtgaggtgctgcttgcgtgtgtcatggtcctaagctgcccactgtcctctctcctggtgtgttcaggcctccccgaggtgcttctcacgactttcacacccggtttaatccacaccgctgcgtctgtcctccgtcctggggctggtcttctccctcatctctgccggaggcttttaatctcttctgccactcttctggaaagtcaccagcaatgcacgctgctggctctgcaggagggtcagggggacggccctcggcctgtgcgtggtgccagccaccctccctgcctccctctgcgtgcgtcccgtgtccctgcctggggtgtgtgtgtcgagtgactaacgtctctctcctgcctctccctcctg

SEQ ID NO: 177092 - DNA, 291 bp, Homo sapiens
cacccagctaattttaaaaaatttttttgtagagatgggggcctcgctatgttgcccaggttggtctcaccctcctgggcccaagcaatcctgccatggcctcccaaatcactgggattacaggcctgagcacccaacctcctaaaacttctgattagagtctagtgcaatagcagttaatgcattgaccatttctcaaaggtctgttctgtgcagggtactggagacatagtggtgagcagaaactgacacttccctgtccccctggaacttacattctagtgggggagg

SEQ ID NO: 177093 - DNA, 231 bp, Homo sapiens
gaagttttagctgtttcctcatgactcaaactgcctctgaacatttctctttttattctaatgctttccttcccccgccttctttctgccaagcaggtaagtgagggacagtggattaagagaaacgttccagttgccttctctcagtttcaccccttgacattttgagcaaacattttcagaactctgatttctaaattttcctggggaatgttctagtgaatatctagt

SEQ ID NO: 177094 - DNA, 521 bp, Homo sapiens
ggaaaattccctgcccaaggatcctgttgaatataaagaggttacagtgggaagcaagtagagaagattaatatgtgtagaagatattagctggggcaagcaacaaagtggccagtcagccaaaaatttaatggcaaaatttggagaaagggacagcctaaggacttccactaagatgaaacttactgatggtggttcagaaatcaatgggaatgcatatagctatgttcagtcaagaaaccagagaagtctctgtgagctattagtagtctccactattgaatctagtctatctaaaccttatcatttccaattaaactacctaaattatctaaatattaggtgtcacactctagaccatttccacaatctttttagctcacttactctactaaatttgttccaatcattcaatgacactgatgctttttcactattcttttcccttcactttctctcttcccaccatacccaaattagattcaatggttcatccctgtaagtcaatcccttgcacacac

SEQ ID NO: 177095 - DNA, 262 bp, Homo sapiens
agtgactccacaaacagagcgcaagcacaacacacatatatatgtgtgtgtgtgtgtctctctgtgtatctgcctatatgactgtctgtctgcctgtgtgactgtgtgtctgtctgtctgtctgcctgtgtatctgtctgtgtgtctgccatgtgactgtgtgactgtgtgtctactgtgtgtgtaccgtgtgggtgactgcatgtgtgtatgtgactgtgtgtgtctgtgactgtatgtgtgtgtatctgtgtgtctgcct

SEQ ID NO: 177096 - DNA, 420 bp, Homo sapiens
ttacaggctggtgatggtgggaaaaaatactgttgccacaaaaaagcgaagaagccacagtacaacatcaactaagattgtatgcttgagatttcacctcaagaggccctaaaagaggttcatcagggcagaagacagttttactttaagctgtcttttagagcttctgaagggatcaagtgagtatgtgataccttttttgaaatttttttttaatacaagtgttcaaagtgtaattcctttaagaatgccaccaaaaattttagcactaaagtagccatgagtatgaaaaggctgagaatcactgttctacacacatccttatcatgctaaatttttttcaagccatgcttcttcacctctcaatcttcagataggcttttccctgtatatggaaccttccaaaataccctcttctgc

SEQ ID NO: 177097 - DNA, 275 bp, Homo sapiens
ttgtgagactttcaaaaggtacccatggggagggaagtgagaggaggaggaggggacggtgaagaaacagcttctttatttctagccttgcttgaatggcttcttgacggttactgctccagttttgctgagtcagaagaatcccacagccgctcaccggaaacacagctgttgggcaaaaataaccacagagctgagcatcatgcaccttccagaaaagatggcagaaaacctcaaaacaaaagagaaatacaaaacaataggagacactgtca

SEQ ID NO: 177098 - DNA, 568 bp, Homo sapiens
agacactcttattcacagaaccagacttccagttcccagtagagggtatgatggtcctgccctgcttgtggacatttgtaatatgaaaccccggctttcaggaacattccatggatttaaaatggagactgctctgaggatatatgacccacactgcagatggatatgaagtagcctttaatcaacaggagaattctagtttcattatgcacttctagcttttggaacaatattgacacctgcagttagaaaacaaaaagcagccgggcgctgtggctcatgcctgtaatcccagcactttgggagtcacagcgagactccttctcaaaaacaaacatatatatatatatgtatgtatgtatgtaaatggtctccagcaggtacagtgaggtatatatggaaaaacatcttgagatttattttgaactttcaaactcagaatgaatagtatattgtgttcaagctattacagattttagactagtggaattctaattaaacaggcttcactgtgcatggattgtctgtagttcactgtcattaagtcctgctgtttttgttagtattt

SEQ ID NO: 177099 - DNA, 588 bp, Homo sapiens
acgaagtgctgccacgaagtgctgccacgaagtgctcccacgaagtgctgcccacgaagtgctgcccacgaagtggctgcccccgaagtggacatttgtaatatgaaaccccggctttcaggaacattccatggatttaaaatggagactgctctgaggatatatgacccacactgcagatggatatgaagtagcctttaatcaacaggagaattctagtttcattatgcacttctagcttttggaacaatattgacacctgcagttagaaaacaaaaagcagccgggcgctgtggctcatgcctgtaatcccagcactttgggagtcacagcgagactccttctcaaaaacaaacatatatatatatatgtatgtatgtatgtaaatggtctccagcaggtacagtgaggtatatatggaaaaacatcttgagatttattttgaactttcaaactcagaatgaatagtatattgtgttcaagctattacagattttagactagtggaattctaattaaacaggcttcactgtgcatggattgtctgtagttcactgtcattaagtcctgctgtttttgttagtattt

SEQ ID NO: 177100 - DNA, 650 bp, Homo sapiens
gtagggactaggaactgctgacaaatattttgtacccttacttcagagcagaaaggctatttgggagcaaaattctctcatggaatgaagagcctgttaagaccttttttcaccaagtaaaacatgaggaagctgtggatgtgcagtttctttcacacctgcaaattacacagcaatcattcacccagcaaaggaacatttgctcctaggggctggagggagctgccgtagggagggtgagaggaaactgaggcttccagagacaccctgtctgcagacggcaggtagctgttgcatgcacctcatcccatttaatcctggatgttactggctccatttcacagataaggggactgaggctcagtgaggttgagaggaggtagtggggctggattacaggggaggggtcactgatgagtgagaaaggtgggttgggggacttccctgaaagcctctctttctctggaacccaggcatctgggcctcctacttttctggctgcccccaaatgtctttgctaagcaacgtagctgaacagtgccaagagatggcagtccctaaggtataacaggaggcacccccttctccccatgggaattggatgcaaagaagggagaagcccatgacgatgttccctgtgggcacgtggc

SEQ ID NO: 177101 - DNA, 373 bp, Homo sapiens
gccaggtgctgcatttgtcccatgtgcccagtccacgggcagatggactgggccaggggggtgacacctggtccaagctgtcccacccaaactctccctagaagagtgtgaaaatggaatgctgaatggaggacaggtgactcagtggcagccatatgtgacccagatgcaaggaaaagcagagacggagagtgaacgaagcagttgtgatgagagtccatggacaacagtcccagagaagcagaaggtcaccttagctgctgacaggttctcctgtcctgtccctggccctcccaaagcccagctgtgtctctgccattgagttctgtgagggctgcccttgtagcccactaataaattatttttttcttta

SEQ ID NO: 177102 - DNA, 183 bp, Homo sapiens
cttgtttgcccaacagctactgagctcagataatgggcatcatagctctgtgggctttgcagtgcaggcctcagaatttaggagactgagcctcaatagttattgataatactaataccatacaccactgaacctaagaagccattgattagaagatgtagtgttattttatatacagctaag

SEQ ID NO: 177103 - DNA, 471 bp, Homo sapiens
tggcctcccaaagtgctgggattacaggcgtgagccaccgcgcctggccagattatgtttcttatcagacttaaagtcagtgttgatgttaaatgctggtgagcttttcctgaattccagaagggaggaggccacaatgaggcctgtctgactcccctcttcccataatggcctgaaccagtctttcagatgaaatttggatggccctggcctagaagaggaagtccattcagatggttggcaggccttgggattttaattttggtttacacaattttgaaattatttgcatataaaattattaggaaaattatttgaaattatttggaagaaagattgttgcctgagttggtctgtccctttctactgtgactggacacaaaatatcagttgtatttggtgcagaatttttctgtggagttgctcctgagtgagcattattgtgcagctctgatactggcctggcccagg

SEQ ID NO: 177104 - DNA, 648 bp, Homo sapiens
tattgtcttgggtatccaaaaccccatttcccccttttttaactgtcctagaaaacatcatgcttccctcctttatgcaggccccgtgcagaccacaggtgctcagatgccaggcaagcctgccttccatgctccctccaccatcgtcctcctcggggagctaacacagctgcttggtgagcatcagtcaatgagggaatccgatacacctgttccccttgacttcagctgtctgattttcatcttcatgaatattaaaaagattcaccttctcctggaatttttcattctccatgcccacatgctttcagacacctctcttctcctttttcatctggacctacattgcaacctttcctttctctttattttctgattatgaaatttggcataccaacgtagaaaatctggacaggacaaaaatacaaagatgccagaggcaactccccttaaatcccatcatctatgggcaactcctcttaaatcttgctacccaggggcaacttcccttaaatctcacaatccagggacaacttcccgtaaatcccaccactcaggggtaacccccgctatatcccaccactcaggggcaactccccttaaatcccgccacccagggacaactccccttaaatcccgacactcagg

SEQ ID NO: 177105 - DNA, 259 bp, Homo sapiens
ctcaagcattcctccagccttggtctcccaaagtgctgggattacaggcatgagccactgagcccggcctaaattgtattttctttttacttaactctttttatagattcaattaaatgtttgcttctacctaaatcttaagtagttagggtccttgggagtagataatgtatttagtaattatttatttttaagaagaaattagaaatctacacctaaagtgaatttctggggtagaaaaatctgggccctactagaa

SEQ ID NO: 177106 - DNA, 406 bp, Homo sapiens
ggtcaagtgtgaaaaggaaaaaaggaaaagaaatatggattcactgcacagcacagtgcagtgaggagaaacaacattcagagaggcagcaggggtggggagggagcaggaaacaatcttgttgaaggagaaagcgaagaacataaagaaagagaaacttttatttaaaaataagatgagaggtgaaggcgagggattgcctctgaccttgttgtccggggggagtgggagtacctggattcaggaagggactcttcctgatcttatcccctgaatttacctagctcagtgcctgagacagggaacccactttctaaaggtttgacccaaggaaagtgaaacaatcaaaggtgcatgatacctggaatgagttcacggcatgcattggttgggggctgctagtgct

SEQ ID NO: 177107 - DNA, 510 bp, Homo sapiens
ctaactgtttttccccacagactcaattaagagcctgcaccatttaccaggcattgattcaggcattttgagggaagtgggctgcaaagagcagctgaacgcccctcagctccacagcggtgcgaggttgggaggggtgagcagcccacactttcccgtggacagaggtcttaggttgactgaacagtgtcggctctcactgttagagcaatagaaacgagagggtgggagaaaggggtgcagtctctggggtcaacgtgagtgaattcagggcataatgaagcacttcataatagcatttcattacagtcaaatatgccacagcctaaaggccatgatttaggagatgagcccacgtatttacgttcacaattccaagtggacccatgtaagacctcatttttataatgaggagatggaaaaagcattatttacacccaatcaacaaattcatagaatatgcaggaaatatgcgagggaagggaaattatccaacctcctgccttcccc

SEQ ID NO: 177108 - DNA, 505 bp, Homo sapiens
cataggacctatcactatgtaaaatattatacatatctactgatttatttattgcctatgtacctatactagaacatagtaaacatgagaacagggaatcttggttattaattcctgcaggactcaactacttatcactcaaacatttgttcttgaaaagaacttcgtataacatcattagatttttacagaatctttaaaaaagctttaatattttcaaggttttttatttatataaatattgttactttaccactagtgatttcaatagtggcattgtcacatgattcaagaagaggaggccattacattactgttgtattaaaaagtcagttcaggcttaatatatatgactactataagtcaacctcacattttaatgtatgaagaagattgtatgaacgatcacattaattcatttaaatagtatgtattttgatactaatttttaagaagaaatgtatcattctcatggaaataaaagataatttgaaaagcatgttgt

SEQ ID NO: 177109 - DNA, 236 bp, Homo sapiens
tcttgctcacaaggatcttcttttaattccagcccactactaactttatccaagtctccactcactcacaaaccacacagcacttactcgggtcctctccatctcttcatctaataggaaggactgatagcacagaagtcatttcccttggtcacatcagctgtcatgggtgacaggtgtcccctacatggcctatgaggtgtcttccttttccatctctaaactctcagattatc

SEQ ID NO: 177110 - DNA, 1837 bp, Homo sapiens
  misc_feature (1363)..(1363): n is a, c, g, or t
attaacttacttgttcacttggtgtatttgctccatttcccaaccattctgtctgggttctccacctccaactcctaccacccactcccttaacctggcacagggacacctcttttggcacctccacccctcacttcctcattttcttcatgccaagagggaaggtgtcaggaagatgggaagggaaggactgcttttgttttgtaagtgatttttattttatattcctaaatcagtggtttgcagacttgagtgtcttggcttaaatgcagcagtactctaccccagagatagtgaatctccattttcagaggccttccctagttctgcagtgactgatgccaatggtacacagatcacatgctgagcagcactcctgagcttgctctgaagagctgggggtctgctgaggaggtgtccatctcacagatacggagcccctgctaagtgctagacattgaactggatgccgggtcatgtggggttaggagtacttataagcagggcttgctttgcttttttttatttccttttccttgcctctctcttcctgtccttccttattccctttcttctctcctcctctcttcattttctctacaattttttttctttgaacagggtttatagtttctagtctctgatcatataaatttgctttgggaaactttcccagcatttttcttccaagacgcaagcacctgctctgctgtgctttaattagacctgcccgtgtcactcctgtttgtgctttagcaacaggaacgcacctgggcctcctgaacactcacttgcttcagcttgccagctctgagcttatcttgttggctacagttgatcacaagagagtgaagcagtgtaaacgtcggagataagttgtagtcatttttaacattttaagtaagccaactcagctaccagtttttcaacaaactgaatttataaaaatgattttcatctcagtgtgcctgtgttgcctcacaagcctcaatgccaggtgtttggattgcaaggtgagactgcatagtaagcagccacacatccaccaaagggccactgctgcagccacggagcacaagcaaggcgaagtgccatggggcgttggcctgctggatctcatgtgacttcagggcttagattctgcatccatttctcagtttaacaaatgtgccaacttagtgtgtgcctcaacagggcctcatgggaatgactgatttgctgcctgcaaagctggttgagctcctgtttaaaggcactgtatcagtgggtgatggcagggtcagtgctattagcctaagatgaaaacacacagcaaaatgagtcacctggataggaaacttcttaaaaccaaaaaaccacctcnccgtgatgtgtgtggaagctcagttcccttgcggtagagtcacttcttttttggcagagtggagtcttcttctgttgcccaggctggaatgcagtggtgcgatttaggctcactgcaacctctgcctcctgggttcaagcgattcttgtgtcttagcctcctgagcagctgggattacaggtgtatgccaccaggcccggctaatttttatatttttagtagagacagggttttgccatgttggccaggctggtcttgaactcctgacttcaagtgatccgcccacctcggcctcccaaagtgctgagattacaggcgtgagccaccacgcccagctgtcacttccatcacagttgtataaagcctcattaaagatcgcagtgttgctgtagcgacatgcagtgctgtagtcagcatctgccatagtatcagagccaacagcccatatgacagctgtcttcttctcaccccaaa

SEQ ID NO: 177111 - DNA, 134 bp, Homo sapiens
cgtggtctgtgtttgctacatctttgtttacaaagtctaatgccaaagtaagagcaaaaacgttattagtgaagatccctttgaagactttttttttttttttttttgagaagaagtctcgctctgtcgcccag

SEQ ID NO: 177112 - DNA, 755 bp, Homo sapiens
gcggaaggtcccggcggcggcgaggatgcgccccagggcgggagcgggacgctccactttaccctggctgcccgcaacgggccaggcctgccgtctctacctctctacctgtgagttttttccctgcatttacttcagtctgccgcgtcttctccccgcccttctctgtaaggtaaatatgtggaggaaataattcctattaaaggtaaaggtaaggagagcaatttgaatgaagaaacaggtagttgctatcgtcgttttcagccaaagccctctggctgctagagagtatacatggttctctggtgtcaaggcctgttttccataagctttctggattctcagcttagttccctcaaagtgatctctgcaagtcggctcttcggtcagaagacctcctccaaaaacagaaagcccaaagattccctaactcgattgaaaagataggaagatacgaagaaaaactaacctaaagaattgtgtggtttatctgcaaagagttctagactaaaagccaacaatgcaaagatagtatgagttaatatgtttgttgtggctctcttctgccattcccgcttcctcaaggtaatgtgccccgatgcctggtagaactgttttgtagaggcagccaatagtgatccagttatcgtctttactggtcagaccacctctgaagtgctgtgttcagcatttgaagactttaatcagctggcattatatcagagagagcagcaaaatgatgacgagaactcaaa

SEQ ID NO: 177113 - DNA, 472 bp, Homo sapiens
gcggaaggtcccggcggcggcgaggatgcgccccagggcgggagcgggacgctccactttaccctggctgcccgcaacgggccaggcctgccgtctctacctctctacctgtgagttttttccctgcatttacttcagtctgccgcgtcttctccccgcccttctctgtaaggttgtatccacgagtaccagcagagtgcctgacacatagtagacataagtttctgataactttggaaatgtgacattggaataaaggaaaaatgcacaggactcatgaagagccaaaatgttcactgataccaagcaacacaagagttaactaaatggactgaactcatagaaaactgaatcaatctttttgacttttgcatggaatattgctgatccttgttttgtttttcagagtccaggaaatttattttgaactatttacagcctttaataattgagaaaattatactcctctgaa

SEQ ID NO: 177114 - DNA, 349 bp, Homo sapiens
agagcaatactgtataatgaaaaagggcacgaggaagtgaggaaatttgacaagctgcaaaatgtaccacaacctggccaggagaacacagacctgtcagacaacagttttgagaatcagaaactgtactataatgggagcagaaaatagacaatgcattattgacattattgaaactactctgctacccaaagaatttacctgatacttcctcctccaagtgtaattgattaagcagttaagcacatgtttttctttcaacaccaattcagacatatcagtgtatttgctgattacacatgtaacaacttcaagtattttaactgaatgactgatcaattaatgaaaa

SEQ ID NO: 177115 - DNA, 396 bp, Homo sapiens
atggggtgagcatgtccgcttatctttgaggagggcccggttgcatttgcacatgagccatcatcaaacattaagtcagatcctgtgtagtccccaaaggagaaaatgtcactaaagaaaagttgcaagtgtttagcatgaaagggactactgggacctgtttgtgtctgtggtattagtttttaatcaaattagagtgaaggatagtaacccatgtctctgacctggacttccctgcttcttgccctggactgatctgggccagtcctgtccccaccaccccaaggcacaaggctgcctccgagttctctccagcgtccctccctcagcagcaaacttgtggcagggctctgcagggctgctgtaggcaaagccactcgtccactcagatcccaa

SEQ ID NO: 177116 - DNA, 563 bp, Homo sapiens
aaagcatgacagacagggaaaaggtgccccccacccactcagccctgccaatcagatctaaggaggcagtgcccgttcccaacgtgagcaggccgccctgctctgcgtggactagcgagctcatttcctgaatgggtattcttgattctaatgaaggaatgccccctgccacctgaatgcatccaaagccagctcaggagttaccagctcaagcagcagcttcagcggacgctgctgccatgcacgggacaaactccgggaggcagtattcccccgactcaggtggcaacacagccattctcaggcctggcttagttagagagcacttgacttctacagatcccagggttaaagccagacctagaaacctgatggctggcctgaacgggcagaggcaaacaaattgccaggaagccaccagggcagtcctgggatcaagatgcttcagcctgcctctcccgtaacaggggaggtactgagattgcaagtggagagtctcctagccagaggggtcgatttagcccaattcagcactctaaggtaaaaaagggaaactaaaccat

SEQ ID NO: 177117 - DNA, 729 bp, Homo sapiens
ggagtccctctttccccggggcagagcctgagcaattgtcagaaatacttctgagccaaaatgttgtgcttttgagacgttaccttgttaaaacacacacacagggtggcgtacggttccatcttcagggagtgccgtgaacataatggcatgtccatagaaatagaaagcaggtctgtggtccttagggctggggagcccggtgttcaggggggcttgctcagcctacatggcttccttttcaactgataaaaatacttagggaccagatcgaggtggtggttgtgcaacattacaaatgtactaaatgctgctggaattatcactttgtaacgagcagttggccggacgcagtggcttacacctgtaatcccagcactttgagaggcctaggcgagtggatcacctgaggttaggagttcgagaccagcctggccaacatggtgaaaccccgtctctactaaaaatgcaaaaaatagccaggcgtggtggtgggcacctgtaatcccagctacttgggaggctgaggcaggagaattgcttgaatccaggaggcagaggttgcagtgagctgagatcatgccactgcactccagcctgggtgacagagtgacactccacctcaaaaaaaataataaataaaattttttttacaaagtgagcagtttttggctgggcgcagtggctcacgcctgtaatcccagcactttgggaggccaaggcaagtgg

SEQ ID NO: 177118 - DNA, 492 bp, Homo sapiens
aggaagtgatttgttcctgaataggaggaaagtggagggtgagtgcaagagaaaagggagaagttgaagatgtttatgtcagatgactctgaccacaaaggtgttaatcagaagatgttacagttgagccagactttgaagaatgttacaacggccaatgactggaagagacgacttcaagtgatgttctgtatctactatccaatatggaagccattagccatttatggctatgtgtaggaaagctgcctgttgcatggcaagagtaatgctatcttgaagtgaaacatcataataaccagtgtttgactcttgcataccaaggcattcccccagcaaggtgaagaaacaatgcctataacatagataacccctcataaagaaacaatacctgtagcatagaaaacccctcataaagatccttatctaattttcccactggtcagagttttgcaagagggtctcagacatgacaagctgcacgttttacca

SEQ ID NO: 177119 - DNA, 285 bp, Homo sapiens
tagatattaaccaacacagattatcagagatatttcaccttagctctgttttctttcttctgtctcaatagagttctaaacttaattataatttgaactataatgcccatgtatctctgggtcccaagtgaagcataccactagctgagggacacaggacctggaagggccttggaaatagatggcagattggagtccatgacgatggagaagtgaaaacacacccccaaatcttgaaactttatgaatgtatagaaacttttttttttttttttttgagacagt

SEQ ID NO: 177120 - DNA, 385 bp, Homo sapiens
taatggatatacacaattctgaagaaacggcattcgtattatgtaactcttactgaagtacagacgaggttttgctatgttgctcaggttggactcaagcgatccactcacctcggcctcccggagggctgggatcacaggtgcgagccaccgcccccagcctacaagaatttgtaaactcatagattgctcttctgttttcactggaccacaacagaaagtagtttcttttatggtgagggatgaacacctacgattgcaatataagttgttgggccttgtgtccatggagctcacttggtggttggtggtcttgaagcattcacattctttggagtagtggggcggctggctagtcacatggggaagatgtgcacacctgtgg

SEQ ID NO: 177121 - DNA, 559 bp, Homo sapiens
tctagaggatcccgcgacactcgttgagtgtgtaaataaatgcctcttcaatttttaaaagtctcatttttgaggtttaaaatcagttcagcttttcccattttgcaaagtgccaaatttctgagatctctctattccctttcctttctgcttgcaagatgtctgattcattcagaagctcatatttttggtataataccttgccaaatgcagtcggcaatgactaatatacaccattaacactaaaatttccaactgtttctcctagagctgtaggtacattaggtatattatttgccttccaagtaattgcaggtattagtttggccaaatatttcaccacttcataatttcacttcataatttcataaattcacttcatgaattgtcatccttctgctttccgttaatagtttcccagccactcattgcctgactaccaagccagtaccaaaattttaggtttctgttttaggagcatcttcttttgatactaatttcagtataacctgattaggctgggttatgttgcagtaattcaacaaaattactggttgtt

SEQ ID NO: 177122 - DNA, 579 bp, Homo sapiens
aacgctccccgcagccaccgccacccattggaatggccaacaggggacctgcattatggcctgagccaggaggtgcagcagaagattgagaaacagtatgatgcagatctggagcagatcctgatccagtggatcaccacccagtgccgaaaggatgtgggccggtcccagcctggacgcgagaacttccagaactggctcaaggatggcacggtgttatgtgagctcaataatgcactgtaccccaaggggcaggtcccagtaaagaagatccaggcctccaccatggccttcaagcagatggagaagatctctcaggtttccccttggccaaaggccagagggcttgaaggcccggcttaatggggccaattttaaacaacccaaacttgacatcttccaaactgtggacctctgggaaggaaagaacatggcctgtgtgcagcggacgctgaggaatctgggtgggttggcagtagcctgggatgatgggctcttctctggggatcccaactggttccctaagaaatccaaggagaatcctcggaacttctcggataaccagctgcaagagggcaa

SEQ ID NO: 177123 - DNA, 422 bp, Homo sapiens
caaaaattaggcagcgtggtggtacacacctgtagtgccagctactcaggaggccaagacacgagaatcacctgaacccagaaggcagaggctgcagtgagccgagatcgcaccactgcactctagcctgggcgacagagcaagacattgtctcagaaaaaaaaaaaatacagaactgaatcatctaaattactgagaggcaccaagcaaagcacaggcagcggcactgaaggccctgccccacacaggatctggcattagtgcttcagctgctgaattatggagaggtctcaagagtcccaaggcaggggcgtggcaggaggggagcttgtgggactcaggccatcatttatttgcaaactggatgaaagagttgtgatgtcagacctgccgctgcctgtcagccctggcatacagcacgg

SEQ ID NO: 177124 - DNA, 507 bp, Homo sapiens
acaatatggcatttactgggtgccatgtcctggagctcagcagagcaagtagtgctgttatccccatttgcagataaagaaagttaggcacaaaaagcataggtgactctcccgaaatagctagtaagtcagggaggggaagtctgaagccactgtcccagactgcagagctgggtggctcaggccaggtgcagtacacctgctgtggcccagcctcttatctgctgcctacaggggtcagggcttggtgccctcagcacccactgctgttggccaggtaaagagcaccttcgggtgctgcccacgccacctcctatggctcccctgattcctgcggtaggcagcagggcctggtcccctggaatgggtggagtatgtgtgccctggttccctcacccaagcaggcccagctgcggcagggacagatccaagccacagaagacgctggcccagaaaaggcaaacactcccacagagcccctaattacggggccaatgagcgcggccg

SEQ ID NO: 177125 - DNA, 366 bp, Homo sapiens
ggtcatagaggaccttaatctccaggcagaattcagggaacccactaaaagaaagaggcagaatcaaaatggaatatagaaaacattgttgccctttcacaatacaggcataacagtaggattctacaagaaacaccaaactggcatgccctttcattccacagtaccagctaacagccctgttcattttaaagaattagtggagtaaaacagtcacccaatccaaaaaagagaaacaccaaacaggcagccacaaagaaggtcttgacgaaaccaggaaagggtcaagggcattgggaagctgccttacaaggccaggcaggaaagattaaagcaaaatagttggggaagattaaggatagaggg

SEQ ID NO: 177126 - DNA, 95 bp, Homo sapiens
caaatcactatcatgtttaattaagaaaagagaaaagagaaaaccccaaatacagaaaactaaaaaggaattgatatgatagaaaaagtgtaaca

SEQ ID NO: 177127 - DNA, 153 bp, Homo sapiens
cttgaatgtgacaaaatgggaaaattaaattaattaaaacttgagccttgaatgtgacaaaatggggcgtatgaacaaaatacttctgcataccaaaggatggtggttgtctcaaggaaaatcacttatttatgcaattgtttgagttgtaag

SEQ ID NO: 177128 - DNA, 367 bp, Homo sapiens
ccgctaaaggactctcatgccataaacaaagtggtcccaccaggcggccgctgttgggtgacagtcaagatggctagttagcggttcatttagcaactgctttaccttcccaaaattatgttcccgtattttgcttctgctaatttcactctggtttggcaaagtccatgtgctatctagaaacagcatgatgttttgatgccccctcttgagtgttttagtcatgatcctctcctctctctggggcttccctatctgactccgcaggctctgccccatggcgcctcaggcccgccctgctggccttttgcttgcactaactgggcagtgaggcagtgtgactttcatggacgttgtttggtttcag

SEQ ID NO: 177129 - DNA, 558 bp, Homo sapiens
ataaacaatccagcaccttccctagtccaggcctccatctccaactttcaggtcatttccacttactatttcactttttcccaattcagcacgtataaatcccaaatttaacatccattccccaaaacagccccatttacaacttctgttctcatgtatgatcctacaattatttccatgtattcaaccgaatatttttgtaacatctttcccaccaaaacctgtacggacaatcatggggctcttttttatttcaacagttctctcatgtagtttctttactatttccagtgcctagaacctggtcaaagccttcaagaccctcttctttaaaaatctttccaaaatttaggagtgattacaatgaccccatttaagacactaccaaaagttccctattgcctacccagcaaacctaaaacttttcagctgtactatgcaggcttccaatctactgacagcttccccccaaaattatcactttattcctctactatctcccaaacatatcatgcacatggtcccttcagtcaggcaacgacccaaaggggatgcagt

SEQ ID NO: 177130 - DNA, 381 bp, Homo sapiens
tgctgggattacaggcatgagccaccatgcccagccacctggcccgtagtttttttaagtattaaaatgatactagaacagacgtagtcagttggtgatctttattaaacatcgtagtcccatacacagcagtttattgcctactaatatttttgtattacccacttgttgaagaaattatcactaccattatagttttgcagtgtctttagctcagtcttttaaaatatgaagcagaaagtcatattttcagctttatcagtgaatgctaatgcactaacaagatggaattatgagcaattataaaaacttcttgttcttaaaatggttaccagtaagttatattctttaacttgacaagattttactgtgtttcatttc

SEQ ID NO: 177131 - DNA, 322 bp, Homo sapiens
cactttgattgttggtggcactttgtactgcctgtaggactgtgggcacatcgtttttaacttgtatgagtctcactcttctcatatgcacaatggaaaaaataatgatgaagatttaacaaaatgacatctgtaaggccctccagctgaagctcaacacatcctgtcctcttctcccccgatccctgctctttgcccctgagatggtgttgattccaccttctacaacacaaaagtgtgaaacacaagagtgttcccttggccccaggagaggcctctgaataccagaagacagccatgctggttcctgagtccctttctc

SEQ ID NO: 177132 - DNA, 432 bp, Homo sapiens
ccaacacatgaaatatttcaaaccatagcattccacccatggccccccaaatatatatacttgttcacagtgcaaaatacattcattccatcccagtggcccccaaagccttaactaattccagcagtaactcaaaaatctaaagtccaaagtctcatctaaatcagatatggatgagacttacagcatgattcaccttgaggcaaattccttccagatgtgggcctgtaaaatctatttccaaaatacaatggtgagacaggcattagacagaaattctcattccaaaagggataaataggcaagaagaaataagaggtcccaagtaagcccaaaacccaacagagagcattatgtcataaagccagagaacaatctcctttgactctatatcccacatcctgagcacactgatgtagggattgggccacc

SEQ ID NO: 177133 - DNA, 807 bp, Homo sapiens
gaacgtcttgggctccattgtgtctctaagatcaggtggcagagcatttctataacactggttgagaaagttcagatgattgctgtaatcctaggatccctgttcttaatagccagtgtgacttggctcctctggtcagccttcagcccctatgcagtgtggcagaggaaggacatcctttttcagatctgctatggaatgtatggttttatggatctagtgtgcatagggtgtgctgtgactccaccccatgtctgcaggagccccgaggcattcgccccagtgagctgacagatgacaccatgactaagaccttcatctgggactttatggcctgctagtatgttcaaacctcttgagttcttggcctcctggatatgctataaaaatggcatctactctacttatctctctggggtgtgttcacagaaagctggagcaggagtttgaaaagggcggtgatggtgtggatgtaaagttatcgtctcggctccctattgcatgggattacacattattgatggtgcaagacagtcactcactctcagccacagagacctcttggcatcctgtgaaagggcagggttttctcttcgatgtcacattagaaagttagatgtgtatctaccccaagcataccttccttcctgaaacataatatgtaacttaatatcctagagtttaaaaggcccccaaggtgctttctaatgtatttactccaagttataaagtttcatgattttttaaattaatgaatttagtgtgaaaattaggaaaaaatgtttcaaataatcatgaattgagtgt

SEQ ID NO: 177134 - DNA, 678 bp, Homo sapiens
atcatgatcctacacagaaagatggggatgggagggtcagagcaaggaaagaacagcacttccaggtcacttcgcctcattctggactccccttttccagggtgtgctgtgactccaccccatgtctgcaggagccccgaggcattcgccccagtgagctgacagatgacaccatgactaagaccttcatctgggactttatggcctgctagtatgttcaaacctcttgagttcttggcctcctggatatgctataaaaatggcatctactctacttatctctctggggtgtgttcacagaaagctggagcaggagtttgaaaagggcggtgatggtgtggatgtaaagttatcgtctcggctccctattgcatgggattacacattattgatggtgcaagacagtcactcactctcagccacagagacctcttggcatcctgtgaaagggcagggttttctcttcgatgtcacattagaaagttagatgtgtatctaccccaagcataccttccttcctgaaacataatatgtaacttaatatcctagagtttaaaaggcccccaaggtgctttctaatgtatttactccaagttataaagtttcatgattttttaaattaatgaatttagtgtgaaaattaggaaaaaatgtttcaaataatcatgaattgagtgt

SEQ ID NO: 177135 - DNA, 303 bp, Homo sapiens
gcatcatcactcctgcctgcctgcccaaccgacctgtcggtggactgaatgggccaagtgttcagaagtccttgggaagaggatagtgtcctgaatcataatgtggtattttctggttttttgtttgtttgtttgtttttggtaaaatgttaattgcagaagtatacaggttattttatttatttatttatttttttttgaggtggagtcttgctctgttgcccaggccggagtgcagtggcatgatctcggctcactgcaacctccacctcccaggttcaagcaattcccctgcctcagcct

SEQ ID NO: 177136 - DNA, 277 bp, Homo sapiens
gagtggattgatagttcctttcaattttcatatgtagaactataattgtaaagctgtgtaacatttgatagtattaaatattaaaccactgtgtaattaaagcccaaaatgtcaaacactgcagcataaactacctgacaggcctccaaatgccctttcaccaaggtgtgatttctatttattttgctttgttgttatttttgtggttttgagatgaagcctcactctgttgcccaggctggagtgcagtggtacaatcatagctcactgcagcctc

SEQ ID NO: 177137 - DNA, 456 bp, Homo sapiens
agaccgatactgaggagagcagccagaaaagtagaagcaaaacaaggaaagtgtctttcttcagcacctagaacagcccaggcaatggtaggtcctaaaaaaagcacttgctgaatgattgagtaaacgaatgtgcaactgatgtcaaaaaagatgggaactgaaaaagaccatataatttagtaaaatgaagatttattgttatctttgataagtgtactttcagtgaaggcacagaagcaaaatcctgactgcagaagagataaggggatatgtttatttggaaacagtgagtataggtaactcttttaaggacatgaaacaggagggcatgaataaaaaggaagacataaatagctggaaggaaaagagactgtggttttaagatacaagaaataagagcgagtttgatctagtcgagaaagaaaaatcggtgaggcaagaagggttggaatc

SEQ ID NO: 177138 - DNA, 335 bp, Homo sapiens
atgctgtgaagagatttaaaacagggtaataatgtactagacaattcctagctgctcagtgaaggcctctctcagggtggcataaatagtggctcacgcctgtaatcccagcactttgggaggccgaggcgggcagatcatgagaccaggagatcgagaccatcctggctaacacgatgaaactccgtctccactaaaatacaaaaaattagccaggcgtgggggcaggcgcctgtaatcccagctaatcgggaggctgatgcagaagaatggcgtgagcccaggcggtggaggttgcagttagcagagattgcgccactgcactccagcctggg

SEQ ID NO: 177139 - DNA, 441 bp, Homo sapiens
taaaatatatacattaaaacagtctatatttaaatgagacaaactgatcaaattgtcaaaattcagtagcctgaagaagagcagatgcttcagagagactaaaatatgcagatcatgccaagaccacattccaagcaggtggcaaaagaaattacacagttctatagtcagcaaggaagagataccccaagaaaatatgctgaaaaatacattgcagctatgctatggccataggacaactaactttgacttcaagcagcaccactgcactcccaatctcaaggtcaatgccaaattaattttaccttcccaccatgctaacaattaaatacactatacacacgcacaaacatttcagtaatttcattttaagcagaatgaacttctagaacgggtttctgaaaatactataagctaatttaaaacaagcaaacttaagta

SEQ ID NO: 177140 - DNA, 406 bp, Homo sapiens
tggagaaacccctccacccacaccccccttcctggaaatagctgtggttggaagggaggctgggagcccggccgccgcggaggaggggtaaggcccagggaaggagcgagggagggcggcggctctgggggtgttcccagaagggtctggaggatgggggcagactgaagggggccgcagagcggggctggcgagtcgaatcagcctcatctgtgcccgcttacggcctctgtcccacatgtgaagcaggaaaggaaaacgttcgcccgcaccctgccaggccggggcccgagcgccgctgccagctgctgccgggtcccgggcctgcgtgtgtggcacggcgtgcggccccgtgcgccccgggtgctggaaggcgtggcggcctgatcgagtagggccgcggccg

SEQ ID NO: 177141 - DNA, 213 bp, Homo sapiens
gctggctttcaaccctcacctacctctttgagagcacggcatcgtcactcccacactaccaggctgtgccccctcttctggggctcctcacctgcaaatgctgaataacccaagtctctctcatctttaaaaaacaaccacccacccccagacctccaactctcctgaaaagtgactcagcagtaagtgtcaagagtcctataagtgcccata

SEQ ID NO: 177142 - DNA, 197 bp, Homo sapiens
tgctacccaggtctatcaagttgggctcatctcccagggcccagcacaggacctggcagctctgaaatgaaataggtgcctaataaaggagtgttaaataaatgaatggatgcacaaatatgtttatgaatcaagcaaatcactaaataacattcatggcagaggaagctgaagttcaaagagaaaacttattggag

SEQ ID NO: 177143 - DNA, 315 bp, Homo sapiens
gtctcccctttctaccagggaagtagcccctctgtcttccttccccttttttgagggaactgagatggaactatgagtgttgttgaatttcatcaaagtcttagttccagttggaagctgcagtccgctccgtctccttccagccagaggaaggatgacgaccagcagcacttgggtttttagttttgtcttgtaagcattttggtgggtggcggtgggtgactattagggacactgactccactgtctccagaaagtagggatgaaaaggatcactcctttcaagaccttgagcttcttcactttaggtgaaga

SEQ ID NO: 177144 - DNA, 1079 bp, Homo sapiens
  misc_feature (4)..(6): n is a, c, g, or t
ggcnnnaggggaaaacaccaagtccctggacaaggggaagacaccaaatccctggactcaggcctcacatgattgagtgagaggaactctgctgtcagaccctacaatgcactcttcagtggaagaggatcacacattccaaacatactccatcaggtcatatgttaaatgacagggctgagacctctccacagcacatctgatactgggatcgatgaagatcagatgtgcaaatcacactgggctccggaaagccctagactgtgtcattcaagatgtgtgacatggataaaaagctccccatagtggaaagaggtgccataaaacactagacaatgagagcaagatgggggacccaaaatggtgccctggcatcggcaagtggtgaaaccagccatctggccctgtgccctgtcctcagaagtgcccctgccgccccagcaggtacatttgcaggtgaagaatttctttcgctttagtgtcctgggaaccaagtattttctgttggtggtgtttctcttgcaccagatgaatttttgcctcgcttacctgagacttagactgtcccaattccagtctccactgatgcaaactaggttggttcacaacaggctgccataaaatttctcatttttttctgtttgaaatgtgtaacttttgatttacttcctaagtaagacttcctgagttgggagctctaaaaactttcattaaaaaacagtggatttgtcaaacttttgagcaaagtattggtggcacttctaaatctttgaatttaatttcttcttttaggggactcttagaaagggaaaatatgatcttactacattgaccatgcaaattctgaggttcatattgaatctaaagtcattggaaatataaatctcaataaaatccctaatactaaatactcatatatatgtatatattgcccatagacatgtagtatgtattcatgtatcatatatgtataggtatatatatgttcatatgtcatatattaaatatgtatgaatttataagataaaggtggaaattattgacatgttataactaaataaagaaaatctttaacaacc

SEQ ID NO: 177145 - DNA, 472 bp, Homo sapiens
  misc_feature (459)..(459): n is a, c, g, or t
gggaatgacccccactgtcttctcctcccaacacactgcagggggaatgacccccactgcctcctcctcccaacacactgcagggggaatgacccccactgcctcctcctcccaacacactgcagggggagtgacccccactgcctcctcctccccacacacactgcagggggagtgacccccactgcctcctcctccccacacacactgcagggagagtgacccccactgcctcctgctccccacacacacactgcagggggagtgacccccatattttaatgcagtggtttctctggtcactcacggtccagcactagcacgcagcagtcggggaaatgctgtgggtatgagacggcctggattttgaaggcgctgcatgaaaaagaatgtagagaatctgaatgcattttatgtatagattgcatgttgaaatgatgctgttggtaccgtctaagngatgtctagatca

SEQ ID NO: 177146 - DNA, 290 bp, Homo sapiens
aggaggtgagagaagaatctttgtgaagaagctgtattataggctaggggaccaaccaagttcattcttaattttcccagattcttcagttgttggaatacgttttttaattcttcactgtggttcattgagttataacttatttgctgttttattcatgcaagtgcttttactgctgtatgtagcccagaatttgagaaatgttgcttggatggacagctagaatcagtggctttttgacaacctttcgtgtaattaaatatagcattacagaagcagttttattctta

SEQ ID NO: 177147 - DNA, 320 bp, Homo sapiens
tcaaactaaggtcactaaccaataacaagacagtatgtaaccaccgtcacgattatttagatcgtaaataagacatctataaagaatagtaacaatatgtctggcactgtcataagcactttacatatattaactcataactttctgagtcaggaatcactattattcccaaggggagaaaaacaaagattcagaggtattggacaactcttgacaaaattacacaggcatgaaataatggagacagattgcagaattcatcaagactgggcctggaggcggccaccttcttcctcctccctttggtcaatattcagagg

SEQ ID NO: 177148 - DNA, 516 bp, Homo sapiens
ctgatcatcagtgagccaagcctggaagcctgagccatcaccagctgggtggtagccagctgtggctcagggccactctagaaacacttgccttgggctgcagctgccctgggctactaccctgatccctaggaaacggggcatggggcattttcctgaacagagcccttgccaatgcccagcaagaaaccagtgtggcactgggattggaaagcctggagtgtgaatatggactctgatgtgccaacttacagaagaagcataggcaagattcttagtctctacatcaagctgagtccttgaagtggtcggagggacaaaacagaattcctggagacagtgtcctaagggagtgccagaggcactcatttgtttgacaactaattttggaggcaggtgctcttccttgtcttaggatcttccagtcaacaaggctgaaaatctccctgcctcctggagcttgcttctgtggaagaaggcagtcagcaaacacatgaacaaagacaagttcaggga

SEQ ID NO: 177149 - DNA, 257 bp, Homo sapiens
caaaaagtttactacttttggtaggcttgatcattatattgttaaataatcagtataaagttcagggaaaagattagcagtagaaatgtagatttgagttattctctgataattgaagtaaggaagtttaaatcatgagaaaggaaggtaaaaaatcatgcttttaaagattacggtttattttggggtggaaacagggaaaatattgtcattgaggaagttaagcttttcaggactggagaaagagaaatacagtg

SEQ ID NO: 177150 - DNA, 433 bp, Homo sapiens
atggctggtaggagttaagagtgacagctctggagtactttagatcagggcaggattggctacataatttgcaaaatgaaaatgtgaggccccttgttccaaagttagtaaggctggagcaaaattgttaaggtggcactatcacagctcactgcagcctggacatcctgggctcaagccaacctaccccctcagcctcctgagtagctgggactaccggggcgtgccaccatgcctgggtcatttttttgtttttgtttttaaagaaatgagagtgtggctatgttgcccaggctggtctgcaacccctggtctcaagcaattcccatgccttggcctcaaagcagtcaactaagcgtgggtcccagcccctggaaaccagccctgcatctgaggtcacactgcttgcctgctggttaaccttaaatacctc

SEQ ID NO: 177151 - DNA, 673 bp, Homo sapiens
tctcagagaggtaaagggtgtcaatgttactcatctcctgaaatgaacaaattatttccaattgaaacctgaatttgaaaatacatctcctggcagtttagacaaaaagagaaatagtttggttaaacactatttttaaagtagtaacatcttttcacataggaatggtataaattataaatgagttaaattcatgtatattataaattctgtttactcatgttggtgatttatattagctatggtaattcatacaaggattttaaggattttccagtatttattgtttgaggaaaaaaaggacaggactctccaaatttgtttgcagatgcaatcttttctttaaataaactcaaggaataatttattgcacgtgttattttgtaagaaatggcaagtaacgttaagagacaaaatcttcatctataatttattaaaactcacagaaatactgcggatggggcaattcttgtttctggttgactgtaaaacactacaataacagcaaaggctaacctatccacaaaaacacaagctaaattcctgacgcaaataatttgagtatttacatgtgtgtttgcctgctcacatgataatgcatattttgctggcctgttttcctcccattctcaaccacctcacttcaatcattgcttttatttccccagtgtga

SEQ ID NO: 177152 - DNA, 1524 bp, Homo sapiens
agcgggggaggctcgcgcaggagccgtgagtggcctaaggtgaatgactcatatgattggctgtcccgaaaaatgaaacgtctttgtggtccggggctgagacccacgaggagactgggcgggatttctgacgttaggaggcggggcctttcggctttgggcgcgagtggttaaaagacagttggtgtcggttcggcttctcgggtcggattccgcggtcccaacccttccccatggccgaccctgaggagttgcaggtttcttcgccgcccccgccgcctccctcttctccctcctcttcagacgcctctgcagcatcttccccgggcggcccagtgagtttgggctggccagttccgagcaggagcagcggcccaacggtggaccagctggaggaagtggagctgcagatcggagacgcagccttttcattaaccaaacttcttgaagccacatctgcagtatcagctcaagtggaagaacttgccttcaaatgtacagaaaatgcacgtttccttaaaacgtggcgggacctcttgaaagaaggctatgattctttgaaacctgatgactgatttggcatacttcgttgtttaataatgactgcaataattcatacttcttatgtcatattttgtacatgtaccacacatataggatgacctctgtccagcagttctgtatatactcagaatgaaatttttcttggttttcttggtttttgtgaaagcagaataccgatgctatttttgttgcggaccagtacttgtttgtccttaaatactttatgcctctgaactttcatagaatcctttatgaaagttaacttcatcaatagacggttaatattaatagagccacagtgctaccagtagcaaactaggtagaccattatttgttttgcaacaagatgctaagcatggcagactttgaagttgcgtttcatcttaaggaccaagggaggtaactttaaggttgccagtggtggatccagctccgttaggctaagttgtctacagctaatgattgtgtctttattctatatccccagcacctaaaacagggtcacacaacattcattaaatgtttggtgataaaagagttacaacataattgaaagctttttttcttcctatatttagcatgaagactgtcattgtttctctaggaaatgtatgaatctgaacttttttgacttgaagaaaaacattctttttttacagagatttggactttgatgataggttttaaaaatatatgataaatatctctttgtacttgttgatttttttttacagactttacttcagaaagggaaagactgtttagaaagaatgcatattttttccctatttatttctgtggtttactccttttgcagtttaacagtgtttggtatcgatattgtataatgtagattgctatcattaaagtggcttatcagatttatggttggtgttattactttgaggtttgcagttgtgttactaataatttaaaaattattgtctgaagggtcattta

SEQ ID NO: 177153 - DNA, 1898 bp, Homo sapiens
ttgaatgttaagtagagacggggtttcaccatgctggccaggctggtctcaaagtcttgacctcaagtagccagccaccatgcccagctgatttttgtattttcggtagacacggtgttgtaccgtattggccaggctggtcttgaacttctgaccttgtgatctgcctgcctcggcctcccaaagtgctgagattacaggcgtgagccaccgcgccctgccgtattttatttatttttgagacggagtctccctctgtcgcccagcctggagtgcagtggcgcgatctcggcttcctgcatcctctgactcctgggttcaagcgattctcttgtctcagtctccccagtagctgggattacaggcacccgccatcattcccgactaactttttttttgtacttttgcagagacggggttccgccatgttggccaggctggtcttaaactcctaacctcaggtgatccgcccacctcagcctcccaaagtcctcggattacagctgtgagccagaacgccaggcccctgctctctatttaaaataaataaatagggtgtcggttcggcttctcgggtcggattccgcggtcccaacccttccccatggccgaccctgaggagttgcaggtttcttcgccgcccccgccgcctccctcttctccctcctcttcagacgcctctgcagcatcttccccgggcggcccagtgagtttgggctggccagttccgagcaggagcagcggcccaacggtggaccagctggaggaagtggagctgcagatcggagacgcagccttttcattaaccaaacttcttgaagccacatctgcagtatcagctcaagtggaagaacttgccttcaaatgtacagaaaatgcacgtttccttaaaacgtggcgggacctcttgaaagaaggctatgattctttgaaacctgatgactgatttggcatacttcgttgtttaataatgactgcaataattcatacttcttatgtcatattttgtacatgtaccacacatataggatgacctctgtccagcagttctgtatatactcagaatgaaatttttcttggttttcttggtttttgtgaaagcagaataccgatgctatttttgttgcggaccagtacttgtttgtccttaaatactttatgcctctgaactttcatagaatcctttatgaaagttaacttcatcaatagacggttaatattaatagagccacagtgctaccagtagcaaactaggtagaccattatttgttttgcaacaagatgctaagcatggcagactttgaagttgcgtttcatcttaaggaccaagggaggtaactttaaggttgccagtggtggatccagctccgttaggctaagttgtctacagctaatgattgtgtctttattctatatccccagcacctaaaacagggtcacacaacattcactaaatgtttgttgaataaaagagttaacaaacataattgaaagctttttttcttcctatatttagcatgaagactgtcattgtttctctaggaaatgtatgaatctgaacttttttgacttgaagaaaaacattctttttttacagagatttggactttgatgataggttttaaaaatatatgataaatatctctttgtacttgttgatttttttttacagactttacttcagaaagggaaagactgtttagaaagaatgcatattttttccctatttatttctgtggtttactccttttgcagtttaacagtgtttggtatcgatattgtataatgtagattgctatcattaaagtggcttatcagatttatggttggtgttattactttgaggtttgcagttgtgttactaataatttaaaaattattgtctgaagggtcattta

SEQ ID NO: 177154 - DNA, 1293 bp, Homo sapiens
ggtctactcaatattaaagaatttcttaggttccgtgaaagagccagtgctgtagtttgaaaactgattactttgaaagaaaataacatgggcattggattcaaagccttaagctattttcagcctgcttataaaatgagatgagaattttaaaaataaaattatgtttgactttttttttttaggcagccttttcattaaccaaacttcttgaagccacatctgcagtatcagctcaagtggaagaacttgccttcaaatgtacagaaaatgcacgtttccttaaaacgtggcgggacctcttgaaagaaggctatgattctttgaaacctgatgactgatttggcatacttcgttgtttaataatgactgcaataattcatacttcttatgtcatattttgtacatgtaccacacatataggatgacctctgtccagcagttctgtatatactcagaatgaaatttttcttggttttcttggtttttgtgaaagcagaataccgatgctatttttgttgcggaccagtacttgtttgtccttaaatactttatgcctctgaactttcatagaatcctttatgaaagttaacttcatcaatagacggttaatattaatagagccacagtgctaccagtagcaaactaggtagaccattatttgttttgcaacaagatgctaagcatggcagactttgaagttgcgtttcatcttaaggaccaagggaggtaactttaaggttgccagtggtggatccagctccgttaggctaagttgtctacagctaatgattgtgtctttattctatatccccagcacctaaaacagggtcacacaacattcactaaatgtttgttgaataaaagagttaacaaacataattgaaagctttttttcttcctatatttagcatgaagactgtcattgtttctctaggaaatgtatgaatctgaacttttttgacttgaagaaaaacattctttttttacagagatttggactttgatgataggttttaaaaatatatgataaatatctctttgtacttgttgatttttttttacagactttacttcagaaagggaaagactgtttagaaagaatgcatattttttccctatttatttctgtggtttactccttttgcagtttaacagtgtttggtatcgatattgtataatgtagattgctatcattaaagtggcttatcagatttatggttggtgttattactttgaggtttgcagttgtgttactaataatttaaaaattattgtctgaagggtcattta

SEQ ID NO: 177155 - DNA, 862 bp, Homo sapiens
  misc_feature (692)..(692): n is a, c, g, or t
  misc_feature (733)..(733): n is a, c, g, or t
  misc_feature (735)..(735): n is a, c, g, or t
  misc_feature (740)..(740): n is a, c, g, or t
  misc_feature (857)..(857): n is a, c, g, or t
agcgggggaggctcgcgcaggagccgtgagtggcctaaggtgaatgactcatatgattggctgtcccgaaaaatgaaacgtctttgtggtccggggctgagacccacgaggagactgggcgggatttctgacgttaggaggcggggcctttcggctttgggcgcgagtggttaaaagacagttggtgtcggttcggcttctcgggtcggattccgcggtcccaacccttccccatggccgaccctgaggagttgcaggtttcttcgccgcccccgccgcctccctcttctccctcctcttcagacgcctctgcagcatcttccccgggcggcccagtgagtttgggctggccagttccgagcaggagcagcggcccaacggtggaccagctggaggaagtggagctgcagatcggagacgcagccttttcattaaccaaacttcttgaagccacatctgcagtatcagctcaagtggaagaacttgccttcaaatgtacagaaaatgcacgtttccttaaaacgtggcgggacctcttgaaagaaggctatgattctttgaaacctgatgactgatttggcatacttcgttgtttaataatgactgcaataattcatacttcttatgtcatattttgtacatgtaccacacatataggatgacctctgtccagcagggcgggagagacgcanaaggaaagggggcggggggggcggggggggggggaaaccanangaccnaggcgagggggggggcggaccaagacggggggggccggaaagacgggaggccgcggaacgggcagaaaagccgggaggaaaaggaacggcagcaagaaaccgggaagaggaagaganccaca

SEQ ID NO: 177156 - DNA, 1527 bp, Homo sapiens
agcgggggaggctcgcgcaggagccgtgagtggcctaaggtgaatgactcatatgattggctgtcccgaaaaatgaaacgtctttgtggtccggggctgagacccacgaggagactgggcgggatttctgacgttaggaggcggggcctttcggctttgggcgcgagtggttaaaagacagttggtgtcggttcggcttctcgggtcggattccgcggtcccaacccttccccatggccgaccctgaggagttgcaggtttcttcgccgcccccgccgcctccctcttctccctcctcttcagacgcctctgcagcatcttccccgggcggcccagtgagtttgggctggccagttccgagcaggagcagcggcccaacggtggaccagctggaggaagtggagctgcagatcggagacgcagccttttcattaaccaaacttcttgaagccacatctgcagtatcagctcaagtggaagaacttgccttcaaatgtacagaaaatgcacgtttccttaaaacgtggcgggacctcttgaaagaaggctatgattctttgaaacctgatgactgatttggcatacttcgttgtttaataatgactgcaataattcatacttcttatgtcatattttgtacatgtaccacacatataggatgacctctgtccagcagttctgtatatactcagaatgaaatttttcttggttttcttggtttttgtgaaagcagaataccgatgctatttttgttgcggaccagtacttgtttgtccttaaatactttatgcctctgaactttcatagaatcctttatgaaagttaacttcatcaatagacggttaatattaatagagccacagtgctaccagtagcaaactaggtagaccattatttgttttgcaacaagatgctaagcatggcagactttgaagttgcgtttcatcttaaggaccaagggaggtaactttaaggttgccagtggtggatccagctccgttaggctaagttgtctacagctaatgattgtgtctttattctatatccccagcacctaaaacagggtcacacaacattcactaaatgtttgttgaataaaagagttaacaaacataattgaaagctttttttcttcctatatttagcatgaagactgtcattgtttctctaggaaatgtatgaatctgaacttttttgacttgaagaaaaacattctttttttacagagatttggactttgatgataggttttaaaaatatatgataaatatctctttgtacttgttgatttttttttacagactttacttcagaaagggaaagactgtttagaaagaatgcatattttttccctatttatttctgtggtttactccttttgcagtttaacagtgtttggtatcgatattgtataatgtagattgctatcattaaagtggcttatcagatttatggttggtgttattactttgaggtttgcagttgtgttactaataatttaaaaattattgtctgaagggtcattta

SEQ ID NO: 177157 - DNA, 1311 bp, Homo sapiens
aagggactccaagtcccagccggggagcggtgaaacagccacagcgcggccagaggggtccgcgaatcccacagcacgacgcacgcgcagtgaaaggcagtagaaggcggggcgacgcacacggcttcctgggaggtgtagttttctctacgagtgcccttcgagatcgattggaggctcgcgcaggagccgtgagttgcctagcagccttttcattaaccaaacttcttgaagccacatctgcagtatcagctcaagtggaagaacttgccttcaaatgtacagaaaatgcacgtttccttaaaacgtggcgggacctcttgaaagaaggctatgattctttgaaacctgatgactgatttggcatacttcgttgtttaataatgactgcaataattcatacttcttatgtcatattttgtacatgtaccacacatataggatgacctctgtccagcagttctgtatatactcagaatgaaatttttcttggttttcttggtttttgtgaaagcagaataccgatgctatttttgttgcggaccagtacttgtttgtccttaaatactttatgcctctgaactttcatagaatcctttatgaaagttaacttcatcaatagacggttaatattaatagagccacagtgctaccagtagcaaactaggtagaccattatttgttttgcaacaagatgctaagcatggcagactttgaagttgcgtttcatcttaaggaccaagggaggtaactttaaggttgccagtggtggatccagctccgttaggctaagttgtctacagctaatgattgtgtctttattctatatccccagcacctaaaacagggtcacacaacattcactaaatgtttgttgaataaaagagttaacaaacataattgaaagctttttttcttcctatatttagcatgaagactgtcattgtttctctaggaaatgtatgaatctgaacttttttgacttgaagaaaaacattctttttttacagagatttggactttgatgataggttttaaaaatatatgataaatatctctttgtacttgttgatttttttttacagactttacttcagaaagggaaagactgtttagaaagaatgcatattttttccctatttatttctgtggtttactccttttgcagtttaacagtgtttggtatcgatattgtataatgtagattgctatcattaaagtggcttatcagatttatggttggtgttattactttgaggtttgcagttgtgttactaataatttaaaaattattgtctgaagggtcattta

SEQ ID NO: 177158 - DNA, 197 bp, Homo sapiens
atctcagtgccctgggaccagccgtcctaccagcaccattgtacacccctctcctacaccacccagcatgcctctgccttccaggcctccctgctaatctctccatctggattaatttcgacgtggagggaggagagggaggcagagcagaccttcctggaggagccttcacccttgaccctgccctgccccgtgat

SEQ ID NO: 177159 - DNA, 252 bp, Homo sapiens
tggcatcactgcactctagcctgggcaacagagcaagagagaccctgtctctctcacaaaggcatttgtggtttagtttttacatccgcagatttatttttaacagttttattgagatgttattgacatatacagattttggtggctcacacctgtaatcccagtgacttgggaagccgagtcaggaggatcacatgagcccaggaattcaaaaccaggctgggcaaagtaggaagacgctgtctctatgaa

SEQ ID NO: 177160 - DNA, 417 bp, Homo sapiens
ccaggtctataggacagctctctgggggctccagttccgttattggaaataaagtaccagttaactcagagctcaactggcaactcctaaaatgaatagggaaagaggaatttctcctttcttatataagcctccttccttcaattaaaaactgttttaaagcgtgcttatcaaggttggctagtctccaaggagtgaggtaatgtgctgtaccctacagccacaggcatataccagccaatggtcagctgtcactatgaggtactgtcagccaattttaaaatggaaaaatgcatgccatgataatgacttatcttcttatctaaattttaaacagttaagatgcctggcttggaatagtaatgtatgcaatcaatcaataatcccttatttttaaacataaagaaggaggcatac

SEQ ID NO: 177161 - DNA, 445 bp, Homo sapiens
ggaaaggagaggaggaggatggctacatagaggactgctatgttccacaacggtctatatatgatacgatgaggataaatgagcaaattgaccaggggtcaaagcttaaccagacttcaaaaagcaccatggaaaagatggaaggaagtactatatccagcaatggtacattaggagcagcatctaatgtttttgaatctagagcaccagaaggtaagaagctggatgagaggataatatttgatgcactaaagctaagcagtgatgtgcagaagtcagcacctgtgccacccagaaggcggccaaatgcagaacgcaaagacaatgttaacaggagatcgtggaagtccttcatgccacccaacttcccagaatttgcagagaggatagaagcttctctcagtgaggtttcagaagctggtgcttcaaatccttccttgcaaga

SEQ ID NO: 177162 - DNA, 505 bp, Homo sapiens
atacatagggttgtgacaactacagataaagacagttttacttattcctttccaatttggatgccttttatttcttcttctttcctcaatgatctgactagaacttccaatacaatgttgagtggctgtggtagaaacaggcattcttgtcttattcttaatattagtgggaaagctttaagtctttcaccattgagtatattgttacctgtgggttttccataaaagctatttaccatgttgaggaagttcacttttatttctagttttctgagtgtttttatcatgaaaaggtgttggattttgtcaaatagttttttttttcatccttgattggttttgtgtgttgaaccactcttgcatttttggactaaattccatttggtcataatgtgaaatcctttaaaaatgttgttggatttggttagataggagtttgttgaggatttttgtgtctatacttgtaaaatatattggtctatagttttcttgtggtaattttatc

SEQ ID NO: 177163 - DNA, 281 bp, Homo sapiens
  misc_feature (263)..(264): n is a, c, g, or t
ttttcttgattctttgggatgatctgacaatgaaccaagaacgactttcattgaaacctttggtatttgaccaagtgccatctatacttcagttgctttcaaactattttcattttcctgcctccctgccacgaattaaaggaataggacatattaagacttcagcaaatttcctatacccaccagagagtaacacagagcatggcagccaattcacagaattctttaaaagaatttcaacacaacatacccccagcagggcnncgcttactgaggggatc

SEQ ID NO: 177164 - DNA, 373 bp, Homo sapiens
tataaaagaaaaccatagcaatgaagttaaaaactcaatggtcagattaaatatagtaatcagggtttcataggaaattagtcaattggatgaaaagataaaaagcaagacagaaaagatagcataggaagagatgaagatacgaaaagaggttaaaaaacatgttgacagaaagcatagacaatagaatgagaaggttgaacaaccgcctataataagtttcagaagtttcagaagcagcgaataaaactaatgatgggtcactttcaagaactgaaagatggctgtgaaacctcaaagaatcactctgggcctggcacgatggctcatgcctgtgatggctcatgcctggcacaatggctcatgcctgtaa

SEQ ID NO: 177165 - DNA, 572 bp, Homo sapiens
tcacaggcttttcccaggaatacctagcttcccttcctgggatctcagccagagcctcacagtcgactcctgcttacacctgtgtctctgtcccaggcagcctcaccgcaccccccgccacccccgccccaccacacctgctttcactaagcccactgcctctggacttgctagaagttaggcaggacagtggccttgcctgctttgacactaaaatcagtatcttcccaaactgacttccctctccccaaagccctaagaaacatgagcagtagcaagaagaaattatgtcttccccaacccaatctcccccaccccctctcccatcatttttctgaccacctcttcctctgttccaaacaggagaccaaccactcacccatcattcatccaaacaggagctagggtggggaaactgacagcgggtctgaagactcataaaaccttcaccagcctcccaggtgtcccccaccccaaggtccaacagagcctgggcaagctgaccccactcagtgctgggtaaagcagttgctttttcatttttgctcaagggtctagggaagagctcgtta

SEQ ID NO: 177166 - DNA, 460 bp, Homo sapiens
gacaaaatacacatcttttattattgggatctcaacctctgtttcaggctttctatttcctttgagaatgtgtagttttgtttacatctggagtggtattaaattgttatccttaacatatgcttgtttataagatgtaaacaatgtgatattgatgatggataaattggcttgaattcccccgctattacctttttctcttttggtttagaggtgcttatttgttcttctctaaagcttctagtgggttgaaacagaaagaagtcacatttctttcaaaatgagtcttaaatgcttgtgttttacaaaattttaaattaaggcatatttttagcttcgacagctggttgatatgtagcctgtgactaatgaaatgaaacacatttttgtttcatgatcatgtgttaatgtcaccctacaattttgttatttttgatgcaagaaagaatgattaaatctg

SEQ ID NO: 177167 - DNA, 764 bp, Homo sapiens
catgcaatcaaaaggaaggagatagaaaggggagggaaaaaatctgccaatacctatgatgggggaagttgcagctccacaggatatcccatggtactgatgagagtgtaaagtggtgtagtcactttggaagagagtttggcatgatctcctcataggtatatattcaaagactcttgcatgtgtacagtaggagacatgtagaagaatgttcgtagaacagttcacctcaccagaatcctgggaacaacccagatgccaatgcaacaagaaagtagatgataaaatgtggtaatagtcacagtgctatgttaaaaatagtgacccacaaatcagtatgaatgatcatagcagcacgaggtaaaaaagtaaatccaaaaagatgataatgtaggatattatttttatgttaaaaacaaaattttaaaatttgtaatacttagaaatacatatagataaaaccaaactataaaaagggaagcagggaagagaatgaagcacacaggattcaagatagtggtttcgtggggcagaggggcgagaacatggtatatataggcaggcctgcccctgtcgttagatgtggtttattgtccaggccttcacctgtatgtgggaagtgggttcataaatgcttgttacattattgacaatagttaattagattactgactaaataaaaggagggacatgcacagacaaatgatgacagtacatcgtcaatcaaggattgtgatgaattcaattcagtgtactgggaatta

SEQ ID NO: 177168 - DNA, 195 bp, Homo sapiens
tgcctgctgtcgctattgttggggaagtcctcatggaaacttgaattgggccttggagttgaatgggatttgggcacatccccctgagcgtggggagatcaccttatttggctttgtatttttagcaggtggtacagcataggttggaaataatttttttagatgaataaatgaggggaagggcacggaagatca

SEQ ID NO: 177169 - DNA, 297 bp, Homo sapiens
aaccactgtgcccaacctggactcataatttcttgatcttccctgtttctgcaacctgcatgttgtctcccatgcctctgcctcccgtctcaacctatcactcagaatccttctctgaaatgatgcatttggagaacctactgtttgattggagccttctgtttttccacttgtttaactcttattcccagtgaccctgtgttttgacctcaccaggacacccagccctggatgtcagtccccttcctggcctcactttcttccttgcccagctcagtcacttcagtgaggctctca

SEQ ID NO: 177170 - DNA, 670 bp, Homo sapiens
tcctagagaagctagttaggaggctcagttttcccatctgtaaaaggggggtgctaagaacctgtctcttgggggctgctgtgaagtataaatgggattgtgcctgtaacacccctggtacagtggtggcttataacccccttccatgtaagcaagagtgagctccacaggcccaaatcaatcctaaaacattacgatgaaccaagtgaaattgccatttttataggttaaatattgacaatttcatatggttcaacctaacagcatcccaggggctagaggatctcatttgtgtccactaaactagactaagagttagtactcttcacttcagtatcaggcacagcaatgaccctccttccccctcatttagagacgaagaagataccgaggttctgagaggttaagtaacgtggcccaaatcatataactggaaagtgacaaagccagggtttgtactcgggcctggctgcctccaaagcctgcagcttaaacacgatgacacactgactgctcggcctggggccagcagggcgttatcacatgtgattgtgtctcagcaccaaggacgtcagtggccgttgccttagaatcatgggaccttgggactgcgagggtacaagcagttaatggctttgttcaagaaacacacttgggctgggcatttatt

SEQ ID NO: 177171 - DNA, 735 bp, Homo sapiens
aagaagcagagaggtacaagtccaaagggatattaactttaacttcaaaagaaaaggtgcacaaggggagagaaattggcagaatcatcatttcccttacaaatgagatctttaaaatgcagccacagagatctcagggtcttcttaataactccaccccctggagtgtgtaacccaatagccacaaaggaacctgagagtccagggatacaaccaccataggctctaactcagaatatgattccttacctctcaggaatgagagggttgcaaagatctgtcctctgagggtaaaaagggcttaaatttcccagccagggacagtggctcacgcctgtaaatcccagcactttgggaggctgaggtgggtggactgcttgaggtcaggagttcgggaccaccctgaccaacatgctgaaacaccatctctactaaaaatacaaaaattagctgggcatggtggccggtgcctgtaatcccagctactagggaggctgaggcaggagaatcacttgaacccaggaggaggaggttgcagtgagccgagatcgtgccactgcactccagcctgggtgacaaagcgagacttcatctcaaaaacaacaacaagaaaggacttaaatttccctttggtagtgcaaggtcatgaaaaattctaaggtcacgcatggtggctcacacctgtaatcccagcactttgggaggctgaggtgggcagatcacctgaggtcagaa

SEQ ID NO: 177172 - DNA, 451 bp, Homo sapiens
acctgcatattagactctctccttcgccggtttctcagtgtgatgagtcacacatagtaatggaaaactctgtactgctctaggaaactatggagttgggatggagatcccatgtaccagaggcatttaggggcttgaacagtagatggtgcaaaataaatgtgactatacagttgccagtggaacttaccacagatattaatccttaaaaaaaagacaattgtgtccagttaggcagaagacataccagatcacccttgttgtttataagtcttcaaaatgttttctggtagaaaagcagtcagtgctctgagcccagcaaggtgcctgttgataaataattccatcaataagttaagacctgtgtcttactgagacctgtccttacttaactgaatgcctatgtatgataaattcccagctgggcgcagtggctcacacctgtaatccc

SEQ ID NO: 177173 - DNA, 217 bp, Homo sapiens
attcctctcacaaacaattgctgcctgcagcatttaaatatttaaagaacttcaggcagtaaaatgagtttgaaaaaaagaaaaatatctatttaaagaacttgaactaaaagggtttcaagaataaaagattattgtgtccagtaatcttccccaaccccggccctcctggaagggaacagagcagactgaaacagtgagtatgaaaggtagcaag

SEQ ID NO: 177174 - DNA, 401 bp, Homo sapiens
tcttcctgaacaaagatgaagcaccaagctctgggaaaagctaagccaagaggcccaacctggctggaagatcatacagttgcatttttcgtgtgtactagaaatacagagcactcattaaattaaccgagtgaaaaccactccttaggcaatgattaagctgagagtcagagggatgggtgggaggccagctgtcccatctgagctgcacttgatcactagggaatttatcatttctaatgcctttcacaaagtcccctgtgatgcccccattgcagcccccggggaacggtgaggcaacctgcttcttatggcagaaatatgggactcaggacagagcaggggttgtctggaaactgagggagaaaaaccaatatggggcatttatagcgtgagctcag

SEQ ID NO: 177175 - DNA, 505 bp, Homo sapiens
tgaaagcacagggctttcctttcctccctctctatctccccaacccagagaccgagattctgatttccctcaagatacacagaatgcacgtcacttgccccttaaacagaggaggaggaaggcaaacttgagcattcaactgttgccaaaacaaacccaagcctttcaaatgagttaagttctcatgatatgagtcgggttgagtaaatttatacaattctcatttacatacacacaaagagtaaaacaatctacttatttcttgtctgaattcctatcttcttcaataagatttggcttattaacgtagcagcagaagtttgggccaaatctatctagcaatgaacctcatctcacctatctctgtcactcttgcatacccttttcctacctatacccttccttttatcctggcaggtggggaatgcttaggcagaaagctcggccatttctattgatcatataggtaacatcttcagcactattattggtctgacgactgtga

SEQ ID NO: 177176 - DNA, 475 bp, Homo sapiens
actagttacttcagctcaacttcctcatgtataaaatggaaggaatatcagtacctattgtatggttttgagaagtcagtgaataatgcatagtaagtgcctggtggatagatataaatactcaataaaagtccactatcattttctcacttcaaccttccaacaatccctatgaggtaaacgctattattcatccatttgacagataaggaaattgagtcttagagacaatggtgtgctggagccagcttccatgggcttgtgaaagccaattgttaaattttcaaaagttttttgagttggccgacatcatgttgatagtttgaaagtagccatgatggggtatttctgccatgaaaatgagcgaacccatttcccccacagagctgcttgttaaacatttaccagcacaccactacttagagcagtaagataacttatctgaggccccatggctggtgagtggcagagccta

SEQ ID NO: 177177 - DNA, 306 bp, Homo sapiens
aagacttcttacatatgtgcattttaaaagtcaccctgacggttacaaattgtagcagaataggctcaggctctgacatcaacgtgtttagaatccagagggagagacagattgaacatgtgataaataataagaacaaaaaaatccaacgctttatgactatctgcaagcatcttccgtgagttagcaggtgtctccctgcctgatgtgatcctgtgttcttgtttatattggctagaattttcagtttcaagtagtagagactaactcaagctagcttaaagaggaaagaaaatggggacaaga

SEQ ID NO: 177178 - DNA, 140 bp, Homo sapiens
atgttaacatcaatgaacttaaaagaaggaaagatttaggtaggaagagacatgatgaattggttgttttccattattggagtgtttgctttatgtttctgagaatcagaatgtttaagtagttatagcagctgcagtga

SEQ ID NO: 177179 - DNA, 307 bp, Homo sapiens
ctgaatgtttttggttttaacagaattaaaaattctcaatatttctggtaggcataattatgaaattagtgcaataactgagacatctctgaatacatattatggaacacaaatttttgttttgatactccattctccaagttctaaatatattaaattttactagaaaaagatactatgtgattgattgcaggcattttatatgaaataatgaatataaatgaaaataaggtaactaaatgtaaagctttgggtctctagctcaaaaataatcacattttccaaatagcccccaacaggtttaatt

SEQ ID NO: 177180 - DNA, 152 bp, Homo sapiens
atacagaaagaaggtgtaaaataacgtaatgggagagcattaggctgagatagctcccatagccagggttcctacatagaaaaaatgaaacaagcttagcccatcaacaagtggcccgctgagtattagctgtgtaatgagagacctaccac

SEQ ID NO: 177181 - DNA, 382 bp, Homo sapiens
gtcctaacaagtgcaataaaggtaagtgggggaaaaacacataaaagttataaaagaagaatctctttattcacagatgacatgactgtgtagaaggataattctaagaaatatataaaactagaaaaactagtaagtgaactagtaaaacttaagtacaagatcataggatacaacgtcaacatacaattacatttctgtataccagcagcaaacaatttcaacataaaattaagacaatttcattaacagcagcatcaatacaaaatacattaacagcggcatcagtacaaagagattgaacaaaaatgtgatagatctctacagtgaaagctgtaaaacactgctgagaagaaaaccacatggagaacaatcatattta

SEQ ID NO: 177182 - DNA, 509 bp, Homo sapiens
aaaggctatttaggaactaatgctggcttaattattttctctgtctctcctctgcctcttcgaatgtacatgtgtaggtgtatgtgtgtgtatatgtacgtgtttccttttatacttggctttttgtagccatcattttttatcttttaaaaatgacaaacacaattcactttccagaaattaacttcacagttcagcagctggggagcgtctattcaataagacagaggttactgtttttgaatcttgccattagtaaaactctccagtaagcctcagaagtgggctaatggcaatatttaaacaacttgctctactgatactggttgtttagtgaaaaggactttggtgtgtcatttagctcatttcccccacttttaggtcaaatgtaactaaaacatcacacacatctgttcatctctttcttccaaatctccaggcagtgtagctgtttggggggatggggtagggaaggaaataaatgaacatctccaggcaagaaattctgc

SEQ ID NO: 177183 - DNA, 259 bp, Homo sapiens
gcctgatccccctcccaggcctcctcagtcacccgctgcctctttccatcattccctttgtcgcctgtgaccctgaggaggggtgggggcttaggacagggctttgcataggatctggactagttgtgggaatttgggcaggtaacttcccttctcaagcctcagtttcctaattcgaaaagaaaaaacatgggtaaggtcatgcagctcccacagaagatggcgagaaataagatcaggcgtagtccgagcaagggcc

SEQ ID NO: 177184 - DNA, 466 bp, Homo sapiens
ccgatctttggtttggagagcaattgtgaggaggcatgaaatgtatctggagatagctatgagctgcagcctgctgattttcatgtaattcttggctacttgccagtatggttggggttaaactgtttccagggtaggaaaaacacgaacctagcattttgatatgaaaacaaacaaggctactttgtacttgatgaagctcaagttgcagatccagtgagagcccattaactattggtgaaggcccactgacagtgttgagtttcagagacccctgcacattctggagatggcagcgaattgttgtgcagcctacgaaagtaataaatatttctgcagtgattgtcaacaacaaaatgattttcttgtttggggggtggggaggcaagaggcagaaaccttaggaagctgttgcaaaccagtttcagcttctgctacttttatttctttccatttaaagctgggt

SEQ ID NO: 177185 - DNA, 472 bp, Homo sapiens
aactcttcctcattttttggttgcttcatgcctttccttgctttctgaatgcagtgttttcccaaatctctctgaaggtactagttagacttcactgttgcttattgttccataccctaaatgatctctgtttcctttggggtcggttctgttttttcatcttttcatgcttttgattttccaaacatgttggaggatcctcaagaaagttaaaaccactttctctggaataataccatgtagatttaaatcctgcctctggctgaacacagtggcttactcctgtaatcccacttcgggaggccaaggcaggaggatcacttgaggccaagagttcaagaccagctttggcaacatagtgagaccctgtctctacaaaaacttaaaaaattagccaggcatggtggcatgagcctgtggtcccagctacttgggaggctgagatgggaagagcccaggaggttgatactgc

SEQ ID NO: 177186 - DNA, 351 bp, Homo sapiens
atgtctgaagaggtctgtggaaggcaagtcccaaggagaaaaggaaagagagataagaaggctgttctgcaaaactgcgaagccctcagaagaaacaaagggaacagagaagacagcctagcggggaggcggggattttgtactttcctaattctggcatgtgcattcctcacaaaattcatggctatcagctcattcaagagttcacttacaatatgttggttgggctagattcttcaagcatttaagtgtagacgctaagaggtaaatgcagatttctcaatttgaaaaggatggcaataaaatatgcagtcatctgtagaagagataagattatcttcctttttggga

SEQ ID NO: 177187 - DNA, 427 bp, Homo sapiens
accatacccagccaagttttctctaatagtaacaagctcctcactgccttcagatacaagtggaaagtttattgcttacaacttttcttatttctgcatcaatccgtgttcagttgcataacagagaatctggtcaagtttaagcataaagggatttaaagcaaggaattgaatgtgtacaaaactactgaaaggactagaggagcaaagctgtaggtccaactccttggaacaccttccaccacttacaactactcacaacttccaccactcacaactctttctaccatgattagaaaagctcccactggactagcacggtggcttatacctgtaatcccaaaactttgggaggctgaggcaggaggaccgcttgggcccaggagtttgagaccagcctgggcaacatagtgaaatcccatctcta

SEQ ID NO: 177188 - DNA, 271 bp, Homo sapiens
caaatttataggcatctaacactggagctcccagatttataaaacaattcttactacacctaagaactgagaaaaacagcaacacagtaataatggggaacttcaatactttactgacagcactacacaaatcatcaagacataaagtaaagaagaagcaatgaagttaaattacactctagaacaaatacacctaacagacattcacagaacattcttcccccaaactgcagaatatgcattcttctcttcagcacatggaaaattcttt

SEQ ID NO: 177189 - DNA, 297 bp, Homo sapiens
ccccgccgtgggttcctgtagtgttctattatttgtttgctcagggctgagctgagactctggacctgggaaaaaggaaagccagagtaggcccagggtccccaaccccagagtgcttcagccttgggggcagctccctaaggccccaggttgaccctggagctactctgcaccctctgcccccaggtctcttgtggggtcagcgctgccaagagtagaaacacttcccccagtagcggggagtactaggagctccgtggggattaaggcttgggcaaatgcctacagaactgacct

SEQ ID NO: 177190 - DNA, 336 bp, Homo sapiens
attctttaggattttagcacaattgctgccataaattctgataaattcaatcttcatgtaatttcactctcatccttctttaattctttagtaatgatcttatgctatgattgacctcttacatgagctcccaacttaatattaataagtgcattttattcccaatcttaactttaatccaactgaagttaatttttgcatgtggtgtaaggaaggagttcaatttctatcttctgcacgtggtagccagttatcccagcaccacttattgaatagggaatccttcccccattgcttgtttttgtcagctttgtcaaagctcggatagttgtacgt

SEQ ID NO: 177191 - DNA, 421 bp, Homo sapiens
ccacatcaggactgggacccaggaacccggcgctgagcagagtatctcagcaaggaagaggaccaaggcagaggctgccccaggcccccgtcccatcctgaccccaccgcgcctgcttctccaggctgctggaggagtgcaactggacccagggcacaacagaaacgcaccctctacccccacctcgccaactgcagtgctcccaacacagcgcaaaccagcctcccgtggctcccaccaccctcaagaagcaagcccaccctgcagggcaggacccctccccatggccggcgctccctcctgcctccctagaggaacaggcagaggtgaggcgtgtggggtcacgaccagcgtaacctgctctccttcatctatgctcagggtttccttctgagcctctcaagataattaaagctattta

SEQ ID NO: 177192 - DNA, 634 bp, Homo sapiens
attcaaatgttcaaagtgaaaaccacgtatcaacacggggagtagtccccctgcaaagagaaagccaaattgtgggctgtgggtgcgaactgctgccacagtgccgggggtaaaatattttggtttgggaacctcctcccagaacttctggaatgttcttgttttcccaacttgttttacagctgcgcagggagccagatagcattcattaattcccaacactggccagcatatagggcaaggggccacagacagatagaactatatgattagtgctaaatgagaaagagcacatacagattatccagaaagctccagtgagtcttcattttctatttcttctctcatcactttcataaaggaattctcaatgagcaacaagttataagagttccacatcttctcccttttcctgtcattatttggctattgctgataatagagaaactctaattagactggtccagcagcacattaggagggttcaaaagccagacctgcttgcaagaaggtattcagagaggctgaggcagggatacccccgggaagggggctgggccagccacgcttttgcgattcctcaaagctggctccaaattgggcagcagaggaggggcaaatgagcccccaggaa

SEQ ID NO: 177193 - DNA, 643 bp, Homo sapiens
ttctggaaagttgacacaggattctcttcatcgtattgataagatgcactcatcagactaacaagcttatactgctcatcaaaattgcacagatacttggaaagcatgagttaaaaagaaacaaaatccactgatgattatatctactttggcttatcatttagtaggaataaagacttcactcttccatagaatactatcacagagaaactctttcaaataataactgaatctttctctaatatttgagggaaagaacaacatttttcatttttaaaatctaaatcagtgaaattttaaattgcaaaatgtaagaattccaagtattaccatggcatcaattcacttttaagtcttcattttaatatatatttcatggccaaatcaaacatgagatgtatcatttttaacttatttttcagtaaaaagttttaaatgtaattttaaatatagaaataatttggtaacatccgcaactgccaagtgtgtgagaaaacagacatgtttacatactatgagtgcaaagataatagtccaacttttatagaagataattttattggaacaatagctatcaaagttttaatgtctcccctccccaactaaaatcccagagtttgactagcaaggagtttaatttagg

SEQ ID NO: 177194 - DNA, 691 bp, Homo sapiens
tgtatttttcatagagacagggtttcaccatgacggccaagctggttttgaactcctgacctcaagcgatccgcccgcctcggcctgccaaagtgctaggattacaggcatgagccacatattacatttttttaatatcatattcatttttccaagtctctgacatccaataatcctcctggtgttaataaaactttcctgttaccatacaccgattctttgtatcagcactgtccattgtaactttctgcaatgggaaatgtgctgtatttgcacagtcccataccacaagtactagcttgtcactcgtgactacttgaaatgtggcttgtacaactgaaactgagttttttgtttgttttgagatggagtctcactctgtcacctaggctggagtgcagtggcctgttatcagctcactgcaacctccatctcccaggttcaagtgattttcctgcctcagctacgattacaggtgtgtgccaccatgcctggctaatttttgtattttttactagagatggggtttcaccatgttggccaggctggtcttgaactcctgacctcaagtgatcggcctctcagtgctgggattccaggcgtgagccaccgtgccggcccgtcttgtcttcttttacagatggagtctcgctctgtcgcccaggctgaagtgcggcggcgcactctcagt

SEQ ID NO: 177195 - DNA, 662 bp, Homo sapiens
actgttaggcagttaaaacaataaagggacacacgctcctttatcactgagatcacctgcttcccaaataaggatgtctggtcattttaaaactttgtgggagtaaaaacattggtaggctgtttcaccaagcctcctgcttctaggaggcttacaggggaagcaaagagaaatcgggatccttttattttcctgtttggtatcaaaggtcactttcttcagaagagcagtatccatgagagtcttccaagaaatgacacccaagtagagagaacaaggatgtttctcttttaagtcaagtacagtctgaagaaggaattgtggaggtgaacctggactgactctggggtctgcagaggcagccgctggccgctaggaagaagagaggttgtggcctggccagggctgttgcgcctagcgccatcgagaacagaagaggcaatggcccaatccagtgcaagtccacggactggacagccacagccccctgcctacgtgggtgccaagggctcaagggagcatcagatgctttgaacaaaccatgggcaacaagaggggcaaagattggggatttgcctttattcataagaccctctttattgcctctaagaaaatgaaacaaggagactatataaaagttcttttttgagagagggtccagg

SEQ ID NO: 177196 - DNA, 199 bp, Homo sapiens
ccccaaacactggttcatacagtttccaattctataaacttaatgtgttatgcaaagttcaacattttcttagcataatttgattaaggatgtgcagaattgcatcagatgtaataaaagccaagccctgtaatttcaattattaaatacttgtaccaaagcctgtacctgagcagctcagtggctcatacttgaactg

SEQ ID NO: 177197 - DNA, 323 bp, Homo sapiens
tcgtctgtgactacccagaagataaaaataaatctacttcagacatgtcacagtggcccaccctgtaatcccagcactttgggaggccgaggcaggcagatcacttgaagccaggagttcaactccagcctgggaaacaaagtgagactctgtctcaaaaggaaaaaagaaaggatgtaaattcactcaattcatttttaatgttattgttggctccaagtgtttggtggatgaatgaataagtgaaagaatgaacaggctgggtgcagtggttaacccctgtaatccctgcactttgggagaccgaggcgggtagatcacaa

SEQ ID NO: 177198 - DNA, 151 bp, Homo sapiens
ggtgaacgttccaaattctaaggcaatcagatgccctggtcaaggttaacttgaaggacagagggggcaaagggagcaatttaatgatctttactttcccctcttttccgccagcatactttttttttttttttttttttttttttaaaaa

SEQ ID NO: 177199 - DNA, 443 bp, Homo sapiens
taccaactgcgggcagcacctttggtcggcctgggggtgaggcacagagctccacacccaggcaactcaagtgtgtgtgtggtaaggggacactgggagcggctggacgaccccctcctgccgaacagacaagagccccaggacaaactgggatggaggtgagggtgcagctgctgccagatgcgctgggtgctgcccaggaaggagagggttggggagccgggtgctcactcgccgcagcagctcactcctgctcgccagggagctcagggcagcccctgaagctgccagatccccccacgcaggcggcggcgctctgcactgcggagccgcgtcctgggggagcagtacccccagccccggcgccccgcagccagacagcccccctcagggtggcagcattccccggctagggtgcagggacccccggggcgaggcggccg

SEQ ID NO: 177200 - DNA, 424 bp, Homo sapiens
gaactaatacataactcagcaattccactactgagtatatatccaaaggaaatgaaatacatatgtcaaagagatatctgcacttccatgtttattgcaaaacttgtcataatagtctgtgaaatcaacctaaatgtccatcaatggataaatgaataaagaaaatgtatgtatatactctatttgagtacactttttaggatggtgtaggtgtcttgcaagttgtaagacaaagcagagttatgaggagggttgaattccttaggaactttcatgccatgcagaattggcggtgggtttgtactggggctaatttctgcaggcaccccttgtgatgttcaagatccatgttctttatctagtaattttttgtttgctcttttcttcccccgaataatccctctctgacattaagaaaggaaga

SEQ ID NO: 177201 - DNA, 164 bp, Homo sapiens
aaatgattctgatttttggttgttctatgcaaggtatatatgactcaagtctatcaaaactccaacaaaatgatctaaacacaaaattataaaatgaatctttaaaatgattttacatattagactctgcacatgcaggttggtatatacaatcttaatgcctc

SEQ ID NO: 177202 - DNA, 420 bp, Homo sapiens
gttgtcatacaccaaatttaaacatggaccccctcaagataggagtctttccctaagaacttcaattttgccctgtcaaccctacactttgaataaatatatattgggtgattctgaacctctataatacagttaatctttgttgtatttccaaggagttagaggttgagccagggaaagacagaagagatatgagggttacagggaaaggaaaaaaggaaagaaaagatgagtaggcttgaggcagagaggaaaaggacatccatatagacccgaaacacggaagaggctgaaagtctagatgtggtgaactttggggcaagtccatcttggtcctatccctccctcatccacagagggcacaacctacccaaacagacccacacctcactaggacagcagtattaccatcacaaccac

SEQ ID NO: 177203 - DNA, 200 bp, Homo sapiens
gggtcacgtgctacctgggcccctcccacatggggcctccacacttaaatcctcagtgcctggcacatgatgagctgccttggccaggcacagtggctccctccagtaatcctagcactttgggaggccaggtggaaggatagcttgagcccaggagtttaagactagcctgggcaaaatggcaaaatactgtctctaca

SEQ ID NO: 177204 - DNA, 192 bp, Homo sapiens
ggaggcagaaattgggcataagacaatatgaggggtggtctcctcccttaactcaagtgatccttccacctcaacctcctaagtagctgggactaaaggaatgcaacaccatgcccagataggtttttgtatttttttgtaaagacaaggtctcaccatgttgtccaacctggtctcaaactcctggctgta

SEQ ID NO: 177205 - DNA, 245 bp, Homo sapiens
taaatccctcgtcatgggagatatgcatacatcctcagagctcctcttctgacagagtccagttcctgaacactggttatgatactatgagcagactgtggggagccatcgttcaatgaagacagtgtggctaggaaatccctggaaggactcccaccactaagacttgtcaaaaattcttcaaacagtacttgcagaggccctgaaatttctgggacttctataaaatccctccctgggcttga

SEQ ID NO: 177206 - DNA, 615 bp, Homo sapiens
ctataaggaggctcaagcacatataactctgaaacactaactaaaaaactcacattaattaacattgcagagtagcagtagtttttgttacctttttccattggaatctttgtcttttatcttccagacacagtatgatcttattagcaccttccggatgcctaaagccttgaagtagtgccttattttccaaaattactactccttcctctagcttcactttcttttcaaaacttccactagccttcgctaggtgtttagaagaagaaaatctgatagtctccgtactaacagaaaaataacagtcctaaaccttctggtagtatttgaaaagatttttaaatgtctttttaaaaaacctattacaatagacaaatctcaaaactggtgaactacagacagtttaataaagcagtgaaggcttacaagaagaatggaagtatatttctgtgtgttacctgtgtatctggtggggggatgtagacaactgcctacttggcctatatgtacaggcaaccataaacaaatcatatatgacttaagcttgtgcatagacttgacattatggtatcagcaatttcaattgtactctatcatacaatccaaaaagcttgt

SEQ ID NO: 177207 - DNA, 245 bp, Homo sapiens
atctagaggattaggcatcgaaacctggtcttccggcacctgcatgagggagactgtgtaaggaacaggggcaggttttccagctctgccacagcttgaggacatctgtctccgacagtgacagattcccccgcctcatgcactcccttcagcgttggaaaatattttatggatgctttactggtgctaaagaaatgtattcttccatttgaataatattgcaagggacgattaacttctgtttc

SEQ ID NO: 177208 - DNA, 479 bp, Homo sapiens
gttggggctgaaacgcatctgcacctccacctgggtcctccgtccctcagggtgggtgtttattcccaagcaaggggtcacccagagagcagcccaaaacctcccttgagtcctgaggaaggggcagccagaggctgggctgggaggaggcgtggcaggcgttgggagcagctgctccaagtgcagtgaccatatttttctgagctgaaaaatgaggacacaggatgtagctgagggctttctcaggttggttcacttaatgaaggggaaaaaaccttccaaaggtatgaaagttaaagcttatttagttatgtggggaatagcttgtttttgtggaaggaacctgagtttccaaaatcaggggttttctggaaaggaataattccatttggctaatatttggggggcacctggaccaaccttgtctttagtgggaagcaaagcaggcatgatcctggcctcacagagtgacgtaggga

SEQ ID NO: 177209 - DNA, 848 bp, Homo sapiens
ggacgcgtgggctgctttgccataaggtgggtcatttggcttgtggcatctcctatgggattccacatcagtggatcacacattctgtaagttcttggatagtgatgctggccaaggccctgcaggtagaaaagaaaaatccaccccagcctacctgttagttcccctcaagatgatgtaaccccctggccaccaagtggctgcttggtcttattgagggatgctgctgtatccaggttcagcatcagtgtctgctgtggacagtttagacattcagcaggggcagtggctggatcagccttgccaagaggaggcctagctactgggcccatgcatggcctccctccctgccaccattctgggctgctctgtatatgaccccattgtgggagccctggagtggatggtgatgggccagctgtgtcaactgggtgagccactctcgctatggtgccccttctacagtggacggcttggaggctgttaacgtggtaaaagatcttcctccttgatgcccaataggtccatccacaagcctcttcctcagacttctctgtcctccctattccaaactctccccttccacccaagccattcaccaccatccatgagaccatgtatagtctaacctcagcctcaggtgatttctgtttccacaggaagtggatacacaggtgcgctgcctgtagctttgtcagcgaggaggttttctctcaccacaatctttcagggccacccattgcagtgtggcagccggccttctgtggattgcacccacagaggcctaccaaatgtggcccgtttcctccctggaaggctggccataagggtcacccctgtgtggccag

SEQ ID NO: 177210 - DNA, 363 bp, Homo sapiens
cacaagagccctgtcatccctcataacaaggtcaggaagcacatcctgacagggacctggcttctgctgcaggacgtgttgggacagcagggcttggcattcacatccatggtgttactgattaggaagctgggaatgaattgcctgatttggggagaacacatacatcgcaagaggtggagagaatcccgtcttgttcataagcttgagggtgtaaactccctcaaggagggagggagaagactgtttgttcccatcaaaatgatacagtggcaagtgctatttatgctattgcatttcttttaagtgatgcactttccctaaaaatatgcacttattcaatcctttctgtgatgggtaaaa

SEQ ID NO: 177211 - DNA, 785 bp, Homo sapiens
ctgagctgtaggattagaggtaatttattatatagagatattaggattggctcttctgtaaaaagctaatttactgacaacagatttgaatcaaagtaagggattcataggtaaaactatgaacttttctccctaatgcttcattccctgtgggtaattaatgaaagagaaactttgcttgagtgtttctgggcatcttgtctcctacaacaggtgtcaaatttctccaggtgaatgcttaccggtaagggattggataaggaatgttgcggtgaggatcgtgcaactggtggaacacttctgccagggctggttcctggcgcgcttcccccagcaaactggccaacagggaaaaaccgatatgaataattcaaaacagtactatgcttcagataaggagagtaaaagattaatacacaaacagatcttaattatatggcccctttaagttaacacatcttactctagagagaaaatgccacacaagtcaaattctgctaatttttaatgagatttttaagaaggagctccagcagaaatataccaagatataaagaaaacatggctagaaagctgaaggtatacatgattttgaaaggacatgagagaagaatgttttcccttcttgtctccaaatacacgaagcagaaatgcagtggtgcagtggatgttagtgtctttagtaaccactaacgatgggtcagggaactcactacatgttccactgtactaaagggaggaggacaaaagaagagtccaagtcattccacctcaatctttgtaag

SEQ ID NO: 177212 - DNA, 331 bp, Homo sapiens
ctggtctagaagatccatgaatttaatcattttgaacaaatgctgaaacttcctttccatgtgctttggtgtgcatcatatcttcttcttagtctaaaatttatatcaaaagaattaggaatactatggtttgttacagcttcttgttttgctactattgtgtacatttttagaagttactaaggaaaaaattttacgtttggtgtcagatgtttgtccatgtgacatttgaatgagtaagtgcaattcctttgggcagataaaaatgtcagtgtactttatttgtctaacaggaattctctgcttgtagatgtaatataatatagttctg

SEQ ID NO: 177213 - DNA, 179 bp, Homo sapiens
tacttaatatatttttttccgtaaatgaaaacatgttttaaatacctaccgcaaatataagtatcctaactggaaaggttagtgaggtttactcaattcacacttctttaatttgggactgtatgaaaatgtctaaacatatgttatggaattctctattgatctatctatccatctat

SEQ ID NO: 177214 - DNA, 204 bp, Homo sapiens
gaaaccctaatccccagcataatggtatttggagatggggccttgggagataattagatttagatgaggtcatgagggtggagccctcatgatggaattagtgcctttataagaagagacaccagagaacttgctcgctctctctcactctcttcactgtgtgaggacacagtgagaaggtagctgtttgcaagccaggaagaa

SEQ ID NO: 177215 - DNA, 392 bp, Homo sapiens
ctagagccaattaggtaagagtatagtaattgtaggatggcttccagatatgcgactggtctatttgggtagatcaaggcaccattaccaaggaataatctaaagaggaaaaaaggaacaattttgtggtacactgcatttaaaataatctgtgggacatcaaggttgatacagggaagactgcaaggcttaggagggaagtctgggcacaaaagtagctggctatgatcttgggaatatttctctaaaacacactgttcatttgtaaagtgaggaaaataccacctatctcatctatttcacaaaacagaaataggatgtacataaatactctctctgtatgtagttttttggggattttgtgtgtgtgtgtttttgttttttgtttctgt

SEQ ID NO: 177216 - DNA, 236 bp, Homo sapiens
tgttggtgtgcatgcgagttggtgtgtgtgagttggtgtgtgttagtgtgagttgtatatgtgtgagttggtgtgtgtgttggtatgagttgtgtatgtgagttggtgtgtgttagtgtgagttgtgtatgtgtgagttggtgtgttggtgtgagtgacttgtgtatgtgtgagttggtatgcgtgtgagttggtgtgtatgtgagatgtgtgagttggtgtgtatgcgagttgat

SEQ ID NO: 177217 - DNA, 606 bp, Homo sapiens
attcttgatataagttcgtgaacagatgtatagctttttttcattttcttgatggtgacctttacagagcaaatgttttcaatttgtatggcccagtttatgagtttttcttctgtggtcatgcttttggtatctgtgaacattgcctaacccctaagatttcttctgtgttttattttcgaagtttaatcattttgtctcttctattaaggcatatgaacctttaaaattgaatttttaattcaatttttgtagatgacgtgatataagggcagaagtctactttttgcatacaaattttcagttttcccagcaccatttaatgacaaagtatctttccccaattgaattaccatgccatctctcttgaagatgaattgaccataaacacaaggttttatttttggattttctgtctatccttacactgataccgcctgcattgagtatgctttagatgagcttttaaaattaggtagtgtaagttgtcttactttattcttcgttttcaaaaattttttgactggtacagattctttgcatttctgtataaatcttagggtcagcttgtcaatttttgaacaaaagcttctgaaattatcatag

SEQ ID NO: 177218 - DNA, 228 bp, Homo sapiens
tgtaaaggttaggtttggatctggtatattagcatcttaaattctcaagtctcctataaacctgttctcttaggccagctatggctgcagaagtcagttatagataaacattgagaggggagatcacatcatcctttgttttccatttcagaaataacggcagacacgtggcacatgtcctgagcctggggtggtgccgttccttttgttgctctatctgtatgggag

SEQ ID NO: 177219 - DNA, 431 bp, Homo sapiens
acagtaccaacttggtttaaagttttcagcttgtcctctgatgcatttgttcacctcattgtactaaaacacaaagaaactgtctcgtataaaaatcagaaggaagtttagaaatcagaaagaagtttagaaaagtttagaaatcagaaggaagtttagaaaaaaattatggaacacatgaaaaaaaaaacaagaataaactaaagggcactgctgaatagacagacaacagcaacagtaagggggctctggtcccccttactaactctgccaagatgacagttgtttgaattctccaacccttcttctgctcctctgtcaaaggaggatttcgcatagggttcgcaggctagcgatctaataggtaaagcacctggcacgcagctggaaggctatctggggtctgtctgcttctgctagcatcaatactc

SEQ ID NO: 177220 - DNA, 532 bp, Homo sapiens
atcagtaagcctagaaatagtgaggcaaggaccctgttccctgatttgaaataaactattgattgccttaacaactggtgggggatggtataatcagagtccgggtaggacccaggacaggacccaggaaaaggatactttaaaatcaaggagctaggtcattctgcggggtagatacagtcatgttgaaaagtataaaagtttgaaatacataaatgaaaatgggatctagaatgttaaaaaaaaattgaccaggcgcagtggctcacacctgtaatcccagcactttgggaggccaaggcgggcggatcacgaggtcaggagatcgagaccatcctggctaatacagtgaaatcccgtctctactaaaaatacaaaagaaattagccaggtgtggtggcgggcacctatagtcccagctacttgggaggctgaggcaggagaatgccgtgaacctgggaggtagagcttgcagtgagccgaaatagcgccactgctctccagcatgggcgacagagcgagactccacctc

SEQ ID NO: 177221 - DNA, 458 bp, Homo sapiens
ttcccttaggctcaaaaggctcggaaactgggggccaacgtttacaccctgggtgtggctgattataatctggatcagataacagcaattgcagacagccctggccacgtgtttgcagtggagaatggcttcaaggccctgagaagcaccattgatgccctcacgtcaaaggtctgtcttgatgtgacatcggtggagccttcctctgagtgtgtaggagaaccctaccatgtggttattcatggaaatggctttcagaatctaaagaaacgggatgaagttatttgcagatttatcttcaatgaaagcactatcattgggagtactctattgaagtcagcttgaacaaaggcaaaacattcttcaagagcaatgtcagcatcaccagcaccacatgtactgtcaaggagccaccacctgtgcagaagccagccaagaaccaccggggtacggagtgc

SEQ ID NO: 177222 - DNA, 179 bp, Homo sapiens
cattctcactaatgactgaattcccaccaagatttccatattatcacagtatgcttttaatcttctaagatattaaatatttgttctcatcacagctaaaatgcaatgcaaatcccatctcagatgtgggtcagatacctatgaatctcctgaggtagtcattgaaatgactttttttt

SEQ ID NO: 177223 - DNA, 478 bp, Homo sapiens
tgatggaactacaggcacgagccaccacacccagctagcttttctctttaacacacctcctgcttttcttacttgttctctggggtggctcctcagtgagttctgccagctcagcagttcagtgagcaattccatcctgtttagtttaaaatccttttaactagggatgtggccttcaattgcatattgacgagtatgcttttagccttaatgctatgtcagtgatgctccactgcccacccagttcccctttaccaatatgatgcctccttccctcagccactgtgaatgttggctcctccaatgatgtgaatgtctgtgtctccccaaaattcatatgttgaagtcctaacccccaaggtgatggtattaggaagtgcggacctttggaaggtgactaggtcatgagggcttagtgatcttataaaataggccctatggtgctcatttgcccttccaccacgtgaggacacagtga

SEQ ID NO: 177224 - DNA, 340 bp, Homo sapiens
agactccatctcaaaaaaaaaaaaaaaaggaaaaaaggaaaggccatgcaaggctcggttagggtggtctgcagtgctgggcctgctggaattggtacagtccagagggatctgtgggaatatggaaggcttggttctgccacacaccaaaaaagtgacctcacttctctgggcctcagtttcctcatctggaaaatgggaacatggtggtctctgcctactgggagtggactgagaatcacgtagcaaattgttgtgaaacaggcagcatttgtgatctcgttggttggcttttgtctccttttatctgggatcaggactctgatgacaggtgtacgtt

SEQ ID NO: 177225 - DNA, 343 bp, Homo sapiens
tgacatgatacgactcgagctggtacccgataagggccaagcagggtggatcacctgaggttgggagtttgagaccagcctggccaacatagtgaatcccgatctctactaaaaatacaaaaattagccaggcttggttctgccacacaccaaaaaagtgacctcacttctctgggcctcagtttcctcatctggaaaatgggaacatggtggtctctgcctactgggagtggactgagaatcacgtagcaaattgttgtgaaacaggcagcatttgtgatctcgttggttggcttttgtctccttttatctgggatcaggactctgatgacaggtgtacgtt

SEQ ID NO: 177226 - DNA, 793 bp, Homo sapiens
gtcactatggaagaagggttggagagatgcaacattgttgactttgaagatggaggaaggaagccaaggagtatggctgacctctgagaatggcaagaaagttgattctccctcagaggctccaggctgaaacctaagcccttgtgaagcctgtatcagacttcttccctacagactgcaaggccctaacttggtgttggctaagccgctaggttggtgataatttgttatggcagcaatagcaaatcaatacatgtttgctgcttaatttaaattaatgtgtaccattatccacctatcatttacttttgaatgtattagcaagtagggcaacaaccgttctagatgtaccctccattctgttgtactgatcaatttgtttactcctttgccaatatccagttgttttgatatagtcacttctacacattcaagtacctggtaaaagacaagttagcctctgttcttgttttgttttttaaatagtttccctgggtttttatagattttgttttatgtcctctaaataatcatttcttgttgtatcttattaagtcttttaaaatttatgttgttatggtgaaaattccatctccatttgtaattgataattcttgtaaataaagtataccacatacaaccgtgtctcaaggcctttgaacttgctgttcactcttcctgaactggaatgtgcttgtcacagttgtctgcacagcagaatttgtcacaaacctcaagtttctgctcaaatgccaacttattgtaagtgaagccctccctaatcacctcatag

SEQ ID NO: 177227 - DNA, 2439 bp, Homo sapiens
  misc_feature (1914)..(1914): n is a, c, g, or t
  misc_feature (2235)..(2235): n is a, c, g, or t
atggggtgacatacatgaaagtgctatataagccaaggattatcagcaactcttcttcagatgagaaaactaaagcctacagagcttaaaacacttgcccaaggacgcatggctagtaaatggtgaccacaggccagtctgctcccaaccacatgccatatcccaagtgcctcaatgggagtgcagaggatggacctaatctagcctgactagggtgggctgcagtgcagggcagcaagatatgaaggcctcaccaagttcagaaggggcagcaaaatcaaccagatgaagaagtgctttcctggtggcacctggtttgattctggacagctcatttcacatctagcatggcatataatccagccagacctgggtttgaatcctgccactacagctcactagttagctgtgtgcccttgggcaagcccctgaatgagtcattccatggctgctgttttctcctctgtaaagcagggaagatagcgcccactttccagggctgtgctaaggagggaagcctgtgaagagcacctgtcacaacaggaaatgcagacgtgggagtcactattgttaccaccctcttgttctagcaggagacagtggctgttaccagaccctcccttcagggacagcccgatgactcctctgggccaccagagtgggttctccaaaagggtgcaggagaacggggagccatttcccagagctgcaaacctcccagggagtgctcaggctccatctccctcagcccccagctgcccgccagccataactgtaggatatggtgcccaggggagccatgaaaggcgaagcttttacctccatctcctgcacttcaggcccccaggccccaccctaggacttgctgtgggatgggctggaggaagggctctggagtctgcagaaaggactgccatgttcctggctctggcatccttctctgtgctcttggtgccaggcacagccatcctgatgtctcatgctcagacaccacagactggaaatggtggcatctcctcctcatcagttcccccaagtcccatcagtcaggtgtccccagcgtctcctccaccaccgctgccttcatcttgcctgcccatgtgcagccttgttccctctcctctgggcacgggcccctccctctggctgctcctctgcaactaccagaagactctgtggtagcccttccatagcgctttatctctagggagaacatctggcttggcctggcatccaaggcctctggtgagcagcctcacctgtccttttccaggttgctctcatgtggtcccttccccctcctacccattccatcctcttcctgacaccaaacttctccctgttcccaaaccctgcctagctcactgctgttcctctgcttgcactgttgtcccaccaccctcctcctgacattccttcctttttttcccctttaagtggtttaacaactgacttcatgtcagggagataatcaaaaattccctgctcacattctctggaagtgggccagttttgtagctcagcgttgaaactacccctaaaaacagctctcctcttccacgacaaacagaagagttgatttggtatacttactcttttaaaatcgcctttaaatgtttcctccattgtgaggccttcagatgtccccaggcaagtaagtagcttccttcatctgtgtgtactgtcttacgctgtgactgttgtggactctggacttggggaccacctgttatctctgtccccagcctctatctgtgaggcagttccaacacaacatgaaggcaacaacaagtgctcagcagggtctcaccttacagcaacttgtaaataccccaagaaatccgcttttaaatgtggagttctggccgggcccagtggctcatgcctgtaatcccaacactttgggagactgangtgggcagatcatttgagcccaggagttccagaccagcctaggcagcttggcaagaccccatctctacaaaaaacacaaaatttagccaggcatggcaacgtgcacctgtagtcctagctacttgggaggctgagatgggaggatcatctgagcctgggagggtgaggatgcatgagccatgattacgccactgcattgtagcctgggcaacagagcaagaccctgtctcaaaaaaaaaaaaaatggctgggcacggtggctcacacttgtaatcccagcattttgggaggccaaggcaggtggatcacctgaggtcaggngttcgagaccagcctggccaacatggtgaaactccgtctctactaaaaatagaaaaattagctggccatggtggtgctcgcctgtaatcccagctacttgggaggctgaggcaggagaatcgcttgaacctgggaggtggaggttacagtgagccgagatcacaccactgcactccagcctgggcgacagtgagactttgtctc

SEQ ID NO: 177228 - DNA, 586 bp, Homo sapiens
atggggtgacatacatgaaagtgctatataagccaaggattatcagcaactcttcttcagatgagaaaactaaagcctacagagcttaaaacacttgcccaaggacgcatggctagtaaatggtgaccacaggccagtctgctcccaaccacatgccatatcccaagtgcctcaatgggagtgcagaggatggacctaatctagcctgactagggtgggctgcagtgcagggcagcaagatatgaaggcctcaccaagttcagaaggggcagcaaaatcaaccagatgaagaagtgcattccaggcagaaggccagcatggacaaagaacaggattacccaggaacatgacacactgagctgctttctctggaaaatgcaaggtctagactctgatgcatgagtccccttctagccggacactcctccattctgaaccactctttgctcagggaagcaggggtctttgtactgcaatctggatccagtctgctcattggccttttgtggtatttagcacggtgcaggtcccagaaccccctatcgcttctttaatcagtggaggcggaggtgagcatacctagtta

SEQ ID NO: 177229 - DNA, 3294 bp, Homo sapiens
  misc_feature (2769)..(2769): n is a, c, g, or t
  misc_feature (3090)..(3090): n is a, c, g, or t
ggaaggaagataaggtgcctcctgtctgggggataacagtgctctcttacctcactcagagtgaatacaggcatggaacaaatgagtatgtgcgagcagggatgcactcaggagaggagcaggcagtggctggactggctgttatgactaggggcggggctcactgccaccctcccacaccagactatcagcagcagcaagagcgtctcctgggcagctgaccccaaaagtgctgagcatgtgctggcagtaaaacaccccaggcttctcattaataaggatgctttctgtttgtgtctcccctgaaacattctcaaagggttttcccttctgttacatcattagctatcccagcagccttcagggtgggaggcacaagatcattcctgttgtacatggggaggaagcaggtctaaggatttgcttggagcctcatagcaaaccagaaacagggctgggctgagaatccagtctctgccacatcccgtgcataggtacagtggcacctgaggtaggaggcatgggagagagtgggatgaacagacctctctccagccctgagatgtccatggtttggctgtttcagcccccagagttgttgggggtccttgtgaagcaactccacacaggtgttgagtggggcacagggtactgtcagcttgttagtaagagggattccttgggcccagataatttgtcagcagctccaagagtgggaccccaactctgtcttctctctttagaggtaactgaatagcaccagggaggagcgtggcggcagcaccaaggcggaagccatgctcttttgactctggcttccgtcaagagctgtcttggaaggagaaaggagctcctgagttgaatttcaggtggacacccaccatgctaaatagaattccaagccactagcctctagccacacaggttccatcccaacactcctgtctgtgggacttgatctgaaaagccacactttggttgggaaccttgcccagggctggctggagaggggcctgttgtgccactcagggaaggccttatggttccctcatcctgggtgggcttcaggctggggctgcagactctggcccagctccctggtgggccagtcaccagcactgctggctctgagtcctgatttcttactttggctttcctggtggcacctggtttgattctggacagctcatttcacatctagcatggcatataatccagccagacctgggtttgaatcctgccactacagctcactagttagctgtgtgcccttgggcaagcccctgaatgagtcattccatggctgctgttttctcctctgtaaagcagggaagatagcgcccactttccagggctgtgctaaggagggaagcctgtgaagagcacctgtcacaacaggaaatgcagacgtgggagtcactattgttaccaccctcttgttctagcaggagacagtggctgttaccagaccctcccttcagggacagcccgatgactcctctgggccaccagagtgggttctccaaaagggtgcaggagaacggggagccatttcccagagctgcaaacctcccagggagtgctcaggctccatctccctcagcccccagctgcccgccagccataactgtaggatatggtgcccaggggagccatgaaaggcgaagcttttacctccatctcctgcacttcaggcccccaggccccaccctaggacttgctgtgggatgggctggaggaagggctctggagtctgcagaaaggactgccatgttcctggctctggcatccttctctgtgctcttggtgccaggcacagccatcctgatgtctcatgctcagacaccacagactggaaatggtggcatctcctcctcatcagttcccccaagtcccatcagtcaggtgtccccagcgtctcctccaccaccgctgccttcatcttgcctgcccatgtgcagccttgttccctctcctctgggcacgggcccctccctctggctgctcctctgcaactaccagaagactctgtggtagcccttccatagcgctttatctctagggagaacatctggcttggcctggcatccaaggcctctggtgagcagcctcacctgtccttttccaggttgctctcatgtggtcccttccccctcctacccattccatcctcttcctgacaccaaacttctccctgttcccaaaccctgcctagctcactgctgttcctctgcttgcactgttgtcccaccaccctcctcctgacattccttcctttttttcccctttaagtggtttaacaactgacttcatgtcagggagataatcaaaaattccctgctcacattctctggaagtgggccagttttgtagctcagcgttgaaactacccctaaaaacagctctcctcttccacgacaaacagaagagttgatttggtatacttactcttttaaaatcgcctttaaatgtttcctccattgtgaggccttcagatgtccccaggcaagtaagtagcttccttcatctgtgtgtactgtcttacgctgtgactgttgtggactctggacttggggaccacctgttatctctgtccccagcctctatctgtgaggcagttccaacacaacatgaaggcaacaacaagtgctcagcagggtctcaccttacagcaacttgtaaataccccaagaaatccgcttttaaatgtggagttctggccgggcccagtggctcatgcctgtaatcccaacactttgggagactgangtgggcagatcatttgagcccaggagttccagaccagcctaggcagcttggcaagaccccatctctacaaaaaacacaaaatttagccaggcatggcaacgtgcacctgtagtcctagctacttgggaggctgagatgggaggatcatctgagcctgggagggtgaggatgcatgagccatgattacgccactgcattgtagcctgggcaacagagcaagaccctgtctcaaaaaaaaaaaaaatggctgggcacggtggctcacacttgtaatcccagcattttgggaggccaaggcaggtggatcacctgaggtcaggngttcgagaccagcctggccaacatggtgaaactccgtctctactaaaaatagaaaaattagctggccatggtggtgctcgcctgtaatcccagctacttgggaggctgaggcaggagaatcgcttgaacctgggaggtggaggttacagtgagccgagatcacaccactgcactccagcctgggcgacagtgagactttgtctc

SEQ ID NO: 177230 - DNA, 509 bp, Homo sapiens
ggaatctcctggtctgcgggttgcaaagactgtgggaaaagcgtagtatctgggctggaatgcaccattcctcacagcacagtccctcatgccttcccttggctaggggagagagttcctgaccccttgtgcttcctggatagggtgatgccccgtcctgcttctgctcgctctctgtgggctgcacccactgtctaactagccccagtgagatgagccgggtacctcagttagaaatgctgaaatcacctgccttctgcattgatctcactgggagctgcagactggagctgttcctattcagccatcttgccagctgcccccttattgggttttaagagttctttatatattttggataatggtcttttatcagatgtgtcatttgcaaatattttctcacagtctgatttgttttctcattcttttgaatttgtctttcaaagaacaaaagtatttaattttaagaaagtccaacatatccattatttattttatggattttgggt

SEQ ID NO: 177231 - DNA, 354 bp, Homo sapiens
ctatgtcagactaggaaagttagtgacacttatcattattgaataggttataaaactcaagaacaggacaggtgtggtggttcatgcctgtaatctcagcactctggcaggccaagggaggaagatgacttgagcccaggggtttgatactagcctgggcaacataattttaaaaaataaattaatttttaacaataaaataaataaaatacataacctcaaggacaaccttataaaattaatcctgataattgctcctagatgaatgctgatgaaggtaagtgaattctaaaaacagtactaatctcccttctacctcaccaaatatgtttcttttcctgaattctttatcct

SEQ ID NO: 177232 - DNA, 955 bp, Homo sapiens
agcacatagaaacacattctggctgctcagaggcaaaggctctccaagcccactgatccttgctagtgtcattgatatatctcgagcaagctccacctgcttaattgcttcttcactctgaaatccctcctgaaaaacctagcgcttttatgaagttcttccttggcttcataccctcagtatcaatttacaagagggaaaaagtccaaagagaaacagaagaaacattgggaaaagtatgcctcaaaaagcctttgtaggtaagcagatcaaggacctctgtaccagctttcactccattgagtgttgctcagcaaggggcttgacctgtctcttcacctgccaccacaaaggcagatggcaggctacaaaggacacattcattgtaaagaattataaagtctcattctgttcacagtggccaagaatgccttgagcattcaaaacctgagatgtgtggaagaaaaagtgtgacaaggactacttgatttgcatgtgacaaatttaactcaaaccagcttaagcacaaagagaatgccaagaattcctgtccagattcagaattaaggaattaatttgaaaaatatcattagatctctatctctctctctctctctctctctctctctctctctctctcgtcgatttgagagaggagatttattcacagcacactttccgcgcgcatgatagaaaatagcgttgggggacgatctggtggggtgtgccccaccaaatccatcttgatgtgagacacaataatcccagggtaggagaagcacgggggggaagaatgaaacacggcaggaggtccccaggagtcacgaacagagttatcccagggacatggggtaaacaagccccaggaagaaacgcagcgcaagacgggtctgtcccaccccaaagagagggcccatggaaagagaccaatcttacacacaccgttcgacaaagg

SEQ ID NO: 177233 - DNA, 215 bp, Homo sapiens
caatctttttggtttaataatttaaaaatttaaaggcatgactcatcccctgactatggctttggctgcatcccataagtttggtaagcagtgttcttatagttagttgtttctcaaatatctataatttcagttttgatgatctgtctctttgatgtaacagtgttttctaaaattttcaagtagtttatttctattcaagtttgttttgcttt

SEQ ID NO: 177234 - DNA, 564 bp, Homo sapiens
atacatcctactacctaataaatatgagacatcaggaaagtcacgtaaaccctagtcagtccttagaaattaaatgtccaattatgagctattcagaagtttgagtctatatttcaatatgtttttactatacttgaaagagccctttaaatataacaaagagaaagagagaagcccactccacgtgatgtaagtctgatgatcaaatatggttccacatttttcttacatgcattggcctagggtgttttcacacatggtgttttagaagtgcctgactttaaaaataatgttatggaaatcctcatggtgagaagagcaaggctacttataagctatgaatagcatctgaggcgagaattctaacagtcatttctgggctgtatgttcttagaaagttacttcttcggtattatttatttcaggattatcttaatctcataatggtctagagactagttagtccttaaccttcttaaaaactaggaaccattagttgggttctttaacacagagctgtgacaactggctcaagatgtactcatgggaaacctgtattccaca

SEQ ID NO: 177235 - DNA, 487 bp, Homo sapiens
agcccacggtagatttagcataatttttatggggcttaagatttttggaatggtaaatgagtactggcttcagcttaaagtcacaagctgcattagccctaacaagaaagtcaacttgtcctttgaagccaggcactgaatgctcttctctagctgtgaaagtcttaagatggcatcttcagccgatggaagaaggctgttttgtctccattgaaaatttacttagcatagccattttcatcaatgatcttagcttctacataagcacttgctgtttcaatgtgcctttttttttttaacccgcccccaagaggcagggtctggctctgtaaaccaggcttgagtgcagtggcgtgatcacagctcactgtagcctcaaactccggggctcaagtgatcctcccatctcagcctcccgagtaagcggggacagcaggcttatatcaccacgctgggcaaatctaccgtgggcaaatctaccgggggc

SEQ ID NO: 177236 - DNA, 466 bp, Homo sapiens
ccagtgtgaccacatgcatagttgccagtggggcccacttaagccatgctgcctgtaccactgctacaaacgcccacactgaggctgacactctggcatctgctagcacactgccacagctgacaagtgtgcacccctctgtgctgccactggcacatgggaatgagggtagatcccactgccactgccttacaaaactctttggcaccacccgctggagtgtagtgacaagtagtccaggggcaccttgacaccctcctacccccagtgcagtgggttcctaacattgaggagccagagaacaaaatagggtcccaataccagtcccccagatttagagcatgtaatctgggagttaggagctgaaccttggccacctaaaatcttccagaaatgaagccagttgactgaacccaccttatataccacaatcaaaccctcaaggtcatcaaatagggtgaaagga

SEQ ID NO: 177237 - DNA, 143 bp, Homo sapiens
tcctcgctacactggcctttccacgtttctcctggtgaactgaactgacgcatcattcctcctcgctcacttcttcagtgtcccaggcgggagcttctccaagccgtttcctgcagggttggactctcccacaccggctttcc

SEQ ID NO: 177238 - DNA, 423 bp, Homo sapiens
ttaagacccccaacacagactgaaccaaactactcttacttcttaccgtatatcctgatcacaatacaaactggactgtttactattttcttatatcttagtttgtatccttccttcagtttgccagtctggcttgctcattctttcaaccttagttcaggtgggtttttttgtttgtttgtttgtttgtttgttttgagatggagcctcgctctgtggctggagtgcagtggtgtgatctcagctaactgcaacctctacctcccaggttcaagcgattcccctgtctcagcctcccaagtagttgggattacaggcacacaccaccacgcctggctagttgtttttgtatttttagtagagacagggtttcaccatgttggccagctggtctcgaactcctcacctcaggtgatccacctg

SEQ ID NO: 177239 - DNA, 378 bp, Homo sapiens
ttcatttctccacaaagttataaaaatataagaagtagaaggatatctaaatataaaatatacttgctatttacataaattcttggcctacatgttcaagccttgacatctatcaaaaagagaagtccataaattaaagctgagatgtctagcaagccaataggtctgtaattggaaatgatgggaagcaataaaaagaatttcccttatataaacaagatgaactatctactagttccaaattgaaatggactacgtggaaattaaacacaaacttacaaattccttcatagtgcaccacaaaagatctaatagtctccaagctagagactaaagtaaatagatggcagaggggttaaagtgtgctttgtgattttc

SEQ ID NO: 177240 - DNA, 223 bp, Homo sapiens
tggttcagtggtgacagcaagagcaggctgagaatttcagttcccaaatgacatgtgccaaagacaggactgaaagatgggtcatgcaagcggtagaaaatgctctctgatggccaaggataaacaactcaggcggcaagaaggtgaacttctgctgcagcccaaagcaacacatcagaatgccataagccactgcagtttatttttctgccagatgatctct

SEQ ID NO: 177241 - DNA, 436 bp, Homo sapiens
ggtgaaaggtggcaacaaggcactggaatcctgtagtctcacatctgcagggctgcccctctttgcaggcagatggggaatgagaaactgcttggtatccttagtgaggtcagtccccaaaactctaatggggtagaggttctggcaagtcagattggcacacacggctcagaaccagagcctatgggaggccagtgtcccaccctggaggccgatcgcaaagagaaggattgtatagtctccagacagccacatggtacaggagaccgaagaagagcatatcctacgcacacaggaaaaaagagactagaaagacagatacttaccagttcttttctgacaaaagtgaacactggctcagttaacaccttggctctgggagataaggagaaactaaaagggccacatggtcctgcttgctaataagatcactatc

SEQ ID NO: 177242 - DNA, 783 bp, Homo sapiens
gagatggaggttgcagtgagccgagattgtgccactgcactccagcctgggcgacagagagatactcggtctcaaaaaaaaataaataaataaataaataaaataataataatgataatatgatagcagctattattttatcgagggctctgccaagtgctttatatgcgctaggctctataatcttcacaacaacctttaagaaagactctgttaccatcttcaatttacagatgcagaaacgaagcacaaagatgtcatcaaagtgtctgaaggtcacagggccagtaaggccatgggaaatgtgcatgttaatctgggctctttccattctgctcattgcttctcaccttcccttcctttctaggtaccaggggaacagagtaggtagagactggtctcaggctgcctgaaggctgacacagacccagccctgaccctctcacaacgtcacactgcatttgcccccagctcctctcagtctagaaacctgcaaaccccaggatcctagtgtctaagcacaggccccagtgtctgttaggtcaccccattccaggcttggatctagccccaccccctccctcaccatctcccacctcctcagtcaaaagcaaagtcaagacaggcagccaagccagtcccagcagaactccttgagaaaggtgacatagcagcagcaacccagcctgagaaagtgccctgaagccacagcagcccaacctgtccaaccagatcaccctcctcctcacccagaaggagtgtagcctggagggtggctttcaa

SEQ ID NO: 177243 - DNA, 590 bp, Homo sapiens
ggatttagaaccaaaatttgctggggggaaagaattaccagcatcaaagtcctaggatgtgtcagggcaccagaagagaagttttgtcactgtaaaataactctcttggcagaacatgatggagactgtaaacagcaggttacttcaatggttatgtgcggttcagtgaagttctctacattaactgaagcacaactcactgcgtcccaggctctcctggttcacgtgtgatacactgcacttggggtggaggtgtgctgacagttgtaaagggctgagcctttctttcccgtggctctgatgcacggtttccagataccagtcatgaaggaagttcttgagattatggactttgtcctagtcacatagggctgctaggacaaagtgccatagacttgggggtggtggcacatattaaaaaaagaaatgtatttgtcacagtctggaggctggaagtccgaggttagcatcccagtgggcaaggttctggtgagggctctctctctggcttgcagatggccgccttctcactgtgtccttgtgtcaggtgcgagataatagtagggtcggggttttggctttagggtcgg

SEQ ID NO: 177244 - DNA, 535 bp, Homo sapiens
aggagaatccgttgaaactgggaggcagaggctgcggtgagccgagattgcgccatttcactccagcctgggcaacaagagcgaaactccgtctcaaaaaatatatacatacatttttaaatcgtgcataaaatacaggcatccccaattaaaacaggtgattgttttatcttgttatcaaatagttgagctgctctatgtagtcctgggttctgtgtaaatagacactacaattgtgggcaagtggcatagaaatctaactaggatttggaactgcttcactgttaaccagcttctttgcaaacgtaaacaagaatgccgtgtaattataccaccatcatatgtgaaattttattctgatttcataggaaccttgggaaacagctgaacctattagcagttttagggaatgttagttctgttgtatagggtgtctatctgattattcagtttgccacagctgccttttgggcttgtgccttgttttgaaatttgttccattgatcatatctgctgtgcgatttaggaggccttt

SEQ ID NO: 177245 - DNA, 544 bp, Homo sapiens
acgagataaagatgtgcaaactgacttccaaatttcagcccccaaatgaataaacacaggtaaaataactttaaatatttgggatggagagacaacactagtgcagagaataattcattttgatgtgaattgctatgaattatcccacaataattccccagctttatcatgagtatgttaacagagtaggaacaaattattatccatatcctccccaaattaaaatccatttaaaaattgccttaggtctcagcaggagttttaaaacctaactgaacagaatttataacatgctttgaaatcaaccactaaaaggtgttttcttttctaatttccatgatctataaatcactgtggtctagattttaaattgtcacatgcaaggagaggcaataaatccttagtgtataacactatgtatctgggcattataatacaaatctccaccatctatgatttgtaaaaagtaaaaaacatgcttattataatgttcagtgttgatcagtggaaaatgtggaatgactgatgggatcccctttggaat

SEQ ID NO: 177246 - DNA, 514 bp, Homo sapiens
agaggatcccgtggaactagaactgcatgagtaagccctgctaacaatggtctggccatctgcaggctcactgacttgccagataaactgcttctagttcccaggctaagcttgaaagtcatccgacccagcagcgaagccatttgatcgtaggaccagcactgttctgtctccttgttccccccagtctccacctttgccaaggtgtacttgggcgccagccccagggtcaggttgccagataatgtatccattgctaatgagttcagagacctctctgctcagggccaagcgacgggacagatccttctgctctgagactggctggctggcacaaatgagctgctaggatctcactggagaaatctccactgggctgaatcagctgagacctaagcctctcagccctgttgagctgctccttgtttgacaaaggctttaacccccaaattctcacccaagcagagaacttgcctcttctctgcccacttcaaaaccagatgacttacagaat

SEQ ID NO: 177247 - DNA, 652 bp, Homo sapiens
agaaggtcttgacgttcagagtaattcaggatttgatgttgtaaacagtgaaaaggggaactctcaggtagggtgtattttgacgaggtaatgttttagcagcagctctgtgtatgaaatacgtggagagaaaagagcagcaggtacagttgtccaaatgggggccagggaagccttggcctgggctggtggctgttgtactaggagggcccacacggtgcaaaggtgtgggatgcacagaaggttgcccatttcttagcatttctgttagattgtagggtccagtgctacatgatcactgtagtagtatatctgtctaccaagtaaagtcctacgtgccttgtgatttttacatgtagatttaaaaagttgacgtgtaacttacccatagtaaatgaacaagtgtgaagtgtgaattctggtggacttttacatatgcatccaccgccatataaactccagccacagcaagatgcagagttgaatcagcaccccaaaaggctcccatgccccctcctcctcctagaaagttcaccagtgttgcatcttccagaaaggtgatgaccgttttgcctttgtcggcaaagatgaattttgcccgatttttaccttcatgtaagtgattcccgcaacagagagacccatttaagtt

SEQ ID NO: 177248 - DNA, 568 bp, Homo sapiens
aggaggggttcaggagctgagatgctgagcctggggtagggaagacttgagtggggcaggccctacaaaaaggggttccatcaatccaaataaggaaaagtcacaaaggaaaggtctggtctcaatagtgaagggcattgttccctgagagatcagtgtgttgtcacaggagacaggaagctctgaacacttcaagacatgcttagaaggccccccgatgtcagcagaaaaggggctgctaatgtcatctcagaaaccaagttatccccatgcaacaaaatcaatcacgtatcaaaacatgatggagagacagcctgcagaagtcagatggttcccggagcactacaggataaaaaggaccttgaaatacagaagacaaagtacaggctcatgaatgtctggacacaccagcaaattgagcctgaccaactgcactgacatcctgatgagtcagcttgaatcaagaagatgggtcccaaataactcagggtcacgcagcagagagagatggggattagtcaagtgtgttcactctctcaccgactcttcctgattgaattcccacact

SEQ ID NO: 177249 - DNA, 264 bp, Homo sapiens
agtgccctacacagatgcaccatttttcatcttttatcccctagttttactgtaccttttctatgtttagatacacaaactcactatcgtgttacaactgtacacgtcacaagccatgcaggtttacagcccaggagccaggggccgcaccacacagcctaagagtgtagcaggctgtgccatccaggtttgtgttagtatattccacgatgctcgcacaacgatgacattgcctaatgatgcgtttctagaatgtatccccat

SEQ ID NO: 177250 - DNA, 351 bp, Homo sapiens
cttggtgactcagcaatcaaactgttcattttgcacatgttttgtgtttgattcatttagtcactgagtcttcagtttctctgcctgctttttgccctgctgatggggaccagcctccaggtcagcacagcaggttgagcctagagaggcaatcacagtcccaggatgaacttttttttttgtccctgaaaggggcctttccaggagactccccaggggctgctgatatgctcttccaaggctttcctgattgtctgtccacccatacccaaggggaactgatgtttctatcctctcccataggccttttctaggctttttacccacttccagcctgtctcctaggggcct

SEQ ID NO: 177251 - DNA, 307 bp, Homo sapiens
ggctattgtccactaaaccaaacctaattcccagaaacaattcacagccctccagcagctgtccgctgtacacctccagcttcagagccactgtgtttgggcccagcctgtctgtttgctgccagcctcccaccatgaaaactgtgcctcttcactgccaaccagacttgcccttcattcaagaccaagctagaaatccatcacttttaaaatacctctctgaaattttatacacatactctctctctctctcttattccaccaaagatttttaaaagtttttatttaggctgggagtggtggctca

SEQ ID NO: 177252 - DNA, 864 bp, Homo sapiens
ccaggctggtaccgccccggagttatgggatccactagggaggagagcaaagtaatcagaacctcccaaggatggataacaaaatttcgccggaggcccaagtggcggagctggaacttgacgccgtgatcggcttcaatggcagacatcattttgtgggattataagaacagagagctgcttgctcggctgtcccttcacaaaggcaaaattgaagctctggccttttctccaaatgatttgtacttggtatcactaggaggcccagatgacggaagtgtggtggtgtggagcatagccaagagagatgccatctgtggcagccctgcagccggcctcaatgttggcaatgccaccaatgtgatcttctccaggtgccgggatgagatgtttatgactgctggaaatgggacaattcgagtatgggaattggatcttccaaatagaaaaatctggccaactgagtgccaaacaggacagttgaaaagaatagtcatgagtattggagtggatgatgatgatagctttttctaccttggcaccacgactggagatattctaaaaatgaaccccaggattaaactgctgacagatgttgggcctgcgaaggacaaattcagtttgggagtgtcagctatcaggtgcctgaagatggggggtttgttggtgggctctggagccggactgctggtcttctgtaaaagccctggctacaaacccatcaagtaagttccagttacaaggcggcatcacttctatacaaacttccgaggcagcaagtgacaccaggttaactccgtacagaccagaagaatcggccaattaaccgtgtcagcttcacggactctcacccgagacgctcaa

SEQ ID NO: 177253 - DNA, 1064 bp, Homo sapiens
ccaggctggtaccgccccggagttatgggatccactagggaggagagcaaagtaatcagaacctcccaaggatggataacaaaatttcgccggaggcccaagtggcggagctggaacttgacgccgtgatcggcttcaatggacatgtgcccactggtctcaaatgccatcctgaccaggagcatatgatttatcctcttggttgcacagtcctcattcaggcaataaatactaaagagcagaacttcctacagggtcatggcaacaacgtctcctgcttggccatctccaggtctggagagtacatcgcctccggacaagtcacattcatggggttcaaggcagacatcattttgtgggattataagaacagagagctgcttgctcggctgtcccttcacaaaggcaaaattgaagctctggccttttctccaaatgatttgtacttggtatcactaggaggcccagatgacggaagtgtggtggtgtggagcatagccaagagagatgccatctgtggcagccctgcagccggcctcaatgttggcaatgccaccaatgtgatcttctccaggtgccgggatgagatgtttatgactgctggaaatgggacaattcgagtatgggaattggatcttccaaatagaaaaatctggccaactgagtgccaaacaggacagttgaaaagaatagtcatgagtattggagtggatgatgatgatagctttttctaccttggcaccacgactggagatattctaaaaatgaaccccaggattaaactgctgacagatgttgggcctgcgaaggacaaattcagtttgggagtgtcagctatcaggtgcctgaagatggggggtttgttggtgggctctggagccggactgctggtcttctgtaaaagccctggctacaaacccatcaagtaagttccagttacaaggcggcatcacttctatacaaacttccgaggcagcaagtgacaccaggttaactccgtacagaccagaagaatcggccaattaaccgtgtcagcttcacggactctcacccgagacgctcaa

SEQ ID NO: 177254 - DNA, 770 bp, Homo sapiens
ccaggctggtaccgccccggagttatgggatccactagggaggagagcaaagtaatcagaacctcccaaggatggataacaaaatttcgccggaggcccaagtggcggagctggaacttgacgccgtgatcggcttcaatggacatgtgcccactggtctcaaatgccatcctgaccaggagcatatgatttatcctcttggttgcacagtcctcattcaggcaataaatactaaagagcagaacttcctacagggtcatggcaacaacgtctcctgcttggccatctccaggtctggagagtacatcgcctccggacaagtcacattcatggggttcaaggcagacatcattttgtgggattataagaacagagagctgcttgctcggctgtcccttcacaaaggcaaaattgaagctctggccttttctccaaatgatttgtacttggtatcactaggaggcccagatgacggaagtgtggtggtgtggagcatagccaagagagatgccatctgtggcagccctgcagccggcctcaatgttggcaatgccaccaatgtgatcttctccaggtgccgggatgagatgtttatgactgctggaaagtatgtgtctgcgttcggagttttcagaactcataaattgctatattttcttgcacagaaaacatggtcattctgatctgggggaacacgtctttagtcctggataaataccttacatcatagtttttgtgattttgtactcattaaaagttctcttcactgg

SEQ ID NO: 177255 - DNA, 619 bp, Homo sapiens
caagcgattttcctgccttagcctcccaagtaggtgggattacgggcgtgtgccatcatgcctagctgatttttgtatttttagtggggacagcgtttcaccatgttggtcaggttgttcttgatctcctgacctccggtgatccacctgcctcagcctcttaatgtgctggaattacaggtgtgaaccaccgcgcctggtcccaacacatttgttttattcaatacgtgttgattaagtactttttatgagaaagccctaatttaaggtcatggcaaatataacggtgagactaacatgacccatctctggctgagtaactttgaaattcacagatttggccaggcacggtggctcacgcctgtattcccagcactttgggaggccgaggagggtggaacacgaggtcaggagtttgagaccagcctgaccaacatggtgaaatcctgtctctactaaaaattcaaaaattagctggtcgtggtggcgggcgcctgtaatcccagctactcaggaggctgaggccggagaattgtttgaaccctggaggtggagctttcagttagccgagattgcgccaatgtactccagactgggtgacagagcgagactctatctc

SEQ ID NO: 177256 - DNA, 822 bp, Homo sapiens
gttctccactcccacccttgtctcctttatttttcttcccgtttttcccataatgccttgttcatctctctctcattgcctgtcacatttgggagcctgagaatcaagatgggtttcttggttgcctgagggcaggcctagtgctggaatcaccagtgacttcatacctggcttcagttggtcaccagttggtgacagagctgcctgatacttgtctcttactgacagcatctatcaaatctcttccaattttttctcaatgaaatgtttcctttcactgtggataccataactcagatatgttagcataacaaaatagtatctgttttcagtaaactactttacttttactgagggctttggaaataagctggtgttttgagttcaggtgtaatgtagccaaaaaggagaaataattaattctttatacttcacctgactagaatttagaaatcagtttttctttacacatcccagacatctagagcttcagtccagctgaagtctcatgaatttttcaggctagtcattatgcatcttcttgcttcctgccttcgtttttgcacttttccagtccatccctgcttggtgaaattcctgctactctccctttaaaactgcctttggattcttccttctcttcttcagacagaattaaccattgcctgttaatcccgttgtgctttgttcattcttcagaataattataaggtgatacagtggtggagcgagctgcaatgagaggccatatgatacagtgactaagactgtggtctctctgtagccagacagtctgggttcaggttctctccccaacttaac

SEQ ID NO: 177257 - DNA, 214 bp, Homo sapiens
gctgccacaagtggaggacatttgaactaaggccctgacaatgagaagaaatcagctatgcaaagatctggggaagaggcattcctggcagagagaacagcaagtacaaaggcccaatggcaggagtgtgcttggcgtgattgaaggattgtcaaaaggccagtgtggctgggcgttgtggctcacgcctgttatcccagcacttcgtgggcag

SEQ ID NO: 177258 - DNA, 256 bp, Homo sapiens
tggacctaacagctggatgccgtgtggtgatatcactatcagcagaagatgcaacaagaccggggccactgctcaaggccagagaaacaggtttgtaggggccagtgggtcagcggtgaccatagaagacagtcttctctactttgatagcaaaacaatgcgtaaggcacctgaggaactcagattacaaccagggagaagaaaatcagaggtacaaggtgggatgcatcctgaattggtagaggagataccccag

SEQ ID NO: 177259 - DNA, 214 bp, Homo sapiens
cagctcaacaaagcccctaaaaatgatgactgcatccatttccacccaacgccacattctgaaagtgatctttttgaaacgaggattgcaaatagctgcagcttctcaaaactgcaattgcttttcatggtgtggcattgctgtcttcatgctgacacagctctcagcactgacaccagcctgcctatgagccgttaaagatatttcacttcca

SEQ ID NO: 177260 - DNA, 133 bp, Homo sapiens
attgtgagtgttcagtcggcttggtgagggatggcagtgggcatcttctgcctgtggtgggcatgcttgtgggggttgagagacctgccatccattagactcttgtgtactgaagagctacctcagtttcctt

SEQ ID NO: 177261 - DNA, 593 bp, Homo sapiens
tagtggaaaactcagtgaaacacaaccattaaaatgtgaccacacaaaaacgtatttatcagtataaaaacttttaccacatggcctaaatgttttaatgtgaaggttattgtaacagttatacaaaagagtgtatactattatctatgtttggagaaataccgttatacacataaaatcaaatgttttataccaactcagtgggaagtaaaaaggaatataaacacaacaaaccaaaatgttaacagtaactatctctgaattgtagtacattgagtgattttagtatccctttgtatttattttctaatcttgatccaatgaatatgtatgtcttccataataataaataacaacaataaagggagaaatctggtaaataaattgggaactgcccaataactaaatgtcactggcagccatgttgctgtggccatggcagaccatgcaaatgtctgacaacactctgggaaggaagggactctctcaatcagctgtcatcctatggcataaattccacttttattccctaagtgctttgagggctctatttggcaaatattacaacagatgctgaaatacaggagttgtga

SEQ ID NO: 177262 - DNA, 306 bp, Homo sapiens
ccaggtgctgggtcaggtgctgaggccccatgtctgaacagtcaggcttcctgccctggaggagctcatggtctcatggagagaatagatgagaaccatccatgccaacaagtaaatataaaaaagcagtgatgacttccatgaaggaagcaaaaaagaggttgagagatgatgtcagagaaatcctacttactatagggtgatcagggaagccttcctggaggcaacagtcaagttgaaactcagaagatacaaggaacagccatgagaagagtgaagaggaagatgttccaggcagagggaaca

SEQ ID NO: 177263 - DNA, 289 bp, Homo sapiens
acatctgaagcaggagttgagttccctggtaggagcctccatgttcctgacacaaagcggggtagctcagcgcctctgtgtacaggcctgagtgtcctggctctgtactgcctctatcctgcagcaggacccctcagggctcactggccattgttaagtaggacatggggcattcttccagcaggaccctgagccaaaggggtacctgcccaacccttgactcacattcaaggtatagcccctgccggacacctgcactgggtatggggggcagagatggctaggacat

SEQ ID NO: 177264 - DNA, 181 bp, Homo sapiens
gcctttcttcattgctgttcttaattgggctacgggtttgactagtctagtagagacccaaaataatagtgattagatgcaccgtatgatggtatgccctctgggccatgtgtttgacggtaacagctaaggggtggcttattatcacatctacattccagccagtggaagagggaagtgg

SEQ ID NO: 177265 - DNA, 188 bp, Homo sapiens
aagattaggtaaggattatactgaaatatatcagggttatggaatatgcaatctaccaatacttctaaaacaaaatagcagcatgataagtaaaggggatgagctgtatttatatttacatggcttgcctgggaagctcaacaaaaaagaactatgttctcaggggcaggcgtggtggctcctgcctg

SEQ ID NO: 177266 - DNA, 323 bp, Homo sapiens
cttgtgctgggcaccgtaggggctatggaaggagtaagacacagtcatgctctcaaggaactcgctgtccagcagagtgataggacatgaatacatacttctagcaaaggctgagtagcattaggcaggtggccagatgaggtcagagctctggccctagtgccctgtagtaagttgcgagggagtaggaaatgaagacaaaacagcaagagcacaggtccagcacaagaaggtgaaggacatggaaagaggagcagagcatgataaagctacaaaagtagggggcaagtcatgaggtccgggtcactggggagccctggaca

SEQ ID NO: 177267 - DNA, 869 bp, Homo sapiens
aggtcttgaaaagtgcaagaggctcttccatggctccaagcacatttgacactcttccttttttgatccccaagcagacagtgatgaaaccccaatagctgggcgaatactcatccaacaggaagaatcagttttaagagctgggttctcagggtcaaatactgtggtgtggccttttggttgtaatgagttgaatggaggtctcaaaaaagatatatccatgttctaatccccagaacttgtgaatgtgaccttatttggaaaaagagtccttttggatgtaattaagttaaggattttgagataaggagatcatcctgggttatctgggtggaccctaaatctgttgacaatgtccttatgagagaccccagagggcacagacaggaaaggaagaggcaatgtggccccagaggctgagatcagagctctgtggccacaattcgaggaacacctggagccaccagaagctggaggaggcaaggaacagattctccctgatcctctggatacagagggagaatagcctggccgacaccttgattttggacttctggcccccagaactgagaaaattaacttctgttgtgttaagcagccacgtttgtagcagttcatcatagcagccctgggaaagaaatacagtgggcttccagttcaaggaggatccacgaggcctgagctccatctgtcgattggaatcaccaaaatcaaggttgtgtgcgggtaacgccagcacaagcagctcatgctggcaaaagcagaccaaaccggctcacgcaacgtcaagtcatcttgaagtggttcacgcaccacagtgagtggtattgattgtggttaagagccaggttcaaggaggtttatcactc

SEQ ID NO: 177268 - DNA, 566 bp, Homo sapiens
catctgaaaactgttgcttttggcctgaggttattacaaaataagactgtatccacgtgttaccggttggaagggcatggacaccgctccccgctccttgaaacactttctgctctcagctgcgtgaccgctctgctctgattttcctcacgccttactggctcctctttgtctcctctgctgatgtctcctccaatccagttcccttctctactctttctagtccctttccctgggttttcaaggtcatcttacataggccagatactcccaatccacaccctcagcttcctcttccttactccatgtggctgtagacaaatgcctacttgggatcttcacctggatggttaatcagcatttcaaacccatcatggccaaaggactctgtgttctgcactccaccctcatcttcccattctcagtaagagacaggattatccagccaattgttaaagccaaagttttatccctgatttttctcttttcctcacacactctgacaaccctacctctaacattgattcccaaatccacggacttccatcatcttcagccttcttacg

SEQ ID NO: 177269 - DNA, 119 bp, Homo sapiens
tgatactgatactgctggtcttaggaacatactttgagaaacactgaactaaataatacgtgaatgcctgaaaagaaaaataagcaaactagcatgtaaaaacatgatacaattttata

SEQ ID NO: 177270 - DNA, 591 bp, Homo sapiens
atagctggtcccaacccattggttttctcagtgacttgtgatggacggaactgggaactgaatctccagcaatcagcagattctgggcagttgtttgtggtctttctcttttcctctctggcttgcctttagagtcccagaactaagcctgccctgcatgtctgtatctatctatatcctgctttctaatctcctttcctggtctgggaacaggttgcttggggccagactgctttgtgatgagtgggttcagaacaaagcctgtctggagaccctgaaagcccctttgaaggataggagctaattgggacgggcgatggagagaactatgacttgatggaggataccagtgaagagggcttgctgccatccactttgcaagtagggactccatcattgcagaaagtgttcaaactttctgagctggttttggattttttgttttctatatcttttgttagatttctaatttgtctgaactattgactagattgtaaataaagttagtccaaggaaacagtttgtttcctgttcagagttataaaacattacagttgtgttctctgttaagtactgtctatccctaatatt

SEQ ID NO: 177271 - DNA, 501 bp, Homo sapiens
ggggcatctggtgacacgggatgctcccagagagccctgctccttccaggtaggaaggtgtgcccatgctgccctgcaggcaagagcaaaatgccctgtgctgggaagggatggagctcagggcagctccacccgcagactccgtgcaggtgccctaggctgcttcccggctgaccaccaacccagagagacagagaaatgctctactcagatctgcttttcacctggagcctgattaagaaacctaaagctccagaggtcaatacacacggaaaacaaaacaaagctacctggatcagtttagagtcctagcagggacagaattgccttggtggctggacgcccaactcccaagccaagcatctgccgtggccccctgacctgctcaccaggagaggggacaagctggctcctgtggtctgcagccacctgcacacattacactgagaattcaaattaaatgcagagtcctaggcccaccctggcataccaccccatgca

SEQ ID NO: 177272 - DNA, 264 bp, Homo sapiens
gcaaaccaagtattgctaataccttggtgtagcatgagaaacattggtactatatgagaaaacttgaataacatttttgaaaggccttttgtaatatatgagattctatttcaaagcctacctgggtttatgcttagtctagaaatactttttaagaagccataagaaaacaaatccttccttatacattactgtgaatggacttgatatgaaaaggatggcatgttttttatgaagacaacttaaaaagtgtgtagtttacaa

SEQ ID NO: 177273 - DNA, 522 bp, Homo sapiens
ccccatgtaaccacagtacaactatcaagtgataagtagcattactatttaatccacagaccctattccagtgtgcatggttatactcattatgtccttcatgaatctgggatctgatcaagaatcttaagctaaactttggccatcatatctctttagtcccctccagtttggaacaatttctcagtctgtctttgtcttccaagatctcatttttgaagagtgcagctctgatgatttctcatgattaaatttaggttataccttttgggcaaagatatggtggaaataatgctgtagagccttataatgatgatgactttttatcacttggctaagatagtgcctgccacatttctccagtgaaaagctaggaagtgtttttatttattactaagtagatatcctgtttatcaaacaatcactctccagttttgccattcattggatcttgcctgactcagtttttactgtgatcgttaccaaatcatgaattttaaataaaattcatccttcttctgt

SEQ ID NO: 177274 - DNA, 330 bp, Homo sapiens
ctcggcttcccaaagtgctgggatgacaggcgtgagccaccacgcccgactgatttttgtatttttatttttttgggcgggggggacagtgtgaacacagtccctccactaccacaaattacgcagtcaagtttcccacatttggggaaaacgcagggctcagcacatccggagtgcaatggctaagccttgccctgggaaaaccaccttcgcgatcatggtatctcccctgccgggtaagtatgatttttgtatttttaatagagatgggggggtttcaccatgttggccaggctggtctcgaactccagacttcaagtgatccgcctg

SEQ ID NO: 177275 - DNA, 350 bp, Homo sapiens
cagtcttttcatctcagaggttacttagacaatacgacaagcacagcccactcctcagtaccggttccggaagagagacaaagtgatgttttacggccggaagatcatgaggaaggtgaccacactccccaacacccttgtggagaacactgccctgccccggcagcgggccaggaagaggaccaaggtgctgtctttggccaagaggattctgcgtttcaagaaggaatacccggccctgcagcccaaggagcccccgccctccctgctggaggccgacctcacggagtttgacgtgaagaattctcacctgccatcggaagttctgtacatgctgaaaaacgttcggt

SEQ ID NO: 177276 - DNA, 371 bp, Homo sapiens
cctggccttggttggtgtcctcatccttttcatgttcagaaggcttagacaatttcgacaagcacagcccactcctcagtaccggttccggaagagagacaaagtgatgttttacggccggaagatcatgaggaaggtgaccacactccccaacacccttgtggagaacactgccctgccccggcagcgggccaggaagaggaccaaggtgctgtctttggccaagaggattctgcgtttcaagaaggaatacccggccctgcagcccaaggagcccccgccctccctgctggaggccgacctcacggagtttgacgtgaagaattctcacctgccatcggaagttctgtacatgctgaaaaacgttcggt

SEQ ID NO: 177277 - DNA, 1468 bp, Homo sapiens
ctcagactggcacttggctccaaggcttaaaaacaaacctggagcagacactgaatgctagaatgtgtaagctagtcaggaaagaaagccaagcctggtctagcagattaaggaggattttaagagatcaatgatgtaagaacatgatttcctaaaaaccatgtaggggaactgtcatctctgcagtgaataggtgcatataggtcctaaaaaaaaagtgaatttggggcctgatagcctaagacctttcattcctgggttgcaaaggcagagtaacaagctagaatagatatgcctcacctctccagagagactggttgggagtgaccaaaagggattcctgccaatattaagcctggagaagatgacaccccatctgctgagcctggagactcaagccagggaccagaggagtggccccggctaagagaagcttaccttttattgccaagacttgcactggcttctgtcactatggaaaccacgtatgatctctgacctccaccagggccaacttcagcctttaaaaccacctttccaaatgaaacaagaaagtgctgagttctagaaaatgtgactttttaggtcaaactgtggaccctaaacatgtgctactttcttaaagctgtgtgagtaaacacatggtctccaaaccacccccgattctgtaatcataagagggcaccagtatctgggcatcagtgagtatcctggcagatggatctggctggatgaggtaagggagttgtacaggtgtgctgagtctatctctactcctgagcctgggagatgtgagaaaacaggaaaatgagagtctccccgccagtgacttgataggggattgagaaccaccatttttgtcccttctgagaaggcacctcagctgctggccctgagcccagagagcagacaaaagaaaacattacccttatacttagggggcacagcaatgctcttagaagaggctcacatgaaaccaagccactagggaacagtaatacatttaaaatattaacgttaggacataaacattccagtagagcacaaaaagactttctggaaccaaatgacaagatctgcagacaaattcagtagctgaaggaaagaaaagtagtagttaataggaagtaaatttcccaagttaagaaagggcctgagtctgcctattggaaggttttggcaagttatgggcaagacaaatgattcataggttgagaaattccagaagtctaaggatgaaaagaaaatcttacagtcttccagaaagaaagtacaagtgacttataggggaagaaggatcatgggggcatcaactttctcttctatgacacctgaagtagggatgattgaggccaatcgtgtgaagattactgagagaaaaacactgcacaccaagaatcctgtagcaagaccccactcctctgtcagggtcaaggaaacatagttgagaatatgcaaggaaaagacc

SEQ ID NO: 177278 - DNA, 329 bp, Homo sapiens
atatgctaccactctttagagatctatgactaaaaagtcatattgaaaatattgcctgtactcagaaggtaaccaccattcattgcctctagtaagtataggacatttggtagctaatgattgtaggtgaaaaatggcattgtgattaaaaaacaaacttggatagcattaaaagaaaaaaaaggagaagagaataaggaactaaaaggagaatcactaaaatcaatgtattattaagttatcatgttcatcatttccacctaaatctaaacctaaaaccttttccaggaagtatttcccatttagtttaattccatatcattctaatt

SEQ ID NO: 177279 - DNA, 369 bp, Homo sapiens
  misc_feature (357)..(357): n is a, c, g, or t
cgtgtaaaggttagggaggaaggaggtcctttgatatctgggaaggggatatctagggctcttgggtgtttttcaggagatggtgaccggtaactgtaaatgcctgtggagaggccacttcttaagagttgaagaccaccagggtctccacattaaagggcctggccatgggaagaacagtgataggcccaaatttccagactgataaagagtagtggaggtgggaggctactaaagacccaggaacttcatgtggaatttcagctttgcttcattccagtttcatttatttagtggatatttatccttcctggactaggctttgggattacaacccagaactaacctttacacggngtaccgagctcg

SEQ ID NO: 177280 - DNA, 404 bp, Homo sapiens
tagatcatcatgtaaataaaaactaaatacctcaattgtggaacttgagatcaatcataattttttttcatattatgaacagaacatgaacatacaatcataatatcttaattcaagagaatattagatttttttattgttgtttgtttgtatttgtttgaaatggagttttgctcttgtcacccaggctggagtacagtggtgtgatcttggctcactgtaacctctgcctcctgggttcaagcgattctcctgcctcagcctcccaagtagctgagattacaggcatgagccattgtacccagccatttccagcacatttttatcaaagaagtatgtcacacagttttagagtccaatatcaatcctttgcctcatctctcccattcccaattcctactccc

SEQ ID NO: 177281 - DNA, 602 bp, Homo sapiens
ggcagctgcccgcccacccatgtctgtctccgtcgcacactctggggccttggcctctgcagtctctgtctccttccgtcactctccctgttccccctctccccatggagggaggacggacagcagtttggtggggggacagggttggccctcgggtctgggagggcccggctctgggtgcagggctgagaggggcgcctggtccgcacgacagcctcaggccagggctcgcctcactctgcagggccgtccctctccgggcagtggcctccagccacactttcggggacccagccagcggagatgcaggccagaggctgtcgtctgagagggccctgacctctgagagggccacctgggggcagctgacccccgtggggccctgggcaaggaacaaaaggctgatgaggccatcaggccccttccctgaccctccctgtccggccctcagtgggaaacagccacagagaagagcaggcctggtagtgaccaggtcacctgctcctcccagggccagtgacctgtgcctcttctgcaccttcctgggctgggactgtggagcctctgctcgctggggggcggtctgcagagctgtgggtgtg

SEQ ID NO: 177282 - DNA, 151 bp, Homo sapiens
ctacttggtttttttaaaagtacagttgcatctagtatgcctgcctttctgcctgtctgtccttccacctcttctacctctcccacccctcagacagcaaaaccaacttctcctcagccttgtgaagaggatgaggaccttcaggatgatt

SEQ ID NO: 177283 - DNA, 211 bp, Homo sapiens
  misc_feature (6)..(6): n is a, c, g, or t
ccggtngagcggtctgctctggctggtacaatgggtttgcctttacagtgatgcatcctcttgaactttgcaagaatctagtgtggtaattgccagatgtttgcaattttagctataaaaagatggctgctttccattcctgtgtatgttggatcttttttctttctacccaagctattgtggttcactaaaataggccactgcactgatg

SEQ ID NO: 177284 - DNA, 376 bp, Homo sapiens
atgcaaggaagtgagtgttgtgggtatggagtggacacaagaagggagggaggctgcagagatggtgaggccagatcagagagggcttttatacctggtaaagagggatgttaaggggagtgggggtgaccgcaggtccccatatgctctgggtaaggccacacatacacaccccttcagcaggattgcagagcccctaattagctttgtgatttttaagagccacttccccttctggccaccacttttcttatctgtaagatacggaagttggactaatatgacatttaaacttccttccaattctaaccatctctggatctggataagccttcgctcctttttgtgtaatgaatgcagcgagtcctgttgccta

SEQ ID NO: 177285 - DNA, 530 bp, Homo sapiens
tactgatacccttgaactaagtttatagaaatatgtatgggtgaacgtgtcatatttaacaggaaagttaatagaaatatccacaacctcacagcattttttttaatttgagttggtatccaaccaaataccataaaaacacaataatgaagaccatctcatatacaaaagatgcaaaatttaatggggggaaaaaaaaaccccttcaaataaccatgcagaagccctagcaaagcagttattattcccagagcatcgccactatcccatcctccagaactatgtttattatgacttattagattttggacccatctaaaattagtatcttctaaatgatggtaaatggaatataaagaacaaagcctccagtgtggccctccatttcaaagagctctgaagacggcaaaaagggacatcagtatgtgtgcaaatacgagtcaccaaaagggtttgtaaaagcatctaaaaatcaattaattaatcctcccaaaccactgcataaagacagtcttcccacccagtgaacc

SEQ ID NO: 177286 - DNA, 672 bp, Homo sapiens
  misc_feature (27)..(27): n is a, c, g, or t
gtccatctagatggggtgttaggttangaggatgaggactccaggtgctgtggctcacgcctgtaatcccagcactttgggaggccaaggcaggtggatcaggagtttgaggtcaggagtttgagaccagcctggccaacatggtgaaaccctgtctctactaaaaatacaaaaattagctgggcgtggtggtgggtaactataatcccagctactcgggaggctgaggttgcctgaacccaggaggcggaggttgcagtgagccaagatcatgccattgcacttcagcctgggcaacaagagaggaactccgtctctaataaaaatatgaaaattagtctgatgttcctgtgctggcctccctgtctatggggatgcctttctgaacttctttgtacaccatgttaggctgtccttctctgtggatgcccttctcaccccatttgggcttcagcaccctgtgactagccactactttctgtgtggtcactgccttccttgttccaggtgggctctgacactgtgctctgggccatgtgactcccacccagagtagacgtctgttttgcctgaccccacttaatggacttggatttattgcttaggaaggggagggggagataaaaagcttgaagattactttttttttcaatttttaaaattgtaaaatac

SEQ ID NO: 177287 - DNA, 582 bp, Homo sapiens
ccctcacggttacctcaagtgttggacaactgggaaccttccagggcccgagcacctaaaattctgtttaaaaaattgtcagcctgggtgacagagcgagactccatctcaagaataaaaataaaaacaaaaataaacataaaaataaacactttatgtacacaatctcacatcactttcacagtcttggaaggcagatatttctgttatcctcattttacagctgacgcctatctaaggcttgtataaaagtcagtcactgtccaggctcacacagccaatgctggagggctgtgtggcacccagagagcacagttgctgcttggaataaaccttcacttatagtccggagcagggtggttctaaagctcccttagctttcccactagtaagcttccaggttctggtacagtttctcagcctcggcactactgacgtttggagtctgatgagtctttgttgtgagcgctgtcctgtgcattgcaggatgttaggagcatacttggcctctatccactagatgccagtagcacccccctcccaactctgcccagttgtgacagccaaaatgtctgcagacat

SEQ ID NO: 177288 - DNA, 776 bp, Homo sapiens
gtgtttgtagtgtgctggccacgggagcactctaaacacattatgggccgggcgcagtggctccggcctgtaatctcagcactttgggaggctgaggcgggcagatcacttgagcccaggagttcgacaccagcctggccaacacggcgaaaccccgtctctactaaaaatacaaaaattaaccgggtgtgatggcgcgtgcctgtattcccagctactagggaggctgaggcaggagaatctcctgaacctgggaggcagggactgcagtgagccaagattgtgccactgcactcagcctgggtgacagagcgagactccatctcaagaataaaaataaaaacaaaaataaacataaaaataaacactttatgtacacaatctcacatcactttcacagtcttggaaggcagatatttctgttatcctcattttacagctgacgcctatctaaggcttgtataaaagtcagtcactgtccaggctcacacagccaatgctggagggctgtgtggcacccagagagcacagttgctgcttggaataaaccttcacttatagtccggagcagggtggttctaaagctcccttagctttcccactagtaagcttccaggttctggtacagtttctcagcctcggcactactgacgtttggagtctgatgagtctttgttgtgagcgctgtcctgtgcattgcaggatgttaggagcatacttggcctctatccactagatgccagtagcacccccctcccaactctgcccagttgtga

SEQ ID NO: 177289 - DNA, 250 bp, Homo sapiens
gactttgtgaatgagtgtgtgtgtgtgtgtgtgtgtgtgtgcgtgtgtgtgtactcacggtagtgtgactgaccatattttatgtttacctgttgattcatttaacaaactattattaaacatcactctctaccaagtagcatcacagaagctaggaagagagagagaaatgcaacagacagccaggcaaaaacattctcgtcaacaaaggacatgtcttaatgtgaagtgtctggtaagaaggcacaga

SEQ ID NO: 177290 - DNA, 615 bp, Homo sapiens
tcactggatcaagccccttccttaccttccacctctgaatactgagtcattacaactgtatgctcaccagggctctgtttaacttcatgcctgatttgggggatgttattccttggtatcggattcagctggccctcctactcccagtggcccagggtggcatctgcttgcctgtctagtctgggactttctttgtgaagttttattatctttctttacttaaatgtcatcttttctgcattgctctcccttctttctgacaaggggcagacctgctgacaaatagggtttacagccacattcctttgttgatggagtcacaccaggtctgatagcctttgtattaaataatgaatctttgttagcttcattaaggttgggaaaaacactatagatcaaaaagataaagagatattttcagggcttcatcttcatttcctcaaagagatgatcacattagtatacagtgactcaggcactcctacttcaaagcagctcctacttcaaagctcctaagcagtcttaataataaatggtggctttgcccaccctgcagacttttcaggatgatggagctagagatcaacatattgagcagcctggaatccatcccgc

SEQ ID NO: 177291 - DNA, 418 bp, Homo sapiens
cctatgccctcactgtaaggaaatgaagctactgttgtatatcttgggaagcacttggattaattgttatacagttttgttgaagaagacccctagggtaagtagccataactgcacactaaatttaaaattgttaatgagtttctcaaaaaaaatgttaaggttgttagctggtatagtatatatcttgcctgttttccaaggacttctttgggcagtaccttgtctgtgctggcaagcaactgagacttaatgaaagagtattggagatatgaatgaattgatgctgtatactctcagagtgccaaacatataccaatggacaagaaggtgaggcagagagcagacaggcattagtgacaagcaaagatatgcagaatttcattctcagcaaatcaaaagtcctcaacctggttgg

SEQ ID NO: 177292 - DNA, 625 bp, Homo sapiens
gattcggcatgaggaaaaaaaaaaaaaggtaatccagaaaagtacaaaaaagtgaagattacccgtaatcccaccaccctgaatttatcatatgtagcattttacatatgatatatatacatgtttataattaagtacatgtttactctgtaaagctttctaaaagttaatctaatatagtaatcaaccacataaagcacatttcatattacaacacatgttgatctaagttgtgtaggtgtatgtgcaagtacttacaggaggtttatgtttaaaggttttttccccccttttcaacaactaaaatagattcacaccatacatggtgttttgttgaaggtagatagaacttaaatatttctgtagtctggagaatcaaaaaacaataaccttccgtctatattcttctcaacagcttctgtaaatagattcacttgtcttagtggctcatgatctgcactctgcgttagtcatttgaattttaaaaaatacagatagcaggctttcactccccatagagttggtttgggttgttatgttgggggcccaggcatcagtatgtattttctaaaagctccccaggtgattcttacatacacctgaagttaagaactaactaatctaa

SEQ ID NO: 177293 - DNA, 472 bp, Homo sapiens
caaggagggctggtgtgtagtttgtgatgttacccatagtgatgagaagcacaggtcactgcaaaagtgttcatggagaggaccctcctaccaaagaaatgacaagaatcttcctgcccagtccctgagtgttcataacttcctgaacttgcattcgaatgttccctacttcttgcccctagaatccattctccacacaacagccagattatgtctctccctgcttaaaacctttcttggcttccattcctattcaaataaggttcttatcatggccaataaggcactacagggcttgttttctgcctacttcttctactttttccccttccactcagtgactatggtctagctattatgaccttctctctgtcacccaaagatggcaagctcatttctctctccaacacttggcactcttcccataggaaagttttcattttttgggtctcctcctcagttaagatcggca

SEQ ID NO: 177294 - DNA, 248 bp, Homo sapiens
cgttatattaggaggtgactcagccatgaataaggtgaagaggttacacatctacctacggaatataataacatacatttctagatgaagcccacagagacccaatgctcaggaagtaaacctgtcaagaagccaacacagtatttgctcctccaaatgttcttgtttctctgtgtttcatgtcttggttactggtactatcatccacccatgtggaaccatctagaagcctaagaatcaccttcaga

SEQ ID NO: 177295 - DNA, 382 bp, Homo sapiens
ccacttaccgcaaatcaaggtaaaccgacctctgagaacacaacctctgagcagcgacatggtctttatggaagtgcaaggtcagcaatttgacaggtgtctccaagaggcggcagggttacatgcagaatgggcttcttccttggagggcagtgttggcaaacactgtggccggcacattttatcagacagagccctgggtactgcctggcccgccccctcgctgtggctgtgcctgttgagggcgcctcggccctttttctgaatggtgatgcactgaattgccaccaggtggtgccaaacggcaactaaaactcccgcactgaaattcccggaagcattgcctttgaggaaaaccctggatcagccatccaggtcctca

SEQ ID NO: 177296 - DNA, 766 bp, Homo sapiens
ttccttaagggttagcaactcagtaggaatgtaagtaaacaaatatcctgagtatttcacctacaggagtgaacatggcaggtgacaatttgtcttctgatataatattatttgttgaattagtcccggattagttctgaaagaaaaatgaaattgaccattaggaagtgcaacccagtgaaaagttgcatagtcaacttctgtgacatcttgtcagatttacatgtgtgaattctcactcatcatggctcttgctgtctcctcaagggccaaagaaactttttcccatagacgagtgtgtaaccagttggtgggcagcagtttttaggaagctgaatctcaaaggtccgtagcaggccagatctcgcatgaccacccctgtgttcttctcccgtaactgtacattcagcttcccctgcactttcccaagagcaacagaaaaaaagcaaatgccaggtgagttgtttattcatttctcatgtttccattgcataaaatgataaaagattaacatgataaaaattatcaaggaatttatagttaacagatctaaaatagggaaaagtcaacatattaattataaagatatcaagataattataatagttttagtgtgtatatattatacattgtgttgtataactgtaattattagtaacgtgcagacttatctctgatactctgtgccaaaggacagtgctttgttttgaccgtaagaataaacaaaagaggccaggtgtggtggctcatgcctgaaatcccagca

SEQ ID NO: 177297 - DNA, 445 bp, Homo sapiens
tacaccgtctgtgactagccatcttgtcccatagcgactggccgtcgtgtcaagttgtcacagtcttcactacttccttgacctgcaagtaggaaacaagaaaaagaaaaactaattaaggaagtgagcaattaaattctttttttttttggaaatggattcttgcactggttgcgccctggttagaagtgcaatgggcgtgatctacggctcacctggcaacctacggcctcccggggtccaatgtgattctcgtgcctcagcctcccaagtagctgtgattacaggtgtgtgccaccacgcctggctaattttttttatttttagtagagatggggtttcaccatgttgaccaggctggtctcaaactcctggcctcaagtgatccgctcacctcggcctcccaaagtgctggaattacaggcttgagccaccatgcccggcc

SEQ ID NO: 177298 - DNA, 135 bp, Homo sapiens
tggtacttgcagggtgagatgggggatggtacttgcagggtgaaatgggatggtacttgcagggtgagatgggatggtactcacttgagggttgagatgtgggggatggtacttgctgggtgagatgggatggta

SEQ ID NO: 177299 - DNA, 238 bp, Homo sapiens
ctcacagccaatcactggcctccattctcccctttcctctgtacagtttgctctggttcctcagagcagatttccgagtatactgcttcagccacgcccccactgtgccgttccctgaaccaagagccattcgtctcaagagccattcgtccaaagtactctatcacctagccattgtagccataccaagccgggcttcctacttccctctgctccccttggtttcctcctgtgaagt

SEQ ID NO: 177300 - DNA, 796 bp, Homo sapiens
gtgccagccaccccatcacctgtttacctggccagctctcctcacctttcagggttctgggccacacctcctccaggaagccccccttgatctcctttccttccacatcccccggagctaccctgatttcttctacagctgagcctcttttctgccctgccggaatgtgaatggcatgagggcagggaccatgtctgttgtcttctctgctgcatttccaaggcccaggcgagggcagacaccaacacatggtgcttgcaggggtctccctgactgttgttgctcccagatcatactgcttgctccaccggagcatgtgcctgatgccttcctctcccgcttgacctgaaagttcgaacctcctgataacttcagcattaacagcgtgcttgagttaagttcacactctagccactctatggaatccacaccataactcatggtgtcctatggggcaggaactgtccgatctcaaggtggtttgttttttttattgtttgcttttgagacaagatctcgctctgttgcccaggctgtagtgcagtggtgcaatcatagctcactgcagccttgagctcctgggctcaagtgatcctccatcctcagcctcccaaaatgctggtgtgagccaccttcgccagccctgtctcagagtgtgacagctgggaaaactgaagcccagtgaagcaaagtcactggtcccatgttgtccctgatccagcctcccctgaggccccaccctctctgccttgttcctggcagcgccccctctctcgtcaccccatgccagccactg

SEQ ID NO: 177301 - DNA, 525 bp, Homo sapiens
gttgctccctaagtcaactacttaataattaatggaaaggagatgtgacaggaatagccaatttccctgtcctgtttggtatgactgttggcaatttgatgattccttccttaaccttgaagcaatctcagtttgactgactcatactatggggaagatagtggcctttgaactcttgactcaatacagtcttgaccttggttagatactaccttgacctctggataaaactgtactgggcattactattttattgattgttctctcaacaaaacaaccgtatctttaaaaaatttttttatcttacatgtctgaagtagaaggtcacctcttttgtagtgaaaaaataactattttccccatggtgtgctgaatgcatgggttaaagcaggtagaccagctgtcctgggttttatccctatgtgttttttgctgattcacaaaggcatttaatttctctctaccacgctttctaggtctgcaaaatagaaaggggagttcatgaccatctatgcgttactgggg

SEQ ID NO: 177302 - DNA, 318 bp, Homo sapiens
aggtgcacaccaccatgcccagctaattttcttgtgttttttagtagagaggggttttcgccatattgcccaggttggtattgaactactggcctcaagtgatctgcccacctcggcctcccaaagtgctgggattacaggcttgagccaccatgcctggccaattttttaaaatttcaaaccccaagaagaaggttcctttccccttgaccccaactccccgcatataaacagttcataaaaactcctcagagtcagctgggtgagaatcgcgcagccatgctgtctgccgtttgtgttgggttttatagccagcat

SEQ ID NO: 177303 - DNA, 348 bp, Homo sapiens
tcttgagtatcctgatgtacggcctgctctcagaatctctcatgggctggctcatgtgaaaaaaaccaacgttgaataaagtaccagagcccacatctcaagagctgccactgtttgcctgaaagaccacctcccagggccttgatttcctcatctatacaaatgagagatgaatctgcttgacttctaaggacctgtagcttctagcattctatgaaaagaagggaggctatctggaatgttattggatgccctctatctgccagttactttgcaggggtcagcttttactagtttgccttttttttttttcagatgaggaaactcatgcctacagagtggttaaat

SEQ ID NO: 177304 - DNA, 177 bp, Homo sapiens
gtactttgttatggctgccccagcaaactaatacaagcaaactaatacagaaaactaatacaagcagtaaagccaacatctgttctgattggtaaatgcacatcctgtaagggatttaaatattttgcatatcagtcacatttaggcattatattattcaagaaattcactattcat

SEQ ID NO: 177305 - DNA, 464 bp, Homo sapiens
gtctaaatatgatgtctgtccacatgtcagattttatctggtcaccttgtgtgtgtgtgcatatgtgtgtgtacgtgtatgccatccttatttgcaaaggactccctttattctgaggtttgtctcttctcatttttggtgttaaaatgcctctcttttataaaatgattgtgatagtagatgatagttgtgggcaggtgtttggcaaaatacaagttagcaacccaatgtcgatttcgcctagcaaattgtttgaaattttgtgggtccatgaaattaacaagtactgtatacagcaaactctgccctagaataatgctccatgtgagaaattgatctcagctcttataagtaggaataacattgtctcttgtaaggaactagtatgtttccttctgttggtagtgaaagctacataatgttttcagtttcccttttcatttggctctaggcatttcggaggt

SEQ ID NO: 177306 - DNA, 464 bp, Homo sapiens
tatatccctatcaacattaaattgaattttttttttgttagctattgaggtttgggaggagggttgttgctacatagaattattacagcagaaatctgctgatacactgagtatccatctgtctaccagtgcagtatgagacatgagacataaggaaaaggctacatggttgtgctctttcccaggacacaatgctcccagttctctgatggttgtagacatttagttaaaaaaaaaaaataaagccaatacaatgagctcagtggttttttccgtatgatgtgaaacttaaaaattcagatgtggcaagaaataaacatggggttccctaaaaaatctgacgtagctgagcccagaagctcatgcctgtaatcctaacattttgggtggccaatatgggaggatcatatgaggccaggagttcaagaccagcctaggcaacatagtgagaccctgtctctaca

SEQ ID NO: 177307 - DNA, 179 bp, Homo sapiens
tgtggtgtttcactgtgcctgtaacctctctcacctagcatttggttaaccagaaacagatgtggaaactgatctatctgtagataatggccctgctcagggagggggtccctgctgagagcgagacattgaaagcctgctacacagaaactgctggaaggccaagccatttctttttt

SEQ ID NO: 177308 - DNA, 218 bp, Homo sapiens
agccccaggaaagcagaatgtgtgtcctcaatcatcagcatcaagaagagatgcaataaatgttttagtgaaggaaagatgcacattatagttcctattttgctaggtgattttaagagttactgcaaagctcatttttttaacatacagaaaatttcaacagctttttcagttggtaaagattttactgtttttattttttgtggggaggagaaaaa

SEQ ID NO: 177309 - DNA, 728 bp, Homo sapiens
ttagttgctgtcattcactttaattgcttgttgtcatttgaattccttaattaggagtagattatggaatttactagtctttttgccttgtcaacgcttagtctactgaatatgtgcaggaaaaacattttggggatttgtggaggggatgacagaaatcttcaaagtgatgaccctgtgcttgcttgaaatgatagttaggagggatggatgtgggggaagagaagctgaaatcctgattcttcaacaattttaaggaaaaaagtgatgaaaactgacattaatatgtcacagtaaagactcatataaggtgtgggaattgagcatgggatggcataattaatttgtgccaaataaacaaaatcagatcctttcttgagaataaatgttcacacagatgtgcctttatagaatatgtacttttaaaaaactccatatatgacatgttgtatgagaaggcctctcttagatcactggtgacctctagtactttggactaaaactaatgaaatattatttaggcagtttatgtatcatttctggagttcttgacttagagctaagggcgtgtgtagatactgatatccagcaagctgagccattttcaactataataacctaatgggtaaagcttctatagtagtctccttcaaacctgtcagtagcaatcactggggttatttgtttacaatgtaggtttttagacctctccccttgagattctggat

SEQ ID NO: 177310 - DNA, 523 bp, Homo sapiens
taacctggccaattatttttttattcttctattttatttattatttatttatttttaattacttagttggttatttagttattggactgactgtagagatgggaggatctcactatgttgaccaggctggtcttgaacgcctgacctcaagagatcctaccacctcggcctctgaaattgttgggttataggcatgagccacttcgcccagtcaaaactattttttaaataactaatgcctctatgtactaagaactttcatgaccactaccttatttgatatttcaatattttatctttatattggtatcatatttaagatattcatctgatttgatagcccccattattctagtccataaagaaatagaaaaaagatcagtggttgctaggggttagggagagaatgtggcagtaaagggatagcacaaggagttttctagagtgacagagctgttctgtatcttgactacagttgggggttacacaactacacacatattaacatttactgatgtatgcc

SEQ ID NO: 177311 - DNA, 648 bp, Homo sapiens
aaatggtgagacgtgttatctcgagctgttggcttttcctgtcatagatacagggtcacaaagacagaaaatgaaactgttagaaaatatctacaggcatcttcttttcccgtgtaaatattaggaagacagaatgaagatgctcctccgctctcatccacacccatggtcatatctctgaagaggggaataccagggagtgatcacattgtcagatgcagaaattaaaaaagcttttttccccagccaaactttatgcttgtggagcaacttggggaggagacccgctggtatgcatttgggcagattgtcacctgttggccacctctgtgatcgagacctttgccttagaggagttcctatgtagaccctgtctggtgggccgacagaccgacagtggacggaggcattctgtatgcgttagcctctgcaaacaaacacctgtctcatgccggaaatctgggcgccccattaaccctgagcacgggcctgccagctgacagaaccctagccaggtgttggtttggggttcagttgcatgctcaggtgttccccttccttcccccgttagcttgtccccacctaagcctgcaacccttgccactgggatgctaacccgttagcagagctcagtctccttgcttggaa

SEQ ID NO: 177312 - DNA, 415 bp, Homo sapiens
ttccaagactaattagtaatactaagtaacagagacagtgttggtatggtacaaaaataaacaaatatatcaagtggaacagaacagagagcccagaaatattcacccatatatggccaaccaatacagggcaattcaacggggaaaaaaatagattttcagcagatggtgcagggaaaggtagatatcaatatgtcaaaaggaacctaaatccatacccaacactctataaaaaattaactcaaaaagaattatagacctaaacgtaaaacctgaaactgtaagacttacagaatatatgagacaatttgtgacattgggtgaggcaaagatttcttacatgcactatgaaaagcacagtccataagagaaaattttgggcagggcacagtggctcatgcctgtaatcccagca

SEQ ID NO: 177313 - DNA, 466 bp, Homo sapiens
agccagtgcagtcatctgggcaagagagaatggagctggagtgtggactagggtgagagtgaagaaaaagagatctaagaaggctgcagagaaatgtaggagcaaaatcaataggacttggtgatgagttggatgtgaaggggcgatgaagcagcttcaaggatgatgccactgttcagccttggataaatggatggatggtgcagggattcacagatatggagaacactggaagaggagataagattgatcttgagctccatcttagacaagttgaatttgaggcacctttgagacttggttaggattttgcgatgattagttttagatgtcaacctgactaggttaagggatactcaggtagctgggggaacattacttctgggtatgtctatgagggtgttcccagaagatattggcatttaagtcaatggactgagtaaggaagatctgtcctcatctaata

SEQ ID NO: 177314 - DNA, 318 bp, Homo sapiens
tccatctagcagaaccgtgtagggatgcgtcacgggtcaaggcttgctgttaataggagacacattccgtttgtctccctctgtgtaacaatcatcaaaagcaacagttactgcaccgctgctgctctgccaccattccatttttatgatagtcttgtaaagtgggtggcactgaccccatcttattgatgaggaagctgaggctgggtgagattaaatgacttgcccgaggctgctctgctggcaggagcagggtgaggctggcctgtgtcaggctcttctgcatgtggagtgactcccatcgtgtggatgcttgtc

SEQ ID NO: 177315 - DNA, 397 bp, Homo sapiens
agtgtgtcaggcaatctggactttccagtgatagcactgagatggtgctccttaaaagagcagtggttccatttgtaggttgtggatctttggataaattctgccattttcattttacttcctgaaagccagggttggctcatgaaaaggtgttgaacaacatgctaaatgtgaaatgttaaccctcactctaaactttctctgttcagagcatcagatgaagacttaattgagttttatagtggctttctgattttgggtagtcaactgaagaagggagtttgaaagttgttgtgtactgttaatgattgtctgcccaagttctgcttgaaataccatgattgtttatggaaagtacctttactaaagctggataaagtttgaaataacaaaaaaa

SEQ ID NO: 177316 - DNA, 299 bp, Homo sapiens
gtaaaacgagccggtaccggcagtgctgtaggccagcggagacaatccaaagctgatgcagctgctcaaggatttcatccaggaaccagtatcctcctttcttcctagcttaaggtttttgtcttcatggtcagaagatggctgttgtatctctgaacactgcatcagaattttagtaaggaagaaaagggaaggataaaaggaaatgtctttttacaaggttttgcatttttgttctcatagatggtggccccttagaaactgatgtctatatttcgctggcctacagcacatgtcat

SEQ ID NO: 177317 - DNA, 432 bp, Homo sapiens
tttggaaatactgaaagaatgggtgtggggtatgtgcctgtagtgccaaccactaaggaggcggagtcagggggatcgcctgagcccagaagttggaggccacattgagctatgataatgcccggcactcctgcatgggtgacagattgagaccctgtctctttaaaaaaaaaagaaaggtaaataaagaaagctagaatgaatggaatactgaaagttgaccaaagagcagtacaagatgagactagagagttgggcaaggaacaatacagcgttacactaaggatttggggttttatgctaataatgaaacaagttttaaacatggtgtgatatgtttaagtttgtctttttaaattatctggaataacctagaggagatgtgttaagtactaatttcttattaaatacattattatttgtgttatgtaa

SEQ ID NO: 177318 - DNA, 308 bp, Homo sapiens
tgggaagatgaacattaaggcaaaacaaccaattgctcctgtgctttctctaatggaagctgcctcacccacctatgagctttctggcttggccatcgctgcagttttaggagagggctgctgttcttggccagggcactgtacttgtcttcctgaattgagagcccattaattgttttcctctcctttagggactgatgctttttaaccacctctgtgatggttgcacacagtcatcacagacggttgggaatggtgggctggtattttctgccagctttaattaaggtcctaccagggtttgcttc

SEQ ID NO: 177319 - DNA, 747 bp, Homo sapiens
gaaaagtctgacatgattgggcccagcagttgcttggttaattgagaaaactggttaaaacaggaatcacgaagaaatggatgtatgtttttaacttaaaacatgaaagtatacattcacttgccaattttttttttacaccacttacctcaagttctatacttgccaatcttttgatgtaagcccagggccttttctttaggctgtgtctgttttggcctaatcttagcagacttaacattttccaatatcagtttatttaaagttaaacaaggatataggcatttaagaaccaatttgatacgattatctttagaattttcttaatcttttacaatttttcccccatacctaattatttttttaacaaactcaagtgagccttttaaaaacatacaacttagcttatagagaaacaactgtttccttttgcattcatatttcattgatgagcttaaaagtacataactaccataacaggttcgggtagcaaaaatagatttgagaacaaacacatctggatatgagaacacatacaacttagctggcaaaagcttgcgatgtattagagtgaagcctacttgctgaaagtcgtcatcataccttgggcatcagctcgtgtatttcagggagggattggagagagtcatttttccaattcaagtcagttaaagtgagactgataagcgagcttctactctatgtgtgtaaactgaagtttaaacagacagatttgggttaaagata

SEQ ID NO: 177320 - DNA, 728 bp, Homo sapiens
tgtgggccttgcttgtgggacctggtgtcagctgatgacgtggccctgtctgggtgcccgtgagtcagatggcagggatggcctgacatcatgaacactagctccacctacgtcacattggacttgactctttacagagcacctaggaagagatattgatgagtgaaccattgcccagtcatcgagttaattatttccccccagaaaggttaacatactgaggacagagagggcatgtgtaggcggcagggcgcacttttcatttagtctggttcgcaggtgcggtcaagacgattccttattgtcttggagccagcccttttaagccttcctgcacagctctgtgacagtctcgcggggagacctgtgaggccactttccttttttccagacccacccccacctttgagattatcactcttcctgctttgtcttctgaggctttttggctttttagtttatttgtaattagagcagaaaaggtacagtaatcggatagaagggttgggagtgatagaatgagccaggatgcggtggagaaatggggtggagaacccccagaccttagggtggcgtgtttgtcagggagtagaccagggtgcagttctaggcagaccactagatggcactcacacattggtgttcagtcgggtccacggcactttccactttgggcttctgtaaaatctccccatgaactagccaaagctttgtatctgtcatcccgc

SEQ ID NO: 177321 - DNA, 253 bp, Homo sapiens
gactagaactctaagtggcatgtcgaggggctgctctcagaagaaaacagcttctttggtctgtgcattccttttgggaccaggtaaatattgtttaagatgagtttgggaatttccaggttgcctgagacactgtctgagaaccttcttagtacttggttctgacagcaagtgctgaagcggaaaaaatatttccatccatctgcactaatctcttgtttctctagcagttagaaagtggggaggggaaatg

SEQ ID NO: 177322 - DNA, 314 bp, Homo sapiens
cgctctgagccgattctgtccctgggaggtgggaacagtggtcaatgccccttaacaaagtcccagagaacctcttcaggctggagtatattgcagtgcttggatgctctagcccctcctagggatgggatgaaaatgccaagtgtccctgtccacagcttcatgtcttaaaaatgtagattcttcaaagagttttggaggatgcgccacctgccaagtctccaggggaaacagtactgtcatccttcccagcaggtcacccccagtgtgtggatggtgtgggtgtccaggctgtattcccaggccctatctca

SEQ ID NO: 177323 - DNA, 476 bp, Homo sapiens
tgtaaactcatttcagacgtttgaaacaatacccaatcactgcatccaccctcgaggagcgccccagaggaaatggcatcattactttcattttactccgtttgtgaacgactaaaggaaaacaacacgtcctaggactctcgggaacgttattaagtgacccctaagaaattaatcatcaagagctaaaataaccctctgctgcacatacaccgccgtttctctaagtggagaaacaaatttcactttccacagttggaacagaaactcttatgcatccccgtttcttcaaaaaaaagtctataaataacctaggatcagcaaaattatgcaaaacatcctgctagaagaagaaatgtaaactaaaaccacttacagagagactcaggctgccaacttaatctgatgctacgacgactgtaaacatgttgtacttttggaacctgaagcgatccacattagcacggatgtcagta

SEQ ID NO: 177324 - DNA, 691 bp, Homo sapiens
agtggtggttcaggcctgtaatcccagcactttgggaggttgaggctggtggatcgcttgagcctaggagttcaagaccagcctgggcaacatggcaaaaccctgtctctactcaaaataaaaaaattagccaggtatggtggtgcacacctgtagtcaggaggctgaggtggaaggatcacttgagcccaggaggcagaggttgcagtgagccaagattgcaccactgcaccctggcctgggcgacaaagaccttgtctcaaaaagaaaaaacaaaaagaaagaaatgatgttaatgactatcacttaacttagtgcctactgtttgcaaagcactatgttaaaccttcaaatttttgtatcttttcctcatggagaccttcaaattaggtggtatcatccttattgacagaagaagaaattaaagttcactatgcattctctacgacgcagaaattccattcttaggtacatacccaacagaaatgaagtcagaagtgcactaaaaatgtccgaaaatgttcataacagcattgtttgtaatagtcccagactggaaacaacccaaatgtccattaacagtgaaatgaataaataaactgtggtatattcacatagtaaaatgctgcatagcaatgaaggtttaaaaatgctacagatggtgtggtggctcacgcttgtaatcccagca

SEQ ID NO: 177325 - DNA, 645 bp, Homo sapiens
catacagaatacttcaaatccccaccccagacagtcactgatctgactatcatctctttggttgtgctttattccagaatgttatatgaatggagtcatataatgtatagcatcttcatactgccaccctttacttagcaacatagatgcaagattcattcatttgttttcatggattgacagttcattcctttctgttggtgaatggtattccattgcatggttgtacttcaaattgattatgcattcagctattgaagaacgttctgattacttcaagttttggccattatgagtagagtggctcgtatataattacatgctagttttggtttgaacataatttttcaaagcagctgtctaaacatacacaatttaggggtgcattggttggattgtaaggtaagacttgtttatctttgggaaaaactgtcaaactatttcccaaagtggctgtacccattcatgcattctgccagtaatgaatggccgtacctattgttcttcaacctccaatttttactgttgagcttttttaagagtcccacagttgtactaggtgtgcagtgatatctcagcattattttaatttgcagtctcctaatgagatatatcgagcatcctttgagtgtgattatgtgctat

SEQ ID NO: 177326 - DNA, 109 bp, Homo sapiens
gttgtctggagaatgcctaattaaaacagaaaattatttgtattcattacacttgaaatatcatctctataaggaacttttagttatttccttataacttttgttttga

SEQ ID NO: 177327 - DNA, 490 bp, Homo sapiens
atgttgtatgtatacatgaatagtgtctgttaaacactggagataataaaacaataatttttctgttaactataaaaatctgaacatttttgtgattatatttcacaaatgacacaccattttatttgcagatttttcttatctccaaagtttttgttaatttattaccaacacagcacacaattctagtggcaatgcattacctctgcagttgattttgaagtaagaaggcctatttattgcattcattcctgcttagatggcatcttaaattcgttaattggattattatgctctattctatacatttattgatttatagattttgtggacagaaatttcaaaacatattagaaaatttagtgatagctttttagaatctattcttcaacatagttattgaaagtgaacaaggaggacctcctctagagattaggttgagaaccacttgtttgatttgttaaatatgtatacatggataccatgtggc

SEQ ID NO: 177328 - DNA, 185 bp, Homo sapiens
ccacccccagtatggcatatatctctgccgtgctatcatctttattctttcctttttcattgtctcttcctgactgtcctcctttgttcattatgtctgacacatattgtggattgaaagtagaacagaaagatatactttctctaccagactaaaaagttttgagatggccctccatttctccc

SEQ ID NO: 177329 - DNA, 503 bp, Homo sapiens
caggttggtctcaagctactgacctcaaacaatcctcctgcctcaggctcagaagcagctaagactacaggcacaagccattgtgtccaactctccagtcaaattctatagccttagcttttaattactatgtaggctgggcgtggtggctcatgcctataatcccagcactttgggaggccgaggcaggcagatcacctgaggttaagagttcaagaccagcctgaccaacatggtgaagccctatctctactaaaaatacaaaaattagccaggcatgggggtgtgcacgtgtaatcccagctactcaggagtctgagacaggagaatcacttgaacccaggaggcagaggttgcagtgagctgagattgcgccactgccctccagcctgggtgacagtgagactctgactcaaaaaaaagtaagtaaataaaaagaatttgatcagaaacttgaatgtaacaaatagagtatagtaaatatagagtaggtgtggatttta

SEQ ID NO: 177330 - DNA, 379 bp, Homo sapiens
catctacacgtatatgaaaaagttaatttctgtcattgggattattgtgagaattaaataacaaagagcagcaaaaaataagcatcagattttgaggctaaatcccagttaggttgtgcctgttgaaatctgagttcctttcacctttgtatttgtaagctttcctttttctctgaactcttccttggcatccttccctacctttcctttcttccccccacatgccccgcctttttggataggtctcacagaagataaacagggtgaaaagtttcatgccgtagctcttctctcacagccaaccaaatgctttaaatccctcctctccctccatttgtcagtcaacatgtacttagtaagggctcacaggacatcgaat

SEQ ID NO: 177331 - DNA, 846 bp, Homo sapiens
ttcctttccacagtgttctttcgtccgagaccgaaaagcgcaaatgacctttggacagggaagggaggcagtaaacactcagacttccttaccagcccctggtgggcactgcagcagaacaattgtctgccccccaggttcaagcacctaggcctccgccccgcatcacctggccaggggcggacccgggagtcctccgaaggctccactccccacttttactactcttctttcctctccattctcccctcagattagcggccggacactgtccctgcctcgattttgtttgctgtgggagggaaaaaaaaagtttgctgctcctcccaagacactggccactttctactcactgaagttcccaccgcagcgctggctcccggctccctagctcccgccccctgtctgcaggaaagccctcccccggagcttccgaaactgctggaggttccagagttttgtagctccgaatgggcgacctgagccgaaccgctctctggctgggtggtcggcgggatccttcaggctcctttcgggtccgggacggggcggcggcagaggtggggcgtgcgtgcttggggctgccgagtgagtgcggctccctggtgcgcgcccgagcatctccccgccctctcctgggaccagcagtctgcccgtggagggctaggagcccgcgaccaggcctgccccggccgtcgccaacctgtccttggaagcgtggcggagactggtgcgctctcagcctcgtcgcgccagccgcctcgcgccaccctccactttcagcttcagagcagaggattccgccgacctccacctgtacctgtactcggccgttaggaaatccac

SEQ ID NO: 177332 - DNA, 254 bp, Homo sapiens
gctcagacttttgttttgtctcagcctgtgcttccttggattcttctcagccctttgctttctgactccacccctttcctttcctttaatctcctaccattagcttctttctctgatttccattctcccggctaggtttccctctctgtctgattctaacaggctttacttctccccttctttccgccatcctttccccctgtttccttctcccttagcctccgcctgagtactcagcatagcgatggggtaga

SEQ ID NO: 177333 - DNA, 1642 bp, Homo sapiens
  misc_feature (2)..(2): n is a, c, g, or t
  misc_feature (7)..(7): n is a, c, g, or t
  misc_feature (969)..(969): n is a, c, g, or t
gncacanggggagttggaaaaagcacatttttttcctccacatttaaaaatgactagaaggtgagagagaaagagagaaagctcacctgcagccggtgaagtcacgcttttgcattccgtttgtaggacaagttgtcagtgtgcgatgatttccataggctttgaaatggggtagcagtttaaacatatcaaatgcttaatgaagtgaggccccatctcatcggtattcagtgtggcactaacattacatacgctaatcctgaaacaataagctataaggagagcctcgctttctgggtttgaaatgaatggagcagtctgaattcttccagttttatctcctgctttaacctggaatgatgccagcatgttgggttttaccctggagaattcatatcatgtgaaaaacttaaatcaggtctgtctgctggtacacgcagtcctaatccgttaaatatttctagctaacaatgcacgtggggctcttcagctctgcatacagtcatgttctgctaagtccatgcaaatataaccacttctgcctgcttttttgagggagggatcagtaatgcctacatggttttacccaaatccctcatgcgacatacaaggctcttggcatatcttaaccctggtggtagctccctatccattctctaggacctggctctcttactgtgagcttgggaaggtttcaaatgagagattgcttctctttcattggtcatttaaaaggaaccacaactcttgactttatcaagttatagaaacttgagcccagagtcccggctgtagaatgtctaaagagaatgccactgaaccccatcattccctacgcccttctgcattcagaaaaattaaaaacattaggacttgtgtgaaccatgtatggggcatttttcttcagagtcaagcactgctgtctgaaaaagaacacttctttccagaaaactctgttttttcagaacnacctctttcattctgctgcctcattcccagaggagtgattttgtatttcccctcatccaaacacggagatgactttttcaggattgtaaaaaggaatgtgtgatcaatcttttatttaatacatatttatgaggtgcctctgtgtgtgaagttaagtgctgggtaaaagggcagtgtagcatcacagtcgcaagcatggattcgagagtccaactgcccgggttgataactgtgtgaggttgtgctgggtacacagtctttctgtgctgtggtttccccttcaggaaaatggggctgttgaccatactgacctcataacgaagtccttggggtctgacacctagcaggtactaagcaagtgttagctgccactgctgccatttctgctcctgctgctctgctgttgatctcattactgttaccttcatctttactattattaggtgctgggaacaaagttgtccaccaaaacaaagcgaaactatacccaccatggttcctgtccttatggagcaccaagtttcctgagggaggcatacactgaataaaagactatagaccaggtatagtggctcatgcttgtaatcccaacgcttttggaagctaagcaggaggatggcttgaggcagctgttcaagaccagcctgggcaacagagcaagtccccatgtctt

SEQ ID NO: 177334 - DNA, 302 bp, Homo sapiens
agccaccatacccagctggcccataacactcttaaagcatctcctacattgttctagtatttaggctgaaagttagggactttgactatgtgtggaaccacttgaattcatgtcagttcctggactgtactgtcacttgttatgacattattgttacctttagtttttatttttacaaccttatcaggtaggtatttaatgtttacattgaagaagtaaagatcctgaataacttctcaaggttatagtcacacagctagtaagaagcaaagtggcattgttaatacctcccaccattaaaa

SEQ ID NO: 177335 - DNA, 369 bp, Homo sapiens
ctacacaggcagggtcagtacccattagcatcaccagtctttttgttctctgagtacatcttagtaacttcactggaatgcccttgccccagatttctacaaggttagttctctgtcatcagttctcaactaaaatgttacctcctaaaaaaatacttccttgactatccaagctatacaaacacccaagtttaatcctctacatatcagttagcactacctgaaaattttatcatttatttacctgttgtattgtctccctgacctcctgaaccaaaatataagtttcatatgaacaggatccttgtctgccttgttcagcagaccagcacatagaatagtgcttgacgtccctattagaactggctt

SEQ ID NO: 177336 - DNA, 608 bp, Homo sapiens
ggaagattaataatagagcaaggaaggggtagatcaggacttcaattgtggacatgctgagttattcatttcagagaagagaggaaggtaagtggatatatgtgtctagaactcaaagggagaggtctgggctggagaaaaacatttggtagtcttcaacatatagaaggtctttcaaactgtaagcaggatgagatcacttcagggagtgagtacagagaggcacgagtaaaggaccaaggattgagccctggagaactccagcattaagtgttcagagagaagaggaggagccagcacaggaaactgagaaggcacaaccagtgaggtagaggaaaatccaggagtgtgtggtgctctagaagtcaagtgaagatagtatgtatatcaaaggagacggagtgatccacctgtgtcatttgttgttcatgggtacaagtaaggtgaaaactgagaattcatggttggatttagcaacatgatgttcatcaactttgaaaagagcactttctttagagctgtgaggccaaaaacctaactgggttgttttaagagaggaaaggagggagaggaattagcaacagtgagtatagtattgacaactcttt

SEQ ID NO: 177337 - DNA, 443 bp, Homo sapiens
aaagtgctgggattacaggcgtgagccaacgcgcctgggcacttctgtatatctttttcaagaaaacatgatttcctggtgggatgatagttttaaatatctggcaatctctaacaattcattggaatcacagggtagcagtgggcagaatgatcctgatgtcatgtaagaaacaggattttagtggagcactgattatactggtattaagtatcatttattacaataggaatgagtcacttttgtgttcctcaagatggacagattccttgagtggaattaaatagtttctgcaaagcaggctcagatgtctctgaagaaagcaaacaaccgtggtagccagaatagacccaatattagtcctgatttattggccttgtaatggcctcagcagaagcagtttgttggcacgaagtctaagcacaattgttgcaagactgaag

SEQ ID NO: 177338 - DNA, 108 bp, Homo sapiens
atcctgtctttatgtttcctatgcagagtaccattgggctgctttcctggagtatgtcttcccttatactcacctgcttgccagctacctaggcctgccacaacaaag

SEQ ID NO: 177339 - DNA, 351 bp, Homo sapiens
gggaaagaaccctgtgactttccacatctcagcgagctcggcgggctctgcttaagaagggctctaagacgggaagggaggagccatccccactgcgacctttcccctcctttcctggctggctggctgtggtctgtcgggaatgagggggtggggaagccgggaaagcagaaggttggggctggaggtctgctggcaggcaggcagacatttggagccaactttcctgctcagcccgcagaacttttggtccttcgctataccagagtttcgtctgtttttttgcttgactgtgtgacccttctctcacactgttattaaataggtctcaagctgcgaaatcactgccag

SEQ ID NO: 177340 - DNA, 347 bp, Homo sapiens
atcgcttgaacccagaaggcgaatgttgcagtgagctgagattgcaccactgtaccccaatctgggtgaaagagcaagactccacctcaaaaaaaaaatttgttagagatgaggtcttgctatgttgtgcaggctgggcttgaactcctggcctcaagcaatccatttcacttggcttcccaaagtgttgggattataggcgtgagccaccaagcctggccaaagacatggatttctgtgtccttaaaggaagaaagctccgctcagtgctttgcttgtgttcatgattcaatatttatttatttgtggaatgattgcaccaagttctgcctaacatacacagcatt

SEQ ID NO: 177341 - DNA, 601 bp, Homo sapiens
cacggtggttcacgcttgtaatcccagcacttttggaggccgaggcgggcagatcacaaggtcagcagattgagactgaaatggtgaattttatgttatatatactttaccaccaaaaaaaccaggaatatttaggacattggaggggacaaaagttttaaaataggacacaaaaagtaatatccataaaagaaaacattgataattctgattttattaaaaccaagaacttctgtttcatcgaaaaaatcattaaaacagggaacaagcaagccacagagtggaagaagttattcacaatacatgtatgtggattcacatacacaatccaacaaatgatttaatatgcacagtatataaagaactcctatgaataaagagtatgactctattatgaaattcaagaataagcaaaattaattcatactgttagaaattaggatagggattatcctgggagatgggaagatggttctgtaagagaacacaagaaagggcttcttgtagtactggcaattttcttttttcatgatctgaagactagatatacagatgccccagtgtgtgaaaatccaccaactgctatatttatgacacatac

SEQ ID NO: 177342 - DNA, 340 bp, Homo sapiens
attgaaactcttagcatttgtgaactggaaaatttggtggtgacagaactgtgtttctgtattagataagagatgttctaatagaatcctgctgctccttttgatggaataccgttctgaaattgcatccaaggatgaaaaagttggtaccgtggcaccctgtcaagtagctcctgttgctgtgaggtgtgattaaaagacacataagccagcagaaaatgtgacacaaagggcatctatataaaaaattaacagactacgtgatatcatttaggccagatttagaatcacaataaagaccttgttttagtctgttttgtgctactatcacagaatacca

SEQ ID NO: 177343 - DNA, 462 bp, Homo sapiens
ccaaataccacatcttgtctttgctatattttatttgtcttcgacagtggtagatttccttacaaattggaaaaaaaaggacagaaagaaaatgttagcaggtttaccacaaaatgacaataacatatactgttatttaagtttttactttctaggcctaaagaaaatgctgccataagaaatagaaacattactaagaatttagagattattttcccctacacaaagttgtatttttccaaagtctcactatgttaaaagattactacgggagaaatagaaactatacaatggctggtttgtgtcaacacttgcaacatttctatccaaagaaatcctaaaagatttaaatgaaagtatctttaaaacatttagctgattaaaagaacaaaagaaaaagtacaagaaaacgttcattattaatgaggagaaaaatggcaaaatggacaagtgttttcatgt

SEQ ID NO: 177344 - DNA, 406 bp, Homo sapiens
gcccgcctcaccctcccaaagtgctaggattacaagtgtgagccaccaagcccggcctgattagtttcttaacttcttcgagccccagtgtcctttaagtagcatagggatggtaatatctttctcataatagtattgtgatgataaaatgagttgttgcatgtcaatcactggcatagagtaagcacttaataaatggtggttgccatggtaatgataataatgataataccaatgacaactacaataatgataatggagaaaagtagctcaaggggctcttctaattcttttatggtaaactagagcatttctctagcaaatattacttgaaataaatgtgccttgtctggattttggaaatctgttattatagggagattttcagttagaaatttatccaggg

SEQ ID NO: 177345 - DNA, 257 bp, Homo sapiens
cttgacatggcgcagctggccaggccggtgccagccagagcctgccctcgtgggcccctgaactgtgcatgtggcgtgtgtgcgtggacacgcctgcgggggtgacaggctcctgtggtgatgactggtaccctccacagtgcctgcctgctccctgtgaggccaggcctggcaccagcagtgtgtaaaaccacggtgccgcccatctgccaggcccgtgctgactgtcatggcctcccacccagcgggacagtttt

SEQ ID NO: 177346 - DNA, 261 bp, Homo sapiens
aaaatatttcagctataatttgaatgcgcacctatactgagcatttacatgccctgtttcatttaatcctcaagaaagccctgtaaggttggcattgttatccccacattacagatgaggaactaaggtttaaaaggtgaagtaacttgagctcagaaagattaagcagctcgccctaggggaatcataagctagcatggataaagcccatatatattagaaccctgatcagaccagcttcagactctgctcctaaccact

SEQ ID NO: 177347 - DNA, 253 bp, Homo sapiens
gactgtggaagctgaagaaatacccatgggtgcgggggccattagacaagaacgaaccaagtgcacctttatctcacacaaacttgacaacttgttcttggccaaattaaagggaaaatatgtagcagtttaaggagtgccattccatcacaccaagcctctgccctcgagctaggggaagtgccacttccccatttgcccactatctgcgcccctctttgtctccacccctttctgccctctctgtgctcag

SEQ ID NO: 177348 - DNA, 225 bp, Homo sapiens
gagggtgttctggccattcagcatgtttccaagctagaggtgaacaattgtcatttccggtaacttcccctctacagggtttctaggtattatgcttcttgttcttcttcttctttttttttttaaaaaagagacaggatcttgctctgtcacccaggctggagtgcagtggtgcgatcatagctcactacagcctccaactcctgggctcaagtgatcctcctg

SEQ ID NO: 177349 - DNA, 517 bp, Homo sapiens
ctactcctcccattcctatctcccaccctcatctcagtgacacgtctacccatccagttgcttcagccagaaacctgggagtcattcttgacactttcctcagattcctcaacccccacactcaatctataattaaatgaattctttctttaacatacttctcaaatccatccacttctctccatctcttctgccactaagtcccacctgcagagattcttacttaagtggtatgggtgcagcccaggcaccaggagtagaaaaagttccccaggtgattctaacaaacagctaagagtgagaaccactgctctacaacatttggacttccaccaacctctctgacctcatttctactactttctctcttgttcacttaactccagtcatgctggcctccttgctggttccttgagtatggcaggcacatacatacctcatggtttttgctatttcttttgtctagagtgctagttctctcctgcatcttctacagatatttactcaagcattacct

SEQ ID NO: 177350 - DNA, 340 bp, Homo sapiens
ctactcctcccattcctatctcccaccctcatctcagtgacacgtctacccatccagttgcttcagccagaaacctgggagtcattcttgacactttcctcagattcctcaacccccacactcaatctataattaaatgaattctttctttaacatacttctcaaatccatccacttctctccatctcttctgccactaagtcccacctgcagagattcttacttaagtggtatgggtgcagcccaggcaccaggagtagaaaaagttccccaggtgattctaacaaacagctaagagtgagaaccactgctctgtgtagcggataccatgttactcaag

SEQ ID NO: 177351 - DNA, 321 bp, Homo sapiens
agggcccagggctggctcaatcagtgctgtgtccccagcatagcccagccctgggctgagttcagagtaagaacccaaacagctgtaaagcagtgaacccagccaggctcagggaccgggctgcctcctgccctgagccccccgactgagctccagaacgtgctgcagtcaatggctcctggtggcctcaccaggtccaaagaggaccaacagcaaaagggcctgagagcagacttggggaaatctcccagacatgaagcgggggccttcgagggccctccttgagaagtgagttaagagcagatcccatccctccacccc

SEQ ID NO: 177352 - DNA, 750 bp, Homo sapiens
gttattttatctttatggctgtcaaaaacgttaattcagtgctgagggaaccaatactgctttaatttttttcttcctggtggaaaagaaaagctgatttgctttcagtgatctaattcagtaagagttctttaatacagcaaagacatctggcatgaatgtaagcagaacatttggaggacttctttttcatagccaatcacttggtattagaaatggaccattatactggataagaaggttttagaatggttgaaactatcatttagttttacaaattaaatgtagtattttttgtaaacattaaacttattaaactaaaaagtaatatattagacacgatgttcctctaaagtttgtttcctatgagtgtagttttgcagatggctttccttgtctctgaaactttccttatgcattaagaaagtttgctaacatattcacattcatatgtttaaaaggtatattatgataaaaaaaatcaatgtggaattgtgaaaacccttagtacaaataaaagcactcaaaagagcttgattgcagaattaataacgtgatagttctaggaaaagagctgcaatggtaaattaaattcactgtcaatagatgaaaatgaaatagcttttttgcattatacatgaggtggtatcagatgtgcagggatgttacagaaaattggtgtttatcaaggatattccaaatagtaaattaaatgccttttcatttgaatatagtttattttcagtgggt

SEQ ID NO: 177353 - DNA, 545 bp, Homo sapiens
ggtcggtacctgacttacttaacccaggtgtgtgcttacttaaccagtgtggaaacagacaatgagcacacacgaattatcgcgtgtgtgataataagtgtaccttcgtgtataagtatgtaaggtgatggtaagtggagataaagaaaaaattaagcaaggttgagccaggtgtggtggcaggcacctgtaatcccagctacttgggaggctgagacaggagaattgcttgaacctgggaggcggaggttacattgagctgagatcacaccattgcactccagcctgggtgacaagagtgaaactgtctcaaaaaacaaaacaaaaactgctgaatgaatggaatctcccagagagcttaagagtatgatggacaggccaaaatagacaggaaattgaataggaataacagcatttgacaaattagcagttttcctttttccgccttccaaaaaaccctttcctcactcttaaataatgtaacttcagtatgagtattcctgtagcactggattcagtgtgtgcacaattaaacttcagcagcc

SEQ ID NO: 177354 - DNA, 196 bp, Homo sapiens
tgcaacccttatgtcacctgcacaatacacatattaatacgagctaaaccagggtccaccattctttcagcttttcccttatttcattcattactttctccttctaatcctcctaagtgaccaagctaaaagatttcataattttattaatatataaagcagacaagtacaatattctttaaaaagttttaactta

SEQ ID NO: 177355 - DNA, 482 bp, Homo sapiens
gaagatctgaaatagattttcaggtttactttggaaagccttttgccaagggctggtgggggagggtggtccatcagtcagttgcggggcttagaattttatttttggtttataccagggataagggaatgggcagttctgacctttcatccttacgttgtgtgtccaaagaggaaataaagccccttttttcagcgtgatttgcagaaatccaggtaggtcctccagttggtgcagcgtgggtcctgcacacatccagaccatcgccatctccagggggcagctatagcagctgacccaagtcacagtgatgtggccagtctcagggccatgacaggttaaggaggctgagccccccagcttcagtgagtgagtgtatcccacaaaaggggatgccattgtaggctgaacaaaacaaatgccccgcacagcaccccatccctcccactgtaattctgaaggacatgaccaccctcctctga

SEQ ID NO: 177356 - DNA, 888 bp, Homo sapiens
aggagctctctcccaccgcccaagatgccgaaaggaaagaaggccaagggaaagaaggtggctccggccccagctgtcgtgaagaagcaggaggctaagaaagtggtgaatcccctgtttgagaaaaggcctaagaattttggcattggacaggacatccagcccaaaagagacctcacccgctttgtgaaatggccccgctatatcaggttgcagcggcagagagccatcctctataagcggctgaaagtgcctcctgcgattaaccagttcacccaggccctggaccgccaaacagctactcagctgcttaagctggcccacaagtacagaccagagacaaagcaagagaagaagcagagactgttggcccgggccgagaagaaggctgctggcaaaggggacgtcccaacgaagagaccacctgtccttcgagcaggagttaacaccgtcaccaccttggtggagaacaagaaagctcagctggtggtgattgcacacgacgtggatcccatcgagctggttgtcttcttgcctgccctgtgtcgtaaaatgggggtcccttactgcattatcaagggaaaggcaagactgggacgtctagtccacaggaagacctgcaccactgtcgccttcacacaggtgaactcggaagacaaaggcgctttggctaagctggtggaagctatcaggaccaattacaatgacagatacgatgagatccgcgtcactggggtggcaatgtcctgggtcctaagtctgtggctcgtatcgccaagctcgaaaaggcaaaggctaaagaacttgccactaaactgggttaaatgtacactgttgagttttctgtacattaaatattgacatattcaaattttccttcaaaaaaaa

SEQ ID NO: 177357 - DNA, 992 bp, Homo sapiens
  misc_feature (902)..(902): n is a, c, g, or t
  misc_feature (992)..(992): n is a, c, g, or t
aggagctctctcccaccgcccaagatgccgaaaggaaagaaggccaagggaaagaaggtggctccggccccagctgtcgtgaagaagcaggaggctaagaaagtggtgaatcccctgtttgagaaaaggcctaagaattttggcattggacaggacatccagcccaaaagagacctcacccgctttgtgaaatggccccgctatatcaggttgcagcggcagagagccatcctctataagcggctgaaagtgcctcctgcgattaaccagttcacccaggccctggaccgccaaacagctactcagctgcttaagctggcccacaagtacagaccagagacaaagcaagagaagaagcagagactgttggcccgggccgagaagaaggctgctggcaaaggggacgtcccaacgaagagaccacctgtccttcgagcaggagttaacaccgtcaccaccttggtggagaacaagaaagctcagctggtggtgattgcacacgacgtggatcccatcgagctggttgtcttcttgcctgccctgtgtcgtaaaatgggggtcccttactgcattatcaagggaaaggcaagactgggacgtctagtccacaggaagacctgcaccactgtcgccttcacacaggtgaactcggaagacaaaggcgctttggctaagctggtggaagctatcaggaccaattacaatgacagatacgatgagatccgcgtcactggggtggcaatgtcctgggtcctaagtctgtggctcgtatcgccaagctcgaaaaggcaaaggctaaagaacttgccactaaactgggttaaatgtacactgttgagttttctgtacattaaatattgacatattcaaattttccttcaaaaaaaacaacaacaccgggncatttcggtgcccaaacatgctgcatggcacggcactgttcttgacccccctttgtcaacgggaaaaccggccataagggtaatcactgn

SEQ ID NO: 177358 - DNA, 413 bp, Homo sapiens
acgttgacacttcaggtgtgttcagaacagaaagagagagagagagaagaagacagagagagagagacagagacagagagatagagagacagagatagagaaaggaaaaaaaggaaaaaggaaggaaagaaaggtgaaaatgcattaatcattaattctccagactattttctctaccttccagtatgttggagatcaaaagaaaagtgctttgaagaacagttacggtttacatctaaacctcagacatatcatacaaagaagtaaaacaaacaaacaaacaacatcaaaaaaagccccacaattataaaataatatgtcagcctaccaaatcagttcatgcgaaaatgcggtaaccaaataggctgcaaaggctcaccagtcttccaactgcctgggccaattgttatctt

SEQ ID NO: 177359 - DNA, 312 bp, Homo sapiens
gtatttttcaaataagagggaatttttaaaaatatttgaactcattaacaaacattaatcaagcaaatagtgttgatgaagcactatattaggcgttgggtaattttctactcctcatggcaggttgtttttaaaagattacattcagaggagtggaagctaggaagcttttgacacctaagtagtggcattgagggagggaagaagtgaatgtacttaaaatactctttggagacaactgacagatgtgggtcattggctagaggtaagagagagggacgaatcgaatgattctctcagttcataatggta

SEQ ID NO: 177360 - DNA, 413 bp, Homo sapiens
tgattgcacaacagtgtgaacgtaattaataccaggtactgatttgtacgtttcaagatagctaaaggggaaaattatatgttatatgtttcagcacaatctaaaaaaaaataaaggacttgaatcactggaaacaactcaaatgtccttcaacaagtgaacgaataaacaaatggtggtacatccatatgttgaaataaaatggaaccaactattgatatacacaacaacttggattgatcccaaaggcattttggtgagtcacagacgcccatctcaaaaaaaaaaaaaaaaaagggaagtgtggaacttcctggtgggtagggcccttcttaaccctgttatcccgggagaatggtgccccggaaggaatatgtgtcacttgactctaagtccccagggcccaaattaca

SEQ ID NO: 177361 - DNA, 435 bp, Homo sapiens
aagcgttaccccgggggtggggggggcagaggcaacggggaagcaggaaggggctgaggctggttttggactctgcaccgtagcctctggcctacaagacagagcatcctctagattctggtctggcccctccagatccgcagccctgaccttaccccactggcgggatctagtcccctgggggtctctctgattataggagcccttcccccatctatcccagttcccaggggcccctggggctcacctgtctccaggtgctgagaaaaaggagacccctgcctccccccacattgaagagaagccccagggacaaagaggagtttgcaccagcgacgtctcagaagacaggggatccagcctcagcctccgtgggctggagggtgacaggggctcttagtggtcacccccaggctccagtgcctccagcggccg

SEQ ID NO: 177362 - DNA, 432 bp, Homo sapiens
tctaccaaagtgcctgccaaagtcatcaatagtctctatactgcaaattccaaaggtcaatcctcagtcctcattttctgagacccactccagcagcgtgtgacacaggtgcttattcctgcctttctgaggccgtttcttcatttggttttcaggacaggactctgctttgctttcctcctctgatcacactggtggtttctttgctcattcttcttcccaatctccccgacctctaacacgctggggtgtccccacctcagtctctggttcttttccatctctactcgttccctctagttacttattcaagtctcatggctttaattactacctgtatgctgatgatgtaataatttccaaacttctatctcctgcccagatctccccactggactctagttgatctatccaccaattgcctacttgaca

SEQ ID NO: 177363 - DNA, 966 bp, Homo sapiens
ccggcccacacaagcctctgggggcagggctggccctagagaaggggcagggggtggcgaggtggcgggcgtgggtggaacagagcggccaggagtcagagcggccacccccacctcatcttcccctcctggctggaggctggcgaacccaggccacccctcccggagacaagcgtgtttggcagtgccaggcctcttgcccctttgcttggactccaagtctcctctctgggcagccaggacccacccatggggacagccctatttagcttctgctctgggaacagcaaaaatcaggatggtgggaggggccgagtcttgtcttgtcctttcatcatcatgactgttgagttcttggctgtgcccatcacgccacagcacgacgcctgccaaaatgcccccaacctactgcctgatgcaggtgccattgccattagcggtcatcgacagcttagggcagcactttccaacgggtgcccatgggacaccagcctgcgagatgcttttgtgggaaaggggttttgtggttcaataactttcggaagtgctgcacactctgtccccaagttggacattcacaaaggccgttattgccgtaaaggctctgacaagccctatagaaaagcttcttgctaaaccttctttaacccatgttttctaaacttatttgaccacagaacccttttcttggggaacagctattaacccccaaggaattattggttcctcaagtgcgttttgggagctgctgccagagagctaaagggcctggggtgtgagctgactctccgctggggaggccgggtgcacacgccacagcccgaggaaagtgctggccaccgcccgtgggcatcgatgaggctttggcccccaggggccggactccgtgtgacctaataggtcgtttccaagtcacccgttttggatgtgcatttcatgtgacaatacagatgacatgcaaatggc

SEQ ID NO: 177364 - DNA, 206 bp, Homo sapiens
tttgctttccactaaggacatggaaacataccttgaatttcttcatcttgcatgagaattattttcagaatctttctctagccttcactcacaggggaactggccccaggtgcacgttttgagtgctttcccacagtttacctcagctgtactctcctactaataatgccttcctgaaactaggcacttagaatggtcccaggcca

SEQ ID NO: 177365 - DNA, 571 bp, Homo sapiens
tcatcttgagcatcattcactgcagaaataagagtaagttagtttctttgagagaaggcctaacgttgtactcctgggaactatttagcaatcatcagattgttgttattatcctactgagtgtaaaattctgggagccaactggctgactaccactcactctcacccttcactagaatagatgatgggtccattctgggccaatgcccagaggccttgagttgaggctggggcactgcctttgcccagaagagctcccaggggactgggggccagtgcccttccagaggcctcccagagagtaacttggaggttccatttgctattgactggattgtgtttgcttgaggagcctgtgaccacccgcagggacaggcagcctaggataaactggaccacccctgagtaaagcactccactcagtcccttggtccccacccctcagttagaactgctaggctttgggggatgggagggtggcaattattcttaacctcccgaaattcctgatgacccgataacaaggaggtatttagacatagaatgaggagctaatctttttcctataatg

SEQ ID NO: 177366 - DNA, 295 bp, Homo sapiens
  misc_feature (282)..(282): n is a, c, g, or t
gtcgtctagaggatcccattcggaatcaccactatcccattggattcctcaagttctgctgagaattctagtctctttttttccccactctagaataaggatcttaattatttatttgtgttgtccattgggaaaaatgattggggatgtgcttactgtcaacaaggggatagtggtgggttccgaatgtaaactggccgtaatcccaaagttctgggattacaggcgtgagtcaccgtgcctggccagtggtgtagttttaatgccagagtttctagagtnggtgacctagaca

SEQ ID NO: 177367 - DNA, 281 bp, Homo sapiens
tacaattttatacacatcagattagcaaaaatcagaaaatatcaagtgctactgaaaatgaagagaaaatgaaaccctcaggtcttgcttgtggaaaggaaaactgtgacaaccattcctgagaacgatccagcatgacttaaattaaatatgcatatacctcaaactccagcctttctactctaggacatatatagcaaagaaatgaaagggcaggtttcctgaaagggcattcttccttcataggaagacatgtataagcttgcagaagtggaaatagc

SEQ ID NO: 177368 - DNA, 515 bp, Homo sapiens
agcaattcagcccctttaacctgagcctgggaagatacggaattagactatagtgtgatagctttaaagaacaaagtgaggggcagtgtggggagggagagcatcaagaagaatagttaatagatactgggcttaatacctcggtgatgggatgacctgggcagcaaaccaccatggcacatgtttacctacgtaacaaacctgcacatcctgcacatgtacccctgaacttaaaagttgaagaaaagaaaaagagcaaagtggaaattgcaagattttagtattcagtgatggttctattgattcattatccctgcctttctctctgacattagttagttcagcacaccttcatatctatcctagatgttgaagctatgtctactcgctggtatctctagctgcagccttgtgccccctcgattttatatttcttattgtagcctttatccttctggattactaatcttggatcacagtagcttaaaatcttaccatgaatcctcattgcctcc

SEQ ID NO: 177369 - DNA, 373 bp, Homo sapiens
ttctcatcctaactcgctctgtgaagaatatttgccacccttcttcttctccaaagggttttggatttccttgttatgctgagtgttacacttgcaaagactgacagtcctggaaggaaactgtagacgtcgagtgctggagcactaaattaggagtccaaagacctgggctcgggccccagacttaccacttgtgagtatggatttgccctcagtttacatatttataaaatagaggcacctcccagactacctcccagagcggctggaggctcaaatgagataacatacatgacagttgtttggaaactgtaccaacacataaatatgaatgacttggtgaactggctaattaattaggtcaaggtagacc

SEQ ID NO: 177370 - DNA, 389 bp, Homo sapiens
tgggcaacaaagcgagaccctgtttcaaaaacaatacgagctgcagccaaggggacaggaggcatggccacgattgatcagagacctttatcctctcagggtttcaaagcttgcagaggtggaattaggactccaaagtcttgggtctcctttccctttgaagactccccttcctacccccactcacgagagaaagggaatcattctccttttcctgagtaaaaaaatgaggtctcagacagtggagagcactcagtgtgagagcccaagatttaggcagatgacctggcctctgaactgagcccctaagaccaccaaacagcttagcattgacattctgctgttatacaagaaggagctagagagaattcagagagtttacctgccac

SEQ ID NO: 177371 - DNA, 265 bp, Homo sapiens
tgtagatggggcacttttctctagaaaggcctgtgaataagatgaacaatacatttgacatgataaagcataatttttctattatgtgttgtttagattgtttgcttttttattgctttacataatggtgcaataaacatcttaatactaattgtgatctttgtttgcatgtctggatgttttcttagggtcgagtcctaaaaagagatttactgaatcaaagtactctatttaattctctttatagtctcttaattcataatat

SEQ ID NO: 177372 - DNA, 532 bp, Homo sapiens
cacatacgatcgtgtgtgttgcaccaattctttcgatggtggtatgaccttcttggctgccctgtctcacgctctttagatcgcccgtgcggcgcaatgtgccggcgttttacataaggttttgtaggtggtatagctcagctataccacctgaccaccactgccatctagtttaagtgtccttttctttttctttcaaatctctggcaggttgtgatatttatgggtctatctcttgtgactttaggttcgtcttggcaccagacataaggcagttccacaacaagctcttgccctaaacagctcctgatgccaagaactgccgaattactactttgatttcagtagatgtcaaaaaggatcatcagggtaaactttgtagatttctttcaataaccacactctcctttcaacattgaaattctagaccgtagacagaagtattgaaatgggttatagggaggagatgtgagaggcctcctgccattgataagtggacatgtctgaattggcctgctacctaaattaataa

SEQ ID NO: 177373 - DNA, 167 bp, Homo sapiens
tgaactgcaggcatgttgtagtggtttatttcttctcgtgtagctttgtggggtatgaatatgatgccctttatttaacccgttttctcttaaggctcctagaggttagggtgtccagcgtggggctcctgggcatcaagctgctgtgaacgtccacatacgtacac

SEQ ID NO: 177374 - DNA, 101 bp, Homo sapiens
ctagagatgacctgcagagaaacgactgacatctaacttcttatcactctcaataccagcaatggaaaaagaagatgaaagtgctgtcaaagtgctaaggg

SEQ ID NO: 177375 - DNA, 593 bp, Homo sapiens
attctaatacagtgtcttcgccacggtagattttagtgtcatttgatggaggaggactgagcaaggaggggtaatatagacctaagatgagctgcttattgtgaaattcccttcaggccgacccagaaaccacaggcctccccacacacaggaatgggagcggttgccaaggatgggcataataccaacagcccttttgtcttctatctaagcctgcagaagggggtatttctgaacagcacccttctgtgggcatgctacatcctgtctccgaggctgcttctgctggctagattagtctctaggtggctctcctgctggaagaaacggaaacctaaacctgcctctccccacccattagttaggtgggcctgcccaacaccttcctgggttcacatccggccagacaagaaagaagccaaaaaactttccgtctaccactgcgcctcctcatgcccaccccatcctattagcctaaaatggaacgggctaattagtttatttgtatagggaggggtttcagctgcctggacaaaaccaggagtccactgtccaagcttcttcggcaacaactggtactgctccagctcctg

SEQ ID NO: 177376 - DNA, 725 bp, Homo sapiens
attctaatacagtgtcttcgccacggtagattttagtgtcatttgatggaggaggactgagcaaggaggggtaatatagacctaagatgagctgcttattgtgaaattcccttcaggccgacccagaaaccacaggcctccccacacacaggaatgggagcggttgccaaggatgggcataataccaacagcccttttgtcttctatctaagcctgcagaagggggtatttctgaacagcacccttctgtgggcatgctacatcctgtctccgaggctgcttctgctggctagattagtctctaggtggctctcctgctggaagaaacggaaacctaaacctgcctctccccacccattagttaggtgggcctgcccaacaccttcctgggttcacatccggccagacaagaaagaagccaaaaaactttccgtctaccactgcgcctcctcatgcccaccccatcctattagcctaaaatggaacgggctaattagtttatttgtatagggaggggtttcagctgcctggacaaaaccaggagtccactgtccaagcttcttctgttttcctgagctcagaagaaaaaaagtgtgttagactaagataataccgccttttgaatatctcggcttcatatttgcctccatgagtgagagggccaagtgttatctgcaagttgaatcttctatattcaaaaatctacccgtgtttctgccagcgca

SEQ ID NO: 177377 - DNA, 214 bp, Homo sapiens
cgtataaaattacctactaccaccatctttcttgtttctcctgctcttcacatcaatattttaatagaacagcaaaatatggtcacattcagaatcaattaacacaaaaaaaaatcaaacaagttacaaggaacaaggcaaacagggtatgtttcaatgaaaaaagaactcaaaggtcccagaaatggaaaaaaaaagaaaaaaggaaagaata

SEQ ID NO: 177378 - DNA, 301 bp, Homo sapiens
gaactcctgaatatggaatctgcccgcctaggcctcccaaagtgctgggattacaggcgtgagccaccacgcccggcatgcctggggacatttttagaaaactataagatgtcaacatttaaccagtgctaaaaaattaaattatttacaagtaaacttacgatgaaaaactttaaacttcaactttaacatgtgaaggggatacaaggtgttcttacaattcattcacagaatacctgagtaagagagtttaaagactctttgctcaaatctaactttctctataaggactatcttacga

SEQ ID NO: 177379 - DNA, 397 bp, Homo sapiens
gcaggtggatgtgatgttaaagggggagcacaagcgacatcttcgtggtgatggaatagtcctggatgctgattgcagtggtggttactcaaatctacatacatgatgaaatggcagagaactatacgcaggcatggtaccaatgtacacgaaagatctggaataaaagcccctgacatcgggaagctggcttggcattcacggctataccacgttattctccttttagacataatcgcaaaagacacaacctcagacaaggttactctgaggccatgatgaagtgagacaaaacaaggtcactacctaatttttgttgaagtaacccataaagacaaggtcactgtgccacccacaaaataccaatcatcaccctctcttggctgaaagcagtgac

SEQ ID NO: 177380 - DNA, 542 bp, Homo sapiens
cctgcaatgggcacgagggccagacacctctaagagtgggtgtaggcctccaaaagtgtccacatgatacttccagaaaaacttcacatgcggaggtgtgcaggaatgtgcgtgctgctagaaaagaggcctaaggggtctgcccaacgtcctgagaacccgagagagcagggcccgctgggacaggcaggggaaggcctcgggagggacacgacggtccggcagcagagcctgcggggctggaggaggcgccctcctctcagctgctcttcctgcccctttcggtggcgaagatggatggggcccggggctttcggcggggcccgaggggccggcgaggctgcggccctggagccccctgcctggcagccatttgggccccagggaaatatcggcgctttggctaaccgaattattctttcggtttgagccagctcccctttttgagtcagatccggcggcagggccagaaaagcgctttctgaaaccccagcgcggtcctcggtgggggtggaatggggtggggtggggggcgcggccgc

SEQ ID NO: 177381 - DNA, 519 bp, Homo sapiens
catttgttttaagataaaacttctttcataagtaatcccccacattcgctgttagcctcctggtgggaccaaatctacagttatagaaggtttgcacctcactggcaaatcaaggaaagaggtgaatgattccaggtgctcggagcttgagctgattcttggagatgactcagttatgggaacattttacagacaggcagagcctttaaaccaatgcctgacttagaaaagaaaattgcaggaaactatcaaaagatggtgctaggttaaagcagcaccctgagcagtttccagaggtgtctgaattacagtaaggcaagcacagggacaaagtgatgaagggttaaaatactgcaagcagacaactgcaaaatgtgaggagatgacaaaaatgtaaagttttcgactcagccttgtctctgaaacccatctctgtaaaatcagactacaggtttcactgccaattttttctagcctgtatgtttcataaataaataaatgaaacagcaaaaaaaaaaa

SEQ ID NO: 177382 - DNA, 788 bp, Homo sapiens
ctgaggatcccgtgcttacttaccagtgtgcagaacagtgtctgtgttatgaataggattcttcacctcgttcacaggaagagtaatgcacatttcgaggagttcctcttctcagtccttgatacttgctatggcctggctccctgtggctggaagggccatctctcctctaggatggaatgttctccaactgctcctgctcagcccattgcagtcctgtctccctggcctatcgtctccaacttcaaatcctcatgggctcagttgtgcccctcctcagtatttacaacttcttccaggtggacacactcaagacagcggcttcaagcatcacctatgtgctagggtccccacatgtgtactgctagccctgccacacactgtcccctcagaggccaagttaccctgagcagttgaatttggtgcctcgattgtcctcattccccacacgtcatccatccacaccccaaatatgtcttgagtgcttcctattcccgtcctgcttcctggtcttgaccctggaccacagcaataggagcatttacagatgagtttgtgtctgcttcacgctgggttcttccttctccatgctctgctcctggcaagcccacatgtgcaatgtgagggtttgccctcaggcaagcctttcctgtggcccttagtcatggaaaagaaatgcaactttgtaaatggattttaaaagccactgcttgccacacttgcctgccctggaaaccttcatgcagcaatcaattcctaactcatacacatgggggaaaagggggaag

SEQ ID NO: 177383 - DNA, 760 bp, Homo sapiens
ggtgacagcgaaagaacgataacaaaatgccggagcgagatagtgagccgttctccaaccctttggcccccgatggccacgatgtggatgatcctcactccttccaccaatcaaaactcaccaatgaagacttcaggaaacttctcatgacccccagggctgcacctacctctgcaccaccttctaagtcacgtcaccatgagatgccaagggagtacaatgaggatgaagacccagctgcacgaaggaggaaaaagaaaagttattatgccaagctacgccaacaagaaattgagagagagagagagctagcagagaagtaccgggatcgtgccaaggaacggagagatggagtgaacaaagattatgaagaaaccgagcttatcagcaccacagctaactatagggctgttggccccactgctgaggcggacaaatcagctgcagagaagagaagacagttgatccaggagtccaaattcttgggtggtgacatggaacacacccatttggtgaaaggcttggattttgctctgcttcaaaaggtacgagctgagattgccagcaaagagaaagaggaagaggaactgatggaaaagccccagaaagaaaccaagaaagatgaggatcctgaaaataaaattgaatttaaaacacgtctgggccgcaatgtttaccgaatgctttttaagagcaaagcatatgagcggaatgagttgttcctgccgggccgcatggctagtgtggtagacctggatga

SEQ ID NO: 177384 - DNA, 180 bp, Homo sapiens
tatttcctttggactgtcttcccccacccccattattttttttaaacagtaaaataggtactacttatttagcaaaaataaataaaagtttaaaaaataatttagctcaacagtgacaagaatattgtctaagcctctccttatctatagtgattttcaaccagaggcaactttgccccc

SEQ ID NO: 177385 - DNA, 349 bp, Homo sapiens
ttccattgtattcaataattctgtacaccaataacaatagcagactgattgggcgtggatgtggataacattataaaaatcagttattaaagggatactttagcctgactgaaaaactgatctaattgtattagtccagtgcatgattatgtgagatgttttgagacagagtagtagatttgtgaatgaaaatttatggaatttttcacttactaggaacctttgtgtgtggaaaactgagaaaattgctttctgctgtagagtctggcattcatggtatattaaagcttatttttctgtgagtaaatcttattcaataaaataccactctttatactaaaaaacaaaa

SEQ ID NO: 177386 - DNA, 249 bp, Homo sapiens
gctaaaaaggccaggtggactgtgacctttaaatctccatgtaacacaaaaacacccagggaaaactagttttagaggactcctggcctctggtgggtacacaatcccaaatactgattggtttcaaatggctcttcagaaatactaaatattaaaaatttgtaagacaacatcacaagtttcatttttataatctgatagattaaaaatccagattgcttattttacacaacacccattttctttttt

SEQ ID NO: 177387 - DNA, 562 bp, Homo sapiens
agtaataaatcagacagtggccgggcacggtggctcacgcctgtaatcccagcactttgggaggctgaggtgggtagatcgcctgaggtcaggagttcgagaccagcctggcgaacatgatgaaaccccatctctactaaaaatacaaaaatcagctgggcgtggtggtgggcgcctgtaatcccagctcttgggaggctgaggcaggagaattgcttgaacccgggaggtggaggttgcagtgagtggagatcacaccattgcactccagcctgggcgacaaggcgaaactccgtcttgaaaaaataataaaaactaaatcagacataggatctgcagctaaataataggtcccaccagcttccaatgtactgtcgtaatgcataattttaagaagttattaagtcttctttcaaccttagtaaagagaaggccttttgacactgtttgatgtgaatattgcagccgtgccatcccttaaaaggactgttgaaaactgataggctttccacatacagttttactgggtggaatggacagataggaacaaatcaagaggcag

SEQ ID NO: 177388 - DNA, 183 bp, Homo sapiens
agttatgatcctaccaattttctgtcttacttatatttatttgaaaagagaatctttgtgtaacatcttgcaaatcccctactgccatgagaattaattactgggggcttcaggatctttcaagcatgtgactgctctaaaatatttcttgtattttttaactctcagttagaggtctcataa

SEQ ID NO: 177389 - DNA, 290 bp, Homo sapiens
ccataaatatgtcaatataagaattctgaactaagctgggtgtagtgacttacgcctgcaatcccagctactcaggaggctgaggcaggaggactgcttgagggcaggagttcgagatcagcctaagcaacatagtgagagacccccccatctcttaaaaaaaaattcagaattatgtaagtatcttaccttagtctttacccaattttattttcctgttcattcaaaatcagaaaaattaagaccagctttactatttaaattctcaaaagacttcccatgtgagaaaa

SEQ ID NO: 177390 - DNA, 457 bp, Homo sapiens
ctaggcctctggttctcaaatattagcatgtgccagaatcacccaaagcactcattaagatgcagattgctgggccccatccgcagagcttctgattccgtgggtgtggggtgaggcctgagtgcttgcctttttaacagtttcccagatcatgatgatgccgctcatctgggagccacactttaagaactgctgttctaggtcaatggaggaccccactacatacaggtggatagccagtctctgattgaatgccacctgtaatgggaagctcaccaattgtaggccccatccatgctttactgcagatgttttgcccatgctaatctttgttgcaaattttcctctaaaaagctaacatgtgtctccctgcagttctaggagggcaatataactggggtctgagtgtgggtttgaaattcctctgtctgagtttcaactcttgatcccttccctc

SEQ ID NO: 177391 - DNA, 277 bp, Homo sapiens
gtgttgaaactatcacattctagaatgttccatggactcttttggcatccaagagcagggactttactattccaaactcagccataattttgtagtacttggtgaatcattactcactggcaagagttcactgttgtttgtcttctaatcacaatcctgtttaaaccatgtcctagtgctgggattggcccctcccctgccctcaccccactttcccaaatgccacaccaaagtcttggcaggggatgtgcctgtctgggagcgcccagtgggttgt

SEQ ID NO: 177392 - DNA, 385 bp, Homo sapiens
atttgatgcttaagaatgagttatcaggtttgggggtgagaaggggtattaggtctccaacctccactgggctactcctgtcatatttttcctagcaagacaggcaacactcctcaaaggttactaagctgcgcctccaccaagaaggaaaatgggactcctttcaccttgagctctctttgtaccttcagcaaatgacttctgaagtcatcttgatctcctcttctataatgcaatcaggggcattccctgcttctctgtcatctctctaattactgaaagaaattttcccccttcttgtgtttttttctataattagcctcatagattggtcaaattcgtctgtccagatttccccccaaaattcccttctccacactgactg

SEQ ID NO: 177393 - DNA, 487 bp, Homo sapiens
gtgaacttcctgggtccagctgaccaatcagccaaagcaatcctgcttctagcatgcagcttgcattcatctgttcatccatcactactgccacatctgaagtcctggtcactattatctctaggctggctatgtgataacatcctaagtggtcttcctgcttccattctcgtccctccttagttcattctccagcttctggcagagtagatccttccaaatgcaggcctggccactcctctgctggaaaccattcagtggtttctcattgcttttaggataaaggtcccgtgtggtctagtctctgactacctccccaggccatcttacacctccctggcaccatgctccagacagattaatttttcttttctttgaactgaacacattacacatttgccctatttttgaacttcccacaagctgtccccttggcctagaataatcttcaccccactcttttcatcttccagatctcagggtatat

SEQ ID NO: 177394 - DNA, 475 bp, Homo sapiens
caggaagggtgggcaccgggaaggccgggcacatgagagatggtttgagttgggagcagcggccaaagaggcagaaggatcaggatgactctccagtgtgttgtgggcaagatgtgaagggggtcttcaagctgctctctgtcctggtctgaggagctggcttttggatgatggagcgtccttgttgccacccccacctcggtgttggtggtggtggagtcagggaccctctctgcactgtggggatggacatggagtgaaggcatgagggagatctagctctcttgggctcctggctcacttgggttattttgcctgttctgtggagggagcatcttcaaattcatcaccttcatcagcaggagagactattatcttcatgttgcagataagagagctaaggctggaatatttgattggtgtcatttcaaggacctgctgtagaagaactgtctggatggaggctagatgcaat

SEQ ID NO: 177395 - DNA, 577 bp, Homo sapiens
gggtcaccgggatcaaggatggtgattccatgacagtccctctaccaaacacagctgcactgtcatttaccctcacagcaagccacatctacctataaaagcaggtgtgatgatcacctttcacagatgaggaaatggaaactcagaaacatcaagcaacttgtccaaggacacattatcttaaaaacactgagtcaggaccacgatttgggcctggatctataggaccaggaagttctcactctaccatgccagagaggagagggatgcctccaacaccaggtggtcgagtaaaattaattagctaataattgttattggatatgctagactttgtactttttcttttgtactgttgctcattgttgaacatgtttggtttttcttttaggttttctctaatataaagaaaacagtggttatttataatcattactggagggtttgacaatcaggaaaacattaggttcagcttctccgaaatcgatttgagattcacagcaagtcctcattacactgcaccactagcataaattattgtatattttaatgctccatatcccacaacatccaagag

SEQ ID NO: 177396 - DNA, 184 bp, Homo sapiens
ttgttccttagagagttgtgtgtcaagtctcctgtgagatccttttctattcaaagttagtttcatttctggagtaacgtgtttctacattgttcagtgcacagtagtgagaattcatacatttgattccagaattaacatgtgtttgaagtgtaggtgtagtgggacataaggaacccagcag

SEQ ID NO: 177397 - DNA, 257 bp, Homo sapiens
attgcgctgcagtgcactccagccggggcaacagtgtgagaccaggtctcaaaaaaaacaaaaaaacaaaaaaacccatatatggaggaagtttattttacgggggacaaaaaatgttctaaaattcaattgtagggatagttgtgcaaccccatgaatatactaaaaaatgctggattataaatttgaagtacaattgtatcatatgtaaattataactcaacaaagctgtttaaaaagaaaaccaagttttaaaa

SEQ ID NO: 177398 - DNA, 252 bp, Homo sapiens
tgcttactgttcaacatatctttgtttggctgtgttcttaggaggtagggtacaagccttcactgaacatttgttgacttagagtcttggacacaatattagcactcagcctcaaaattagcatttttatctcgcactattctttatttcttggttcttctatgcacattactcatatggatttctcttttgcaagaaatacttcttttcatctaatctaagtagctcttgaactgtttctctttcttcagt

SEQ ID NO: 177399 - DNA, 543 bp, Homo sapiens
accacagttgcaatttttgcctaacaagtatgacagcaagagagggacaagggagatgagtacctatgcggttcaatgatgataagttattacaatgagtgaccataggagttaggctaggtaaagagggaagtgaggcctttatggagaaaggcagtgacatgtaagggataagtggtttggagggcacagtgggttcaaggattgttgggtttgagatactagagaaaatgaggtagaaaaacaattttaaaaaattaagatggcagggcgtggtagctcacgcctgtaatcccagcacattgggaggctgaggtgggcagatcacctgaggtcgggagcttgagatcagcctggccaacatggtgaaaccttgtttctactaaaaatacaaaaattagccggtgtggtctcatgtgcctgtaatcccagctactggggaggctgaagcacaagaatcatttgaacccgggatgtggaggttgcagtgagccgagattgcaccactgcactccagcctgggtgacagagtaagactctgtc

SEQ ID NO: 177400 - DNA, 146 bp, Homo sapiens
agaggatctttgaaaggataaaagaaaaaaaaaaagaaattggttgcctctgaagggaagaagatggctgagggtcacagatgagagtattttcaccaaactctttggttataccttttgaattctgtattatgtacatgtattac

SEQ ID NO: 177401 - DNA, 448 bp, Homo sapiens
tactatcaattattattatttaacacttggttaatatagtagtcccctcttattccaaaacccccaattccaagacccctagctgacacctgaaactgcagataggaccaaacctatactgtgcatgaatttctttttctttctttacaatttcagagatagaaggttcgttcttacagcagatcttagcaaactcggtgtaagattttttttcctcccttattaagtctagaactttcaccctttccctaaaggaagcactttacaacctccctttggcatatccaaattactggaatcactactcttgaggtgtagggtcatcatgaagtaaaataagggttccttgcgtacaagaactgcagtactttgacaccctgataacccagccggctcctaaagggactaatgagccggcagcatcaacagcatgagacgctggacaaag

SEQ ID NO: 177402 - DNA, 545 bp, Homo sapiens
ctactaaaacccgttaccttcttccctgtggtaataggattttgctggatacctggttagactacatttcccaggctcccttgccatttttggggggccctggggggactatgtaacagagttttctccaagggaatgtaaataaaaatgaagtagcctccaagctactttttaaaaatcaaatgagtctcttgaacattctctttttccttctactgtctggatttgaattagaagggcctggtagtataacagagccaggaggtggtaggcaccagggtcgttgaatcaatatggatgaggttaccagtagaccagaaacaccagccttgtattataaatgatcaaaagataaccttctattatggtaaaccactggtatttggagaaaggagtctgtaatggcagcttctcttactttataacatacttttcaaacatctaacaaaatatatctaccacctttcacaattttgcacctggaagggttagggaaaagtgtatcctggggcctcagggaaaaaaaaagaaaaaaggaaagaaaa

SEQ ID NO: 177403 - DNA, 346 bp, Homo sapiens
tttgcagcaaaattaggagaagtgaagcaagtttttctgaaaggccagagctgccagttaggaaaatctctattggagaaacagggtcactgaaagatcaagagggaaaatcatttaatatagtatggttactggctactctagaggatcaaaggtataactttgtttttaatttggtttaccagtcacagcacacatcagtactttcatgtgcacccaccaacaccaccaagtttatggtcctggctagacccaggtatgaagaagattattacaaatgcatgggctgtgacgataacgttgtagatgtggtcgttacctagaaggttgcctggctagacccagg

SEQ ID NO: 177404 - DNA, 242 bp, Homo sapiens
tcgtggtggaagaagcagtgatcacatctcctggctcagagtggcccccacttccccaccatctccacctgcccaaatcagaccaatctgacaagtgtctgtccagcttctcccttgaggatgaagtccttagcaccttccagccttggcacctctatcacagggctgacgtcattctattttgtataataatgatcactcctcacatcgacaactcttcacggttaaccaaaccctcagat

SEQ ID NO: 177405 - DNA, 420 bp, Homo sapiens
ccactaatgcactgtgacttcaggagctccctcccctcagtggctttggggaaggggtgggacttagagttgaagtcattctgtggacctattacagtgttcttcatttgctctgactacatttgcgtatcttcctgccagaatgggaggcttctgagtccagaactcaatcttgtattcatgtgcccggtgcgtgttgggtggatatggttaaatgagcccagttttgttgttcttgtgggtcttttctatgtaacacagtccatatattcttgcctacactttaagtgaaagaggaacttgtaaagacctcctatctttaagaatattagggccaggcatggtagctcacacctgtaattccagtgctttgagaggcccaggtggaaggatcacatgagttcaggtatcagtctgggc

SEQ ID NO: 177406 - DNA, 202 bp, Homo sapiens
actgtagacttgtaaagactgcaggagagggatcacagccagcaaatggtagcgtgactcctatgtgctttactatagaagaggctgcagggcctccacccacaagttccttaccagctagtgtgctgggtggatgggcaggggttgtagagagtattataatactgtgccaaaagaatttcaagctgtggtgctaaaaatg

SEQ ID NO: 177407 - DNA, 273 bp, Homo sapiens
ctcctcacatagtggatggaaggaacaaataagctctctggggcctctttaataagggcactaatgccattcataagggctccaccctcatgacctaatcacctccccacctcccaacactaccactctggggattaagttccaacatatgaattttagggggacacagacattctgaccatagcaccaagtaatttgctcaagtgatgggaagaaaacaggaaggactgatgtgtctacagacaagcctcctcctcaaccctggggtatcct

SEQ ID NO: 177408 - DNA, 529 bp, Homo sapiens
tctttgattatgtgtggtagatatttctatttttgaattcttcctagcatattataatttatttgttgacaaatctatttctgttatagtgggagcttctagaggacagggaccatttaattatcctctcagtatcctagcaactgacacagtaaaggtttttgcacttgaaattacaagtaatctacttgtagttagccctcagttcacctgatactctataccatttgttcctagaaaactatacaatacatgataggaacttggtaaatatttaatggtaataatggaaaagaagaaaaaattgcatttcatatgctgtgtttaagaagaaaggtctacaccaggcatggtggcttacatatgtaatcctagtgctttggaaggctgaggcagggggatcacttcagcccaggagtttgaggctgcagtgagctatgattgtatcatactctaacctagacaacagagtgagaccctgtctctaaaaaaaagaaaagaaaggtgcatgaataaaccatttaagaaa

SEQ ID NO: 177409 - DNA, 647 bp, Homo sapiens
attcaccttaaatgccctccttgagcaccttttccaaagtaacagccccatcactgcctatcatagaacattattttactttctcattcctatgactgtcctaggttggtactgtcctcagcagaatagctgctcctccatgaggtcactcaggaccccaggccaatagctgctctgctatcatcatgtgacttctaaagtcaccctaggagaccgcatcctaatcatccaaaagggtaaagggcctggagaaacacatgggacaagttttcatgggctaggcctggaagcagcacacatcacttctactcacattctaattatgggggtagtgggcagagaacaaacaaaaataaacactaaggaggttttcaagtagctctgtgtgcaaaaaaggggtctgatttttggtagagagctagtaatctctgactcaggaaaaataggtctaggtacttgaaacatactttggaaacattgctggcaatatttgggtaacttagaagcgaaaggaaatgttcaaataggatctcagtttggttaggaaaatgccagctgccgaagccccaaatcccccacgtcttagcacaattaaattagacacacgcctgtagtcccagctactcaagaggctgaggcaggagaat

SEQ ID NO: 177410 - DNA, 174 bp, Homo sapiens
tgagcatggtggcatgtgcctgtagtcccaactacctggcaggctgaggcaggaagatggcttgaccctgggaggtcaaggctgcagtaaacttttattgcaccactacattccggcctgagcaacagagcaagaccttgcctgttaaaaaaaaaaaatgtgattcaagcacta

SEQ ID NO: 177411 - DNA, 355 bp, Homo sapiens
aaatatacatttggaaatagttttttggatggtacttttggccatgaatctaactaagaaacctatgacaataaatacataaataccaaaaatatataaacaaattagagaacttcagatttttgtcaaacttttattggtccaaatttcttagaattgtttatgattaaacattgtttttcacttataatattgcttctatcttttcttttttcacttgcttagtgttatgaccactttgattattttgttaattttatttaaaaaggctttagatttaattctattttcttgttttctatttcattactttctgtttttgcatttatcactacctgtcctcctttatttttct

SEQ ID NO: 177412 - DNA, 337 bp, Homo sapiens
agtttaaggagacattgttacagatcaagagtgggtatttttgtaaggatatagaaataagtggaacagtgataatgactctttcggttttaggttcctcatctgttgaatgaggattatgcttaattaaatgttagcttttattattagatatttacataacttttcctttagaattttggtgattataatccctcccattttctcccattctggtactcatataaaacagacattgcaccttctggatcagattttcatgtcattctacctctttctcttactttccatctttgttctttattactgcatcctgggagaatcctagttgcctaat

SEQ ID NO: 177413 - DNA, 187 bp, Homo sapiens
gtactatcagtcattgttcccaaacccatttaatagtaactgttcatgtttcaagccgacagcccgaaggaagacagggttcttccagacatagcaaggaagctgtccaccaagtagccctccagagtggggtcattttggtaaattcacctcagtgtttggggtctggtccttagccctgatggag

SEQ ID NO: 177414 - DNA, 290 bp, Homo sapiens
  misc_feature (24)..(24): n is a, c, g, or t
attctagaggatcccagttctacnccaccatacttgtgaattactgtagcaattctgtaagagctgaaaaagtgggatgtaacatgacaccatcttctacgtctatcattatctctgtgtggaaatttagatacgtgtatagttttttcctattcagattttctgtttttaaaagacaaaggccacatcttttctttatactcttttgctttcttaaatatttatgttatacatttatgaaatactcgttgacttggcatctgatgtgcatataatgtgtagaaattgaa

SEQ ID NO: 177415 - DNA, 158 bp, Homo sapiens
tatgctcttaaggaaaaccattcaaagtccaagtttgtaacatatcccacccatcgagttggcctcctcattgccctactagtctactaagctactttctagacttatatttaacccatttttatccatttagtctattagaacacatattccatgag

SEQ ID NO: 177416 - DNA, 355 bp, Homo sapiens
  misc_feature (1)..(1): n is a, c, g, or t
ntgcctgtatgagcatatacagatctcgtggagaaattgtcctgtcgacggaaccagtgtaaagtcagtgagactgattctaatgctaagcatggaatgacactggcagaatgcaagagagtggttgatcagggcagcccagatatcgtggtcataaaacaggtgagtggaatggggaagaatttgccaaggagggaaaagtgaattaacactttaataatgtccaggtgtttatcatttcagctgtctgggtattgaaaatggttagtcccatttctttctttttttttttttttgtttttgagacagagtctcactctgttgcccaggctgaagtgcagtgctgcaatcttgg

SEQ ID NO: 177417 - DNA, 252 bp, Homo sapiens
tgagatgtagaggcgagctctggtcccacacaagggcagcggtacatctgtgaataggctggtttgcaactggctcgtccatacaaccagttcattttctaaatggaaacaaatccaaatgcacaaacccactgccatcccaacgtactgctgactttgctgtgtggttgaacagaactgactttgcttgaaaaggaacttacgggttctgtgtcacctgattctaaaaataaaacacttccattactgttg

SEQ ID NO: 177418 - DNA, 594 bp, Homo sapiens
ccctcacgatacctcaaggttgtctaacttcctggagaactattctccagaaatgcatgtgcacaatttcactgcgttaacccatgttcacaactgcatctgatctgttacactgtttggtgtacttgagcactctggtatttaagcattttgctgctgttctctgtgcacagctggcataagtgtcactccctactaaatgatgaaaccaaaaggtagagagcaggctgctacttttatgcaaaacagatttgaaataaaggcttacgcaaatattggctttaaaaatgttgcctgtttcttttagcagttttagactaactcttcacattgctttttaccctgaaacaaggactgagaccttgagtcactcatttgtgatataactgaagataggagatttattgagactttaagagcacttcagctcattttttttaaccaatgaagatattttttccttctaaaaagagcccaaagctagaacctgctctttctaatttaccacaggttgagagatttgggggtagagggtcggataggcaacaaatcagatctctagaaagatttcgggaaaatgtatttcattatttg

SEQ ID NO: 177419 - DNA, 119 bp, Homo sapiens
atgtgtctgtagaggaggagctggatggaatgtgtctgtagaggaggagctggatggaatgtgtctgtagaggaggagctggatggaatgtgtctgtagaggaggagctggatggaatg

SEQ ID NO: 177420 - DNA, 479 bp, Homo sapiens
cgggatcaggcagaaggggaaatacgaaagcatggggtatattagtagaaggggagagagaaatacaggaaggactcaaaaccccatcccatccttagatgtcaccttggtatgtaatcttctagataacttgtacatactttggttatgctcctccacgtcaatgtcacgtgtcatttaaattgcattccattggattgctgcactgaaataatttgtactcattgtcaggcacttgttttctccttttttactgttaatgtgtccacaccattgtttctttcagatgaattctcaaagttaaaattactgagtcaaaaaacacgcagttttaaaacttttgatgtaatgatcccgttttctggaaatgcagtatgggttcatacggaccatttattttgaccattgcttgcagtagacactgtaattaaaaatgtatttgcttgtttggtaggtggaacatggtacttggtttaatt

SEQ ID NO: 177421 - DNA, 407 bp, Homo sapiens
tccgcctcctggattcaagcaattctcctgcctcagcctccctagtagctgggactacaggtgcacaccaccacgtctggctaatttttgtatttttattagagacagggtttcaccatgttggccaggatggtctcgatctcttgacctcgtgatccacctgcctcggcctcccaaagtgctgggattacaggggtgagccaccacgcctggccaccaggcactattcttcatcctggggataccactgatcatggccactaggtcctctctacttttacattacattgtaacagacttagatagttatcaccaatatagttaacattctttgttttttttttccctttctttttttttgagatggagtcttgctctgtcacccaagctggagtgcagtggcacga

SEQ ID NO: 177422 - DNA, 385 bp, Homo sapiens
tttgtggagcaaagcctgaaatgcctttagggacccatcagtgcagtaaattacaccgactctcacaggcctcgttacgtgagactgcaggatatggccgggccactgccatctgcgactgtgacataagttaatgatcatgttgttatgaattaacctatcattagaaaacaagaagtatttccagataagacagaattggagactttcttgaaagagtaatggagtaaatgggaaacctcctcatccagcaagatgcagagaagagttgggggaaagggatcccttagttaaggcagggatccccaactccgggctgtggacgggtacccgtccatagcctgttaggaaccagctgcacagcaggaggtgagcagtgggcaag

SEQ ID NO: 177423 - DNA, 481 bp, Homo sapiens
atttgtcgagcaggtactcagttgcagggacaagtgctcaacactcagctaggtagcatctctccaacttctggaggagggaccagtgagacaggccacccccaacaatgaaatgctctccccaggcctccagcaccagcctcagtggggtggttttgcatcttctctttgtcttgttcttcaagacagtgagtgggaaagttccccagctttcttgacagtccatcacaacccctccttcttcattccttccgtggcgactcacttttagagacttttgcaattaaataaataaaggcatttcccaccaactttaagcccaacaactttatcttcagtgtctaccactcatttctcatatcccacaagaggaaagattaatgtgatattgttgctatttaagacatctgagcttgtccatattcagattttctttatttttctgaggttttccctgggttctcccacctccccagccaga

SEQ ID NO: 177424 - DNA, 662 bp, Homo sapiens
taacagtagtatgacaaattgttttaacttcacaggtccctttttaaggatctcaggaacatctaaagatccctagatccggccgggcgcggtgctcacgcctgtaatcccagcactttgggaggacgaggcgggcggatcacgaggtcaggagatcgagaccatcccggctaaaacggtgaaaccccgtctctactaaagatacaaaaaattagccgggcgtagtggcgggcgcctgtagtcccaaggtgctgggattacagacgtgagccaccatgcctggcatgtgtctttattttcttttacttacccacatgagctaactttctaaaagcacatatactgcttttataacaaaagattatgttatcttaaaaagcaaatggagaaaattatgtaaaatatcacttttaaacaaagtattacgtgggggaggtgtattattccatgggcaacctttgacatacttatggctccccaggtaggaatgaaaggaaacaacgaccaacagcgaacagacaaagaagcacaacatggtgggggcggcccagggcctcaaaaaagtctgtctacaagccaacgcgacatggcggcagcgggcccacagggggctcggcccgtgggtaaccgggttccggggatacttgggaacagaaaggggg

SEQ ID NO: 177425 - DNA, 148 bp, Homo sapiens
  misc_feature (24)..(24): n is a, c, g, or t
  misc_feature (30)..(30): n is a, c, g, or t
  misc_feature (35)..(35): n is a, c, g, or t
tgtgtggtgtctagaggatcccanatgatngctcnacgctcctcaattcacccatctgcttcccctattggattgccaaaaccttgaaggcaggagctcaccttgatggtcttctaaaaaaattcctgtccccggccgggagcggtgg

SEQ ID NO: 177426 - DNA, 334 bp, Homo sapiens
taaagcattagtaccattgaacagtttttgctgctcagttaagaccctttagggcatcttttaatacagacatcaaatattttacttgctctgtctgcatttattcgataagtattaggtgagtttcctactatgtaccaggcactatggcaggcacccaggatcttggatggcaaatcgaccacagtttctgcctgcaaggagtgggaggtgcattttctttcttttttttttttttttgagatagagaattgctctaacctcgtgggaaccaaaaaattgttcccctcaggttgtcagtaatgattgacctgtaaggaaggtttgctaggta

SEQ ID NO: 177427 - DNA, 1706 bp, Homo sapiens
catttccaggcattttgtgaaaaacgattctctgtccttgaagatgttttttatgtctcctaattgttgttggcattttctctttgagttaaacttcaaaaggggaaaaacatctcagggaaaaaaatttctcaaatgtttgcaataaagctctaatatcatacatacaattagaattgtaaaagatattctaaccatttgtggaacttttgtgaagtgagctcaccaaatgtcagagaagatctcactgtgtaatttctgtagaaaggctcccccggacagcgtcactgcacctgctgcagaaatagcattccaaagctggggaacccatgggctgcatgtttcctgtgtatttccaagtttgtcagtagttgtggatttcagaattatccctgaaaagtgataacatgtgtctgtccctagggtccatagactatttttgcagtgatgtcaccaagaaaaaaatccaccccagaaaacttcagtcacctgaaactctgagaaagatggatttatttggcttaaaactgtgctctgttaggattaaaggaggctttgaatttatcatattctttacgacagcatattttatagcatagaacgtgtaaggatacggggtagaagagaggctcagctctgcagacacaaatcatggtaactctggtattttccacaaagctagctgttttgaatcaacattgaaaacaaaatccactaaccgcaattaaatttagatttacaatcgataaatgacaggtgtctgaaattatcaactcagatttttaaagcagtagctgtatggtaaagaaagaattagattaggcattaaaaaagaaagctaatgactacctagcaaacagattctagtccagctaaccactaattaaccaactagattcttacctagctaaccacaaactgagaaactagactcctgtctgtctaactagtaactaacaaacgatactctatctaatacagctaaccactaacaagctagactcttatccagctaaccactgacaaactagactctagtccagctataaccactcattagccagagaggtgctgggtaagtcatgttaactttttgatttcttgatgttattgaaatgaaataaagactttaaagtttcttgaaaaaaataaagaattctcattagtgttataatcaagacaaataaagctagttcaccagtatcacatgaaatataaataccaagcgttattatcatggtggcatcatcgtgactactgggaaacatcgtcccaggtcacacctactataactagaagcaagaccgcttaagtatcttaaactgatgaaaccattgtgataaagtacagcagagtaaggagcaaagatccaaaaacttcgggaagctagtgtgaataatgatcattttagtagcatatgcatttcctcattcccagagactctaaaaatgtttacctaaatgctgccttacaaacatacgggaacaagcttttcatgtacgaaggtaaacctcgatgcgctaccctcaaccctaggaaaccggcacgcaagcagggcagaggtcaccaggggtcttgtagccccagccggtgctcccggatcgctgtgctgggagaaacttgtcataggactgtcatgccacagccatcttgaccggctattggagtggggcagtaacacgtttttactgttttcaaggatttag

SEQ ID NO: 177428 - DNA, 281 bp, Homo sapiens
agtggtgaacacccgtagtcccagctactcaggcgactgaagtgagagggccacctaagctcaagaagtcacggttgcagtgagctgaaatcacaccattgcactccagcctgggcgatgggaatgagaccctctctcaaaaaaaaaaaaaaaatcagagggcaggaaatttatatgaaggtaccaagacaaggacagatttccttgtaagtggcataaggagccatctgccagtcacatttcaaagggagctttaaggacattccatctaagtgatcaag

SEQ ID NO: 177429 - DNA, 114 bp, Homo sapiens
gcctatgatttaagtcccttcttaacacaagcattcctatgagactcaattgcttattattttcccttccttagtatgtttaataatgttaatggagttttcattcaataagta

SEQ ID NO: 177430 - DNA, 679 bp, Homo sapiens
tagaggttgtttaatccatgccaaattctttggacgtgattttctgcctgaaactatagtcttctttgcattttgctggcccaatgtcatcaagtttcacacaaagcttggaaaaatagcccacaagtgtagttggatcagcctttagaaaaggagactagagattctcagtatatttaagagaagatttaaaaatagaaaattacataagcgtagagggaatgtagaaaaataaattgatggctatatctaacaccttcatataaaaatggaataaaagtcaatcttccccacatcaagaacttcagagatgtaatataaagtctggagttcacatgagctcttgactgaaggacacgatcctatcagagaaaggtaagagagaaaaggtcttctacggccctggttatcaccagagtagttaggagaagggctggggatagaggaggaaatgagttccgtaagttccaccagacagcagacctactgaatgaggcttaatttgcttccctaatctctccattggtagaaattgcatagtggcttaagagacagttagccagctgccattttaatatcttcatgtttccaagttgttaactacacgtttcccaaatcctaactttatatcacagtattggttaagagtcttggaacaaataaggatactgaattggct

SEQ ID NO: 177431 - DNA, 414 bp, Homo sapiens
acgttgacacttcaggaagaggaacataggctggaatttagattatgggggctctgaacaccaaactgagtttggacttaattgacttctgtaggcaacgaggagccatggagattctgctcagggaagtgaggaactgggcatgccttaggaaaattaaccagggggtggctggcaagcaagcagacagcaggagaggaacgctgtggggatagggaggaagaacctcgcatgaccttgctaacacagcaacatcccaaccgttggttcggcctagaagctggtatttgggccatctgtttcccattgtcttaattttctgctcattagaaattgaacccataaaccagtccacacaagtacgttatctaagtaatgttgcattctgcttctcttagactacttttttttttt

SEQ ID NO: 177432 - DNA, 673 bp, Homo sapiens
tgttcagaggatcccacaagctgtcacaactgggcaaccaagtgaaagggattaacattttaacacaatacttcttactcccctccccaagtcccagtgcaagggcacacaagagcagaaggaaataatatgtaccctcaatctcccagagacttgacaacaagaaagccaagggcatatgacagggctagaaatacactttgcaggaagggtggaacgaaaggctctgcctgacagtgcttgctggctgccccttctcctagacagaaatggtgatggtacagactaacagattcataccttcatacctgttggaaattatttctccagatagacagctgctgcctaagtgataccctgatcggtcaccacagccacaaagctcagtactgctgcagagcatcctactgtttaacagcttgatctaggcaccaggaaaaggctagagggaccttggttatcatcttgagcaacttcacgaaggcacacatacccaacaatatttgacaaagcaagctagcagaaaattcctttatttccatcccctaggcctacaagtaccagccaatgataaataaaagacatttcacatcaagagtcggaatagcaaagagttacaaaaaaactcaaagtacttcggagtaaccttctcagaggcacacacacactcagg

SEQ ID NO: 177433 - DNA, 317 bp, Homo sapiens
ttaacttttttcctggccagtgtcatcagtggtattatgttctatcaagaggcacataacgtctggtggtctctccttttgtgataattagcagactgttgaagctcagtgcctcattccatcagtcaactaaggtttgcaaactcatgatattttgatgcagtcattgcttttcatttatgagctgaaccatgaaacttgcccttatctactattggtttcccagtggtacagtttatataggaaacgagaataaatgctgattcttcttttatgtacttactttcaaaataatgagttagttccttggtatcatg

SEQ ID NO: 177434 - DNA, 232 bp, Homo sapiens
ctcataacctaaccaggaaaagaagtgtatgataccatagaaggattaagtagttcactgtttgtaccactttgttaaataaccttctttatgcaaaggtacaaaagttccacacacacagacacatgcacaaacacacatgcacgtacacacaagtacttgtaacacatatttgtttgtttttaagtttcatgtaacatccaagttaagaaagcacagttaggtctactgg

SEQ ID NO: 177435 - DNA, 1111 bp, Homo sapiens
acagctggtgggtggcagagctgggattcaaacccaggcagcttggctttagaatcaacagtctgagcctcatgtcctgctgcccagatctggctgtagacgctctttatttatgtctttctttctctccagctgctgagctgctcaccctttatccactttgcttatcacagtgtctggcacacagtggcattcaagtgctatttgtcaggtgaatgaaggaatgaatgagaaagggggaatttcccataacccaactaccttagcacaataattatggtaattttgacagattgtagatttcaaatcatgggtcaggaaccgctcctgccagtcctgttgtcctgtcatcatctttgaggccagaacagcccagctgtgccaacatacctggggcgagaggcagcccatgttcctcacgccagcggtcagctgcgggttggcctcgggcctgtctctctcttgatctcgcccttactcactccttcgctgtctctctgaacctccttatcgctgtctgcctgtcttgcccacttctccttgttctcattgtgcctctagaccctctttaaagccagtggagtttgaggacatgcaatagtaattttataatcattactgggcagtgtaaaacaaacattagcacagctggcaaagagtgtaggcagatggttcctttgggatcctaaaaaagcaggatacagctgagatctctgtgacactgtggattcagaaactgctggaactgtccagtccctgtggtggctgccccttgtaggggtggtgccaagggtggcttgggggtttaggtcctcctaaatttccattaggccccaacaaatacacaatatagctaaaaaaaaaaaaaacccagtgtatttgttatgaaaatgcaactttgagatgagtctctagaccccacgtcccccctttggataaactctggtgcttcacagctgccggagacccatttgctgtcctctgctttgctaaccatcttcactgagtctttaatatcaagtggggctggaagactgaccagtgccctgattcatttacatattgattcattgcaggtctcaggcacaggttgataattatctaactgttt

SEQ ID NO: 177436 - DNA, 343 bp, Homo sapiens
cctatgggtccccttgatcattcggcctgagtttggggtttcttttcctgttcccttttcccttaccaaaagttctcaaaagataaaccctggtttcctcaagtctagtttcaaagcaataagtgttcaggtagcaaacatcttctatctcattgcatcaatctcatgatcacaaatgccacatttggctcccaacctgctccaggctaatccaattttatgcaaaattatccagaggtgggatggtgggcataagtcggcttgagtgtggtcctccagtcgagaacctcttgagcacagttagataatgtaggcacttaaagcacgaggtccaagcagcttg

SEQ ID NO: 177437 - DNA, 169 bp, Homo sapiens
tgacaatttttaaagtaggtatttatcacctcacttttatagatgaattaaagagactgtgactttccagaagtggccaagccactgcattctattatctctctagtgattagagggctatcagatttactctctccctcagggtttaccatcagcccttcctgcttcc

SEQ ID NO: 177438 - DNA, 386 bp, Homo sapiens
ctccaaaaggccgtctccacctgccaccgggaaaggacccggagcgaaggatgtcgtgggcggtcagcccaggtgattgcccttcttttgctttggagccaggcagaacagagctcaaattccagctttgggacagtgtgtggcccagaaggctgtaactgcggagttaacactctccagtttccctagatggcccgacctggccggtgactcggggatgatgaagctcctggagcctcagcgtgctcacttgagaggtagggcagcgctttgtacttcacagggccatggggacaggctcagggcctggcactctagtgaccggcttcatgctgggtcactgactagggaatccacacacctttttagtccagactgagtaggta

SEQ ID NO: 177439 - DNA, 105 bp, Homo sapiens
ataaccatcatgaagaccaaggaagagcttcctggttcatgctaagtagtttggattttaccctccagtcaatacggaaacaagaaagagcttaaaggccagtta

SEQ ID NO: 177440 - DNA, 671 bp, Homo sapiens
gctgagtataaatttcttaagttcgatatctgagtatataattaaaaagtgatttttatccagcgttgcaagaatgctctcctaggtaaaattactgattaaaaaaaattagtccagttgatttatttaaatagatctatatagatttttttgaggcatttctatgtcaggagctatctaagcctcatctaaaaatgttgttttcctaccttatgtggaaaaacctaccacctggaaagaaataaagcctcagttctatgtagatatgctcacacccagataatagacagacaaacatcttgcttgtactccagcctgccctgccctgtcctgccctgtcctactgcttacatggctatagaagctgtttagggtgtttctttttccgccattcagtctctatatggtaaaatggcagcagcaatgcttgttatcttatagaattaagtcagaattccagagcagaaactgggacttcttcaagaaagaagaagcataaccgaaaccagaataagtggagctcggatagtatccagagaggggaaaatatcagaataaaatgagcagagccacaccaacatacttctaggcaaaatcagtactacagttaaggaggcacagtggggtagttggggggatgcagtttttgatacccataacttctgactgtt

SEQ ID NO: 177441 - DNA, 420 bp, Homo sapiens
tgtcaattttcatcctcaatgacctacctgtcatttgatgttccagagccattaggtctatatcacataggtatgttcctactggatcctccattttttaaatgtccttcagcaagacctgcacactattagcacagtttgaatggattaaaatattctaatgccatcatttcagaggtaagtctacagagaagagacagtcattcaaagatgcatgacactttggatccattgagttcatcctcttactgccttgaatgaggccacaagagaagtgaggatgctggagctggcagcacctacatgtgaaccctgactctaacacccagtaactgtttgatgtggaattacataagccatctttgggtctcagctttctcatctgtaaaataggtataatatcactcacttcacagggac

SEQ ID NO: 177442 - DNA, 763 bp, Homo sapiens
ctgagtttgtatttccaacaacagcctgcccgggtgatcgttctgaactgtggagctcaatgcagccaggatgccaggcatacagcactggtcaggtgccaagcagctgccctggaattgtaaacgttacccacacccgtcacaacggattagggaacgtagagagaagaggggcatctgtgcggtgtcatgaaacaagtggatatctgtgtcattccagttgaaacctgacattgttttccgatcttggagtgccgtacacgttctgcttctcgtagaaaagccgcaacagctcagaggtgacttcctgtcctttggaaatgcctgttccactggcttttcagtttcctgaaatagctcagtcctccagaggcgaggctcccagcatcctgaggcacgtgtccatggggaaggaggggcacgctgattttagttgcttttccaaaggcgccttctaaagccaggcctttatcgggccctgctggtggcttctccacggtgccctcatgtggacctcagactgggctttggagcctcctgtctcacacacccattttgtccttcccacacaactcattctttgttctcacactcccactttcccgctgcttctcacactcattttcttacacttgctattccactcacacttgttctcatttgtttcacacacctctcactgttctcacactcgttcactcacttgttctcgttcttacactcacacctcactttgttctcacactcgttcactcacttgttc

SEQ ID NO: 177443 - DNA, 1042 bp, Homo sapiens
ctgagtttgtatttccaacaacagcctgcccgggtgatcgttctgaactgtggagctcaatgcagccaggatgccaggcatacagcactggtcaggtgccaagcagctgccctggaattgtaaacgttacccacacccgtcacaacggattagggaacgtagagagaagaggggcatctgtgcggtgtcatgaaacaagtggatatctgtgtcattccagttgaaacctgacattgttttccgatcttggagtgccgtacacgttctgcttctcgtagaaaagccgcaacagctcagaggtgacttcctgtcctttggaaatgcctgttccactggcttttcagtttcctgaaatagctcagtcctccagaggcgaggctcccagcatcctgaggcacgtgtccatggggaaggaggggcacgctgattttagttgcttttccaaaggcgccttctaaagccaggcctttatcgggccctgctggtggcttctccacggtgccctcatgtggacctcagactgggctttggagcctcctgtctcacacacccattttgtccttcccacacactcgttctctctcacttgttctttcacacttgtccgcactcattctcacagacttgttctcacacggtttcattctcacatttgttctcatggacacacattttcacacttgttctcacccatgcttgagcttccatactcattctcacacttgttctcttgcagattcgttttcacacccattctcacatttgttctcacacttgttctttaatacttctttgttctcacatacccacttcacatgttctcatttgtcacacgctcttgttccttcacactcattctttgttctcacactcccactttcccgctgcttctcacactcattttcttacacttgctattccactcacacttgttctcatttgtttcacacacctctcactgttctcacactcgttcactcacttgttctcgttcttacactcacacctcactttgttctcacactcgttcactcacttgttc

SEQ ID NO: 177444 - DNA, 130 bp, Homo sapiens
agaggaatatcgtggcaaaatataaatttataaacttatacaaatctataagacagcttttcagactctaaatggaaatgttggggagagacataaaagtaggaaaagtaaaaataagcacctgatgatt

SEQ ID NO: 177445 - DNA, 331 bp, Homo sapiens
gaaaaaggaggaaaggaaggtaatgtaagaggagaggaggggaggggaaggaaagagaccagcaacttgtctgagtgcaatgccatcttgcaggggaaagcatttttcagagattcacagtccctattgttcttcctcaaaggcctgctgaccaataacgactgattctggatctaccttacgaccttcctgggccttctgcacttgaaagcaggcactgcttattgaggatggtttatgggctttgctttatatacttatgattctgttttgcttagtgctgggtctcaaaaagcctagaaagccatgtccccgcctccttgagacatta

SEQ ID NO: 177446 - DNA, 474 bp, Homo sapiens
gtgaagtgcctttgggatttttctcacctttaccgagttgttcacttatctttgaggtttactatatacatatagatagagatatataggtatactgcatacaatttcttggccagaattatgatttacatatattatctctcaatctgttttgtttttttcattttcaacagtattttgtgcagagcaaatgttttcaattttgataaagtacgacttaacagtttttcaatgtatgcattatgcttttaatgctgtatctaacaacttttagacttagatgtgagattcatggttaactgtgtttttctttcagcattttgaatatgttctacaactgattccagcttccatggtttctcaaaagaagtcagtgttaaatcttgtaagaatcacttgtatgaaatatgctccctttctcttgcagctataaaggtattctttcttttacacattctctttctctctctctct

SEQ ID NO: 177447 - DNA, 309 bp, Homo sapiens
caaaaaacaagcaaaaaaacgagactgcaccagagctgctcagctctgattccagctggacaacaaaattaatcatgcagcttcaaaaactcattgactgggtgttagttaggtctcaggatttaagtttttaataagctcttggtgatttctattagatgtgaaggcagggacgactatatgtctctgtggtgtccaagcaagctgagagtcacagctgtggacgtttgcttcccttacagaagtagctctcaaacaggaatgaccctgcccctgatgggacatctggagacagttttgcttgttacc

SEQ ID NO: 177448 - DNA, 350 bp, Homo sapiens
agctcctcgattcaagagaaagagggcaagtacccgcctgagaggcacagtgttccacagttcattgcctcaggtgatttgagaaggctgtgcccaagaagatgcatgggagaagggctaaagctcattaaaggcctcagctgatactctaaacttctgtgtggtctcaccaaggctgccaagtacagctgtgcagggcatgtactgcacaagggtgtctgagcggggctgaactcaccaagccttgactctggctgtgcccaaccagacaggcaccttcttccacttctcataaaggcactctatgggctagaagccacattccacctcagtgaaggaaaccaagggga

SEQ ID NO: 177449 - DNA, 267 bp, Homo sapiens
cgtgtaaaggttaggctttatattttgtttgggtggatgtgtggaaagctcctcaactgtgcatcttgtgaaagattgatattaggcttttgtatagaagactgagaaagcaggctttaccctaaggcatggggctttactcttagggcgtggcccttgtggtgtcaaagctggattcttgaagtggtaacaagatgttaatgatgtccctccactgtggctgcggaggatctccagcattacttagttcttctcaacctttacatt

SEQ ID NO: 177450 - DNA, 237 bp, Homo sapiens
cacagaaaaaaatgggtaacttagtgaagaccacacaattaggaagtagcagccttgggtccaatcaaagaccatctgctttcagattttgtgaccttgaaaagtgtcacaaatatattgcttttcctttgatatcatgtccacatcaagtagttgcaatatttccacccaccccttcacgctagatttctcagaagagctacttgtgttttatgattgcattttctcatattccag

SEQ ID NO: 177451 - DNA, 444 bp, Homo sapiens
cttgataccttatagaagtggtgcctcaaagtcacttggaaactttgttacacacagactgctggaccctactgccagagttttcgatttgatagatctgtggtggggcctcagagtttgcatttccaacaagtttctaggtaatgctgatactcctagtctagaggccgtcctctgagaaccactgccctgtggtatgcctggaagtgtcccatgccagtagagccaaaatggccttgccaagctggaatggaggaatctggggaccctggacttagggatgtcatccagcagggctccaggcatcctgtcactggcaatgggcttaatgtccacaataggcctagaggcccatggctcttcttccagggatgtagcacccttgtttaggacatcatggcccaccatggtctgtccagtcatctctaacccctgccatcctca

SEQ ID NO: 177452 - DNA, 505 bp, Homo sapiens
tcactgggttgcagctttcccttgccaataagccacaggtctgcgggcggccaaaatactacctaggaaaatcattcctatctggtgtgtttgaactttgcagtgataggggaactcgtttcaccagccaggtactggaaagagtttgaaaaatctggcccattctacagcattttcactgtgcctatcacttgcagtcctctgggctagttgagcagattgatgaaatcattaaaagacagctggtctggcaaaagtcacaaaaacttttaattttgtcctggcctaaagccatttcactagtactactgattctgcagtccactcctaccagagaacattgactctctccttttgaaattgttactggttggtccattccctcagaccaaggaatatttcttcgacctcattatagggggaactcctggcttattgccaggggctcataaaagctataaggatcaaccaccacaaggtgggagaatcttcttacagcttccat

SEQ ID NO: 177453 - DNA, 198 bp, Homo sapiens
tacaaaaaaatacaaaagtgagccaggtgtggtggtgtacgtctgcagtcccaataatgggaatctgaggtaggagggtcacctgagcccgaggaggtcagaggctacagtgagctgagatcgtgccactgaactccagcctgggtgacaggatgagacccctcaaaaaaaacaactattgccagtatatatgaaacc

SEQ ID NO: 177454 - DNA, 292 bp, Homo sapiens
gggtccctttcccctatcctcaatctgcgagatacatggcaattctaatcatgacaagcttaaattaatttaatactatcctattatctttgggataaagatcacacgtgcttcctgaggtcagccttcttagcatggccgaaaaggtcctacctgatttggcaccagtatcatctctcaggcactcacaaacccattctccacaattcagtcttttctgctggtcttttcttctgattgtctaatgcatgtgattcttcttgccacaagaccattgcacattccattccag

SEQ ID NO: 177455 - DNA, 264 bp, Homo sapiens
tgtagctaaggaaagccccttcaacaacccaacaaaccattaatgctgctaaactaaatgagacacatctccatttttccacatctcccagtatagagagagaataagccagacccaaaaatatgtatggttaaaaaacaaataaataaaataaggcccaagaactggtatactgctttgccaaacacattagttaacaggggccatatcagcactctgagtgtcatggctggcacatgaggtttattgttaaaaacagaaaca

SEQ ID NO: 177456 - DNA, 579 bp, Homo sapiens
ccactggcaaaaatggaaaagttaaagattagggaggttactgagggaagaccaacatctaaatcaaccgctcaggcttgttccctaacggaagatttacaagtctcttaggatgagtaccgcctaccaaagaatgaccctctggtaagggagactctccttgtttagccgaagcttctaacaccagatgagcatagctgtcaggccattctcaagcacatgcttcaagattcattcttcagatttcagttcctgctatggcatgatgttcctttgagccggtttgcctcttagcacagagtaactatgatgagcctgaacccagtataacgtaacattcctaaaggccaagtgttgtaaactggacctgctcagaaagagaatgctgactataaaaacttagtcatcttcaaatatataggccattgtgcagaagaacttaggtggtatatatacagatacagaaataaataatggtaaatcatattttgggaaaaattatttcctttctaattctctatcaaaccttctgattttgaatctcagatctcagctggatgtggtggtgcatgcctgtcg

SEQ ID NO: 177457 - DNA, 207 bp, Homo sapiens
tgggcatgaccattaatgcttccttctgcttctcaacttgcttcccagcccacacaggatcaccaaattgtacaagttaggaagcattcacattatgttccagggatgccattcacgcagaccacaatgtaaagggtgctccttggagttaagccctgaatgtgggggccctgaatctactgccaaatcttgcccattctacttccc

SEQ ID NO: 177458 - DNA, 538 bp, Homo sapiens
ctccccctttccctcctctcgtttctttttcctcctacactttctccttcttcttatctgtctttttagagatggagtctctctctgctgcccagactagagcgcagtggcgtaatctagctcacttcagcctcaaatctcctggactcaagtgatcttcttacctcagcctgctgaatagctaggactacaggtatgcaccaccatgtccccttttgttttacacttttttgtagaaatgaggtctcactatgttgcccaagctggtctcaggcttctaacctcaagtgatcttcctctatggccttgcaaagcactcggattacaggtgtgagcactgcactttggcctgttgggttatgcagtaggagagcagggatggtggtagtggctccatatggattcctgcaaaaagtggtgtgggtgaatactggatgccccgttatgttggaacttctaaattcctgagctaaattagaaaaaaagaagcagctcttgaaaggaatgatgttgtgaaggagagatgcttggagaaacc

SEQ ID NO: 177459 - DNA, 521 bp, Homo sapiens
tcacatggttagtgggtaaaacagatattaagcaaattatcacaccatagaattgcaaactgtgacaaatactgtgaaggaaaaggaatgatactgtaagaacttacaaggacacatgatgtagtggggggtataggactggatatttgagtttaggtttaaatggttatcacaaaactgtgggccttgggaatccgaatgacttctggtgctcacttcagtggcaacagcaacatagtattttatgtttctactgaagttgaaacaatttcattgtcccttcgatttcatttgctttaacaaatcatggctgactgccaacatcatatgcagaccattactatttgaaaaatggatggtatacaggcacaaatctaaaaacagacacatgggttgggtgtgatggctcaggcctgtaatcccaaccctttgagaggctgaggtgggtggatcacttgagaccaggagttcaggaccagcctggccaacatggtgaaaccccgtctctactaaaaatacaa

SEQ ID NO: 177460 - DNA, 215 bp, Homo sapiens
ccagcctgggcaacaagagtgaaactccatctcagaaaataaaaataaaaataaataaaagtacatgaaaaaagtatattcccttaagcaggtaaaatacttgcattgtatttttacatcatgaatttgcttgttaagaaatttcttttctgtaagtggttaaaagataaactgtattccatcctctgggttttcaattctaaattattggagct

SEQ ID NO: 177461 - DNA, 506 bp, Homo sapiens
tattagccagccaactggaggagataaagctacaaatcaagaaacagaaagagttagaaaatggagaggtagaaggggaagatgctttcctgtccagcaaaggcagacatgagaggactaagtttagaggccacggaagtgaagcttctgtgtccaagcacacagcgcgggaactgtctcctcagcataagcgggaacgactccggaacagggagtttgctctcaacaatgaaaactattctctgagcaacaggcaggtttcttctcccagtttcaccaacaggagggcagcaaaagcttctcacatgggggtgagtacagacagtgggactcaggagacaaagaaaactgaagaccggtttgtacccggctcctcccagagcgaagggaagaagtctagggagcagccctcagtgctgagtcgctaccccccggctgctcaggagcacagtaaagcgtggaaggggacttccaagccaggcaccgagagcggactgaagggaaaa

SEQ ID NO: 177462 - DNA, 537 bp, Homo sapiens
gtattcctacactacaagaaatctttaagaggtttttttataccgaaggaatatattagatggaaacataaatcttcacaaacaaatcaagagtgctaaaaagaaataaattatctgatctaaaatattactagaagtaaaatattgtgcagaagtagctatagtaatatcagacaaagtaaacttcagaacaaagaatgttgtcagaaattgagatattacacaataataaagaggtcaattctccaattagatataaaaagtataaatgtgcatgtacttaacagagcttaaaatatattagacaaactgtgacactactgaaaaaataaaatgacaaatacacaattataatgggaaactttaacacttctctcttagtaactgcaggaaaatgtaggcagaaaattagtgatgacataaattacttaaacagcactactattcaccttgacttaactgatacgtatttttaaaactacatccaatgcacgtttttcagcagcacatggaatgttcatagagatcaaccatgct

SEQ ID NO: 177463 - DNA, 345 bp, Homo sapiens
gccaaggagaggtgtcaaagctttgtcttccaaccccactatggcttggtacaacctgctcttacactaagtgagacaaagggatgacagtgtgctttttgtctctaggaggctttactttctttctacccatcatcctctcttttccattcccagagagtactgggcacaaacaggtataatagctcccaccagtcaaaagtggctgaacttggcattgcaggattggtgtttgccaagaggctctgagtccctgtacaaacacttgaactaggtctgggtctgttattaagtaacccaaggttgatctgatttccccacagaaaagaacatttataatcaaat

SEQ ID NO: 177464 - DNA, 253 bp, Homo sapiens
tttgattgaacaacatattaaaattacttacttccactaagataataagaaagcctgttcaaatatatggtgcatatatttattcctttataacgtatcttaaatccttccttttgctttccatccctagtgacaacagtcttgggtatacatgtttttttttttttatttgatgcatgaattacaaaatttgttttctaactagctttcatttctctagtcctactcccttttactaattgtatatacatca

SEQ ID NO: 177465 - DNA, 671 bp, Homo sapiens
gcagcctgacatggtgacaagaatgtcagacagatgaaagggacacagcctgatttaaaaccaaacactgaacctttttaaagaagaataagacattttatacacacacatgacaccaaaagcacaaacaaccaaaggaaaaatagatacattagattttatcaaaattaaaaacttttgtgcatcaaaggacactggcaagaaagtcacagaactcacaggatgagagaaaatattggcaaattatctgttaaggtctaatatccagagtatccagaagatatagagaaattcctataattcaataaaaagacaaatcaattttttaaatgggcagaggatgtgaataaatatttcttcaaagaagatatataaatggctcatatacacataaaaatgttgaatgtcttaaatcattagggaaatgtccatcaaaaactgcagcgagatactactttacactcactgggatggctatgagaagagacagacaacgacagtgttgacaaagacccggagaaattgaaaccctcaaacattgcagatggaagtgtaaaatggagcagccactgtggaaatcagcctgacaggtcctcaaaaagttaaacataagagttgccatacgatctagcaattctgctagggatgcaccctagaattaaaaacatgtc

SEQ ID NO: 177466 - DNA, 288 bp, Homo sapiens
ttgtgacggagttttgctctcgttgcccaggctggagtgtagtggtgcgatctcggctcactgcaacctctgcctcccaggttcaagcgattttcctgcctcagcctcccaagtagctgggattacaggtgtgagccactgtgcccagccctaagaatgttttaaaatgctcttttaaaaaaattcaaggcaaaccactcaaatacttttggagaaaagattaaatatcataggaattatacaacgtgatttaaactttcagagattgaaggaaagaagattaagctt

SEQ ID NO: 177467 - DNA, 438 bp, Homo sapiens
ggctgaggctgaattaacaccctctgtattggtttgccaccttcagggtacatcccaaaattctgttaggctggtatttgttgtattttttccatctatacttgggccagaaagtatcttagagttcctattagcataagagcaatcatcgtggctcactctgtatttgaataaaaaagagcacaaactataggacgggcgcagtggctcatctatctacgcatctatccaatctatgtacctatctaacctatctatgtgtttctctattatgtagttattttcagaaagggtctcattctgtcaccaaggctggaatgcagtggtgcaatattggctcactgcagcctctgcctcccaggctcaactcaagcgatcctcccacctcaacctctccagtagctgggactaccaggctcctgccaccacagctgacta

SEQ ID NO: 177468 - DNA, 114 bp, Homo sapiens
tgcttttcaactggatctttctcttcttcaggtcctcaagtcaggcctacaacaatttgtttcctaactactcttcctgtttatttttaatctcccttactgcaccaactatct

SEQ ID NO: 177469 - DNA, 467 bp, Homo sapiens
gatttgggggataaagaacacttgtgctgattgctggaacttcccatcaatcagccaagaatgctctgccagtgggtgagagtctgtgaggcaggagagcttgggggcttcccctgtatggtaataggtgtatgaggaggaaatggtgggggcatccaggccatgtggagcaaagagaataatgtcataggtggtattgtcagagggaagggaaaatcctggtctgtggaagggccacagtgaccctgtgagccaagttgcaacactgaagtcccagccaaatccctgctgtgttcactgatctggagcctgagacagtcacctgttttgcccatcacaagctgtggacgctgagtctcccatgacaggagcagcctcttttctcctattgttgatcaagcctaggcctactctggtttgcctggggcagaaagtcatggccaggtttgatgtccaggggtaaaggt

SEQ ID NO: 177470 - DNA, 223 bp, Homo sapiens
atgttgcccaaatgttgttagccgcctgcacctgtttctcttccaaatagccatgaggggtgggagaaggctttgaaaaggatgtaggtcttatcgggatattatttctttttctctctattaatgaaacctctgaacctagggtgaactgtaaaatctttactattacagacccttaagtgtatgatgtacttttggtacttaaacaacttttttagttcta

SEQ ID NO: 177471 - DNA, 470 bp, Homo sapiens
tttttttatagggacggggtctcgttatgtgcccaggctggtcttgaactcctggcctcaagtgctcctcctgcctttaagtgctgagattacaggcatgagccaccagacctgaccttggggttttattatttgccttcgagccccttcagacagttcttcttggaggtttggggaaggcttctgtaaagaaaacttccttatacctgtttgatgatggtaaaaggtccaggtggagaaagacttcctaggcagaaggaaaaggaagtgcaaagctatgtagcctctacaagagcacatgtgtagtttagggtggctgcataggacctgggaagagagctgggtgatgcagggcagatgactggcaggtaatgaaggtacttatgggctatgctaaggagtatggaaaatggggagtattcaaaatttagagcccagggtacagtgatgggattgcattttttgacaaa

SEQ ID NO: 177472 - DNA, 457 bp, Homo sapiens
actttctcatgctctggagctggcctattcaatacagtagccactagccgcatgtggctatttaaattaaaattaattacaattaaattaaaatttcagtttcccagttgcactagctacatttcaggtactcagtagctgcatatagctaatgttcaccgtattgggcagctctcatatagaaatttgatctgattattcagcttcaaagtttgaatattttattcttttttccatcttgacagtctttctcttttttagccttcaaaagcctatgaaatttattctgtatccttagggaagcccaacctgtttataaaacattttgagaatgcttagcttctaagagttaaattaaggtgtgagatttagtagaaatcgtgtgtgttacaagagtaaagggaaaattttcattgatttgtgttgagattgtgctaaaggacgagctcctaaagat

SEQ ID NO: 177473 - DNA, 469 bp, Homo sapiens
tgacctcctgggctcaagtgatcctcccatcccagcctcctgagtagctgggactacaggtgtgtgccaccacgcctggctaatttttaatttttttgtagagacaaggtcccattatgctgccgttttgtaccactttaatataaagctaaaaatcttccttatcttttaaacttttagccacttagtaatttcattttttaaaagtctatttgatttgttaagtctctattaaaaatgatgcaatgtgctttgctgtgtagcacagcagacagaacacaagcgttagtgttggacaggcctgggcttggattctcgcactgtggatcactaactgtgaatctcagtgagttacttaatgtttcactttccacatctgtccaatggagagttcataaggttttccttattgggattacatgaggtaatgcttgtaaaggcctcagcaccaggctcagctcttgttatt

SEQ ID NO: 177474 - DNA, 224 bp, Homo sapiens
cagcatgggaaaggccctgctaaatttcaccccagcacttttaggagtggaggaaaagcagagtttggattaccatgacatgagaagggaaggtgaggttgggagtggaaacttggattctggaaaatttcatgaagcttggctgtgaaggaagggagattggatcgcaaggtctagagaagtatttatggttgtcatttgtttttgtttttgttttaaacact

SEQ ID NO: 177475 - DNA, 817 bp, Homo sapiens
tgaattgacaaattgatctgtaaatttaggtttccatgtagccagtgatccccaaatgcactaacatgccaatcatatgaaggggtaggggtggggggccaaggtgggagaactttcatctacatccaagtgagctgtcagagctgtttcatcccagaggctgcacggggctgaagaaagcaagcgtggatctgtggagtaaagagcaacctgggtgcaggtggcagctggactaggcatttctttagaggaatgactcaatggaatctgtcccagccagcagggatggagaggtcagcccaggggactctgttgactgaattctaagaaatgctcttctctgcacctgtgggatacagagtcgacaaagaaccagtgaacagtcatcaggagagcccatgaacttggctttctgatgttataataactgataaatgtttctgtggcacaccaagaattccacagtgataattagaagcttgctgggtaatgtgaatcacgcatgactggctattacgaacttggtgtgggtgctaagaggcaagagaagggttgcagaagccacttggatccagctccgagatacatactgtgagtgcctttccacccagggctttggtgtgattgtgaaacttctgtgaggttgttgcaattgtctttctccccacttcctcctaggccagctattttcatagaggactgttactgcactccccatgagaggagatggtaaatatagaattttagcaacacaatttcagggggtgcacgatgaacactccacgcctgcaaatcttccttgaagagactcaaaaat

SEQ ID NO: 177476 - DNA, 728 bp, Homo sapiens
aggaggtgaaggttgcagtgagccgagatcgcaccactgtactcaaaccgaggcaacagagggagacgcaatctcaaaaaaaagaaaaaaagacaaagcttgttaataccagcatattgttaagggaataaagtaggctgcagaacaactggtgtaatatggtgccatgtagggaaaattacatgtgtgcataggagaggggtctgcaaggttgtgccctaagatgttagagtggttcctttgcttttctcttttataattttgtatttgacttttaaataaggaccataaatcacttttataaaatacattctctccagcccctactactcctttaaagaataagagtggtttgcccaagaaagacagttttttttgctctggttttcttgattctgacatcagaggaaactccttctcatccacttggggctctgggttcaggggattcatttcaggcagattaaagtggtgaccaggggcattcgtggacacagggagggacaggagcaccatcagtttgtctcacacaaccactgtcatcctcactgaaggctgttgcctgatcaaaaacagtattgggccaggcacggtggctcacacctgtaataccaccactttgggaggctgaggtgagtggatcacttgaggtcaggagttcgagatcaacctggccaacatggtgaaaccttgtctctactaaaagttcaaaaattagccaggcgtgg

SEQ ID NO: 177477 - DNA, 490 bp, Homo sapiens
taatattccccataataaatccatttctacccctgcctgatacactcaccgaacctctctcatcttcccctccgaaaatctctatcacgacttagttccaaacagaagggaacagccacaccaggaatgtgaacaggaaaaacattaacatagcgaatcgttacctagtaagatgacgttaacagcggaagtcaagaaaagaggacacaaagggattcagaagcagcaaatgcagaaagatgccgcgatggctgggcttcaggagcaaggaaggggccgggaatgcacagagctgccaggggtgcgtggcccagccaacctggtgcatcaaattaactgtcgcatgcggttaatacctaagaacccttttattcttttcctgttttagaatttttttgacaattgaacacatttttgcatatgaactttaaatttgtgttttcctatttttaacattggaaatcttactggaattaaatatttatattca

SEQ ID NO: 177478 - DNA, 472 bp, Homo sapiens
agctccaatcacactaacccatgccattacctggacacactgtgctagtctacactcacgtgcccccagctcacatctccccttttcctggaatgccatgtccatatggcctggagaatgacctaaagttagtgccagcagagagcttatcagtagtggggcagatcacaggggagagcaggttttggagctagggtgaggtgtcaatgagaagaagggtgatttattaagaagtaagctcatttcaagccatacacctgaaacctgacgcccaaagaggaggcagagacccaatcaactactgatacagtttgtgaggctggagacttgagagaacaataggttgaggcaagtgtaaccaatggattaattccttaccaatctaggattcctggagcgtggagtgctccaggcctggtggcaccaagactttaaaaagaaaaaccattacacagtgagatttggtctctac

SEQ ID NO: 177479 - DNA, 554 bp, Homo sapiens
gctgcatagctttaggtgggcttcctcaagtgttcccacagctttcttctttgtggattccctccacagtttaccatggagaccagaatcctcttccctggggatgccccagcctttcctcctgggaaagtaagcatgcttactgctattggtccagcctcatcttcccaggctgtattgacttggcacagtgtcaccgatggggctgcgtcctctataagcccccacaaacacacatccatcccatctggggagagaaagcggttttatctacttttccacttggcttcaaagaatctagaaaatcagatattttgtatcaagtgacaggcaacaagcagaaatctgaaacccactaaaaagtccttcttttgatgaaaaatttcttccgtatgtttggaaaccaagctgctttcatattaattgaatatactgaacacacacaaaaacaaatgtcttaagatctttcttttacaatgctgggttcaaaagttttggattccaaaatgtttctgacaaggctttaactgtttttcaggcatgttgtgtgcttc

SEQ ID NO: 177480 - DNA, 419 bp, Homo sapiens
gccagcaagtggcagaactcataacttgaacccaagtccgttgaccccaaggcatagttcttccccatttcaagcctctcattattacagggtatttagactatctttttggactgtactcacttatgacaggctggaaatgtccatgactgaacttgacactctttttagtctctaactaaacataaactgaaacctgggcttaaggatggttgaatggtttctcctctctaatttccttcaaggtctccagacttctcactaggtaatcattggactgtccaaatcatctgaaacggaagtccttcaagggacaatcagctgacagtacagctctttgcaggttgccttcctcgtgttcagctagctcattgactaagcatctacttgtgttgtcaaactctttcaaacatttctca

SEQ ID NO: 177481 - DNA, 384 bp, Homo sapiens
tggtgaacaatgggataagattaagacagttttgtctggcttagaagtgagaaagtggttggagaggaggctagagaggcaattatggaggactttaaatatcgggctgggatgactgaaccctggctctcttcttattgcagctctgtagtgccaagtgcttgaacatttccaccggagcatgtcacagcaaacagaactgaaattactaaaagtgaatccgtatctttcctcccaaaatcaatgcctccttttattttttattttattttattttatttttttatttttttgagacggagtctcactctatcacccaggcttcagtgcagtggcacgatctcggctcacagcgacctccgcctccccggttcaagtgattct

SEQ ID NO: 177482 - DNA, 531 bp, Homo sapiens
tctcagctcactgcagactctacctcctgggttcaagcgactttcctgcctcagccacccaagtagcagggactactaggtgcacatcaccaagcccatgctaattcttgtatttttagtagagatgtgggtgtgtctaccatgttggccaggctgtgctcgaactgcctgtgctcaagtgatgccgcccacctcggcctcccaaagtgctaggatacaggcataagccaccgcaccgtgccagagagtagttttttaccactgtttattctctgattccacctttctgtttaccacaatcataatcagcacatctctgcactttatacagctgtatactaacttacctcgggttcttgttaaagtgtagattcagttcagggggtctggtgtggagcccgagattctgcattcctaataagcccccacaggatgccagcaccgctgattcagtttgcacacattggatggcagggatctatgctgcccaccatagcagccactcaccacatgtggctgctgcaatttaaa

SEQ ID NO: 177483 - DNA, 381 bp, Homo sapiens
ctaagctggtcaaggtacacctgtaaaataacagctttagaacaggagtgagggcagtggtgggtatggttctgcctggggactccagtcagtgatacggttgttcacttccatcgggccagagtccccatgcgctgcctcctccagagctcccagccttctctcagtgcgaacagttgggcatttaaggaaccagattgcctctcgcctttccccaccctgctcagcgtccggccgtgggctccagtactgtgatggtgttggatccaggcctgtgggcggccacagagtgcctgcctcttggctgccctccctcagaggccttctttttctatcacagcctttgatggtgtcttttgtagggaaaaaccccaagcaaag

SEQ ID NO: 177484 - DNA, 236 bp, Homo sapiens
tgcttttagaggcactttaaggcgacgagttatacgttagtttcctgaaatcagtagcctttgtagaaacaagtcatcgttcacttggtggggattcgacagagtttcccttgaggatttcgagttgcaggaagtgttcacgttgttgggacattaatcgctaggatttggttcttcgcaccttcgcagagccgattccttatctggcaaagtgtaaatgcttctttggctgtcgg

SEQ ID NO: 177485 - DNA, 594 bp, Homo sapiens
aagccactgtgcctggccctaatcaggtattaaagaatcttagctccatattggagtacctttgagctccttcctttctctaggatcttgcctgtagttgcctcagttctccaagtcttcagcaaccataaacctctagacctggagtctctgctcatgtcaagagaggatatctcaaaatttagcttgatttctagttccgtctggttatgaaattaggctatagaatggcacaatgaagatgatttgacttgaatggaggcttgcatgcatccttggaatgttcactgtgacctctgttttaatgagtaaagcttgaaacctaagctctatgtaataatatatgtcaatatgtaacctgtagacctttaaaatacaaatggaaacacacttaaaggaaaacaatctctcgaataaagacaataacattagcaaaatgacatcttggaatctgtcaaatctttgaaaatgcttatggtcatctaagtcatttcgagggaactttgtgcattttactgctgagttgctggatttcagtgtgactatcctttttctttttcttttctttttttcttttttttttttttttttttt

SEQ ID NO: 177486 - DNA, 564 bp, Homo sapiens
agccaacgcacccggccaggagtggcttttagaagtggaactagcctcggagaagagaggcgagaagaagtttgtctgacaggcgttaggacccaggaggcaagggtcaggatagataggatagaagggcaagtctcacttgggcgatgtgactttgagagttccactcatggccacaaggtcaaccaacttgttgttgggaccccgaagctgaatggctttcctctctggtgaccctcggctcagcccagaagtacaggagatgtggaacctggttccaggcaaaccaacgcttccaactccaaagagttgggggttgttagagagccctttcccagaaagcctgacactcatgtctttagtctggcagctgcactagtcactttcaactggctgacaggtgcccagtatttagcccccaaattctaaggaaaagtaggacagaatagcaagtgaaagggatccgatggtactccccacttggcgatagctgattgccccatctgggtcaccaaagtgtgtccagaattggttccttccagtgggttcttggtctcgctgact

SEQ ID NO: 177487 - DNA, 150 bp, Homo sapiens
cccgtgtgaacagctggaagaaggagctgtaaaccagagggaccattctctctctactcactgaaagtgcactgcagaagagccagtggggtagagaagacacatgggggagtgatgaatattttatttggagaactgaggatctcttac

SEQ ID NO: 177488 - DNA, 658 bp, Homo sapiens
  misc_feature (658)..(658): n is a, c, g, or t
aggcacagtcagagggaacgcccgcgcggggagccaggggcgcccgaccccgccgccgccgcagcggcgcgcagcccccgacgcgccctgtggggacccggaccaggagggaccctgccccgggaaaaggctgtggagacctgggctccgaccccgagttcatcccctcgctactagctcctcgacgccccgatgtcctaacgcatggtcactgcgcatggggaaacccatagtcacatgcgcacatcgtcgtcagcccgggcacgtgccgcgagtatcagcgtggcatgcgagcgtgatccatgcgtgtgaggagttgtctgcctggctggatgggtgtcaaatcgactcagccaagagggaccctagcgtcaataccctgtgagcatccccggagggactggttgattattgccggaattcccaaggaggtctccatcagagggcattgcccgttgaaggccatacttgtgtgaggacttttgaccacgttgcctagagcaaacagcgtttcggacgagagaggagtaattggtcagcgccgtgggcccttggtgcgcgctcagtcgctggcgaatgtcaacatttagctttgtttcccctatgggaagtgactcggcgactggggagcccgtgcaacggtggtcttgtgttgccn

SEQ ID NO: 177489 - DNA, 2211 bp, Homo sapiens
aggcacagtcagagggaacgcccgcgcggggagccaggggcgcccgaccccgccgccgccgcagcggcgcgcagcccccgacgcgccctgtggggacccggaccaggagggaccctgccccgggaaaaggctgtggagacctgggctccgaccccagttcatccccccacacccccgccgccccgtgccaccctggtccgcgctgggaaccctatcctgcccctcgtgtcagcccggcactggccagaatcgcgggcatggcggtgaccatgctgcaggactggtgccggtggatgggggtcaacgctcgcaggggcctgctcatcctgggcatcccggaggactgtgatgatgccgaattccaagagtccctcgaggctgccctgaggcctatgggacactttacagtgctaggcaaagcgtttcgagaggaggataatgccaccgcggccctggtcgagctcgaccgggaagtcaactatgctttggtccccagggaaatccccggcactgggggcccgtggaacgtggtctttgtgccccgttgctcaggcgaggagtttctcggtctcggtcgcgtgttccacttcccggagcaagaggggcagatggtggagagcgtggccggcgccctgggtgtggggctgcgcagggtgtgctggctgcgatccatcggtcaggcggtccagccctgggtggaggccgtgaggtgccagagcctgggcgtgttttccgggagggaccagccagccccaggggaggagtcctttgaggtctggctagaccacaccaccgaaatgctgcatgtgtggcagggggtctcggaaagggagaggaggaggaggctgctggaaggcttgcgtgggaccgccctgcagctcgtgcacgcgctcctggcggagaaccccgccaggacggcgcaggactgtctggcggccctggcccaggtgtttggagacaacgagtcccaggcgaccatccgggtgaagtgtctgaccgctcagcagcagtcaggcgagcgtctctcagctttcgtgttgcggctggaagtgctgctgcagaaggccatggagaaggaggccctggccagagcatccgccgaccgcgtgcgcctgaggcagatgctcaccagggcccaccttactgagcctctggatgaagcactgaggaagctgagaatggccgggaggtctccaagtttcttggagatgctggggctcgttcgggagtctgaggcatgggaggccagtctagccaggagcgtgagagcccagacacaggaaggggccggtgcccgggctggtgcccaggctgttgccagagccagcactaaagtagaggcggtcccaggaggtcctggtcgggagccagagggcctcctccaggcaggaggccaggaggctgaggagctcctccaggaggggctcaagcccgtcctggaggaatgtgataactaggttggggctggggaggcagcccagcgcgagtcctccccgggcaaataggctccgagggccccggggcctcctctcctcctctcaggcagcagggccctggagacaggcggaggcggggccagggccggtccctcaccccacatcgggatcggggccccccacttccccccaaggggccctgcccaccaccaccttcccggtgacccagatgaccacatttaataccaaatggggtggggggaggcgcccctccagtgccaggggcacgtgctgtgagcttcctgggagcccaggttgtgctcactgctctcccgtatcgtgagcaccacctctgctttccctgcgtagatctaggccaggggctgcttgtttttgtggagccgtgtgtgttcttctctgagcagctcctccccagaggaccccagcgcagtcccgggagatggcggaaagaaggcaccagggcacagtggacactcatcccgtgacagcgatggtgaccatgactgtgggagaaagaacaggacccgggatggagtggggctgtctgagtttccccagtgaactttgtgctttggcgttccacccctgttgttacttgttactgagtttcctagacctggggtgggtgttcccccaggaggaggggggtcccgacctgtgtcctgtggtggccatttgcagcttctgtgttgtgattcccttctcttcaacggtttcagtacatatctctcttcaataaatttcattcagtgtt

SEQ ID NO: 177490 - DNA, 510 bp, Homo sapiens
attagaagttaatttggcaaagggagttgcctgggcagagggacacaggtgttgagagtggtatattgaggactcacagttacttcattgtggccaagccgcatttaacaaagtaaagatgagattgaacaggggggaaggggcgatgagatcatggaagacactggatactatgtttaggaatagagggtttctcccataggagatgaaggattcaaagttccttcatgacatgctcagactgttctagaagcttgctttcagaggtgagagcagattaccatttgtgctgcctgccagcaagtttcctataagctgcacaaattccctgttccaatgcaaagagctgctttatatattataatcttaagaccagaggcattttgggtagaatagtataggattaaattcatgaaatcttagcctttaagcagcaataagatttagtagcttactttttattcctcaaggaattgattgttaatatatggtatctcggtgataaagata

SEQ ID NO: 177491 - DNA, 310 bp, Homo sapiens
cccgttacccacacctgttatcctgaaagctttcaaataattctgggattaccaggagatctctgacatgtttcttggattatacactctgtctctcagcatagcataatatttaggagaatagattttgagcttgagttctggctctaaacttattgtgtgtgcttatgagcaagggcgtgaaagccataagattcattaaattaatatatgtaaatttgtggaaagtgtgcgacacatagaaagcaccatacatgttttatattgtcatccttagtcacaactgctggtacccattgttcggggcctg

SEQ ID NO: 177492 - DNA, 351 bp, Homo sapiens
acgttgacacttcaggctcccaaagtgctgagattacgggcgtgcgccactgcacccagccatgtctttttaaattcatgaattccttcccagtcacatttttaaaattcctgtttttggtttgcttgtctactaagagtctctcaccatctggattttgctgattgcatccttgacatgccatttaatgtgttattttctcctctatattttctgtaaattggtaattgaatctacaggcttgatcagattcaggcttgcttgtttgcttgcttcctttttttctgtcttttttttttttttagtaggccactgtccaaattaagtaggggtctttaatcaggagacata

SEQ ID NO: 177493 - DNA, 457 bp, Homo sapiens
atgcagggatgagacggtagatttataaaagatatgcagtaaaagagtaacatcggaagatacacaaatccaaacagacaaaaagtggactggtggttaccggggcaggcgaggggaatgggaagtgactgctaatgggtatgagttccttttttagggtgatgaaaatgttctggaattacagtggtgacaggtgcacaactttgtgaatacactaactgaactgaataaaacagtgacttctggccaggcatggtggctcacgcctgtaatcccagcactttgggaggctcaggcaggaggatggcttggggccaggagtttgagaccagcctgagcaacacagccagaccctgtctctattaaataaataaataagccaggtgtgtggctgggcgtggtggctcacgccggtaatcccagcactttgggaggccgaggcgggcggatcatgatg

SEQ ID NO: 177494 - DNA, 408 bp, Homo sapiens
atgcagggatgagacggtagatttataaaagatatgcagtaaaagagtaacatcggaagatacacaaatccaaacagacaaaaagtggactggtggttaccggggcaggcgaggggaatgggaagtgactgctaatgggtatgagttccttttttagggtgatgaaaatgttctggaattacagtggtgacaggtgcacaactttgtgaatacactaactgaactgaataaaacagtgacttctggccaggcatggtggctcacgcctgtaatcccagcactttgggattacaggtgtgagccactgtgcccggccattcaattttttttttttttttttttacgaaaggaatcatgttagaaacaaccttggttgaactgtaggagactcgttaaatcaaccgtggg

SEQ ID NO: 177495 - DNA, 532 bp, Homo sapiens
gtcctacaaacctccaaatgtctaaaatagacaaatcctgagataattcttatttaaaaaggattcaccatagaattattttaaataggctatatcttatgtatttcacctatttatttatagataattatctcctttatagagacaggagagaccaaaaaaaaccaacaacaaaaaaaacctaaaatgcaaagcagtaacactgaatgctgctcaaaaacactgaaggaaaagcttcaaaaaccttaattgtttaatggaaaataaagttcaatttatatttgattttaaaactaattttcaaattcgcaggtaaaattaaagtaactgtttaatgggaaatgatttaaaatgttagattttaaaattagttaattaacagaaaataagttttgatttatacttgatttaaaactaaaatcaagataaactaaaatcaacgattttaaaatatctttctggataatggagatgaacaaaacctttatctttgttttatttgatttatttatttttttgagacagagtcttg

SEQ ID NO: 177496 - DNA, 364 bp, Homo sapiens
atgttcacgtctccaggtttctccccgggggtgtgtggtgccagttcagaatctagcacacagtagacttcctaatccaaattttcctgaattaatgtctaatttttcctaatgtggcttgttttttgctatgaccaattcctgcttatatttcaacgtcaaaccttaaagtcacccttttgtgacttttcttgtttattattttttaaagcagaattaaatttttgtatgtgtgttttatacactctcatgcaagtgcataagctgcttcactagttatcatgtcctctctgtcttttctgctattattaaaggtaggtaatatattttagtctcattgcatcattagtacttagtatactct

SEQ ID NO: 177497 - DNA, 162 bp, Homo sapiens
aattaggctgtgatgcactagtccctcccccacgtgctccccagatttatttcattttattttatatttttttgagacagggtcttgctctgctgcccagcccggagggcagtggtgtgatcatagctcactgcagcctcgaactgctgggctcaagctatg

SEQ ID NO: 177498 - DNA, 597 bp, Homo sapiens
  misc_feature (2)..(2): n is a, c, g, or t
cntgctttcgggaggcgacagtgctacgacagaaatcgggaaaaactagccaaaatgtacaagaccggtctgtttcctgcactccagcctgggctacacagggagactccgcctcaaaaaaaaaagaaaagaaaatggattcaaagacttaaatctaagacctaaactactagacgaaattggggaaatgctgtaggacatttgtctgagtggtatgacactgtataatacctcaaaagcacagtcagccaaagcaaaaatggacaaacaggatttcatcaagttaaaaagctttacagcaaaggaaacagtcaacagagtgaagagacaaccaacagaataggagaaaatatttgcaaactatccattcatcaaggttttaataaccagaatgtataaaggcctcaactcaataacaaaaaaccaaataacccaatttaaaaatgggcaagtgatctgaatagacattgctcaaaaaaagacatacaaatggccagcagatatatgaaaaaatgctcaacatcactaatcataatcgaaatatcaaaaccacaatgaaatattatctcccagttaaaatggctattataaaaaaga

SEQ ID NO: 177499 - DNA, 471 bp, Homo sapiens
tctgtgcccagataactcaatttactcccacataacctgtggagtccttaatagctgcaggattgtgtttttctttgtagtaatggatgccattattttggggaatgaaagaaaacactcacactagtaagaagggaaaggaataaaggactgtagaaccttgggaaggaggacaatggccatgcagatgagcgcatcatctgtgcttggacatccccaggagagggagatgactacttcctgtgggagctcattcctcttggacagcctttttaaatttttatttgcaaatacaaattttcttaagttgatacaaagtttttcttcctgtcactcctacctattgtttctaaatttgctctgtgaaaccacaatgaaaggaaattctcccccttccatgggacagaccttcatggggtcttacagattgccctccagtgatctcatcactttattccccagcactctgag

SEQ ID NO: 177500 - DNA, 554 bp, Homo sapiens
gtttgcacaatcttcagttctgcagtaatcttttcttttttttcttttcttttctttctttctttctttttctttcttcctctttttcttccttcctttctttctttccttctttctttctctctctccttttctttctttcttctttctctctcctctctttcctctttcttttttttctctctctttctcttcttttgtttttcttttgagatggaatttcactcttgtggcccaggctggaaatgaaggtgtgtaatttttcggcccagtgctgccctgtcaaaatcaccatggttagggagaaggacagaacggatattggatggatgctagcaggttctgcccattcatcatcttttataaactgtgggcctttctaatgttagttacaatgaaccggtcacaacagccccatgctgttgtgaagcacttcttagttctttattcccaggcaatacaaatccacagtgaaaaaaaaaatttaaattagaaaatacaccttagaaagaaagatttaaaaatacctataatccattacgcagagagtacca

SEQ ID NO: 177501 - DNA, 517 bp, Homo sapiens
gagaaggacatgagttttggggagctaggggcagaatggtatggtttgggtgtggttcatccctgcaaaaactcaaggtgaaatttgatccccaatgtagcagtgttgggaggtggggcttagtgggagatgtttgggtcatgggagtagatccctcatgaacagattaatgccctcccaaagggttgagttctcactctcataggaatagattatttcttgtgagaacgggttgttaaagagcctggtttctctcttgcttcctcttttgccatgtgatctctttgcacatggcccctccccttccacttcccaccataagttgaagcagtatgatgccctcattagatgcagctgcccaatcctggattttccagccaccagaattgtgagcgaaacaaacttttctttataaattacccagtctcaggtattctgttctagcaacacaaactggactgagacactcccatagttttgttttttgagcaatttccttactttctggttctacaag

SEQ ID NO: 177502 - DNA, 598 bp, Homo sapiens
acgttgacacttcagcattctcactatagttctataactaggaatgattataactcttactgggtcattttgcaaatgaagaatttggaaattgaagttaattacttaaactcacacatgtactaagtggggcagaattgggttgttaaccaggttccctgactctctgcttcctaatcataaaacatatgagaatgaactatcttactgccctttatttgctcagtttttaaagaaataggaacctggaggattttaagtgcctagcatctatttagagagtaacaactactgtttaataacatttcaccccagaatgtgcctgtggctcacaatctagagaggaaaagatggcccatgttggggaggacacacccataatcaacacaaaagaaaaacctctcctgcttgttgccaaggcagccaagcattattgttcagattattcattagccaaaggggtaagggaagagaatgaaacccagtctacatttggctcaccaagataagtgtcctggcaagggacacatatactcacagaaaagggcactcttttctaatttacacaagcaccatagagactagaagtggtgcatgt

SEQ ID NO: 177503 - DNA, 763 bp, Homo sapiens
  misc_feature (489)..(489): n is a, c, g, or t
caatcccattcctatgctaggcttaaccaccattattagtataattattcatactttacagagccaatcacatagttacatatgtattgtcatctcttctcattaacctttttttaatccatttccaataatcacctctcctaggaagataattttttaatgatagtagaggaatagacgaaagagatctaaatgaaagaaaagcaaaaatacagaaaataaggaattacaccaagtataggatatttcataaaattctaattttataatcctataggattgtgagagtaaagcaaatgccagcctatatactataaattttcccacaaaatactattttctccaaattaagagagagagagataaaagtaattttaatatgactagatattgggtatgttttggtttcaaatgtaccatgaaccaaaaaaaaagtaacaggaattctcataatggctttcttcatagtcctatacttacaatttttangtattaaatagtctgtttgctagaaagtattaatagaactgtgagatcttgtattttatatccataatttccccttcatacattcagccttttgtttttcacagatcatagagataacattgtactcattagtagaaataaaccaatttgttctcacacacaaagttgggtaccttcaaatcaacaacttcaagaatcatgttcacttaaatctttgaaactttacagaaaattccaactgggcatggtggcctatgcctggattccattgggg

SEQ ID NO: 177504 - DNA, 671 bp, Homo sapiens
  misc_feature (489)..(489): n is a, c, g, or t
caatcccattcctatgctaggcttaaccaccattattagtataattattcatactttacagagccaatcacatagttacatatgtattgtcatctcttctcattaacctttttttaatccatttccaataatcacctctcctaggaagataattttttaatgatagtagaggaatagacgaaagagatctaaatgaaagaaaagcaaaaatacagaaaataaggaattacaccaagtataggatatttcataaaattctaattttataatcctataggattgtgagagtaaagcaaatgccagcctatatactataaattttcccacaaaatactattttctccaaattaagagagagagagataaaagtaattttaatatgactagatattgggtatgttttggtttcaaatgtaccatgaaccaaaaaaaaagtaacaggaattctcataatggctttcttcatagtcctatacttacaatttttangtaaaatattaaagtattaatataaatatgtgagaataaaaacaatctaaatccagaaaatggcagtcctaaatgttcatgagacagattgtattaatttaaccaggactatgtagaagtagaaagaaaagaaaaagaaaatcttttttaaaccagaataaacattaaaaactatgccgaaa

SEQ ID NO: 177505 - DNA, 502 bp, Homo sapiens
gcagtggtgcgatcttgactcactacaacctccgcctcccagttcaagcaattcccctgcctcagcctcctgagtagctgggactacaggtgcacaccgccatgcccggctaatctttccatttttagtagagatggggtttcaccatgttgcccaagctggtcttgaactcctgagctcaggcaatccacccaccttagcctcccaaagtgctaggattacaggtgtgagccactgtgcctggccaggatttaagatttaactcactcgtggatactctgattggcttctctctgcctgagtgttactcaagagtgacttgaaagtccggaggaattagggcaggacagtgaggaactagcaaaagaggagaaagcactgatttagatggtagctgtgagttactgtgtccagatattgtcagtgcctaacttggaaatgaattaagtatcttggttttagattttctaaatctaaagggagttggactcttctgagtgga

SEQ ID NO: 177506 - DNA, 261 bp, Homo sapiens
aataacctaaccatatacctcaaggaactagaaaaagagtaaactacaccaaagctagcagaagaaagaaaataataaaaattagagtgaaaagagagaacagaaaaacaatggagaaaaattacaaaaccagaagctgattctttgaaaaagtcaacaaaactctagctagataggttaacaaaaaaataaataaataaaagagagacagagagaaagaacaccaaattactaaagtcagatatgaaagtggtgacacgg

SEQ ID NO: 177507 - DNA, 286 bp, Homo sapiens
  misc_feature (215)..(215): n is a, c, g, or t
cctatcccagcttctatcggtgaaaaggcaggtgcaaagcaaatcctatcccagcttttatcggtgaaaaggcaggtgcaaagcaaatcctatcccagcttctatcggtgaaaaggcaggtgcaaagcaaatcctatcccagcttctacaggtgaaaaggcaggtgcaaagcaaatcctaacccagcttctacatgggtggttctcagtggtttncttgtcttaatcgtttcctgcatctcccagcagtcctccagtgagcaggcgtgactttcacaaccagagag

SEQ ID NO: 177508 - DNA, 543 bp, Homo sapiens
atgttgccacagcttggagtgaccgcagtgtacagagatgggatgggagcaggaaacccaaaagagccggccctggaaccaggtggaggggaggcagcccggccatgacccagagcaggacacctgctccacttcaccttttgccatgagtaaaagctccctgaggcctcccaagaagttgatgccctgtgcttcctgtacagctgcggaaccggatggctttccgtggctttgctacagccactcctggaaatgctgcctgactgaatcctcagggcaccccagcaggatggatgtggtgtcccccccaactttacagatggggaaactgaggcttgagagctaaagcagcccgcccagcccccagagctgaggaggccgactctggcaggagtcactgtcggtgcatgggcatttcttcctgttacagcctgctgccccttccaggccaggaggccttctgtgcggggtaggaaaatgggaacacccaggccgattttccaatcagcaaagctctgctccctaaggctgatgggcttctta

SEQ ID NO: 177509 - DNA, 292 bp, Homo sapiens
acttaacactttctaaacaacacataaagcagatacccaagattgcatactatttatagttctatttctggctcacattgtctttctaactactcacactttctaactggctcacactgtctttctaactacaaccttgactcaccttcatggtagagaagtcatggttgacttttacgtttggctgccttcccaattcaaccccaattccctgtcacctcctaccttagtttccttccaccctagcacatccctttttgtcatgattagctattgggtatggtataatttt

SEQ ID NO: 177510 - DNA, 323 bp, Homo sapiens
gagcctgtaagagctccccgctctcatttgcgccctagtgccaggtggagtcagtgtgagcctgtaagagctccccgctctcatttgcaccctagtgccaggtggggtcagtgtgagcctgtaagagctccccgctctcatttgcgccctagtgccaggtggggtcactgtgagcctgtaagagctccccgctctcatttgcgccctagtgccaggtgcagtcagtgtgagtctgtaagagctcccccctctcatctgcaccccaggaccacaagagctgttctctcaggtggacaatagagagatgggatcagaagtcattg

SEQ ID NO: 177511 - DNA, 415 bp, Homo sapiens
tgttttttttcctcctgtgactttctcctttaaacttctttcatcgcaccttcatttttctccccagtgttgcacatgctaactttagtctatctaaccaattgagctttcctttcaagaacactctcatatttctaatatgttcctaatatattactaatatgttcctatatcatccaggtgatgagctccaccaatccctcatcctctcactggaggaaaacgcaacagtccctacccaaaccaggtctgtgcctgaaggacagcagtcccaaatttctacttgatttagatgaaaaacatgaaatcagaccttctgtgtcctgtggcactgaggcattgtttcatttagaaaataaaagtgtctacaacttctaagaattcacaaaaaaaaaccactgcatgggcccttcga

SEQ ID NO: 177512 - DNA, 220 bp, Homo sapiens
taaatatctatgcatttatacatactgtataaaaatacagcatatggcaggttttttggttggatttagtttagataaaacatggccatactattcttaacatgagttctcacctcgtggacccctttccatccaggactatatatccaaagcattgttttttttgttgttgtttgggtttttgttactgttgttgttttttgaggttaggtcttgctct

SEQ ID NO: 177513 - DNA, 674 bp, Homo sapiens
tcatgtcgggctttgtcactttcaaaagcattacattataagctatgtggccaaaacacaatcaataaacaaacacacgcagacagatacaactaaatacacacaaacatacatgccacaacagagagggtctttgattcttaggatcccccttttcttttccatccattaattcctaactacactgttcttctctaaccatgtaactatttctcaatatccatttgtcacatgtaaaatattctcaagaccactcctagccttgtatacctgagacctgtctcccataccaacaccatcacttaattaagaaacaatggcactaaagctttgcttacaaatctgtgaaacaaaggtcatcccacctgcctaccttcccacttcaccttactaataggaggtttaaaggagatatgtgcttaagtacaccaaagaaccagaggtaccaacagggttaagatacgccttgaatccaagaaaatcccctgaagcagcatgtcaatactgagtaacacaaccattccctaggctatcacctttttttttttttttttttttttttttgagacagagtgtcgctttgtcacccaggctggagtgcaatggcacgatcttggctcactgcaacctccgcctcccaggttcaaatgattctcctgcctcagcctcccatg

SEQ ID NO: 177514 - DNA, 791 bp, Homo sapiens
ttgactttgtttcctcacacaacactttgaaaagacatgagtttgacaccccaaacaggataatatttaccattttaatggtaatatccagcagaaccttagacaagaaacagtagaatctaacttttaagaaaactttattaaaatgtaattcacacactataaaattcatccatttaaagggtacaatttagtgggttgctttttttctgtattttcacagaattgtacaaccatccccaatatctaagtttacagcatttttatcaccccagcgagaaacctggtacccattagcagctgctccgcatcttctccctcttgtttgtgcccggcttctttcactgagcgtagttttcaagggtcatccatgttgtagcattggtcagtaagtacttcattcatttttatagctgaataatattgcagtgtatcagtattttgcattttatttatccatttatcaattgatgggaactgtctgtaactaggtatttggtaattccaaacatcttattttccaacaggcagagtaagatttgttacatgtaataaactccaagggtctattaactttttcattataacaaattgtgtaaatattgctttcagttagttacccacagtccttttgcagtagagatagttgtcttggttttaattggattcatgatctacaactttatgttctaatctcatgtcatttttattatttttagtaaaagtaatttgtttgactaaattaactggtaaacagttctgagctttttcaattgtgtctacaaatttta

SEQ ID NO: 177515 - DNA, 599 bp, Homo sapiens
gactgggaccagggaagaagggcggcacctgtaccccgtcctccctccccgatactgcctcccgggttcgtgattctcatgcctcagcctcccgagtagctgagactacaggcatgtgccaccacgcccagttaatttttgtatttttagtagatacagggtttcaccacgttggccaggctggccttgaactcctgacctcaagtggatctgcctgcctcagccttccgaagtgctgggattacaggcgtgagccaccgtgagtggcctgtttctttgttttaagtaacagcccttgcagaatgaatgataaagttccagttagatcatcagacccaacgttccattctcaaatgtcttaagagttttgaggtcaatacacatatattttttgctccagcagtagggagtcatgtgacaaatctgaataatggagttaggtggacaaaagcctaaggtgaatttcgtaaggttatcaaaaacgttcaggatttgtagtcatttattttcagtgactgtcagcgaaaagcttagtctggcttagttttgacttcgtcttgaaataaatgttccacggccaccttctctcacttaattca

SEQ ID NO: 177516 - DNA, 182 bp, Homo sapiens
ataactttctaggtaataatgtctaaactttaggcattgcttgtttattaactaatgacacaaaaagcctccacgctttcttaaattaatgatgcaatatgaaatttggttgggacaaatgactaagctaatttaacttcttcataattgtttcttttgcctttctgtgtgctttcaggact

SEQ ID NO: 177517 - DNA, 393 bp, Homo sapiens
atagtggtgtgcacctgtagtcccagctacttgggaggctgaggtgggagaattgcttgaacccaggaggcggaggctgcagtgagctgagatcatgccactataatccagactgggtgacagagtgagactctgtccccccaaaaaaaagaaaaaaaatgaggacaaaaataaaaactatttccagattccaacagcctatcccctccacctctgccacctgagtagagcctgggttgctgcggtcagctcctaactggtctcctcttccctccctccacatggcagccagcaggatccttttaaaacagacaaggcagcagttttccccagctttgggtgatggccactacccaacttcagcttccattctgtgaagggcaaggccacgta

SEQ ID NO: 177518 - DNA, 304 bp, Homo sapiens
taaaagccaaaggtcacaagggaaaaaactgatagatttgtctgtgatattgagagatgtatgcacatatacatacaacagtcatagtaagacaccgttagacaaaagaaagtgatggtttggaaaaaaatttccaacataaaataaaactaatatttaattattagaaaataatagcaaacaacctggtagaagagagaacaaaaatattcatatacgataacgtgaccattgaatgtgtgaaggatgatatcacacaaattcaaatgaaattatcttactacatgttagattggcccaagaa

SEQ ID NO: 177519 - DNA, 150 bp, Homo sapiens
ccacattaaggtaaattactaccactagggcttcaaatctggtaagtgtttaaaaaaagaaatgcagtaagatatccagtgtcattcaatattattttatttggcataagttttttgatactaaattagtaacaagcaatcattgtccta

SEQ ID NO: 177520 - DNA, 446 bp, Homo sapiens
agaccaacattagacaccatctctctccacaaaaaacattctccaagcaaaacatcctgatctctaaatacactacggcaggaatgaaactgttgatcagagttgcagtattgattctttttgtggccatggatacacatatgggaactttgaacacttttccatgctagggaacatcacatttgtccattacattgatgatatcatactgcttggacatggagaacatgaaacaggagctacttaataccctttgaaaaagaggaagtattctagagaatataaaaagacttcttgagtactaagaggtcgtgaagacagctttggaaatgttataagcgtcaagattcgctcaagatacacctgcttctcttgcaaaagcattattcaaaagagccaagatatggaagcaactgaagtgctcatcaacaggtgagtggattttt

SEQ ID NO: 177521 - DNA, 713 bp, Homo sapiens
ggccaggcagaagcagcatgggtttccactcacacgatttatctactgctcgtgaaatctctggatttaactgtgatgaaagaccggaggctgaaggagaacttcaatatcatatattttaaaggttgactcacagtttggaacaagaattaaagaaccacgaacttcaagtctggatgaagtgcttcatgcctgtaatccaagcactttgagaggctgaggcgggcagatggcttgagcccaggagtttgagaccagcctggaaaacacagagaaaccccgtctcaatataagaagaagaagaaaaagaaaaaaaaaaaatcaaaaacgaaaacaacacaaattttagagtgatgtaaaattctcaaacaatgagatagataaaaagtacgcagccaaaaagtgcaggaagaagtgttatggagatggagcaggcccttcgtaaaaacacgatgtgggttttctggatttggaggcctcacaaaacctggatcagactcgcccactgccctgtgtctgccctcccgaccccctctcctgcccagcagggatgtgggtggcagtggtgctgtgtggagggtggcgggaggaccgggaagactgcgaccagtgagccgggaggccttgggaacagcctctctctgactcatccctgtgcctgccgggtgtgacagaggctcctagagtcctgcctcagatggccgccttcagag

SEQ ID NO: 177522 - DNA, 571 bp, Homo sapiens
atgggcggtgaagaggatattgaaaggccagttcccagaactttatctgagaggagaacaaggaaactggtgtctgctgcatgtttttcaagatgtgctggcgtcaccaccacctgcacactccccctccccaggcttttcccacggtaggcacacagcagatgtgccatccgtggaggctgttagggttatgacatgcattttatccccaacaacccaatgacctctgtagtgatgtctctatcttacaggtgaaggaaatcaggaaaacagatggagggctgacttgggggtgggtatggagcactgctgccagcaactaagatgatggaagtgggtgaccagtgtgactctgtgtgacaggaaatgatgccgaatggacacagccagctagggtggtagttggaataaagttagataacacaggcttactgtgtgcaggtggcaggtactcactcagcaaagccacctgagtcgtcagcactgtgctactattttgatttttttaatttgagagatggggcctcactgtgccaccccagctggggtgcagtggctcttcaccggccat

SEQ ID NO: 177523 - DNA, 215 bp, Homo sapiens
ctattttttaatctaaaagcctcctcctttctatctgccaatttttaaaattttcttcccatttaaactaccaagaagcctaccaaaacttaaacagttcagcaaatgttgtctttctcccccaggacatccgttttaaccaaccaatctgtttaagaggtatatcaaaaaaagtaaacaggtaaacaaaacgttaaagaaacataatgtatctt

SEQ ID NO: 177524 - DNA, 514 bp, Homo sapiens
taccccccggcccccaccatcttcttactcattcaggtcatcgtgtcctctgatacccagtaatttccatcattttctacatgcatttctgttggtcttctgagaactgtgattttccaaagcagaaagggcacatcgtctttccggagcctggaaggtgcaggcactgatgcgttgggggagatcacagtgtgacaaggatggggtgggagtgtgtcacccccctttgtaccgaccctcagcagtggggagtgagcagaggagatagaacctgggaggaagagagatttccaattacttccttcccggtcccttctccactggagcctgttattcctctgctgctggggcctctgaatgttctctcactgagccaggaaagagcttagtgaataaagaacgaggtgtcctagcagtgcagggaagatgtccaggacagtgagtgtgaacgtggggtcctggagaatgtgcacgccagccctgccgcctggtgggctctgcaatcagcccccca

SEQ ID NO: 177525 - DNA, 524 bp, Homo sapiens
gacaaagtccctgctgtcatggagctggcatttcagtgctttgggagtgggtgggtgacaggcagtgagcaaataaacacaggatggggcaggtgtgatcagtacaaaaagaaacaaagcagggaaaggacacagagggtagtgggggtgggagcttgacattattttaggaaagtcgtctttgataaagtgacctgaaataaatgaggggaggagccatgtggctttctgtgcaaagagtcttccaggaagaagggacgttaagtgcacgagtcctaaagcagcctcttgcttggtgtgagccaggagaggaggagcgggagatgggtcagaagtggcctgtgtccgctgctgggtgcccgtttgtgccaggccttcctggtgcacttgcgcactgggccctgtctcctggagggcttctcatggcgtgttctttcacaccctaatacagcaggaagctctgccactgaaaggtattgtgagccaagaatttgaaggcccttagaagtcctgcagtagagcaa

SEQ ID NO: 177526 - DNA, 390 bp, Homo sapiens
ccttccgccggcaggtcggcggggccagccccgaagtgctccctgggccccgtttctcccacagcttcccccgcatcggagaccacgtggtgagcgtgcagagcaaaaaccacgtgagctgggcccaggcgcaggtgcgcatcgtggtgctggaggccgtgagcgggctgcaggtgcccaactgctgtgagcctggcatcgccatgggcactgagaggaacttcacagcccgcgtgcagcgcggctctcgggtcgcctacgcctggtatttctcgctgcagaaggtccggggcgactctctgttcatcctgtcgggccgcgacgtcacctacacgccgtggccgcggggctgttggagatccaggtgcgtgccttcaacgccctgggcag

SEQ ID NO: 177527 - DNA, 423 bp, Homo sapiens
aggtgtagggcctaattgtaatacatgtaaatgttaattctccaccccaaagcacacatggttatatgttacctgcatgtttgttcagtacacatgcctcaggaccaccttcatgagtatttgaagctcttcgtataacctgttgactatgtatgtttggccaacctgttcaactaaaatttctgtctaattcctctctccctcaaagtgcctatttctggtctttgctggaagctacacttcccagctggtaggatggccacttggcaggctgtaaacttttacaagaaataaagtctccttttcgaaatgtatagatcttgtgatttttcagttaaccctcactgcatatttgttcttgattagatgttgagaaaaatattttggatatatttggttaattaaaatacattattaaaatta

SEQ ID NO: 177528 - DNA, 437 bp, Homo sapiens
tgccccatctccccacctagagcttcctgcagagccgggcagagccgggtgccttctctgctggttgcctgggcgcctgtgccccttccctagatctgcagtagggaactgcttcccggtggcctaagggcttggacgctggccatgaccatggacacccccaccaccctgagagggtgccataccccagcccgaggctggagggccagctgtacggcagggccatggaagggaggaccaggcagcctcctgtggctcctgccagggaaaccctctctgctcgctgctgctcagcctttcccagccctgcccctctcgtcttgcttctcacatttcagcctctgagttactggcaccactgtctgttgctgctgttgctgctgctgctgctgaagccggcaccagccagacattaacccctgatgcgctggcggccg

SEQ ID NO: 177529 - DNA, 328 bp, Homo sapiens
tgtggtaggtaggtatgtacttaggtatgtatgtatgtacgtatatatatgtatgtatgaatgaatgagatgggggtctcactattttgcccaggctgtagtgcagtggctgttcacaggtgtgatcccagggctgatcagcacaggagttttgacctgctccacttctactctgtgccagttcaccccttgttaagcaacgtggtagtcccagaggttaacatattgatgctgaacttagtacagacaccaggtaggcatggtgcactacagcccagaactcctgggctcaagcaatccccctgcttcagtcccctccttagtccct

SEQ ID NO: 177530 - DNA, 537 bp, Homo sapiens
aaatgttccgcgcgattaccgattacggggtaagtggccgtcgttatacatgcaagaattgcagattgcaggcaggaaacaagaccggtcttgtctcctagacttaatgtttctggtccttttttcttatctgtaaccttgtcctaagtcctcttaacctattccctttttcccttttagcccttatctctctgctaagctccaagtaacccattaatctacttgacatttctacttgactatctaatggcatctcattaagtcctgtggattatttctccaaaatacatcctgaatctgatccctcttctccacctctgtagctattacctttatccaggccactatcatttcttgcatagcccattgcaatagcctcctaattggtctccttgcttccaccatttggctctctaaaattcgttctctcagaagccaaagtaatcttttaaaacttaaaaccggatttctgctgaaatccttctaatggtttcctattgtacctcaattaaaatccaaactctctataatgatctg

SEQ ID NO: 177531 - DNA, 356 bp, Homo sapiens
gctgactctactgaccctaaaagctgttatctctcctatttgctcttctgcccttcctcatccttcctgttttcccacactaacttctctctgggattatcgatgagaaaagattgacaaatatgtattactcatagtaaaataatttgggcataactcagcacggaatatattgttagactttaaaaggtgagtgtctgagtaataaggtcagttattagcaggtatttgtggagtcccaggatggttttgttatattttattgttgttaatggcaggtactagagtgtgtgtgtaaactaatggcagtgttccaatagggacgcattctctgaaggagcaaagcccagagtaga

SEQ ID NO: 177532 - DNA, 220 bp, Homo sapiens
tatgcttgccaccacagggactttgctaagttcttcactatcaggtagaaactaatatcaattccaatgaagaaactgaagttcgaacagaatggtccagtaactggcccaaagtcaccaaaccagtaagttgcagagcggggacaagagctaagaatcattaggctccacagctcattgcagtttctctctccaaggtgcaggctaattctcttgtcct

SEQ ID NO: 177533 - DNA, 278 bp, Homo sapiens
tggtgttacttcaagcaccttccaggccaaaggcaaaaatgttcaaagcaagctctgtgatttctaaacaaaatttcagctctgctaccagtagcatagaatctataagctttgaatctcctttcagccggcaacacagaattcttccactttaaaacttcaccagtgattgctgcttctggccaaaatgaagtaatccagacagttattttccaactgaaacattcaaacaaacaaaaagacaaaatatataaaacaataagacactaggctcaggc

SEQ ID NO: 177534 - DNA, 494 bp, Homo sapiens
aagccattctaagtggtttgaacctttgggtaattgagagcccttgaaggattctaagcagggaaatattctatcatagttagattttagaaatacggtgacaattgcagcgttatgggatggtttagagagcggttagattgatggaaaaccacgccaagcaggtaagacaaagttgctaaggacctgatctaggaagatggtggattcagggcagtttcaaataataaaacaaacagggcttgctaagacattggcaataagcaggaagtgggggataggggttctcggatgactcaggtttttgacttttgtaatttgtcattggatcaaaagtgatgcatgaaaatatataggaaataaaggatgaggggtagaaggaaaagtaaaggagaataataaagaatagaaagggagtttaaaaatgagttttaagtatgtatttttgacatcagttgttgatatctaataagacattaaaagtcactctaaag

SEQ ID NO: 177535 - DNA, 207 bp, Homo sapiens
cctgccctgagcctggtgctccttggaactacgcatcgtgtaaacacagcctgggcgctggcctttgtcaaagcaggcagggggccagtcctggggaggtgcacgcctcaaattcagagcagggtcagcacccccagaccacagcccatagccctactgtccacgcctccctggccatggtgggccgtggctccagcagtctcccac

SEQ ID NO: 177536 - DNA, 521 bp, Homo sapiens
attctgcattcttatttaattataaacttctcaaagacgaaatttatctcccaaaagccttgagcaaatctgaaactctcaaaatattattagctgactcaggttgacttttgaattcaatgttctttcactgccaagtccacttgctgctgaagggaaatcttaatttcaggcaaatggcaaattgctttactgtttacatttctttaaaagatttgctttgcttacatattttatgaataaaaattgctaatactgcacaataatttgaagaataattcttaaggatacaatcaacggaacttataattccaagggacctagggttgtttgggggttttgtttaacaaaaggttaagggactggccgatatgaatttggggtatggagggagagaaatgcctgtgtttgtgttcctgctctttgtaaggcaacattaccatgcctcttttctggagacatcatagaatcctgtgatccacagaagacccaagttccaggcgatacaactaggaagtcct

SEQ ID NO: 177537 - DNA, 286 bp, Homo sapiens
agtggtgctcagccttggaacctgtttcttcgttcttccttccctgtgatccctgcgtggttcctggaggtttatttggctttcgggctggcatctactgtgcttgtgagcagagcgcatgcatttcccactctttccctagagctggtgaccggaggctccggcctgtgtaactttgaaagcctggaattcatgtgacccctgctgacctaatcaagactccgaaagcacagccccatgtgctgggactctcctgaggagttattaaaaactcgcattagttctt

SEQ ID NO: 177538 - DNA, 303 bp, Homo sapiens
tgtaatacaggctgaatatccctcatatgaaaagcttgggatcacaactgttttggattttgaaatatttgcattatacttgacacaggttgagcatcccaaatctgaaaatccgaaatccaaaatgctccaacaagcatttccgttgagtcatgttgatgctcagaaagtttcaaattttatagcagttcattttttcttcttcgagaccaagtctcactctgttgcccgagctggagtacagaggctcggctcaccgcaaccaccacctcccgggttcaagcgattctccttcctcagcct

SEQ ID NO: 177539 - DNA, 299 bp, Homo sapiens
ttccattgaaggattttttacagtaaagtgacatgactctgtttttgttttagaaagattaggttagtggcagtgtagaaaataaatttaagaagcattgatccatttgttcatctaacaaatattaaatattatgaatgttcttttccctcagggagcttaattttttgagggagacaaatgacaaccatttatataataagtaatttatttatacttgggaggattgctatgaatgaggagtacagcattgaataagaatgtataatgaggaggccaggcgcagtgtctcatgcctg

SEQ ID NO: 177540 - DNA, 731 bp, Homo sapiens
tgtgtgacccttggtgcctggcaaggcgggggggtagggagcagccctcgcacagccagctagactgttttgctctggggcctgaggattgcggggccagggaagcaaccaggcccagtctggggccctgtgaagcgatctgcactgcccagggtcagggggatgggggggtcggcctcacctcggctaacctcccagcggaacaaaggggcctttctccacgcccgcccgggagggtgtgcccgcccggctgctgccgccactgcagagggcgctgattttttttttcttcctgacttttctccatttctgtctctggttcctgatctctgacttttattctccattttttcactttttatggggatggggtagagatcttccttttcaagtgtttaccaattgcagagacaagtctgcactgccaaaaggtgagggcatcctgggtgcgttaggaatactccgggagtcacgtggccttagacccccccctcccccccaaatcgagggcagctccgttctgaaagaagcaggcaggattcagagcggcagccacacagggtgggaccgggctcactggataacccccagtcaagctatgcacctggcaggtcccccgccttctattcgcccacccatttcgcagtcccctttccatccggcccatgcaccgcaagctgttcctaatcaatgcgaacgggaaactcggccctcatatcacgggatgtgtt

SEQ ID NO: 177541 - DNA, 450 bp, Homo sapiens
tagagtaaatttttgtagatagtgtgaggtagagttcgaactttgtttttttggatgtgaaaatccagttgtctcagcttcatctgttgaagatgctgttattttctcatttaatttggcagtctcatcaaaaatcaattggtcaaagatgtttgggtttatttgttggatctctattgtatcccattggtctatttgtctatattacagtgttttgattaccgtagctttgtaagtcttgaaatctggaattgtgagtccactaactttgttctttttcaagattgttttgtctagtgaaagcccctggcaatttcatattcatttgaagtttagatttttcattttggcaataaatctgttggaatttttacagagattgtattgaacctgtacattgctttgggtggtattaacatggcaacaatattaaaacctccaatctgtgaa

SEQ ID NO: 177542 - DNA, 163 bp, Homo sapiens
acaaaaataaccagaatttgatcagaaatattcggtaactttaaggagctgatgctcacatatctacaataataagatagaaaatattcaggcgtcttaaaatacgagttatctgaaatcgagagggaagagattaaagtgatgatgaaagggacagtctgga

SEQ ID NO: 177543 - DNA, 581 bp, Homo sapiens
cacttgtcaaattaagtagaaaacatcaaaacccaggcaccctgaggttaagatgccctttagtggtgggagttagtgcatggaaggagcccaggaagcatgcagctaacagcctgctaattagtagtatcaagctaccaaatgggctcatgggtagctttccttaaaaattgtaaaaaaatgggccgggcatggtggctcacgcctgtaatcccagcactttgggaggccaaggcgggtggatcacgaggtccagagtttgagaccagcctgaccaacatggtgaaaccgtgtctctactaaaaatacaaaaattagccaggcatgctggcgcacacctgtaatcccagctactcaggaagctgacgcaagagaatcgcttgaacccagaggcagaggttgcaatgagctgagattgcaccattgcactccggcctgagtgacagagcgggacttcatctcaaaaaaaaaaattgtacaaaatttcctttattaaaaattgtagctccctctctctctccctctccccctccccctccctctccacggtctccctctgatgccaccaaagttatgaaggc

SEQ ID NO: 177544 - DNA, 119 bp, Homo sapiens
ggtgtgcacttgaaaagaatgtggattctgctgcttttggaaggaatattctgtgtatatctgtgaggtccaatttggtccatagtgctgtttgattctgttgtttcattattgatttt

SEQ ID NO: 177545 - DNA, 151 bp, Homo sapiens
cagcactttaagatgccatgtcaatcaaccaggattggcacacgaagcgagacgcagttagatgatcatagagatcttattgctcaaacgcccaatggttccatcggcctaatggaaacctcagctcctatatgcttcccttctgagagtg

SEQ ID NO: 177546 - DNA, 224 bp, Homo sapiens
gcctaggctggtctaaaactcctggactcaagcggtcctcccagcttgtcctccaaaagtgctgtgattacaggcatgaaccaccgcacccagctccctttttttttctcagttgccaaaacaagagcatttatttgtctttcatgttacatgcccattggggatagaatgtatattctgctgatgttggatagagtctttatatatctgttaggtctaattat

SEQ ID NO: 177547 - DNA, 362 bp, Homo sapiens
gaaaggccacggattacatataagggttcctgttattctcttgtcacttagatgtgattttatttcttgggaacatcctactgccttttcttcaaaagattctcctcttctgctggccttgaactaagtccagtctacctgctggcctgaggtggcgggggtgtgtgtgtcagccccctcagttgtgttcctggggcaggcagaactcaccagcacccggtgctgattttatcccttccttctctgaaaactcggagagtatgtgccagctgctgtctgcgattgatgcacatttattttgtcacttgggctcagaacgtcctcaccagtgagcagcttctgattaatgccgccaccccatc

SEQ ID NO: 177548 - DNA, 422 bp, Homo sapiens
gtgacagccagtgcaggcaggctccagctcaacacgaatgactccatttaagtctaaggatgcattgctataaaatactggttctcaaattgttgtaagttatgacagggagcaaagtctcaggaatcagaagacctaaattccagtcctaggcctgcgagcctctaccattgtgaccttaggcaaataattatcttgaacttcatcttcttgtctacaaactaagatgtttattcaagatgatttctgaaggtctttgccttcagaatttttttctgttttagtattcatttttttctgttttaatattcatttaaattaaatgatgccaatttgccttttgttctttttttaattacaaaagttctacatgaatattcttgtgaaaagttcacaccttcacattgtgcttttcctcaaaa

SEQ ID NO: 177549 - DNA, 467 bp, Homo sapiens
aacactggtcatagctgttcctgaggtaacacccttatcccacagtgttgatatcataaatacccattcagaacccatgtacatgcatatatcaggttcataccctacaagtttcacaggggaatacttttttgcgtagcgatcttcgtgactcccgtcccgtactctcattctgtttatgactggatgtggtgggaacaccacagggatttcctgaagtgtagctgtagcctccccacacccagtggctgcatgcagagcaccttgccccctcacactcatccacaggtctatttacataattacataccaaccagttacttatttaaagtataaatctcggtggtttttaatatattcacagagttgtgcaacatcaccatcaccaattttgttgttgttgttgttgtttttgtgacggagtctcgctgtgtcacccaggttagagtacagtcacgcaatctcag

SEQ ID NO: 177550 - DNA, 384 bp, Homo sapiens
caggtctgacacctgtgaagggacagaggaagcaaagaagatgagattggcattgtggttcttagacacattttgtaggctgaatggaaattcccaagccaaagttgccagtgaacagactcttgagtccttagtaatgagcctgcactagtacgtcctctttgttccttcttgctggttaaagaagggaaggaaacaagtcctggtttagacccggggaatgctactccccctctgaccttaatccttcctatagtctctctcaataggctagaacttcttaacctggttccataaactgtcttgtgaaatttttttgcttgttcatttttctgtggataaggttgagtccgattcctacagggtctctcaccctaggtttca

SEQ ID NO: 177551 - DNA, 361 bp, Homo sapiens
gtctggatctcctgaccttgtgatctgtctgccttggcctcccaaagtgctgggattctgcggctgaccttaaaataaactttcctttaaagatgctccatgaagacctggcaggcagattgttttatgccacagagggacgggtgcactggctggctgccctggtggactgtctctggcagtggaggggatgataggggttttgtctgcaggggctggctgcaggtggctagggtcacggaggagcggggcttgctgaggaaagcagctgtggttcagccgtcactccatggcctaatggcctttgccctccaagtgtgtgttgggccgacctgttcggtgccgggtgctgggtgctggg

SEQ ID NO: 177552 - DNA, 566 bp, Homo sapiens
tctctagttacaggtgctggccaactgactcttacttaaaagggaatctttaaacttctttgcctttcagcccttgatccactataaatcaaaacaaggtggtcaaactgagttacctgaaaagagataatcttatcataaaattaaagtttaaatttgtcatgaacaggccttaatattgtataaggtgtaagaaagggatccagtttcagctttctgcatatggcaacccaaatgtccatcaatgatagactggattaagaaaatgtggcacatacacaccatggaatactatgcagccataaaaaaggatgcgttcacgtcctttgtagggacatggatgaagctggaaaccatcactctgagcaaactattgcaaggacagaaaaccaaacaccgcatgttctcactcatggatgggaattgaacaatgagaacacctggacacaggatggggaacatcacacaccagggcctattgtgggatggggggacggggaagggataacattaggagacatacctaatgtaaatgacgagttaatgggtgcagcacactaatatgg

SEQ ID NO: 177553 - DNA, 182 bp, Homo sapiens
aatgtatataaaggctatttctccacataaaagatcatcaacgacttatagaataataaaaaagatgtgaagtgttatttcttcaaacactggttgacaaatgcatgctccgtgagaagtacttggctgatcaaacaaacacaccaactattatctctagagtcagtagtcaattattcatg

SEQ ID NO: 177554 - DNA, 267 bp, Homo sapiens
agtaactgggattacaggtgcccaccaccacccctggctaattttttttgtatttttagtagagacgggttttcaccatgttgaccaggctggtcttgaactcctgacctcaggtgatccacctgcctcggcctcccaaagtgctgggattagattacaggagtgagccactgcacccagccagatatgatatttttattaagatcttttctattacagaatacaaaattgaaacatacagaaaagtagaaaaatataccaaatcta

SEQ ID NO: 177555 - DNA, 422 bp, Homo sapiens
gtgctggcagcaggcccacttaggttacagcgaaataaatctgcgcaggtaggctgcttatatccaatgttgatacctgttcagtccaggaaacatacctgcaaaaatgatcggggcatattctagggtttgctgtttgatgatcctgccttgtcatgtgattccgggctgatgagattgctcaagaagccggacatgacaaatttaatattcatactaaatagaatgtagttgtagctgactctcaatgtcttatacttgattccataacaaaacctgaggtcctgccattctttggaccaacataccaactctcttaactttggaagtatatttcctgcttaatcctagggaaaccaagatatcaatagtccttatatcatcattaacatcttaatgattaaaaacagagcactgagagt

SEQ ID NO: 177556 - DNA, 953 bp, Homo sapiens
tgctgttccttttgatcccttaaagcccagtgaatgagagaaggaaatgaatagactgcttgtcacaacaccaccagggtctccacagtgcctggggctgctgctgagagacagagaatgaaagctggaatggaggccgtggaggcaggaaacctttgctgggacaggctccacctcccctacatggtgtcttgagggcttcccatttccttcagtctggggattccgcccgcactaatggagctgtctcttgctgcagcatgcttcctggaggaaaagtccaactctgcctggccacacagagagaagactgatatgcagtctctccacatccctcccccgtttatccaacaaagcagcacatttcactgcgaacgcttccggagtcggctctcaacagtgcagaaaaagggatgctccctgttgcacactccaccacccccattggacgtttttaattaaatcaactagaaagatattttcagtttgaagattcacttcatcttatgtaggtttaaagaagaaagaaaaagagtagaatggtaagaaatcaaaattcacgtctcatgaggaccttagaaatgttcaacccagagaaaataagacttgagaatgagaagaaatagatgttgcaagtctcttcaaatatttgaaaaggtgtcaaatgggtaatgcatgttttatatggtccgaaggaattggaccagatcttagaaggcctaggatgtcagattgtggagttctgattttgtttggaagcaaataaaaaaaaaagaaaataagaagcagaacattgtgttttaggaagattaatctggtagctgattaatctggtagtagattaagctggtagtgtgtataaagaatagtatggtataaagaatagtatggtataaagtataaagaatagtagattaagctggtagtgtgtataaagaataagtatagggaaa

SEQ ID NO: 177557 - DNA, 344 bp, Homo sapiens
cggcattgctgatgcagcaggaggagcgtgccaagcagcagggagatcattcgctgaaggaacatgagctcttggagcagcagaagcgggtaatacccctccccctaacctttgacctcgtggtccagtcagttggctgtcatttatagtgcttagagtgcaccattcaagttttccctggaggctactttgttctcaactaagttctagtatcttccaaagctttcaatttttcttgaagttcaggaattgacaaactatgacctgtggcctgcatgtgtatggcctatgagctaaaaataactttaaaattttttaagggttacaagaaaacccaaaccaaa

SEQ ID NO: 177558 - DNA, 202 bp, Homo sapiens
cggcattgctgatgcagcaggaggagcgtgccaagcagcagggagatcattcgctgaaggaacatgagctcttggagcagcagaagcgggcagctgtgttactggagcaggaacgacagcaggagattgccaagatgggcaccccagtccctcggcccccacaagacatgggccagattggtgtgcgcactcctctgggtcc

SEQ ID NO: 177559 - DNA, 406 bp, Homo sapiens
agaaccgctgatcgcttaagctcatattcccttcaagcaccgcctccatctctgctcccctttagagcaaagccactgaaaagtactgtgtaaatttgctgtttcttcttcccatcctcctattctctccaatctacatgccattttcaaatcgaatggtcaactttcagtcctattcttaacctatcagcaacacttgacaaaactgatcaccttctgcaacacctttcagcaattttcctcccgccctgactgtgctctcttctgctggtttcttatccagactcagaggttcagttcttgaacctaatccgtttttggaacactcactccttaatctatctcacttagttccacagctttaagcaccaactgtatgctgacagctctctcttaagcggatcag

SEQ ID NO: 177560 - DNA, 196 bp, Homo sapiens
acaaccacccgggaccacactgtggcttcaatgatcaggcaaagaaccaagcttaggattgagacgctgagcccaatgcaggtgatgtagtccagaactttgtcggtcatcgatttggaggacatgagaatggaaaaagacatcaccacactggtgtagttacagcggcatttcacttcgttcctgatatccaaca

SEQ ID NO: 177561 - DNA, 207 bp, Homo sapiens
aaacataacttataaagcagcattttttcctaaattaaattcactaagacaaatttcactaagtaccaccttttttaaaaagtaatttttaaaacatgggagtgtatttcctcaacaggaagatgtactggtcattgtcaaaagtaccacaacaaatttgtttagaggacacaaccaagaaaaaaaattaactttttttttcttgag

SEQ ID NO: 177562 - DNA, 322 bp, Homo sapiens
gacgctctgagtggggtgggagggttctgagtcctctcttcgccttactgtgtggccaccaagactcactgcatccccaccaggtgcccggggcggctgtgcttccaccatttcacagagggaagacaggtacggagattaagaaccaccctgacgccccaccacaggtaagtcgtggggctggggctgctctgggggcccctcaaactcactgcatctcaaaaccaagctcagatgcaccccttcccttccaagcatggaggggagttcagcacgaaacccttattctccagccttggagtcctccccacagagagagcgt

SEQ ID NO: 177563 - DNA, 456 bp, Homo sapiens
gctcggtaccccccgtccgtccctctttgggggtgggggtgcccaaagactggagccaagtatttctagagtctgtgccctgatgagaccccatgtgtagaatatctcattaggtaatgacacagggattcataggtaggatttggaacacagaatgaagctgctcttggccagagaccacagattgctcagatcgctgccataacctcattcaacttccccaacccacaaaggaattagtgcctctcagcacattgattgggaatcactagtctggggaatataactacaaatggaactgctgtgcctaagcatgtgtgtgtctttgactatgccaaatactgcctgactcttctccaaaatattgtccaattcacagccccatcagtgatctaccagagttccagttgctccgtatccttggcagtgcttgagattaccaagacaactttttcc

SEQ ID NO: 177564 - DNA, 607 bp, Homo sapiens
attcgctttcttcctttatctcaaactcttccccatttctacaagctggtccattcagagagagacagttctgattgagagctaagttttaaaaggccaactttggggggcaacaagttcttcacatggctagattaactctttcagccagggagaacttagactgttgtttgttggttgggggtgggggtgcccaaagactggagccaagtatttctagagtctgtgccctgatgagaccccatgtgtagaatatctcattaggtaatgacacagggattcataggtaggatttggaacacagaatgaagctgctcttggccagagaccacagattgctcagatcgctgccataacctcattcaacttccccaacccacaaaggaattagtgcctctcagcacattgattgggaatcactagtctggggaatataactacaaatggaactgctgtgcctaagcatgtgtgtgtctttgactatgccaaatactgcctgactcttctccaaaatattgtccaattcacagccccatcagtgatctaccagagttccagttgctccgtatccttggcagtgcttgagattaccaagacaactttttcc

SEQ ID NO: 177565 - DNA, 140 bp, Homo sapiens
ggaagggttattagatccagagaagggaggagagctgtgtgggtgagaactgggaaaggaagatttacagacagagaatctgaggactgagagagttggctcatggagcaggaaagcgagtgtaccagggagacggtgag

SEQ ID NO: 177566 - DNA, 111 bp, Homo sapiens
tgctgggattacaggcgtgagccaccgcgcccagctacatttgccgctttcttatgtatctcgtagaggcagtccctaactatcccatttcaagtgcaccgcccctctcac

SEQ ID NO: 177567 - DNA, 766 bp, Homo sapiens
taatggtaaaagcaagcaaatgtgggagaggactaagcagcagagaagagaaggccactgtccttggggactttgtagctcaactttgagttgccatgggtgatgctcctccaagtcaaggcggaacatccaggctggggcagctggcccttgtgaactagtgtagcagacactgaaggaggaaatggaagcccgggattctgcctcaaagggcttcaagtcccaggaatttcattccctggcactgcaggcagcactgtctcaacctaaagttgcatttgcagtctcttctatgaagcagtgagcaggagaagagggaaaaggtgtaagactagaggcaaaaggacaactaaatgttcttaccacccagaaagaggacttttcgtatatgaatgacagtggttgcttgtgacagagcagacaccaatgagcaacaaagagagtgaaaaaatcagggacatcagagagaccctcagggacatcaaaagagagcccctctcctccacccccatcccctgctgttctggaaccagtctaagaacctagaaacatcaggagggccctcctccttccttttcaagcaggactgcccatcactccataactccctaactctttcttttagggaccttcaagttactgtttctacatataattttcactttctctgtcaatttattatctgcactctggcccctatccctaatttctgtattaacttctctggtataaaaactaactgacaagttctgaaacaccggtcaca

SEQ ID NO: 177568 - DNA, 240 bp, Homo sapiens
gttgtatgtgcaattcattactaagagagaatatcctgagcagttcccaatggtgggtggctggctaaaaggaatccctggagattttagtgtggtaggaaagcattttcattcttgaggatttttctttgacttttctatgggctggctgatttcctcagtttgctttgttctgggttttaggggagaattcttgggaggttgtgaattttctttgcctacagtgagatggttagatgc

SEQ ID NO: 177569 - DNA, 287 bp, Homo sapiens
atgacgagttagtgggtgcagcgcaccagcatggcacatgtatacatatgtaactaacctgcacaatgtgcacatgtaccctaaaacttaaagtataataataaaaaaaaaagagtaatgtatgtcctgaaaaatatgtatttaatagaacatggttggggctttaaaaatttaagaaaatttaatctaaaatcctaatctaagcttccagttggaagatattagaaaacacgctgtatccgcctttcctatttcctttccatcttttccaattttcattttcttct

SEQ ID NO: 177570 - DNA, 216 bp, Homo sapiens
aatgaaatttaaacagcagttttcttgacacttttcaatttatcaaaaatagctatgtattaaatctcactttggatgcaaacatttcaaacttcttatacttatttttaacattctaacatatgaaagattattattatgttttaaagggacagggtcttggtctatggccagcctgggcagcagtggcatgatcctagctcactgcagcctgga

SEQ ID NO: 177571 - DNA, 399 bp, Homo sapiens
gtcaatatattttaaattttaacttaccaacagttatttattgaacaaccactatgtgcagggatgtgctaatgtactaaggataaaaaaatggatcaagccaactcctgtactcagagagctctcccaagcaagggcaaatacatgtggatgggttctggtttatggtgtggtaaggacagtgagcttatttaatactagccatgccccattccttcctttaagaaacatttatcggctaccactgtatattaggcactgtggaggcgctggaatgtaactgtgatgaaaacagagaaggtctttaccttcatggagtctgcattccagtgtgggcacaggaggggagaaggtgacagacaaagcaagtaaataaataagtagcaattagagagcact

SEQ ID NO: 177572 - DNA, 1042 bp, Homo sapiens
gtggggtgactgctccccctggtggccatatatggctaaagcaagtagaagtccagacacacctggagaacaggtgccatcgcctgaaagcaaccgtaaccacgacaacaaggccaggtgcagaacccaggtctcccccctttattagaacctgtggagagatcatgaatgtattctccgatatgtttattttcaggggttaaaaaaaaaatctccccagtgtcacttctcccaggaacgtgtgtatgtgaatggcttaaaaactgttgcccttgacaaagaaatgtaccaatctccaatgacagaatatttaatcgaggaaaggtctcattaacagatgttaattaatctccttaacagatgttaaggagaactgcaaaccactgttcaatgaaataaaagagaatacaaacaaatggaacaacattccatgctcatgggttggaagaatcaatatcgtgaaaatggccatactgcccaaggtaatttatagattcaatgccatccccatcaagctaccaatgactttcttcacagaattggaaaaaactactttaaagttcatatggaacaaaaaagagcccgcatcgccaagtcaatcctaagccaaaagaacaaagccagaggcatcatgctacctgacttcaaactatactacaaggctacaataaccaaaacagcatggtactggtaccaaaacagagatatagatcaatggaacagaacagagtcctcagaaataacaccacatatctacaaccatctgatctttgacaaacctgacaaaaacaagcagtggggaaaggattccctatttaataaatggtgctgggaaaactggctagtcatatgtagaaagctgaaactggatcccttccttacaccttagacaaaaattaattcaagatggattaaagacttacatgttagaactaaaaccataaaaaccctagaagaaaacctaggcaataccattcaggacataggcatgggcaaggacttcatgtctaaaacaccaaaagcaatggcaacaaaagccaaa

SEQ ID NO: 177573 - DNA, 521 bp, Homo sapiens
taacttaggataaaaacacttcctattaaacctcaggtaccactgcttaaagagtatcattctcacatttccttgcaaaagtggaaacccataatccaaagatcctttttaagaatgagtcacaggggccgggcaaggtgtctcatgcctataatctcagcactttgcgaggctgaagaggatggattccttgaggtcaggagttcaagaccagcctggccaatgtggaaaaaccctgtttctacaaaaataccaaaaatttagctgggcatggtggcgtgcgcctgtaatcccagatgcttcggagactgaagcaggagaattgcttgaacccagaagtcagaggttacagtgagtcaagatcgcgccactgcactctagcctgggcaacagagtgagactgtgtctcgggaaaaaaaaaaaaggccaggcgcggtggctcacacctgtaatctcagcactttgggaggccaaggagggcggatcacaaggtcaggagtctgagaccagcctgaaccaca

SEQ ID NO: 177574 - DNA, 271 bp, Homo sapiens
atttggacttggtagtggatgccctggcaaaaggctggaaactcttccctttaaccaaaagttatcaatttctcttccttgacttgtgttcagcctttctgagcccttttgtttcttagcataaagaactggagttttctgagtttctatacattgtggaaagcttatcttcccctgggaaatgtggccttgaacctttcagggcactatcaactgtgattcacaccagacaatcactccccacaaagaactcaaagaaccaaagctgttt

SEQ ID NO: 177575 - DNA, 556 bp, Homo sapiens
gagaactctgaggttccaattgagttctcagtcaatctattttggtcagaaaataattaatagatgaaaaggtgacccagatttggggtcgggcccaagtctgccacccacactgcgtgggcaaatcacattgcctttctgggcctcagtttcctaatctgacaaatggacaggttagacaggatgcttctgagttggcttccaacccaaaagttctgtaagtacgtgtgagcagagccgtggactcagccacaccaagttttaatcagagttgtctggtaactggtggagatggggggaaggagagctcattaaacacctgcgggcatgcacagactcttctagaaaatcaagacacagtctccattcatggttttgccctagtccattttcagtgcggttggtgaagccagttcgccacccgagaactcgtgaggcttccaggaggagcgtactctgctttgcttcgttagccccagcatgtgctcagatcacagaggaaaagtcccagggcagcaaaacactggggagggccctgcgctttggagactgagag

SEQ ID NO: 177576 - DNA, 236 bp, Homo sapiens
ctcagcctcccgagtagctgggattacaggcacccgccaccacacctggctaattttttgtatttttagtagagaccacgtttcaccatgttggacaggctggtcttgaactcctaacctcaagtgatccaccagccttggcctcccaaagttttgggattacaggcgtgagccactgtgcccagccaaggatattctttttataacattttcaaaaattaaggcatattgtgtat

SEQ ID NO: 177577 - DNA, 390 bp, Homo sapiens
cagagacccagaaaggagatgcttgcttaagattttcctgagcaataaaggcaggcctggggtcagaagcatttcccttggctcctggcccaggactctcccatcaccatatgctgccatttgcagaaatgccagctgcaggactcgtgacatttgggtggctttttcctaaagtgtcggtagcgtgtggggctccattctcctgcccgaggctaaggtcattcctgtctacctcctggcctcaaaacacagcctaatggcctttgggctgtgctgaaactgccctgtgtcctgtgggggatggggagggctcacctgccaaaaaccagccgtggtctcatggtcaagatgtgtcagagatttctagagcttggagaactgtgttggagg

SEQ ID NO: 177578 - DNA, 576 bp, Homo sapiens
cggtgtggtggctcatgcctgtaatcctagcaatctgggaggctgaggtggaaggatcgtgaacctaggagttgaagaccagcctgggcaacaaagccggaccctgtctccttaaaaaaattaagttcaattaaacatttttaaaaataataaaccagtcattagaaccataaacctgtactgtttttgacaatgtaatgcactgccctgtaaaacactacaattaagactgttattttaaggaccctgaagtctgtgaagatcaggcacttttttgaaaccctaagataattatcccccagttttctccattctttgtttctacctagaaccaagttcaccaccaaaacgcagtcctgctgacgtcaagtattcattcatatgacatgtaattactggggtcgttaaaatttgggcagaatctttgtcaattcaccaggaccttaggcaaaaaatcaggaaaatgaagtgactgactcagtctgccaaaagcggatattctgaaataccactttccaactttaagaaacacttcctgccaggtgcggtggctcacgcctataatcccagcacttt

SEQ ID NO: 177579 - DNA, 201 bp, Homo sapiens
gatggaattgaattaaattagggaaagtaagagtaaaaatatttaactctcagtctcaaattcaataattcctgactaatggggcctcagtttccttatcaatacattgaaattagtaacagctgcctgatgctccacagatcatttctatgggtggaaaacctacacctctaccctgctgtgaataggatacgtctgaga

SEQ ID NO: 177580 - DNA, 346 bp, Homo sapiens
aggtgggaggaccgcttaagcccagaatttcaagaccaacccgagaccccatctctacagaaaaaatttttttgagctagccaggcatggtgacgcatgcctgtggtccctgctacacaggaggctgaggtgggagggttgctcaagcccaggaggtggaggctgcagtgagccatcatcacactccagcctggatgacagagcgagaccctgtctcaaaataaaaaagttattttatttacatggtccccagttttatttgtataatataccccttctacttttttctcagaatttgaggcagacaatatcctattagtttggtactttcccctaagcagatctc

SEQ ID NO: 177581 - DNA, 422 bp, Homo sapiens
gtcagggctcaaacacatccaatttaagcactgccaagggacaaggcaggacagcgatcagggctggactcagaatatgttctctttgccatggttgaggtattcattggatttttttcttctatcctcaaattggaaatagcttatgattccactggtgtcaaagtagaattttccaaaagttaaaaacataattctcatacaaatataaacatgtgtcaaagatttctttaattcactaatgagagaaccaacaaaatgacaaagccagtgcgtagagcatttgaatgaacttagtatttgtaggaactgatgaaagaatgttgcattaagagtgttaggttagatctaaaagtgttttacaagttattaaatccataaccttggggttacagtttataccagatacaaataatttgcat

SEQ ID NO: 177582 - DNA, 563 bp, Homo sapiens
tatatggattcagtgatgtgaccatatacttcctcttgctcctgcctgcttttcccctttaaatatcaaagccctcaaaatcatctttggagaaaggcacagacttctctctggggcaagtccttaaccttggtaaaataaactaaattgattgagacctgtctcagatactctttggtttacatgctgttctaaaattgaagaaaggttttacctacaaagccccagcaattgtcccctcatcacagttgcctgaatggggtcacatattcattgctgaaccaatcactgtagagggaggaggatggtggactttaccttagaccaagcaggccctgcctctaagtctaagtacatgtggtccaggatggagaagtggatctacctggtcaaaagcatgtgctgcattacaaaaaaaaaatggagaacagatgctgagtagcaatatccaccacatcttttcagtttatatgctgttaatatattttgttagacttttttttgttttgtttttgagacggagtcttgctctgtcacctaggctggagtgcagtggtgcaatc

SEQ ID NO: 177583 - DNA, 757 bp, Homo sapiens
gggagggtggctctgggtgttacagcaagaccgttggggagctcttgaattccaaggggttgggtcgttgtcctgtggcatgacaaaatccaggtgtttccagaatattaatccagcagaaggatagactgaaggaaaggaatcagaaagccaggagattggtttacagtcctttgttgcagacttgtatgtacgttgcatgagtttctaaaccctgtgatgggaagaaaggtgtgaccgccaacagccttggtcgggggtgaaaggacacgagctggaccacagtgagggtgctgcatttcatcctggcaagaattctgcccagctgtggctttctgtcctccgtctacaattgggagaatactggagacatcagatgtcgtgtaaggactaagaacgaaccctggagaggctcagcatctgggtgctatttgtagaggtctgctgggtgacatgtactagagtctttcattttgaagaacctgctggatatgactagaaaagtaaaggagaaaaaaactccaggactgatggatgagagaactgaaaagtggcccttgatgtcacagtgggcactgggactgcatgtccccaggggctgcaaactccagagctcaccttcccttgaatacacatccagtatggcccaagcccacgcatactacagggagtccagcctgcctggagtgccccctcactagtatttaggacaccccagggaaggttggcctgtcctctatttccagaggcaggcctt

SEQ ID NO: 177584 - DNA, 195 bp, Homo sapiens
aattgtcttgtgacaaaaggatggaatagacctagcccctatgtctgttgaaatagagataagctcatgggggtgatgtctggaatgaagctatggtggtagctaagagtcttcattgagaaaacaatcaagaggtagagtggccaggcacagtggcttatgcctgtaataccagtactttgggaggctgaggca

SEQ ID NO: 177585 - DNA, 532 bp, Homo sapiens
ccatgttatcaaattgtactgagactcttgcagtcacacaggctgacatgtaagcatcgccatgcctagtacagactctccctgcagatgaaattatatgggatgctaaattataatgagaacaatgtttggtgagccaaaactacaacaagggaagctaattggatgaatttataaaaatatgcctcagccaaaatagcttaattcactctcccttatcataaggataatcttgcctaaagggacagtaatattaaagacactaggaataacctctgtactttggacagtagacctgcatagcccattaggcctcaatgaagtcttatgcaagaccagaagccaatttgccatttaaggtgattctccatgtttctgctctaactgtgcttcacaatactcaaaacactaaatcaggatgtttcctggagttcagggagctgtccgtgttactgagcagttctcagcaacacaaagatcctactgactcctcatcagacttctttctcactggaattttacacctgggctg

SEQ ID NO: 177586 - DNA, 852 bp, Homo sapiens
cgcctccaggcggtgcccgctggtctctagagtgtcagtggcgctgtcttcctgcgttaccggagcgcacaaaatactcggtccccaggccgagaacgcacctctacctgggtcctgggtcccatttcacagactgagatgcgtgaagcgcctcctttagaagagctgacaattcttagcaaaccaagttttgcgtgattttggggaggcggcgctgccccaggaacgcctggagggcctgcaccaccaaactggacagccatgggtgtgtaacctctttttgggcctgagaaacagacctttctctccactcagagctccggcttcagctattgtgcttccgaatgccactaccatcagatatgccatctacagaacttaacacctgagcacccacccttcagggccacccatgggcccaaaacgggataaaggagccattccctgacataggaggaaaacatttgctgagaagctactgtgtgccagacacaatcttggactttcacttaatcctcaaaacagccctaggaagaagtacctaccgttaacagataagaaagctgagacccacggtttacacagctaaggagagcaaaggttttaacccaggactgtcctgactccacaacatcaaagttgttgttttgtttttggtgttttgtagaaacaggatctccctattattacccaggctggtctcaaactcctgggctgcagcagtcctcccacctcggcctcccagagtgctgggattacaggcaagagccaccacacctggctgatgaataggaattgggtaaacatttttgaaaattaaataccaaattaccattacacaatgccaaacag

SEQ ID NO: 177587 - DNA, 864 bp, Homo sapiens
cgcctccaggcggtgcccgctggtctctagagtgtcagtggcgctgtcttcctgcgttaccggagcgcacaaaatactcggtccccaggccgagaacgcacctctacctgggtcctgggtcccatttcacagactgagatgcgtgaagcgcctcctttagaagagctgacaattcttagcaaaccaagttttgcgtgattttggggaggcggcgctgccccaggaacgcctggagggcctgcaccaccaaactggacagccatgggtgtgtaacctctttttgggcctgagaaacagacctttctctccactcagagctccggcttcagctattgtgcttccgaatgccactaccatcagatatgccatctacagaacttaacacctgagcacccacccttcagggcaatatggtgaaaccccttttctacaaaaaacttagccaagcatggcatatttgtgtaatgccatttgcatgacccacatggtcaccctggaccccgtggatcaggccctgcctggtgccaccaccgccacttctgtgccaggcccccagtgtgatgcaagttgcatgatgctctttgctgtagtgccttttaatggcatagctttggcaggtttggagatgttcagaataggcaaatcctgtggtggatttgtggttgtctaaggccctggtggaagggagcataggtgaattggaggggatgattaaaaggtgtgagatttcattttggggtgatgaaaatgttctaaaattggttgtagtaatggttatacaactctgaatatactaaaaggcattgaattgtacactttcaatatgtgagttatatctcaataaagctattttacaaaaaaaga

SEQ ID NO: 177588 - DNA, 819 bp, Homo sapiens
ctgcatgggtccaccaatacaacccttgttttgttttgttttgttttcaataaatacagtcagccctctctatcagagggttccacatccacaatgaaacatggttggaaaatacagtatgggatgtgaaacctgtgtatagggtgggctgacttttcgtttccataggttctgcagggtcaactatagtacatgagtatactcacattttagtatcctaatagatcctcaaaccaacacctggcagaaaatggggaacaattgcataacagtattcaagggactgggtatgatggcttgcacctgtaatcccagcacttttggaggccaaggcagaacaggagttcgagaccagcctgggcaatatggtgaaaccccttttctacaaaaaacttagccaagcatggcatatttgtgtaatgccatttgcatgacccacatggtcaccctggaccccgtggatcaggccctgcctggtgccaccaccgccacttctgtgccaggcccccagtgtgatgcaagttgcatgatgctctttgctgtagtgccttttaatggcatagctttggcaggtttggagatgttcagaataggcaaatcctgtggtggatttgtggttgtctaaggccctggtggaagggagcataggtgaattggaggggatgattaaaaggtgtgagatttcattttggggtgatgaaaatgttctaaaattggttgtagtaatggttatacaactctgaatatactaaaaggcattgaattgtacactttcaatatgtgagttatatctcaataaagctattttacaaaaaaaga

SEQ ID NO: 177589 - DNA, 835 bp, Homo sapiens
cgcctccaggcggtgcccgctggtctctagagtgtcagtggcgctgtcttcctgcgttaccggagcgcacaaaatactcggtccccaggccgagaacgcacctctacctgggtcctgggtcccatttcacagactgagatgcgtgaagcgcctcctttagaagagtgacttttcgtttccataggttctgcagggtcaactatagtacatgagtatactcacattttagtatcctaatagatcctcaaaccaacacctggcagaaaatggggaacaattgcataacagtattcaagggactgggtatgatggcttgcacctgtaatcccagcacttttggaggccaaggcagaacaggagttcgagaccagcctgggcaatatggtgaaaccccttttctacaaaaaacttagccaagcatggcatatttgtgtaatgccatttgcatgacccacatggtcaccctggaccccgtggatcaggccctgcctggtgccaccaccgccacttctgtgccaggcccccagtgtgatgcaagttgcatgatgctctttgctgtagtgccttttaatggcatagctttggcaggtttggagatgttcagaataggcaaatcctgtggtggatttgtggttgtctaaggccctggtggaagggagcataggtgaattggaggggatgattaaaaggtgtgagatttcattttggggtgatgaaaatgttctaaaattggttgtagtaatggttatacaactctgaatatactaaaaggcattgaattgtacactttcaatatgtgagttatatctcaataaagctattttacaaaaaaaga

SEQ ID NO: 177590 - DNA, 530 bp, Homo sapiens
gtcatcatgtgtgcacagctcatgtgacgtagagtattcttagtatcctaacacacaatagagtacctaaagccagaacttttaagagatatacctgtaagtttgggcattacatcagatagtattttattaagttttgaaagttctcagcttactgcacccttgttgttagtgggggttgatcataaatccacaggtacatgcattttctcaatttgtaaatttttttttgaatgtatataatttttatttgttaactatatctcaacaaagttggaaaaaatgaaagagaagtgaaggagcaggaagagcaagatggagagggagaaaatccaataaagagtccacaatgtaggttgcagctgtgaggatgcctctcagagctgaagggaaaaaaaagcacacacacaccagctgccatccgccactgcctgagagctgtccctaggagtattaattaactcccttgtgtttcttcttagctgtgcctgcctctatctggggctgaaaagggcttctgtttcttacca

SEQ ID NO: 177591 - DNA, 1694 bp, Homo sapiens
agcgggccatcgcgcactggggctccgggcggctgggaccggcctggggtagctgcgcagcaggtctgtgggttctggcaccacctgagcccactgggcatctggtcatccctggcacctctcctttggagccaccttgtccctggctagacagtcacattttccagtgccgttttggaaagatgttgcctttggagaaggcgtttgcctcccccaggagctccccagccccgccggatctgcccacgccggggtcagcagccggagtccagcaggaagaacccgagaccatccctgagaggacccctgctgacctggagttctcccgcctgcgtttccgggaatttgtctaccaggaggctgccgggccccaccagaccctggcccggctgcatgagctgtgccgccagtggctgatgcctgaggcgcgctccaaggagcagatgctggagctgctggtgctggagcagttcctgggcatcctgcctgataaggtccggccctgggtggtggcacagtaccctgagagctgcaagaaggcagcctccctggtggagggcctcgctgatgtcctggaagagccaggatgctgctgggctcccctgcgggctcatcctcaattcttagcgatggagtgtacgagaggcacatggaccctctgctgctaccaggcgagctcgcgagccccagccaggcccttggagctggggagatcccggcaccttctgagacaccctggctttctccggaccccctgtttctggaacagaggagggtcagagaagcaaagaccgaagaggacggcctgccaacaccgagcagaagctgaagtcctttccagaggaccctcagcacctgggggagtggggccacctggaccctgccgaggagaacctgaagagctaccggaagctgctcctgtgggggtatcagctttcccagcctgacgctgcctccaggctggacactgaggaactccggttggtggaaagagatccacaaggaagcagcctcccagaaggcgggaggcggcaggagagcgctgggtgcgcctgcgaggaggccgccccgcgggggtgctgcctgagctgcctacggaggcgccccctggggacgcccttgccgatcccccgtcgggcaccactgaggaggaggaagagcagcctgggaaggccccggacccgcaggacccccaggacgcggagtccgactctgccaccggatcgcagaggcagtccgtcatccagcagcctgccccggacaggggcacggcgaaactgggaaccaagaggccgcaccccgaggatggggacgggcagagcctcgagggcgtctctagctccggcgacagcgcagggctggaggccgggcagggccctggggctgacgagccgggcttgtcccgcgggaagccctatgcctgcggcgagtgcggggaggccttcgcgtggctctcgcacctgatggagcaccacagcagccatggcggccggaagcgctacgcctgtcagggctgctggaagaccttccacttcagcctggccctagccgagcaccagaagacccacgagaaggagaaaagctacgcgctggggggcgcccggggcccccaaccgtccacccgcgaagcccaggcgggggctagggcgggcggtcccccagagagcgtggagggcgaggctccccccgcaccc

SEQ ID NO: 177592 - DNA, 803 bp, Homo sapiens
agtctccaggtctccagccagatccggggaatgtgttctctcagtgaagccagcccttgcccggattggaaatacaatcctcttgcctgtgcatcttcagactgccagcgagcacttgagttaattaagttcgcctgagttgggcggatggcacagtccaggcggcctcagagaggggatggaaggaaccctggctcctgttaagaatgacctttcctccccttgactcaccacccatctgttctataaattggctttttttcagcctgaatctcattaggatcctgtgtcccagggaaggagaaaggaagagaggcattttccctaaccgtgtcccagagaatggggagaggaggggcctgggcagaagcagcacccacatgagagagttccagaggtgggcgctcagcaggacaacagtgtaactgccaataccactagcaagggtcagaagcgaggagcagggagaggctgaagatgggtggcactggtagggacccccatggccctaaagcactttgggcttccctaaaatcccaaggatacctcaagatccttcagcccctagccaggcacaatgactcacacctgtaatcccagcacttcgggaggccaaggtgagcaggtcacttaaggtcaggagtttgaggccagcccaaccaacatgacgaaactccgtctctactaaatatacaaaaattagctgggtgtggtggcaggtgtcggaggtcccagctattcaacaggctgaggtgggaggattacctgagcctggagaggtcaaggctgccatgaggcgtgat

SEQ ID NO: 177593 - DNA, 344 bp, Homo sapiens
gaaacaagagggttagtaagggaaatcatttggattatatataataaagaactctctggttggtaaacattattgaatataagaagaaaagcttcaaactttttggccctaaaaaatttgcccataggataaaaataacaagactaggcaaacacattccctataggttacagaacaatggaggaattaaaagacaaataaattccatttcataatatacttgtcatacttatgtaaaagttgtcattcttctcacaagcccctgcatcccccacaaaggcaaacctgaacaataattctcattaaagtatacttccataatctactatgggcacggaagatca

SEQ ID NO: 177594 - DNA, 419 bp, Homo sapiens
tgccatgattgtaagtttcctgaggcccatccagtcatgtggaactgtgagtcaattaaaacgtttttcttcataaattacccagtctcgggtaattctttatagcagtgtgaaaatggactaatacaccatcaaaggtttttggtattttttgtttatttgtttatttgtttgtttgtttttggtcagacagagcttctttatgttgcctaggctggccttgaattcctggcctcaaatgatcctcctgtctcagcttcccaaagtgctgagataacaggcgtgagcaaccatgcctggcctcaaaagattttttaatgatgcctgtaatattttgactctgaaactattggggtcaatataaatattttttcaatatggttggttggttggtatatggatgttgtattttcccaaat

SEQ ID NO: 177595 - DNA, 311 bp, Homo sapiens
gagattgttccagagaaaggatgggcacctttccccaaagatgcaggcttgctcttcagcggtgggggtgatccctaagggttagacaccatttagattcagggtgagtacttcacgatatggggaaaggtggcactcctgccagggaaaccttttggaaaatgaataagctctccctaattaaaccaagaatttcttctggtggattttgttagaggagagagaagaatgggatgtgaaacccaacatgaataataccaccacaaatagtttattgtagattcacagatctaagagaaataacaatcaaa

SEQ ID NO: 177596 - DNA, 268 bp, Homo sapiens
tcagcaagggggaggatgtattaaaagagggtaaactggagggtaaacttataaggcacactgcttaatgggccagtcaagacatgagcaatacctaatgcaggccaggcgcaatggctcactcctgtaatcccactctgttaattcttaaagagaaggccaagaaatgaaatggacactactgccagcatgaaagtggagaaggaacactataaaactcatttatccttcaagcttcctaacctctctcacagctgatttcctggaa

SEQ ID NO: 177597 - DNA, 454 bp, Homo sapiens
taggggtatggggaatggacgcagtgcacctgggctgcctcagggctcagctgtggggcaggtccgcttcaagcctttctgggttgacctgatggagctcttcctgtcctggccctaagaagctcctcctgccagctccttcctcccactaccccctggggcacagccagggctggggcacccactcccaggcaagaatgcacccctggagaaaggggctaggcctgtaggagagccaagcctgtgctttctcccggtcctggttttccagggagccctgactggagggggatgggaggagaagcccaggagggagggggagctggggaagcagaaccaggaactggaaggggaagggtgtgggtgggcccagatccagcctgcctcccgctctcccttgcctgccaatcccctcctgggccctggcacactcaaggcaggggcttggcggccg

SEQ ID NO: 177598 - DNA, 342 bp, Homo sapiens
aatgagaggaatgtttgaaacatcataaataaggatttatttatatatgtttgattttctttttttcctctctctccctccattttttgcctctcttccttccttccttctttccttccgtgttcctcttcccctttccttttcgactgggcttttttagtaacttcatagagtgatataattattctgtcacctttacattcattagagtaggctcactcccattctttgaggctgtattttttaaccattcattataaaatgaaaggtacagaaaatcacataaaatgtagcatttagttggttattaaaagtttggcatctttttaacagtggtgacag

SEQ ID NO: 177599 - DNA, 289 bp, Homo sapiens
cacgttccttaacattcttggctgtgagggaaagaaggcaaagacaagagcctttatcctaacaactcaattgctggagagaagattcatgcatattctatgtggcatcacatgccatagccctgggattgaaagccatgcaatttaagggatggtgttaatctcagtccaaataggtaataagatcttgcactttgctatattttaggggtaggaatgagattgggggtttgatctataatttgtacccataggaccagtgatttgcccagtcatctgtgagtaaatg

SEQ ID NO: 177600 - DNA, 312 bp, Homo sapiens
gtcaaaaatgctcccccaaaatagaacaagaccaagacatgacaagaaaatatacttaaaatcagaaaactaaatacaggaagtccaacattcaactaaaggaaacggaaaaggagaacacagagaaaacagtaaagaataaactgtcggccacacacggtggctcacacaggtaatcccagcactttgggaggccgaggcgggcagatcacttgaggtcaggaatgtgagaccaaactggtcaacatgacaaaaccccatctctactaaaaatacaaaaattagccaggcatggtagcacgtgcctgtagt

SEQ ID NO: 177601 - DNA, 247 bp, Homo sapiens
ctctgcctgcactgttgccttagacaagcatatgcctcactctctcacctttttccgttctttgctcagatgtgccttctcagtgaggatggctttggttatcatatctacctttgcaaatcactcctcaccccttacagtccatatatctccagtccctgctttatttttttatagcatttaccatctgacttacttgtgtatttattatcttgttcccttacccgaatgcaagcagagattttaa

SEQ ID NO: 177602 - DNA, 196 bp, Homo sapiens
atttaacaacatatccctaaaaacatttcccatatagcgatgtttattaaatccctttttttacactgcattttgttacatattggaaactatttgagaaacgagaggtaattgcaaacatgacttgacctggttcaaaccctaagagcttttaaaactccaatgtttaaatggagaaaattgtagttttctggta

SEQ ID NO: 177603 - DNA, 678 bp, Homo sapiens
ctagagtatctggaagaatggagttgccatttagtgatagagggaacgctggggaggatccattattggagtgagcattagcagcttggtctggggcacatcaagcttggaaggcatgttagtcatccaagtggagatgttgagtagacagttggacatgggagtctagagtttcaggagattggtctgggctacagaagtggatttttgaatcaacagccatgagacttgataagattaccaagggagtgtagagagataaggccttgagtgttccaatatttagagtttggaaagatgaggaataatcagcaaaggagactgcaaaagagggccaacaaaatggtagaaaatgtggaaagcctggtcacctgggagttaagtaatgaaagtgtttcaaggagaaagtaatcagctgtatctaatgctatacatgtgctaagcaagataagaacattggatctagcagcatagaggtctctggtgatctgaaaaaaggcaactttcatgtagttgtagaagagaaagttcagttataatggatcctgaagagagtgacagaagagcgatttatgactcaaggaaagaaaaaacaaatgggctggtagttaaagggaaattgagtcaagaaaaggttcaatattttttaatggtagaattgaccgtatgtgtatgtgc

SEQ ID NO: 177604 - DNA, 589 bp, Homo sapiens
caaggaggtggggctaattgggggtgatcttggtggctggctaccacagatgaagttcgtgattagaattattggggtcaacagatctgaatatataaaaatctcttaaaacattctttcaaattgttttctagaaaaattcttttgatctgcatactaaccagccaagtttgagactatcttgccattaagtagaattattgtttcacttttcagataaaaagtgacacttcatttaaacttgggaagacatttcacttattagccatttgttcttcctcaatttattcatttattaaagattcactaagtataaaaaaaagattgactgaatatcttctatgtgcaaggtaagtactcatgccaatgagcaaaaccagagagttcttgctctcatagttattacagtctaatggggaagccaaacaattggataaccgcacaaagaaatataattatagccaggtgcagtggctcacgcctgtaatcccactactcgggaggctgaggcaggagaatagcgtgaacctgggaggcagagcttgcagcagtgagccgagattgcgccactgcactccagcctgggcga

SEQ ID NO: 177605 - DNA, 616 bp, Homo sapiens
aaagtccatgtccttaaccaccaaccattaaatttaattctacatgcaaaaaccttattttcccaatgacctacaacccaaatactaaaacaacatgatttgtctctttaataaataaagaggacagaggagaaaggaaagaaaggacaggtaacaagattacttgctcccaggaatgaaaaaatatgatgttccatggatacttagtttggtccctaatccgcaacatcacaaaagatatctgtttggatcaataccatttctgctcacacagtctggtattgtcttttgtagacaatatttctttgtgtcaaactaaaaaagaaagaagtgggattcacaactccatttagaaagagaaaatattataaacggacagaaactacttatgtgtcactcaacgtaagtgacttaccagtatgcaacagaaaagtccatatttcaaagaggagctcatatgcaaagtttcaaagacccatggtgataacccaatataagaaaatttggccctctccctctcccctttctacggtctccatctccctcatctcccgtttccacagtctccctctgatgcccagccgaggctggactggactgccgccatctcggctca

SEQ ID NO: 177606 - DNA, 620 bp, Homo sapiens
cttcgtttaggtgttaacaaaatccaggccagacaaatctaaactttaatctcatacccagttcctagatgagtcccttctccagctcaggttccgcctaagcctcagggttccttacttggtgggcaccacctgctcccttccccacctttgtcctctttttcctctgctggctcctccggggttgggtgtgttcagaggcagagacaggctaaaggtctttggcttttaggttctgttggtgggtgagttccagatatagctttctcttgtaggatatttcatttatttatctattaaaaatatttatttagaacacaccattcatgtgccagaccctgtccaggcactggggctagggtgataaatgagatcaacaaaaatacctgcccacattaagctcctgttctagggaaagacagaaagaaatacacgtgtccttagtatattagaagattccaagtactgtagagaaaaataaagcaggctggactcggtggctcatgcttgtaatcccagcactttgggaggctgaggtgggaggattacttgagctcaggaatttgagaccagcctgggcaacatggcagatcctgtctctcccaaaaaaaaaaaaaaaa

SEQ ID NO: 177607 - DNA, 661 bp, Homo sapiens
cttcatatctctgtggtgttaagcatgaaactctcttggcctgaaatgtgcctctcctatgaatccctccaggacagtcatccacctcaggtagaaagtttctgccctttccccactcacaccatttcataattccccatctccagtgtttatggtcttacaggtgaatgctttgtcgtcttcaccaccagaacatctgcttattgggcagaggaaccccatatcttatccctcttttattcctactactaggcccatccctcagcctaatgcctgcctccccttaagtgtttctggaacattatgtgaatgaacaaatgtcagaggaattaggcaaatagctgcaagaaaatcagcggtacttaaaactgtctttcttcaggatgtttttttctatacgaacccacttctaaactagcacaccgaaattacttgttcagtacgtgtctccctctcattagaatgtaagctcttgaggctctggtttctgtccctttgttccctgctgtgtccccagaatcttagcacaatgcctagtttatagtgaacactcattacatatttgctgagtaatatatcagttgcacccatggggtttccacaattgaaactccttttgaacccagggagctctggtcttttgtcagtcatctctatctta

SEQ ID NO: 177608 - DNA, 325 bp, Homo sapiens
gttttcctctctactaacaataaccagtttaaaaatgtaatggaaaaaattgactttagcaacaaaatattgaaaacagaataaacttaaaaaagatctatatggagcacttcagaattgtatgaggcatataaaagatttaacatgcagaaatatgccttgtttcttccatatggggatgataatagccaacgtgtatttattgcttactctgtactagatactgcggtgtgttataaacattatctcatttagaatgagaattataaacttgtcagttcttccccactaaacaaaatcataaaggcattattttgggaacttg

SEQ ID NO: 177609 - DNA, 410 bp, Homo sapiens
gagtgaatgctttgcccttaagacgggtccagatgttctccctgtacataactctgtgcatgtgtgcgtgcgcgcgcacacacacacacacacacacaaacacacatacactctcttcccctctcacacacacatacacactctttctctctctcccctccccccttacacacacacacacacacacacacacacacacacacacatattcacagtgctggtatctttatgtgttagtgaacaattatacagtcatattagcctgtgtgtaaaagaattatttcccttagaaaaagacagaagttcctcttctttctctgtagtaagttggagtgactcattattttttacattttcgtgaaaaccacacacaacaaactcactgtgtgagacagcacatatcctctcag

SEQ ID NO: 177610 - DNA, 376 bp, Homo sapiens
gccaccctccctgcctaatctgaggattttgctagcaaagctgtcaggcttaatttcagcaaattgttttgggtaattagtcccttttaattgctcatggaaatagtaattttaagtgacaagattattatatgctgctcgctagtggattctccagggtcaagaaaacaccactgagattgctataacctgttcttttctatcttgggcattccccttgaaatccagaaaagacatttagtaaagtcggttcccactctgtaaaaagtatagagcactggtttccttttatccttctgccaaagtgaaggattagagaaggactttcaacttttctgtgcgactgccagcccatgtcaggcttcacagatttgct

SEQ ID NO: 177611 - DNA, 475 bp, Homo sapiens
  misc_feature (14)..(14): n is a, c, g, or t
gggtctgtttctgnacttctgaaataataaaagaatgtggctgggcgcgatgactcacgcctgtaatcccagcacttcggcaggtggaggcaggcagatcacctgaggtcaggagttcaagaccagcttggccaagatggtgaaacctcgtctctactaaaaatacaaaaattagccaggtgtggtggcaagcgtctgtagtcccagctactcaggaggctgagacaggagaatgcttgaacctgggaggcggaggttgcagtgagccaagatagtgccactgcactccagcctgggcaacagagtgagactccgtctaaaacaaaacaaaacaaaaaacagttacttgatattagtaaaatgcaatgaagacccttactgctacttacaggtgaatgatcaaaggtcattcctgagatgtgagtctaacaaatgggagggttttggccgccgtaatggaaacagggctgtccgt

SEQ ID NO: 177612 - DNA, 432 bp, Homo sapiens
ttcaccgtggtctatttccaactcccaatggtttgacaactgcttatggatgaagttcctcagttctgaccatcagctcactgaatgtgctccagtaaagttgcaaagcgagtcattaagcttcgtccaccacagtgagaacaacttttcctcagtccatttcccatcaacccctggggaaatttctgagttgcccaccttgtctgttaggcttctttccctagttttatcaggtatgaccaggggaccatgactacattgtagacgcatggttgttgggagtctgcaataatagatcggggcaaatttaggggttaatgtgtgctggaataacatcccagtcataggttgggtctctccaaagcagagcctgagacaaagacttatgtaccggaagtttacttagaaatatgattctggaaagcagaagtg

SEQ ID NO: 177613 - DNA, 456 bp, Homo sapiens
gaagtcctgggctcaagggatcctcccacctcagcctcccaagcatctgggattacaggtgtgcaccaccacacaggccccttcattcttgaagcacaacttactctctgataaacacagtgttccaggctccccttatatgttccctgaaccaacctagtaactagccattccttcaaggatccctaattccttttggtggaagatggtatttcaatatacagatctgaagtgtacaattcaatgagatttgagaaatgtatgcaccactgcagacaatagccccaaagtataagccatttccatcaccccaaaaagtcactttgcctcttgaagattattcctaaccccataagtaatcactcttctgatttctctcaacacagattcattttgcctgtgaattcatgattatagtcaaatgaattcatttattcttcatttgaatagaaatat

SEQ ID NO: 177614 - DNA, 285 bp, Homo sapiens
agtgatttagaaaacaatgatgtcatgattctagacaagaatctagcataatctgtatggggtgcttagatgctacaaaatgccttcaatttatctgttattgtttgttgttgttaatgatcataaagaatgaggaagaagattaaaatttaaaccaagtgacttgtgtggagattcaagcatctctatccaaccaatcttccttagcctaatatggaatattaatctttatatttatctccttactttccctaacacagcattaattgcaacattttcttcatt

SEQ ID NO: 177615 - DNA, 701 bp, Homo sapiens
atttctctgaagtttttttaaaaaaatataaagagttggggttgttttgttttgttttgttttgaagcctcgctctgttgcccaggttggaaaacatgagctgagatcaccattgtactccagcctggcgacagagcgagactccgtctcaaaaaaaaaaaaaaaaaagtgtagacgtgggtgctagtggactgtgtgatagtacatcatcattaattatgaggttctttctggactatgtggacttgagttagccaggctctactgtcctggaggagttggtttttatctttttatcctttgagaagcggggggaaagggtgtataggtgcattttttcccccattctgttcctggaggtttgtagacctcctgaaacttatccatggtctctagcctggaaggatttgcggcgacagagaaaccaggtcagatgtttataggaatgggatacaggttgaataaaaggatcctgtacaagaataccaattttccatatacaatactaattgggtttagttggagcaaaagttttcagcaagctggttagatgaaggttgtggtttgccaatatacaaagtaaactaatgccacaaactcagggacaggccctcttactttatttgtcatgggaccatcattgaaggagaacgtactctgaacctggtatagactaatccatcagtcatttggtcatctgc

SEQ ID NO: 177616 - DNA, 372 bp, Homo sapiens
gagcccagcgaagtgccaacacctaagagacctcggggccaaccaaagggaagcaaaaacaagggtgccgccaagacccggaaaaccaccataactccaggaaggaaaccaaggggcagacccaaaaaactggagaagtaggaagaggagggcatctcgcaagagtcctcggaggaggagcagtgaaccgtgcgtgccgcctgctcctcactggaggagcagcttccttctgggactggacagctttgctccgctcccaccgccctcgccccttccgcaggcccaccatcaccaccgcctctggccgccacccccatcttccacctgtgcccacaccaccacactacgcagcacaccagccactgcagggct

SEQ ID NO: 177617 - DNA, 264 bp, Homo sapiens
tactctgatccagtttagttttaatggaggtgttgctgacttaggcatttgggccttcaataaatccctttatgaactacacagtgagacccccatctcaaaaaatacatatattcctgttgaaaagaatatttaggggaaagggtaaaaaacggagaaaaatacattttaaatacctatggtcagtatcagaaaaaaaatttaaatggtctagtgagataaaagttgcagggaattggatagcagaatatttaagggaaaaaa

SEQ ID NO: 177618 - DNA, 345 bp, Homo sapiens
aggggcggctccatggaggtgctttgtaacatttggtggtaaagttctccacactcaaatcaatatgtttcaaacaatatttcatgtcataacattttttttcaatgaaaataatttgatcagtctggaattcattgaatccagattatacatttatgcacggacacgtgcaaacacacagacactcacacatactcttaagtagatgtactctccaagggcatcctcgaggaaatccatgagtccattaccaggtattttatgtttcgttgtcatgggcagcttatcccaagggtaactggaacaaagtgtttaaagggaacatgaaggcgattaggtgaaaat

SEQ ID NO: 177619 - DNA, 238 bp, Homo sapiens
atcctagctacttgcgaggctgaggcaggagaattgcttgaacctgaaaggcacaggttgctgtgagctgagatggcgccattgcactccagcctgggcaacaagagcaaaactctgtctccgggggggaaaaaaaaaagaatatggaaccacatctacagaattttgaggataaagtgtttgtgaaccaaacatttttgttctatgtcaaattatctttcacatttaaagcgaagag

SEQ ID NO: 177620 - DNA, 591 bp, Homo sapiens
tagcaaccaaaatttttgagcacttgcagtacccacttagtgcttagagcctaaatggggaataaggataagtaaataagcatttaaaacagtatgaagactaagggatagagacctacagaaacaaagccaaacatatgaaaatgatgaaagatgacttgttctagctggggaagtacaacagactcaccctgacacaactcttcataccaagcagttcctgaaatcctcgctaagacactgaaatataacttcaggtccctttgttctaatgttctccacatatagagcagttatcctaaatccagtctcaaaaactcaccacaaacatgaactaagtcactttcccctgttttgtaggctaaccaatttaaaatgttagcaagtcctccaaaatcctaccgtcaactgttaaattacatttctttatgtctgctccagtttcttcacggattttaaaataaagggacctacaacaaacataaagctctgtataggagtaggaataattaatacaaagtatagagaatactctagcactggcggaaaagagttgtggtttatgtctggtttaggaggcatgtgagtctg

SEQ ID NO: 177621 - DNA, 177 bp, Homo sapiens
caactaagagactacagtgacaagctcagaagtgtagattgcaggtgtagattaggaaactgttttttggggatttaaaaaccactggagtaaatgagagtttgtgaggacagtgggccaagatggaaccccagggagcaatttggttggcaagatggaagagaacatacctataaa

SEQ ID NO: 177622 - DNA, 520 bp, Homo sapiens
agctgaaatgtaggaggtggatatggggcagaagatgaggctcaaaaagaaaatgaaaccagattgtgaagggtctaagtctctcactttctgtggtagacagtggagagccacgaagctttagccatgactaggaagttcaggctgagtcctcagtgaaagaatgagtagctcttgcaccaggagttttatttattcagaggaatagaaacgattttataaatttgtttatgaagtattctgctaagcaagcaggaggcctgagtagtgtttataaggggacaagagaccgaaaactcaggaattaaaagcacgagataaacctgaagttctgtatcttgtcagccttagtctagcgtccgccaggtcaaatctaccgtctattataaacatccgccttttcataatacataacactactgcagtttttttttaagccttttttctacaattagaatgtaaactttgagagagcagaatttatgtctcttcttggttatcataaactcctcaaagcttg

SEQ ID NO: 177623 - DNA, 419 bp, Homo sapiens
ccaaataatgtcaacctcaaactcatatactggcagttttatttccatttttatcttgtcaattttctttattgagagagaattcacacaccataaaacagcttgtccagtttccaaaaatattaattttggagagtattaccatcttaacaatattaagtatcctcatccataaccatgggatatcattctatttatttaggtcttccttaatttctttcaacctgttttgcagttttcagtgtacaagacttgcatttgtcttgttaaatttattcctaagtattttatttttgatgctatcacaaatgcaataattgcatttcagatcattcatttctactgtatagagaattgaattttgtgtactgatcttttatcttgcaacctttctgaactcattttttagttaatagttt

SEQ ID NO: 177624 - DNA, 274 bp, Homo sapiens
tttttaaattcaaattctgtataggatcctatctcaagcatctaatgttttcagttattgctatactactgatcagaacattaccactgaagctattataaaaccaatgaaataatatattattcacatttcaaaaacattttaaaaagtagatctgatcatagaaagtacccaattatattagaaatttgcttttctgtgtaatgatactttgttaggaactggttgaacactttaatccatagtgcattgcagggttggctactaatccgaa

SEQ ID NO: 177625 - DNA, 215 bp, Homo sapiens
gtctctttttggaaagaagaaattttctttttcaacttgacttgatttttttttttgaaattacactacatttaatttgtgtatgtctcggtaccagcagacaacatagtttctcatgaacttgaaataggtaatttattacaaaaacaaagctaattttgataaaagtaattagttgagagtccaatatgatttaaacctaagttttaaaaagt

SEQ ID NO: 177626 - DNA, 384 bp, Homo sapiens
ctctacaacatgcggtatgtatgatatcggtcctacttacgaggtaaccaggactaggcacatgaaagatgactaattaccccaggacactgtctccctcaacctcaactgtgggggtaatttttaaaataaaaattaaggccaaatacagtggctcaggagaagtgctcttaactcccacacgtgtttaggttttttggtttgtatttgttatttttacttttttccttttgctacatcaaaatgagtcctttataatttctgccctagggaattctaataatttatctttgtggtccaatataaaatcattttaaatgtatgccatgaatgtagtcaagtattgataataatgtagtactagtagtttgctcagtcagcaca

SEQ ID NO: 177627 - DNA, 498 bp, Homo sapiens
tcccctccacaccctccaactacccgcaaccaccattctattttctgtcactatgattttgacttaattgatatttgaaggactctgtacaacaaaatggccaaccaccttcttttcaagggtatatgatacaccttataatagtccagataattaaagggtctgaaattatggagagtatattctctgatcacagtggaattacattagagcttaagaaaaatcagataattaaaaaaacccaagatatctgaaaattaaacaacacattctatataatccataggtcaaaaaagaaatcacaaaggaaattggaaaatattttaatctaatgataacaacatattaaattttatcagatgcagctaaagcagtgctaaaaaaaaaatttatagctttaaatgtttgtttatattagaatgaagaaaagcctaaaaccagtgatctgcattcctacctcaataaattggaaaaagaaatgtaaattaaacctaaagt

SEQ ID NO: 177628 - DNA, 709 bp, Homo sapiens
ggacaggaaggagaggtgaggaaagaggaggtttccataaacaggaaaccaccaggtggccttttcacctcttaaatcttgagggagacaagcggagaaccccactcccaaccaagagagaggacctaccgtttcccaatcagcggaatgtggaaatgctcaacaggactgaagtgaggttaaactctcttcctctaattcttccccgagtggcaaggtgggttatcaggagggagaaagagcagggtggatgggtgggttgatgggaagggacatgggatgcatccgtgggatttcacagatgctggcaggacataggatggagtggggcagtagtcaaggcaagagctgtggctgtgtagaaatatcagcgatcaggacactcatcaaggcattgttcatgacctgatcacactgaagactgcctcgatgctttcatttggagggtatttgtgatgtaattcagggttaaaagcaaattttaaaacaataggacactgtaatttcactcgtagaaataaacacacacacacatataacacctacagtcacatgactggacagatatttattaaaacaaaaagggaagtgatgggactagagatgtttgctgattttccttttagcttacctgtattttccagagttttcaccagtgagctcatattcattagcaataatgtggagggggtcacagatttctctcaca

SEQ ID NO: 177629 - DNA, 450 bp, Homo sapiens
atggggcccacagtgagctcaaaaccctcatcccttccctagggtggccgggaatctgccgtccacatggagccggggaggaggagagactctgatttgctggaaggacctcattcatttccatccaacccccaggcttccctgcctgccgagctgactccacccagccctgagcctaggcacagtaaccaccttcacgtctgggagaacacacagtccccgggggccagcatgcaaaagttctttttgaagctgggtggatggagccccctccctcctgagggtgctccccagctcctgttgagcagacagcccaccccgtcgtcttggcaccagggttttgctagtggcagataaagatgatgttccagcagacgctccagtgctgccgaggttggtgtgtttattagacctgaaatgagaactgtgactctcaagctcatgggcact

SEQ ID NO: 177630 - DNA, 329 bp, Homo sapiens
ccagtcttttggtttctcaagctaccaatatgacggcgaccagcttgtaatgtccccggagtgttagccagtgggagctgctgccctgacccggcacccgctggctggctctggccctgagcaaggctgatactgctaaggccacagggcaaacggtgccctctgtgggcccctagaacagcttgtcctgtgaggggcattgtcatggtgatgagagcagtgctagggaaagtgtaatttttaaaaatgtctaaacattttgatctagtcttttcaatcttttttttttttttttttgagacagagtctggctctgtcacccagaccga

SEQ ID NO: 177631 - DNA, 652 bp, Homo sapiens
aagtagaggcctaaggtgggtcacaaacacaccaagtatttgtttgttctgcccttctgttctaaccaaggttgtagggcttcctgcactgaattcttcctccacagctctctggctctctagcttccaaccaaggccagtgttggagggaaaggaagaaggaagtgagggggaaagtcatcacggccggcatgcccatgggaactagtcagaaatccacggtggaaatggggctcagcctgcaggtgggagcagtgacgaaggaactgaatggctgatttagcgcctattatatgtcaggcatttaccaggtaaaggattaacaaaatctttaacaactttaggaagccataatctggtaatacaaatggagaagttgaggtttaaagagataacttacaaaagtccccacagaaccagcccaatgacctctccaccatccctatacagagggcaccaatctgcctcttgaccctgacgtcagaccccctcctcccaccaccccctctgcctcttcctcatctctctcaagatccatctccaagagggtcctagtgagggaccaacccaaggtgaggacccaaccacagtgtctgagccagtgtctacaggacacacgacgcgtccatcactggagctttaactagaggat

SEQ ID NO: 177632 - DNA, 218 bp, Homo sapiens
tgctgggattgcaggtgtgagccactgtgcctggcccatgttgattttaatacttagaaagaatcaaagaagattgacactagtcactgttaatgatgttttttgggttactacatcttagtcatctttgtttcctctgagaacatatagacctctcagatatagacatgggtttgttaaccttgcagtgcactaatgaggctgaaagatcatcagct

SEQ ID NO: 177633 - DNA, 402 bp, Homo sapiens
ttaacacgcgcattatccaaaccccatgagcaatcgcagggtacaggatagagtgaatctttcagggcaccaagagaaagaaaggtcagcgagtcatacattttagctcctgaaatgaatatccagcaatgccaatatattcatcaaagtgccacagtattctcttagattacagaagcaggtctcctaagagctttatactataccatttcactacttagtatatattatcttcatgatggagaagtcatttattgaaaatactccaggtatgtctggggaggggaacagtttaaactgattgaagaagacatgtttaaaaataataataagaacaacttaagaagagggacctgccttatttatctttgtaataatgatagctaggtagatatttgctat

SEQ ID NO: 177634 - DNA, 827 bp, Homo sapiens
  misc_feature (2)..(2): n is a, c, g, or t
  misc_feature (6)..(7): n is a, c, g, or t
gncagnnggattgcttgagccaggagcttgaagccaggccgggaaacaaagtgaaaccttgtctctaaaagaaatgcgaaagttagtgccaggcgtggtggtgcgcacctgtggtcccaactactcgggaggctaagcaggcggatcatttgggcttggtaggtcaaggctgcagtgagttgtgattgtgccactgtactccagcctgggtgacagagcgagaccttgtctctaaaaataaaaaaattatacccatctagtacatttttggataaagggtccttggctaggtattactgtctagtctaagcaagtatgagtgaaacataaaaaagcacagccagccgggcgtggtggctcgcacctgtgatcccaacactttgggaggccgaggaggatggatcatttgaggtcaggaattcaaaccagcctggccaacatggtgaaactctgtctctactagaaatacaaaaattggctgggcctggtggtgggcgcctgtagtcccagctactcgggaggctgaggcaggagagttgcttgagcccgggaggcggcggttgcagtgagccgagattgcaccattgcactccagcctgggtgacagagggagactcccatctcaaaaacaaaaagcatggccatgagaggtggatacatagtggcagcatctttaaaaaaataagaaaccaagtaagagtaaacaacagtcaagtggctattcaagaatgctccgggttccactgaaaatttttgacttacgagtttaacataaactctctgctcaattttttagtcagtgagaaaggcaaactgataaaatggat

SEQ ID NO: 177635 - DNA, 117 bp, Homo sapiens
attggggagctgctggccggcacccccccagccctggcaccatcaagtcagggcacagagttgcaaaggacagttgtgctgggtgttcctggttacgctgtagccaggctgtaggct

SEQ ID NO: 177636 - DNA, 174 bp, Homo sapiens
gcaggtatacctaattacattcaactagagggattaaataaacaccaaagggtcctcatttactgagatgaggctttattttttcttagtgatctcatttatctaacaccctgactttttgatttttgagtccaactagattctttaactttgccctagttctgaggtatctgt

SEQ ID NO: 177637 - DNA, 423 bp, Homo sapiens
aaaacctatgtctttctccactggaatgtatactccaagaaggcagagacttcattttgttcaccagtgcatcatcagcatatatacatgcgcctggcacatagcaggcaatcaataaatatggcaagaaagaatacctgacactgaggcagaagtacggaaaattgttgcatctccctccctgaactcccagtaagcatattctgaattaagtcgctgagactgagcatctccattcaaggacctgtgtgcttatcaccgtgcaaagtatggcaagaggaaataaggttgctctgtgtccatgagtcctcatctacctgaagtgtaagaagtcacatccctgcccagccaagctgacctgagtgcatcaagtgagaagagagacctcccaggagagctggtgggtcaccctacaatgcccca

SEQ ID NO: 177638 - DNA, 234 bp, Homo sapiens
tggggctccagcagccactttagaccatgaaatgaaatcaccttggaaacataagccaaacacagcagaacaacaacttagaagtaactgacaaatgctcatttattcattcaacaaacatccactgagctctattatgtgccaggcattgtccaggctccttggaatagatctatcggtgaactaatgagacgaaggcaggccgggcgtggtggctcacacctgtaatcccag

SEQ ID NO: 177639 - DNA, 464 bp, Homo sapiens
gtcgatctagaggatctactcctaccccagcaattatctgtgtttggttctctaccaaacgtctcatttatatgttttaaggaagttagagattcaattcaatatggtgttttttgtttttttggtgatggagtctgcttgtctggagtgcagtggcaccatctgggcccactacaacctccacctcctaggttcaagtggttccggttccattggacttttcatgatggatgttaaaagcagatggcttttgtttcatatgttgtttcatatatcatatgtcatttgtttcatatgaagatggcttttgtttcatatgtcttgtgactcaggcccatatagctagggctaaaaagagctacaggggtgagtctgaagtgagaccccaaagtaaatcactttggaaagttttgctttcatttctctaaatagctaaggacttgggggaagtcaacagttttgca

SEQ ID NO: 177640 - DNA, 413 bp, Homo sapiens
acgttgacacttcagcttctgcgacagagcaagactctgtctcaaaaaacaaaagaaaaaacatttcccaattcatgttatcaggccagaattaccctgacaccaaaaccagacaacattataaagaaataaaaaaccagaatatcttatgagcctagatgcaaaaatctctaacaaaatactagctaatcaaattctacaacacgtataaaagacaataatacagcttggtttttcccaggaatgcaagattggctgaatattcaaaaatcaatcaatgtaatttaccataggtcagaagggtaaagaaaccacattatcatctcaatagatgcagaaaagcacctgacaaaattcaacatacactcacaatgaaacctctaagcaaacaaggaatagaacatcctcaatgg

SEQ ID NO: 177641 - DNA, 598 bp, Homo sapiens
acggcagtgcacctgttgctgaagtcgatctagaggaccccggtatgctgtcggccagcattaccctgataacaaagacagaaaaggacactacaaggatgacagagatttttaaggtacaaatgatgtattgttggaattgaaaatacaggctttgttagtacaaagatttgtgtgtggataggtggatgtgtactggtgtgtgcatgcatacatatacaagcttaacttgttttattgcacttcactttattatgcttctcggatattgcagtttgtacaggttgaaggtttgtggcaaccctgcaccaagcaagtctaccagtgccacttttctggtagcatgtgcttattttgcacctctgtgttacatctttgtaattcttgcaatatttcaaatgttttgttattattatatctgttatggtgatctgttatcagtgatcattgatattactattgtcattgttttggggcatcacaagccatgctccaaaagacaatgagcttaattgatacatatgtgtattcgaatggttccatcgatctgcccttcctccatctcaccctctcctcaggtctgttttctgagacacag

SEQ ID NO: 177642 - DNA, 1071 bp, Homo sapiens
gctcttgggaatgggagtcttcctccatgtaaatacatcttccatgtaaatgcaagtcttcctccatgtaaatacatcttccatgtaaatgcaagtcttcctccatgtaaatatgtcttgttttaggcatttgaacactgcctcctccgttggttttgaacttgggcatcttctagatgcatttaatgtgctgaggccctttagtagggtactttactatgttgcttttctaaatattattacatgttcattataattttctagcttacctagaaacctgagtttaaaatgttactggtgaactagagtgtttttgttgttttgttttctgttgttagatgaacagtttttattatgattagacactgattttcatatagggtttatggtttttttccctatgatctaaatgtaatatataaacatgataatattcagtcggttttgctttctaataatcctgtttgctccaggtgttttaacattgtgattttttttggaggtattttatgtattagtgctttcttttattttttgtttttctcagtcagacttgctatatagctttgctttagttatcatctcttttcaaggaaccagctgttctacctttcttctaatcattgtatctttcatcactattcctttttaagaaggttctaaagaaagaatatgtcaaatactttgattaaagattgaaaatatgtccctatgtaaatgaactgtagaactctgaaaacaaacatttaaataaaactattaataaacagtgagaccctttctttttttattaaaaaaaaaaacactaaataaaactatttatattgggtagcatagggtaaaacacagtaatacttctgattgtcctcactgggaatttgaatacttttcatgtattacagagaggaacaagtaacctggctgaaaataaaaggatgtgagtcaggaaaataaaataataaagcaagagagcacccaaagccttggcttgcaagaaattgtgtattagatactatggtttttatatgtacttattgacagagaaagtggggatctattgcttaggtaaca

SEQ ID NO: 177643 - DNA, 171 bp, Homo sapiens
ttttgttttatctatttttttatatgcaaagttttactgttacccaagctggagagcagtggcatggtcatagctcattataaatttgaattcctaggctcaggtaatcctccagcttcctcagtagctagtactacaggtgcatgccaccatatccagttaaatactttg

SEQ ID NO: 177644 - DNA, 546 bp, Homo sapiens
aaacctgtccatatcgaatggtaatacacacacacatggaataaactcacctacctttaatctcattatgatatgttaaatccctgcactagaatacctaattataatgaatctaccacaaagtacccattgattttattcatgttgcacgtatgaataagaatgatagccatgtttggctcttcagaggaataaatcatgatttttctagtgtgattaacattttaagtcaaaatgattatcactctactggcacattttaatttgggctctattacccttcttcgattttacaggatatcttaataactagtggagcgggtgcctttcatgatacaattttattatattgtaaatttttaaaatcacttttgagaataacaagtgattaatttaagaaaactgtatgagaagctcaaagatttgcatcttttgcaatctttttagtatatttcactgagtaagataaaggaaatacatcatgtagccagaaattatcagtagcttacttctctgatagtaggtaattatagtgggaatgataaa

SEQ ID NO: 177645 - DNA, 176 bp, Homo sapiens
attgtagtcctcctaacaggcatgaagtggtgtctcattgtggttttgatgtccactccatcttaacgggtaaacttgctctaactccttacccaaatctctaaaccatttgtcaccctctggatttgttcatctgtccatccatccatctgcacacacatacacactgtatacac

SEQ ID NO: 177646 - DNA, 275 bp, Homo sapiens
tttgcttttgatctttactacatgtatgtactttaaagactggctggcttgccttaatccttgaggaggtctgagaaagtcatttagactgatttttatcctatgtttatgaagataatgggaatgcaggaactaggataattatatatatttggttacgtgcatcatataattgtcttggatgtctatatatagaatttttcttaatggaggggggggcttcttttgtccctttgaagagtctgctggccttaatttaagtagtagaggtgttg

SEQ ID NO: 177647 - DNA, 942 bp, Homo sapiens
  misc_feature (290)..(290): n is a, c, g, or t
  misc_feature (381)..(381): n is a, c, g, or t
cctcagcaccacactattgacagcttggagcagggcatttctagcctcatggagcgcctgcatgttatggagacgcagaagaaacaagaaagaaaggttcgggtcaagtcacccagaactcaagtaggtagtgaataccgggagtcctggccccctaactcaaagttgcctcactcacagagctctccaactgtcagcagcacctgtactaaagtgctctatttcactgaccggtcacttacgcccttcatggtcaatataccaaagaggttggaggaggtgacgttaanggattttaaagcagctattgatcgggaaggaaatcaccggtatcacttcaaagcactggatcctgagtttggcactgtcaaagaggagatnttccatgatgatgatgccatccctggatgggaagggaaaattgtagcttgggtggaagaagaccatggagagaattaatgccaagtatcagattgagggcttatggaacctggtcactccctggctgcttcactcaggaaagggaactaaaaccagaatacactaagaagtttctagtttgtgtgccaaaacagaagcttctccaagcatgatggccacaggtcagtcctctttctgtgcctggcatatctggtacttaacaattctgtccaaactgtagaccatgggttcatctggagtaccttggtccgtgggacaccacagtgttctatactactcttgaggacaacaaaccgaaggccttaacgatgcggattggttgatcccgcctctgtaggggcatgggctgctattatctggacacttcggactgggtgctccttcctgtgtgtacacgtttattttaattgcctccatggtgcgaatcagaggccgcgttgtcctcccgacaggcaggtaccgttctgtcttgacctacgcacagaatctctggggcccgct

SEQ ID NO: 177648 - DNA, 293 bp, Homo sapiens
tacctttataatgaaaaaaacagaaccaacacttgagattaaactctagtaaaccactatttgaaccaaagcaacttacatcttgctgtcctagtaaccatctactcaaatattctgtatgtaatgatatagctatcaccagttggaagctgagtgagggtgttatatgacttaagatctttacgagctgggcatgatggctcatgcttgtaatcccagcactttgggaggccaaggcaggcggatcgcttgagcataggaatttgagaccagcgtgggcaacatggtgaaac

SEQ ID NO: 177649 - DNA, 367 bp, Homo sapiens
cagccagcagaagatgctgaagaacagcatggtacaagtcactgttctatgagtgccttttccccatggctgcctgcttgtcacctgtggatgtgattaagtgacatttattcatcctcccaagatgttgctgagcctatcctaacttccccaattgcccaacctcattactccttttcaacggccctggacaggaataggtcctaggaacagagagggaatcctgtaagtatcaaatgagcacatgctgtgggcagagtccggctctacctggcctccagcagcaaccaaatatctacagccatgcatgggttcccactgagtgctttttgtaaatactttttgtaggagtccttagctatggccg

SEQ ID NO: 177650 - DNA, 473 bp, Homo sapiens
tacagtttttcaatatatttttaatgaagttatttatagcaagtgttatatgtattgaatgaaaatttagttatgtataagtgaagacgaaagaggctggtggatcttaaaatatccataaaccagattgatatactatatattttagatattagaggttgatgtacttcttttctcacaaatttctgtaatagtatgtgaaaagatagagtaatattttctaaaataagagaaaaatttaaaaatgggagaaaaatattagaaaatgtaaaatagaatgccttggatataatttttagtgaagtgaataaactttgtatttcctccttctgatatgttatcattctagaccatctttagctggtcagattcatcatactccaatttataaatgtttaatttaagtcttctaatgcattttaatgaacgattttcttctatttgttgtcaataaaaattctgattgatatgaa

SEQ ID NO: 177651 - DNA, 226 bp, Homo sapiens
gtacttagaataaatacttggatgtgttgggaatggtagggttgaattccctagaggaatacaaatttaataaattggagagcagtcatagaactcttatcatgcctgctggtttactttttttctgtaagcctctaattgtaagcaagtgttgattttgtttcctgagaatatatcttctataaagaacaaaactatgatgtattgagcacccttatcccagact

SEQ ID NO: 177652 - DNA, 267 bp, Homo sapiens
taaaggtgcattcttgaaagaaatttagagcattggagaattttcaaaataatgtcaaataagatgtaagctccccatagaaagaaatgtattgtcatgtttagagtccacaggactatattagcaaattaattactgttttaatgacttgcttccctacagcgggagactggattatttctcccaatttttcacttgcataggattttacatccagatcctctgttttgtaagtctgtaccgcctcctgctataaactgagtatac

SEQ ID NO: 177653 - DNA, 230 bp, Homo sapiens
caggaggaggtatggcgaaagggaaactagaatatccaggtagtaatgcaagtataagataattagagggaggttgctgatgtaagtttccaacaatagaatagaagaatgctaaggaaaaagaaatgaaagcatttgattactgatggatggtgacacattcaccaaaattcagaatttgaggagagttctgtctcagacataatgactttattaaggtctccaggtgg

SEQ ID NO: 177654 - DNA, 112 bp, Homo sapiens
gttggccatagtaaaaaatcaatacaaattcaaagaagcaatgtgtattttataaaaggaataagaagcacttacttttctctcatagctttggcgtttttttcattaacta

SEQ ID NO: 177655 - DNA, 420 bp, Homo sapiens
tatccaacatgttgggtgcaaacgggcaccttttagccttttcttaaatttgcatgacctgtaatgtctatacagattatgaatgagcctgaggagtctgcatgtctaacttgtcatcagcctggaaaaatcaaaatgtgtaggtaaagtgagcacaagatttggaaaagcaaggtgtttggatgtaagagaataaactcttagcccttttgagcatgagttcctcagctgcagaacaggattgagaatcctcacctgaattggccactctgaaagtgaaagctagctagataaaagtgctttgaaaaggtaaagaaaggtgatgatttaaagctggttaatgctgaattatggaggagctctttggaaattcttttttatctatataaatgacagaaatttagtgtgatccatgtggct

SEQ ID NO: 177656 - DNA, 624 bp, Homo sapiens
ggctacctagaggatcccctcgaatcgacggtttctcaaaggttgtcccacaatgagaccactgtagcttgacatgcaattgtaagaagtagcacagagactccgagtacactttgcccagagcattaatctcctgcagttaccttaacaaagtatcataaattggttaacttaaaacaacctaaatttatttttatcttttcgcagttctggaggccagaagtgtgaaatccggctgctggcagggcgtggtccctctgaaggctccaggaaaagagcacttccttgcctcttccagctccggtggtgtaggccatcttctcactccctggttcgcaacgcttggctcccacctctgcctccgctgctgtggcttcttccctgagtctgtgtcctcttatggacaccagtcactaaatctagggcccaccctaaatctacgacgacttcatctcaagatccttaattaattacatctgcaaagatcctacgtccaaattaggccccattctcaagtcatgggtggatctgaatttgggaggacattttttgtttgttagtttagtttccatgaatgcagtgcttacactgctctattatttgctcttgaaaggaaaaaaaaaa

SEQ ID NO: 177657 - DNA, 182 bp, Homo sapiens
ctagtgatgtaaactccttgttcacattgacagatgaacctttctcctcagtatgaatttttttcttcatcttgtcttttttaaatagaggcttgtttttgccctcagatcctggggtttgggagagagtgatatcaaataggaaaaaataaaacctttaaggcatcactacaaataataaa

SEQ ID NO: 177658 - DNA, 470 bp, Homo sapiens
tgggctccggtgtgagccacatgctcttctgccttggcatcatctctgcaagtgccacacctcaggtccagcccagagctcctcaggtcgcatggctggggctccggtgcaggtgtcctgagtccttgctgtggacctagggcagtgccctaacctctctgctgtctcctcgcgtgcaagcaagaatgccgatcccagtgcctgtctcagaaccgaagggttgagcacattcctgggacagggcaacggcctcctgagcaggaatcattactgccttccaggttatttctggggtcaccaacgcctttccgaggggacgcaggcagggaccggtgcgaacggaacacaggagcccgtgtgccacaggccgcaggcagtttcaggtgctttacaggagcccctgccatacccggagccccctctgcctgcagcccgaggcctggctgggggctgggtggaggccgcggccg

SEQ ID NO: 177659 - DNA, 418 bp, Homo sapiens
accaaaatgtttaaaatgtacttcccttccttttgacatgtctttgaacaatgatcatgcatgttggttgagtctttgactttgctggccctatgccatttgttgagatggatgccctgtcaccaagatgtggcttaaatcacactgatgaataaagtttacacttcgaaggctctcatttgcagatgtgactaagcggattcacatgatcctgtgcaacctaggctaccaccaagtagcagagaacaggaagagacaaagaaaaattagacaacaatgtcaaaatgttaagcccctgctgtcttgagtggctggaggcaccattagagacttggagcctactccaggggccaggtattttgtcaacaaacttcttatcctgttcagttatctctcatagatgctggcttcatatatg

SEQ ID NO: 177660 - DNA, 332 bp, Homo sapiens
tttcatctcccattttcctcctcaacccaccagaataagctgttcccccccatcaactccatagaacttctctgtcaaatgttaagaatgacccctcaattgccaaatatagttgattcttttaaatcttgatttcaagaatttacttgccatatgtaggtgatggccaccatattggacaacaaagatacagaacatcgccatcattgtagcaagttccattagacagtgctactctacagttagagacattgaaactttagtcaaatcacaaaaatggggcagtagcagggaatcaaatcagggactcaaaaatactcatgagtttttct

SEQ ID NO: 177661 - DNA, 527 bp, Homo sapiens
agcagtcggggagcagataggagcatcctagctctctgtgattgccctggacaggagccctggacctcccaatgagaaaatgacttccggcaggcagggatcctcctatcatgaagaatattaggccacctcacaccccctcttctcctaaatcaggagactgtccttaaatccagctccacctgggacttcctcagtaaccttcagcaagacgcctctcctctctgggtctcacctttcccatctataaaatgggctgacaacgaagccaccactaaagggccactggagatcccactgcaatattgcaggtgagagcgccaatgtacaatagcggggttcagcgggtcactgtaggttttatcattcattcagcaaatatctacaaggccttccttcctcaagcacttcgattctccggggccagtgctttgaacaatagcaaaaacgaagggctcctgaccccaggcgtccacctcctcccgccctcctagacctcgaggatgcagagaccctctagcggccgc

SEQ ID NO: 177662 - DNA, 402 bp, Homo sapiens
cttgaagtggtattggagatggagagattttgagtagctcccagagctgggagtgatattttggaatctaggatctgccaaagaggagacatggtaaaccactacattttggtattggtagcttaaaggactgtaccctgtaagaaagagtaaactggaaatagatttgctttgagaggattgacatataactataaattatttcagtcctgaaattgagtgaaggtgattcaactttgctagttttctaggagcttgctaaaagcaaatgtaaactcactctaacagaagattatatcttcctagacctcacattacctcagttttcatgtgttgtgtccaggacttgttaaaaaatgagtacacaaaaattcaacactatgtggccaaaataatagagga

SEQ ID NO: 177663 - DNA, 559 bp, Homo sapiens
aactgtgatgagaaacgcttctgtccattaaatcgttcagtcagtggaagagacatgtatgtaaataggtaagttacctaccatacattgtgccaagacctctcacattatgtgaacagaatattaaagaattataaaagagggagcaattgcctctgttaagtagacagcaaagatgccttataggaagtagcatttgagacagattaagtttctttttaggtaaaaatatgtcccctagagataataataaaataatagcaacggatacctatgtacttcttttactaatgcaccagagtctgttttacatatattctctcatttaatccttacagcaaccttatgaaacagtactgttatcaccttgattttacagagaaggaaagtgagccaaagagaggttatgtggcatgcccaaggtcatataactattaaatgtcagtgctgggatctcgtacattttcactcttaggacatctgtgctatccctgcttagtcactttggcatcccagtggtgctgtacttttgctttcataatacatggaagccctggaa

SEQ ID NO: 177664 - DNA, 483 bp, Homo sapiens
ccagccacctgacccaaatacaccacctgaacccacgaccaggtatgcccacaccccatgggtggccttaacacacacaccctgcccctttctccaagtacaggagcagcagcccagacttccctcggggcaccgcggcctgcttgggactgcacagtgcctgggagggtgcctggggagggtcacaagggacttggtgctagaagcaggaaaagtgtagggaccggaaaagcccccgtgcatcctggaagggacatgggccagtttgagcaggggtgtgggagtccagccctggccttgccaggtggagaggcgcctgggccagacatccgcggcaggaggcgggggaacatgccaagaggcggaaggggcacgcggagacccccagggggcgccggaaggggcgcgccgggcggtcggcggcggccgttggcgagctgaggcctgccaggcgaagtctggagaccagccgggccgcggccg

SEQ ID NO: 177665 - DNA, 468 bp, Homo sapiens
tcagcacttgaaatagattgtcttagtggcccacagagaatcagccaggattaggacgttaatttcctgatacctgtcctagggccagttacccaccaggcccgtctgcaccccactctaacattgttagttacataaataggaaccagtgttttagactgttgggggaggggggaaatcagatgcccctttgtacactaattaacgcaggcagaacaaaaggcccagcttggttttcaagttcaagtttggctcatatgtggtcctcagtgaagattatgatcttgaataaattaaaaacaaatgttaaagaagtcataatgaggtaaaaaaaggagttcaggattctggcctttaaagactcagggtaaacagacttctctttaaagctgatgttcacctcccctcctccactttaccagtccctctttggaacttctgtgttccgtcttcgtgataattgttcat

SEQ ID NO: 177666 - DNA, 173 bp, Homo sapiens
atgttgctctctcaattccttctctgagatcatcaagggtgaatgtcagcgttaaacttaagacatgcacccttgatgatctcagagaaggaattgagagagcaacatcgagaatgattgacagaaagaatgaccaagataacaacagttctatgattgatataagttacaaa

SEQ ID NO: 177667 - DNA, 176 bp, Homo sapiens
taatttttctaagtaatattagtagttgccagagtacaattcttgtaaaactttcactaaatttattcctaagagtttgatgggggttttaatgtgatatttcaaattggttattgctggtatataaaaatacaattgatttttgcaaatgcacctgtttagtttgtgacaatctg

SEQ ID NO: 177668 - DNA, 292 bp, Homo sapiens
aggagcaaacactgggagcaacatctggcccaggcaggaggctggctcagagaaggctttcctgaatggcctctccctggagggtaaacagacttgaggaaaatagggtgtgggaaggggctggatactagggaacagaccttgccaacaagaggtacagcattcacgctggctggcagcaagatggtgtgccagtggagacagcagaagctggataggtctagagcgcaagaggagccagagaagagacataaatcaaaattgcattttttttttttggagacggagtctt

SEQ ID NO: 177669 - DNA, 238 bp, Homo sapiens
tcaaagtttgcactaaaggatagcgccagattatcaaatttatcaatatatcaaagatttatcaaatataaccatactgtaggccattttgtacatttatatgtaaaatctagaaggcataagtattctgaagtttgtaaagttatagttggtttggtacaatgggctctgtcatgtaaaaataaaagcaagtgtttccaaattttttatcttgtcgccatgcaataaatctttccct

SEQ ID NO: 177670 - DNA, 582 bp, Homo sapiens
caaaagacgatctcaaacagaacacaagccaaacaaaatggtatgaaaaccatcatttggaacctgtgaattccagattattactcagatgatttccatactcggggacattttattacctgaagaatttcattatatatggacatcacaaaaagtatgatgtgtaagttgtccaaattgcaaacatctaccagtatttataagagatctgctgtaaagaaacccaccttcttggcattttctattcttttcttgatgatgattcctccttagtgcaacccaatcgtcccttctgcctggtaaggtgacgatctcaaacagaacacaagacaaacaaaatgggatgaaaaccatcatttggaacctgtgaattccagattattactcagatgatttccatactcggggacattttattacctgaagaatttcattatatatggacatcacaaaaagtatgatgtgtaagttgtccaaattgcaaacatctaccagtatttataagagatctgctgtaaagaaacccaccttcttggcatattctattcttttcttgatgatgattcctccttagtgcaacca

SEQ ID NO: 177671 - DNA, 461 bp, Homo sapiens
ccccaggggtttagtgtcagtcattaacgaatgacttggtgggacctctgctgacatcctccttgagcctcaatcaatgtaaggagactgtaaggatctccacactcaagacttgcctgtgctcctttccccgtagcctaacccatcatctggcctctaggcatgtgtaaggatgatgagttgggcagggcaagtcattctggagggatgccatgaagtcgtcgtccaggcaaaatggatttagacagaaagcaaaagtcagtccctagagcaggagagaatgtggaaagagaccagtctttcagaaccgcacacctatgcctgcctgcctaggtggaaagtccaactgcacggagacgctgaaccgaacaggcaacgggcccacacaccaggccaggaaacagtcacttcccttcctttgtctcctaagacctgcacgtgttttccctcatttgaaggga

SEQ ID NO: 177672 - DNA, 488 bp, Homo sapiens
tcactttctaacggtgtgagatgatatctcatagtggttttgatttgcatttctctgatggccagtgatgatgagcattttttcatgtgttttttggctgcataaatgtctaccattcgacccagccatcccattactgggtatatacccaaatgactataaatcatgctgctataaagacacatgcacacgtatgtttattgaggcattattcacaatagcaaagacttggaaccaacccaaatgtccaacaatggtgtagaaattgaacgttcaatttctacacattcctgagctctagggttcagagtaggttggaggagggcctgggaagacgccatgatatgttgaaataaagtgtattcatacctataaggtatatatttttattagaaagcccatggcatcagacttggcctaaagcagcattccatgccaaaaaaaaaaagtatatgtagagatgtggagacacaagagcacagatgttt

SEQ ID NO: 177673 - DNA, 335 bp, Homo sapiens
tactgaataaacaggaaatcatgattctatatataaatgaaataaattgaaagttttattaggaattggatatttatataatttcaaagtacttcgccacaaaattcttatttgtcaggaaggggaatagagcaactttacataaagaaccttgcagaaatcaccttggtcaaatgatcagagtaagcatcaccagccaatgagacaaattaaaatcatactccatctgatagaatgaatgggatgagaaaaacagcatcacttctataatattcttgctcatgatacatatcctaaatctaatcttaaggaaccaccagtcctgcttatctcct

SEQ ID NO: 177674 - DNA, 651 bp, Homo sapiens
gcagatctgacggtttctcgaagctgggcccatcaccaacaagacagtgatggtgaaagcaatgatagaagaggtcgaatttagagtaaggatcaggatggacaggtgggtacatctatgcaaccctaacctttctgaaactactaggcatagatattcctgaagactagtctcagcctgcatggatggtccctcatggctactgtctcatttgaaaagtgaacctatgaaaagaggaaaacactatgacatccaccactgtttggtcacaccaattcttgacattaactctctcgaaggacattagtatgaccttcaaatcctagcccgcaggaaagcttcactttagttgtttgtttcctgggtgtcccttcctacaacccacgaggcaaatgccacacaccctccttacatgcataaaacagtgctgataatggatgaaacacacaagtatcagctcatgcctgcactttcagagaaaacactcttgcttagaccatgggtatgtcaagctgccaaggatacaaaaggtaaaacaatccaagggcaacagatggttcatgacaaagaactaagagggcagcactgcgattccaaaaatttggatatggacgtcaatgagagtgaatgagagagaaggagagagacaga

SEQ ID NO: 177675 - DNA, 278 bp, Homo sapiens
tctgcccgtcttctgttgccatcacgcttgtccacaccctccttaccccttgtctgggtgattgcggtggtctcccagctgccctgccagcgtctgccctggtccctcttcttgactattcttgacccagcgccaccatgttaaaatacaaatctgatcgggtaactcctctgctccaaactaggtttccttgtcactccgagtaaaagccaaagtccttacaataacccacagggccctgacctgccttgctctcccctgtttgcctctttctgctc

SEQ ID NO: 177676 - DNA, 891 bp, Homo sapiens
taagcattacatgcaccttccaggtgatacagcatcctagatatccagagagattaaataactcactcaagtacacatctatgataaggggcagggtgctcacagctgtcaatgaaaccatcttcacagggttaataagaatgacattaatcaggtgtactttggcccacttccttgtaactgaaagtcatgtagctctagatacggaccatttgcatcgtcacttttcctatagataggatcactgttgttagaatcataaggctttcctttaagaattgtttaagatgttttccagatcctgaattccagctgacacaaaccagttttaggaatcccgcagggacattaaattggcatgagaatgcagttttttcatttccccatcccacgattttgtcttgcattcttagagcaatcaatgatcttcatgccatggcccattccaatccccttaaaattcctatccccgaactcctcagggaggtgtatttgaggtttgctcctatctcctcattcagcagccttatagttaaaactcttggccaggtgcggtggctcacgcccgtaatcctagcacttcgggaggctgaggtgggcggatcatgaggccaggagatcgagaccatcctggctaacacagtgaaacccccgtctctactaaaaatacaaaaaattagctggatgtggtggcagcgcttgtagtcccagctacttgggtggctgaggcaggcggattacaaggtcaggagattgagaccaccctggccggcatggtgaaacctcctctctactaaaaatgcaaaaattaggctgggcacggtggctcacacctgtaatcccagcactttgggaggccgaggcgcggggatcgcgagatcaggagattga

SEQ ID NO: 177677 - DNA, 234 bp, Homo sapiens
gtgggaaaaaactggatgacactgaaaaccttcatcagcaccagaagcagcacattggagagaaactcgagagaaggggtgccagagaagtgtcatttgtaaacagctgtaaagtccatgtgtcacaggagccatttatctcttatgaggttgggaagaacttcttgcccagcttgggattacaccagcaagaggctactcacaatgtagagaagacaaacactgaaactaagc

SEQ ID NO: 177678 - DNA, 143 bp, Homo sapiens
atatacaatcagccggtaccctcgtataaggcaatgatgctgaacatctcatgtgcttgctggccattcatagctcttctctgatgaagtatacattgacgtcttttgtggttttcttattgggtgttggtccttttattgag

SEQ ID NO: 177679 - DNA, 190 bp, Homo sapiens
tgaactattcttgaccagttaactaatgccttctggtaaatgagagctccctcgcacattatttgtattgactcctcacaaagatcccacatgaaaagtgagatgagaattattatctctgttttacagatgaggaagccagaccaagggaggtgagatcatttgttcattcccaaacccagtcagtcag

SEQ ID NO: 177680 - DNA, 555 bp, Homo sapiens
aagaacccatcagctagtaacattctggcaacccagatggaactggggttcccagacccctgacttaatggacaattctccatagtagtagacaagaagccccctgagcactttctgtggtgtctctgctacctagtgagttctctgacagctcagagattacaagggcaccccttgagcaatgctgttcaccccttccctttcctccttatttgtaattgctgctctgatatctccttactctacttttccccttttcctttccttctcctgtagccccctctgtccttctccaacaaccctttctcttttactttctacttatttggctgaaatttaatagccattggctcctgggttctttctgttctggtctggtcagttatggctgaaatctgacagcctttagctctggaatactctcctatttggagagcaagagttgtttgaggaaaggaaaaggggaaaaggagtgaaaggggattccgtagcagcaattttaaatgaggaggaaagggaaggggtgaacagccaatttgaaatctgagctctcaa

SEQ ID NO: 177681 - DNA, 410 bp, Homo sapiens
tcatcagctcgcaccgttaaggtgcagtgcagagctgagcctaggttcaagtcctgaccatgctgctcagtggcctgtgagcttttggtgactgatggatcctctttgcctcagtttcctcctccataaaaatggggatgaccacagtgttctgagcactttagagagtgccaccggacggccgactcatttaaacccgagaggctcctgctaggtatttatattagcacttaatagacagaaagcacctcacacagcactgacatagcgccgtgcttagtacatggtaatgggattgcatattgtcttacccaccctacacaataggatgacttccattctacagatggggaaagcaaggctcaggagtgttaggaacttgcctcttgtcacctggccagtgcactgga

SEQ ID NO: 177682 - DNA, 331 bp, Homo sapiens
tagctctcaccctagcattaagaaatgacagcatcactaggtgttaatcaatacccaacagagaaaaagtagtattaacaaggtagactaaaactaccctgcataggttaatgcaggaaccaagagtgaacaagcctttcccagcagtaggaactgtcacaaaccctacaatttgctgtggtccctttatttagtgtactgggagtttttgccattagcttgggaatgacctttagtaatgaagatgactccaggaaaattacagaaaattattctttaaaaagttatcacattggatctatctttttattgtcaaacatctaccatcaga

SEQ ID NO: 177683 - DNA, 165 bp, Homo sapiens
aaaatatggaatgagctttctcttcctccagaagtatgacctgagcagcaaggggaaggccattcctggggacgttggttgcagagcttctggtgctcagggctggagggtggtagatatttgacctctgtactcatgtgaccccctccccgccaagacctgggg

SEQ ID NO: 177684 - DNA, 473 bp, Homo sapiens
ggaggatctatcgcttaagtccagaagttcaaggtctgcctaggcagcacagcgagatgccatctttaaaaaaaaaaaaaaaatagatcagattaaatcatttcactaattcgaagactttcgatggctccctgttcacacattgtaagtgaagtctttactttggcctgtaaagccctcaatgacacaacttcccatttcctctctgacctcgtctcctaccactcttcctttcagctccaatcacgttgtcctccttggtattcctcaaatactcaaaacacagtcccactctggggccactgcactggctgcttcctctgtttggaatctcttcccccagatatcccataattctggggtccccagcacctgggccacagatgggtaccaggctgcacagcaggaggtgagtgcttcagcatcaccgcctgagctctgcctcctgtcagatcagccttggcattaaatcc

SEQ ID NO: 177685 - DNA, 401 bp, Homo sapiens
tcagaggttcactggagaagggggctcagtatcttactgttctgagaatgtgttttcactaaatcactttgtttttgtatggctgtgcctggttgtccccatgttctatttaactttgattgaaactggtgtcttctctgagggttgggcaatggcagtcacttggctatacatatagtaggtaggttctaaggcacccagggcacctaaactgccttttatttagactttcaaccaattcccctctttgcagcccccgtgcaccctcattttctgagatagccagtaactctaattcttgagccctgctaggattctgtggcacaaattttcttctggcgttttgctagtttgggcaactgtctttcaatcatgtgctttccagattgaaaaaaaaaata

SEQ ID NO: 177686 - DNA, 551 bp, Homo sapiens
cgtagcatgattttaatcgacggttctcaaagtgaaatcaggccaggaacattagcatcaccgggaaacctgttagaagcgcaagttcttgggcctatcccagacctcctgaatcagaaattttaggtcttttaaaggttctgtatgtgattgtgatgaatggttgatgtttgaaaacatgattttcagcaatgaggaaatgtaaggatgttttcaaaaacaatgaaataattcttcattagacaggtaattcagaaaaggaccaaggaggaaccatgaattcatgtataatatctggatgggtaccaaccataattcccttgatgtgcttggcttttctttgacagtagttaatcaatgtaataggttactctacttaaagatccaatttgccctacacttcatcttggcaaaatactctgaactaggcttacattttaaatcttaaaaaaaaaaaagaatttttttaaaaaaaacaggaatcttctaagttttatacctcattatggactgaatgtttgtgtccccccaaattcatgttaaaacctaat

SEQ ID NO: 177687 - DNA, 221 bp, Homo sapiens
tggcacctgagcaatggaggggtagaatgaccagagctccagagcgtgagcattcagagttgactgggccagcccctctgaggaagctttcctggagccagctctgctgccttcagcctcgacaacctggatttaagtgcatatcttgtactggaaagtgacttaaaccccttccctagctaaatctgccgatcagaagttgctatccttggcgttagcag

SEQ ID NO: 177688 - DNA, 590 bp, Homo sapiens
tgtttcctttgtctgattgccttatctttgttgtgtgccactctgtatgaaattgggcaccatgattcatgtccctgccaggactactttgaagtaaggaaaaagttcctcaaaggaaccagagaaagggaaatgtgaaattatgcttgccagagaaaagtagtagcaaccataactaatacattgcctctaagggttgcaacaaaaatgaaatgagtgagcacacttcgacatattctatatactgtatagctttctaatagttttgttttgaatttttcttttctttttgagaggcagtatcttgcatggaatcaggtagacttttggtttgactcaggtctgtcagttcttgggcttatgatcttggtcaagctgtgtaatctttctgacctagtttctgtatctttaaaatgagaataacagtaccagtttcatagggctcttggaatatttgaaaataatgcccagcacatagtaggtgctcaccaaatgcagttttccttctcagaagcttacagtctgatggaaacaagactcatataaagataactaatactctagacaaagggaaacaccgggtacgagct

SEQ ID NO: 177689 - DNA, 212 bp, Homo sapiens
tgcccattacatgaaataatgctcagaaagcagtggtacagggtaggaattcagtatggtagctgctattgtttttgttactattattatttcatctcacccctactgccagtgccccgcatgcagtaagtgctaataattgtccaatcaagaaacaagtgaacaaaggccatgttcttattcccttgctcttgtgggttggccccttcctc

SEQ ID NO: 177690 - DNA, 204 bp, Homo sapiens
attggtggtggtgtgggcaggcagataacgcacaggcgcttccattgtatggaacaaatataatctcttactggcgaattaaaataaattactcctgtctccaaaggggactgctcatttctttactttctaaataactagcgcgtcaactactgttttaggctaccctgaaattgtgtacaggctaacataaaaggtctcctg

SEQ ID NO: 177691 - DNA, 156 bp, Homo sapiens
aaattttctatctcacggggaagtttttattgtggattttatgttcaccagattaactagcttttgagacattgacagggatggagatacacagaaaatctcacaaaaacaatttcataagtcacaggtatttgtttgactctaaaaattaatttt

SEQ ID NO: 177692 - DNA, 260 bp, Homo sapiens
aaaatggaatttcaggaaaaatcactgaaagaagattattcattatgaagatagttgacatttgaggacacaaaagtcataaaactttatgttccaaataacatgagcaaaggacacaaacaggtaattcacaaaataagaaatatggttcagtcttgttgatatcatagaccaggagtggctgtgggcggggcagtagccacattgcttctgcaagtctgagaacactactgttgcctggtttgtctcacaggcttgga

SEQ ID NO: 177693 - DNA, 399 bp, Homo sapiens
tgggcagggtgaggggtgaatgaccatcacaagccaggaaaagatgggtggcaggacctctttcaacaagaaaggtgccaaaaccctgcctagttatagaatcaacttttctacttcacactcagatcagaatttattaatctttaagctgaatgttttgacccagagataaagggatgcttctttttgccagaggattggctttggccccctctctcctgctaggatattagaggtgggtggaagatggacggtctcctggtacctgcccaccctctctccgccctctctttgacctggctgagatgggctgagattgattacagctaagtcctgtttctgtcagagcctaagcttgggctgccatgcgcgcgcacgcgcacacacacacacacacac

SEQ ID NO: 177694 - DNA, 372 bp, Homo sapiens
ggagctcagtggaattcaactctgcttgctctgcccagagctccacgtcaatccgctggtcacttggaaggaggaaggccctgggagaggggtgcaaagccatacaaagaaactggtcaggcagaacagagaggcaggggctctgagaccctgatgggcaggtggaggcttcttccatgactcccgcacttcatgcacccatttggcaaactgtcccatgtgtgcctgagcaaatgtggctgttgtggattctcgtttcataatggccccaaaacccaggaacagactctgggccacggcgactcaagaagtgaagagtggggctcccactgtggatgccaggagtcaaggtgttgcttgaatatggggcca

SEQ ID NO: 177695 - DNA, 469 bp, Homo sapiens
tgaaaggtgaacttgggcactttgcagcaaattggagggggttcattctgcttctgggcggtgcgcccttggattccaatcattaaagcttttttgaggtacttgtcccagatcacctgattttggctcaggtgttctctgagcttacctcacacctcaggacacatggttttaacatctgccctgttttctggtctcttcacaagatggtggtttcccttcaactgagggcctgtgcctcagtttccccactgccacctagaagaggtgcctgatcaatgatggagtgcatttatttaaaacatttcaatagcatccaggcctgatttcctgtgtttaatgacatcattgctgctccccacttttccttaatattcagcgggactacaattttattttatttgtgtctgggactagcagtcatgttggaaagaccattccttcattacagataataagccaggggcca

SEQ ID NO: 177696 - DNA, 442 bp, Homo sapiens
atccttaagaaacacaaagatgagattgaagagggaatctgcagtccttgactatgaatggcagagttctgctgtagagtgtagaactggtggaatcccacaacaggaaggaatatgaagacaagcaacagagtcattatttggagaataacagtgaaaacagccaagcagataaactctgtgcaccatggcccactcacccaaacttaccctacacacactaggatatcttctaggtgaaagcagtaaatggaggaggttgggcatgagaaggaaggcagtgcccccagtgctagtgatgcccagaaggacaaggaagcatccccactactgccctcaaagtcctctcacctctcctaactctcactacaatgtgtggagaagagcactatcagaggtggatacagtaccatcttccctccaacatttccttgaacatcaa

SEQ ID NO: 177697 - DNA, 547 bp, Homo sapiens
ttagaagaaatacaaaggggcgctttctcacaaaaactgctaagtacccctagtctgtctgacactcatcttctgatattcatgttacggctctaggaacctaagttcccactgacccctaatattccgcattggcattgtgacagttttgctgttaggagcctgcatcgtgaggttggaagaggtcctgcctccataacatcgcccaggatctctgtgcaggagttgcagtttgggtttctgaccagagctgttgtattctggttcctaaatgctttatctgtctgtcattggtctcagtatgtgtgcgcaagtgtatcagtgtgtggtttgagtagtcttttgtgggctgtggaacagctttgctgcatttcactctggagtggattttattcctctggtggaaatactcattcttgttagcagagggcttagtttttcaacactaaggtaccctctctgtgagtgatcatcagactgcagctgtgaaacctgtcatgacctttacaccaagagcttactatgtgcctggtgaattctataccca

SEQ ID NO: 177698 - DNA, 339 bp, Homo sapiens
aatgagttgacatgtaagccctctttttaatttattggagagtttgtgaataattgatgtttttttcttaaatgttcagtagaattcaccaatggaatccatttgggcctggaattttctttacatgaaggttataactaaaatttctttagtagatataaggctatttaaagttttcctattttcttcagttgtttgtcttcaaaggagtttgtccatttcatctaagtcctcaaatttatagacctagtgtttcatgatataccctttttaccttttgtaatatttgtagattctgtagaaacatcatatctcccatttctgatatctctacctaga

SEQ ID NO: 177699 - DNA, 479 bp, Homo sapiens
ccaccctcaggcaggtccttgttgcagagctgctcttgggcttcctttcatcatggcgggtggcaggagcgactgtgcctgctttgtctgctgctgtttccactccagatagtctagaactctggcttcaggaggctttgcatcccataaaagacttgccttgctgggcttgcactcccaggctttttaagggagtgatttaagggactctcaggacaaagttcacggggctgccttctgtgagcccctccatgggaaatcacctattcttaagcacagaagcacacatctcttcatgcagctgcatgcaggtgctccttctgtgttctggcacaactttgcaatctcagcttccagcatgaaggagcctgctcctatcacagctccccctcttggccccactctgtctggactctcctcccacctgaattgcattaaggaccctgcaaagctgaaggtgccccctgctatatggccca

SEQ ID NO: 177700 - DNA, 579 bp, Homo sapiens
aatcacttgaacccaggaggcacaggttgcactgagctgagatcgcgccactgcactccagcctgggagacagagcaagactctgtctcaaaaaaacaaaaggatgttatttgccttttccgctaatagagctgctgacaccttagcacaaatcagggcagtgggatgaaattgtactagtcatcactgtgttcttcacccctgtgctcacacaaaaagaaaaaaatgctgttttacagaagaatggccttgatgaagcagtgaaaaatatctgatgtgaagacatgggaagggcatgttagccctgctgctgcacacctagacacgatgtcttatcttgaggaaagcactatacagttgagttgcaaagctggactaaacactttttttcatggaagaccagctttacttgaaagaacagctggcagacatactgttcagagttgcatatttggtagacattttctcaaaagagaaagaggtgaggctgtgactttgaagaaaacaactgtttgttaccggtataaaattcgagttttcaagcaaaaattagaattttgaaaaacttattaccgtgat

SEQ ID NO: 177701 - DNA, 253 bp, Homo sapiens
tacacactaaagctttcagaatcatttgtagaaacacaactgctttcagatgataattcttaattattataaaggacacaaaaattagcatactgtttttctgaggttcttcctggtttttaacttactgcacaagttgggcgtaatgtgaaagacaacaaatatgggtataatcatacacctgatatatatggactttaagaaaacaccaacatgtatacacagatcaacatctccactagggctggttatg

SEQ ID NO: 177702 - DNA, 221 bp, Homo sapiens
gtgctgagaatagactatgtgggagtaagcatgggaagtagaaaaaccagttgggaacttacttcaatacatcaaatgaaagattgttgtggcctgaatgaatctggatatactatggagaaagcaaaaaatatttgtttatttacggactggaatacaggatgtgtaaaagagatttaaaagcgactccaaggccaggtgtggtggatcacacctgtaat

SEQ ID NO: 177703 - DNA, 835 bp, Homo sapiens
tgcagtgctgctgtgggtgacctagaggatccgcgcgtgttgtttactattcgggtaaggggtaccctagaagcccaaagctcaccataacatgatacatccatgtaccaaacgtccacgtgtatccctgaatgtctaaagattaacaacaacacaataataatacaacttctcctcctcaaaataccccagagggatctccaagaaaacaagagacaaaaatgatgcatactctagtggcatgaggccaaaactgcacggggcgcgcgcgtgtgtgtgtgtgcatgcatatatgtgtgcgtgcatgtgtgtgtgcacgtgcacgtgtgtgtgcttgtgtgtgtgcgtgcttgtgtgtgtgcgtttgtgtgagggggcttttttaacacaaagaaaagtacagaaggatccataccaggctgtgaaatagttacctggcaatgaggaattccagatcagcccagtcaacaaggtgaaaacccatatttactaaaagtacaaaattagctgggggtggtggtgcatgcctgtaatcccagctactcaggaggctgagttggaagaatcgcttgaacccaggaggcagaggttgcagtgacccaagatcacaacactgcactccagctggggtgacagagcgagactccatctctaaaaaataataataataaattaaaacaatgtattcaagcagctgaaatcaggcactggacagatatttgccaaaccttgttcatagcagcattattcactacagccaagaggtggaaggcaccccagtgtccaaggatgaatgaatggtaaaacaacgcgcgggatcctctaggtcacgatg

SEQ ID NO: 177704 - DNA, 713 bp, Homo sapiens
tgctcactcaatattaatcacaattttttttttcatgaccatttgtacagtgtattgtcatgtatatggaaagggtttcagttctgttttagggatttctcttagaaatctccagcaatttcacttagggagcttttgaagccatctgccttagtgagctgtcgctagtgtgctctttttgaaaggtaagcaatctttgggccagtttggatatgactcttttacatgtccagtccatatattcccagaagaatccagaagtcatggccatcaaagtaaaatacccagccttttaaaaccactacatttggataggaagatgctctccttgaaattaccttttacctttgagatccatctagaaaaaaatctaaagagttgattgtgggtcaggcccatcagagtgtaagaatgaattcgagctgtaaaaaatgtgattctttttctttttttttgaagagccattgggcaggagtaaatgtggtagaaccattttggggagctgtatatattcagtaaagttgaagatttctatgctgttaggatcaggtaatttcatttgtaatttagagaaattttgatacatgtaacctgggtgacatgtacaagaatatttgtaacagcagtttgtaagcggaaaactggctacagcctcaatgacattcaccaggcagtaggtgaatttgatgttgtttattcataccttgggagac

SEQ ID NO: 177705 - DNA, 343 bp, Homo sapiens
ctgattccatattcgcagttgtaagtagaactgctgagacgtggaagtaccacatggactcacagaggagctgctgtatgtagcacagcattgcacaagagcttatttcagtctagtaaacatttataggagcctgtgtcatttaatcatcaagcctcgcactgtggctcacacctgtaatcccaaaactttgggaggctgaggcaggcagatcacttgaggtaaggagttcgagaccagcctggccaatatggcaaaaccctgtctctactaaaaatacaacatttagccaggtgtggtggtgcacacttgtcatcccagctattccggagcctgagacatg

SEQ ID NO: 177706 - DNA, 629 bp, Homo sapiens
tctagaggatcccagtcttgggaccacaaactcattaagccaaagggaaaagtcaagccgggaagtgggtcacgcaaatctgcctcccattttgattcctaaataagatggcgagatcccctctccacaaaaatacaaaaattagccaggcgatgtgggacgcatctctactcccaactactcaggaggctgaggcgggaggatcgctggagcctggaaggtcggggctgcacggagccctgatcataccactgcaccccagcctgggtgacagagtgagacttcacctccaaaaaaaaaaaagtttttaaagaatacccacccaatagagctgctgtgaggtttgcatgagtgctatctgtcaatcaagccaaatgaccgaggcaagtctcaatcattttaggaggtttatttgccattgttaaggatgcacacctgggagacacgtctgtgcctttctctgaagataattttgagggcttcaaattttaaggggaaaggatgggatatcgagaaatgcacaattttcatgtgaagcggggtagggggaagagagtcatgtatgccttcatctggctcagtgaatctgcgtttttgcataacatagacaatagagcagaggaaacaat

SEQ ID NO: 177707 - DNA, 513 bp, Homo sapiens
gaagtgaattagactgtctgtgtaatcagaatacgatgtgtatggacatcaaaacctcacactgcgtatcttaaatataacaatttcaacacaaaatgtgaaagcaaactgtaaggataggctggtgcactttgatctcttgttttatgctctgccttcattgttctgtacccttaatcgggtttttagtttcagtacgcaacagaatgttaataaccgtgttctccatgctgtgtgttagatgttgccaaccttaataacagacagtggctctctaaaagaaaatgtttatttgcgagtagagcattgcaatgggaatacatgtgccatagtaaactatgtatatattcaggagataaagacagaggtgtttaaagaaaaaaatgaggaggattacataattgttttgcaataattattcttggccacaagatcaataacaaggctgaacggtgttccattgtagatatatacacatcacgttttgttcctacagtccgaggttggacaggc

SEQ ID NO: 177708 - DNA, 313 bp, Homo sapiens
gttttgagaagtgaatgggaagcccttagagctgaaagtagcttggagagcatctcattcattcttttcattttatagatcagaaaattgagacccagacagggaggttatgacttcaaggtcatagttggtggcaacgctcagatgcagacccaggcttctgactcccattgcatttccaagtgagatggtttttgcaagatttttatatccagaacattttaaaattggccatctataggatgatggtgctgtactggagatttctaatgcagtttgcatgtgtacgaggagcatcagagagagatcttgc

SEQ ID NO: 177709 - DNA, 308 bp, Homo sapiens
gtttttggtctcagggggaccactatgatcttcagtcatttgccactaagtatgatgttagctgatttttttttttttaagatggcctttatcgggttaaggaagttcctttttactcctagttttgggtgcatttttattaagaaagggtattgaattttgttaaatgcttttgctgcttctattgagatgatcatctagtttttgttatttattctactgatgtggtatattacattgatttttgtatattaagctaactttgcattcctgggataaatcccacatggtgatggtgtataatcctt

SEQ ID NO: 177710 - DNA, 376 bp, Homo sapiens
ctctaagttatcacccactagccttcaaatgatgtcacagaaagaacatcacccttggagtggggaggggaggtttaagtctaggcatcacaatttaaactggtgggacctggggttggtcacatcccttttcagggtcttcagcctctcagccataaaacaggatgacagcccatgctctgtatgccgcaaggctgttggctggatcagctaaactcttaagaggatgtgtgggctctaagaataccccgcgcactgggaatttttgacctgatctgtccaggaagcattgttccagcctagccccgactacccttcaaagcagactccctgaggattcttacatttaaaagactacaggctatacagaatccaa

SEQ ID NO: 177711 - DNA, 711 bp, Homo sapiens
atctttctttcttcctagaaagccttcctttttatttccttttgttgagatatgtcacacacagaagagcattctacaaagagtgataattttgcatatatgttttgcgtatctcctataacgtccactcagattgagatacagaactttccagctcaccacttaccaacctcctgagggtggacaccatgtctatgtggctggtagttttatcagccatgctggacacaaagtagccattcaataaatatcaaattgacaaagaaagaatcaatgttggtgaggttgtatacatcatacaactatttaaaatagatactgtgtaacaatatggataaatctcacagacattatgttgactttaagacaaacacaagagtacatactgtatgattctacttacaagacattcaacaacaggcaaaactaattaatggcactgaagtcagaatcatggctatctttggcatagcggtattgagtagcgaggagctggaaagttctgtatctcaatctgagtggacgttataggagatacgcaaaacatatatgcaaaattatcactctttgtagaatgctcttctgtgtgtgacatatctcaacaaaaggaaaaaaaaaggaaggcattctaggaagaaagaaagactgaaaactaagtatcaataagaaatatgcccataagactttggtaaatgaaaagaccactttgca

SEQ ID NO: 177712 - DNA, 234 bp, Homo sapiens
ctgcctttactacatttaaaaagagtttcacaaactcatataatatctttctctagagttcaaagtgagcttactagtccttactgatactattcaatcaccactcacctcttccctgtttgatagacaatactgaatatgcaaataaaaagaaagttcctacatttcggctgtggttagattaaatttttaaaaattactaccctgtaacactttaagttgctgtaagaacac

SEQ ID NO: 177713 - DNA, 254 bp, Homo sapiens
cacacacaacacatacacacaaatgcacacatgcatatacccacaggtgcgcgctcacacacacaactcagtgaagggagaggccccagcatgaggcacctgctggggatcagttccacaaagggtgcagcataactgctggagcaggaacagctacacagcggatggcgatcatctccattctctctctctctttctttttttttgtgagacagagtctcgctctgtcgcccaggctggagtgcagtggcgcg

SEQ ID NO: 177714 - DNA, 437 bp, Homo sapiens
acaggcttcaaacttgtgtggtttttggaaatcaggcagaggaaggaggcagagaacaagatgattttttgaaggatggaacagctgagaaagttaaacacctccttcaccttcatcaccttccctattgttccctaatctaaaattagaaagccagtctcttaagaaattcatggatctgtagtgatgaccccccaagaaagccctccccattttggtgtggagttgaggaataggcaagtgtactgcctgctcaccctgctgcctgtctcccacccgaggccttgggtgaagtctgccagtgatcatgccctgttatcctggggaaaaagtggttaagaaaacatagtgctataactcacaccagctacttgtattaggcaacctagttctttattaataaatgtaaactgataactagggatcattgacatctt

SEQ ID NO: 177715 - DNA, 521 bp, Homo sapiens
gagaccctgattggagcagatgccggctgcgtgaactatgtctagacatggaaattgtgctcttaatctctcaatcctgctttctctacattctctgacaacgcgcctgtttctgtaaacattctcaccacgggagtggagctggaaacacatgtgcaatcagcagccacagcagctacaaagggggttatgaaatccgcgcaaaaatagcctgcttgccccataggcatgcaaagcagccaactagccagggagaacgtgtcaggcggcagatttcgctcagtgtttcaagaggcttccagtgacctgtcatacttaggggcaaaggagcttagtgctggacagaaacacccggaggggctctgggcctgcggacagagcctcctgtgcagctgtgagcgacaagacctcctcccagggaggcagtacaacttccaagagatgccagcctcctgtcctacctgccccgcaactcctcagccctggtttaaacttttacttgagccgggcacggtggctca

SEQ ID NO: 177716 - DNA, 381 bp, Homo sapiens
aattccaggcatagatatattctccacataatttatccttctgtaaatttgtttgatggattaatgacacctactgggcaagtagcatctttttgaaactctccatatccaagctgaaaagaatgggatagcccagctcacaaatgccaagcagatgtgcacagaattgctataccttcatgcagtctagggtgatgggacttcgttacatgttcattagcagtgacataactgtggatcgttattttcctaattagccattaataacagttaacactgtaatgggatcacaatttcagaatttggagcatatattgttgacagtgaaatctaatgaaaaacaaactagcttcttatattttataaaagatgttaatctaa

SEQ ID NO: 177717 - DNA, 374 bp, Homo sapiens
atacctcttactaggcactgggctaggacaggtagaatgacaataagacatgtcccctatgcttaaggaattgtctgtcacaagtaactggcaatgccacagaagtggctgtcggtggctctgtgaaagtgctgacagggcagaggcaagagagagatgaagtatccagagcagcagtggcctggggcggttgtcataacctgggaacgctttgtggaggacctggtcactggttttccgaaggccagcccaggtctcggagtctcagagttctgagatgtgactgcaggatgctgctgagcctggggaagcaggtagggagcttgcagcccatggagaaatcaattccatggcgggcaattgtggaggtaggg

SEQ ID NO: 177718 - DNA, 137 bp, Homo sapiens
ctccttgtccttcctcctctccttcctcctcctcctcttccttctcctcctcctcttcttcttcttctcttatctcactctcttcctttcacttctctgcaattgctatgagaacgtgcatgagtgagcctgaaaat

SEQ ID NO: 177719 - DNA, 603 bp, Homo sapiens
tgccagacatcatgttgtgtacacagtgatctcctcttattctcaagaggagaataaggcactaaaatgcttagagtgttacttctcgctctctgggggtaaggaaagaggtgttaagtacaaaaataaccctatctcaaagacagagagtctgccagaagaatcatttttggaacatcctctaaatactagtgcatataactcaatcctttcaaagaaaaagcctaaatccacatatccaaaccctgcccatccttgagagttaactgaagatgcaccttcttaaaaaatcattcttcgagctgggcaaggtagctcatgcctataatcccagcactttgggaggaggcaggcagattgcttgggttcaagaattggagaccagcctgggcaacatggtaaaagcccatctctacaaaaatatcaaaagttagccaggcatggtggtgtgcacctgtggtcccagctactcaggaggctgaggtgggaggattgcttgagcccgggaggagaggttgcagtgagccaagattgtgccattgcacagcctgggtgactgagccagaccttgtctcaaaaaaaacccccacatcattctttgtc

SEQ ID NO: 177720 - DNA, 404 bp, Homo sapiens
gggccactttccccagtatttggatccctcagctttggagggcaagagctgtttccaggctatggacaagggacggggtgcatccagaggagggagctggaggtgtggcctcacgtgtaagccagcagaagttggcgtttctaaatctgaataagaaaaccaaggagaggtgggactttggagcctgccttataagagcccagcccttgcccacagggccacactccacgtgcagagcagcctcagcactcaccgggcacgagcgagcctgtgtggtgcgcagggatgagaaggcagaggcgtgactggggttcatgaggaagggcaggaggagggtgtgggatggtggaggggtttgagaaggcagaggcgcgactggggttcatggggaaagggatggatcg

SEQ ID NO: 177721 - DNA, 453 bp, Homo sapiens
ctgaataaattctccagaatgtggagccacacagaagcaagcacaaggaaagtgcctgatgcaagggcaaagtacagtgtgtaccttcaggctgggcacagacactctgaaaagccttggcaggaactccctgcaacaaagcagagccctgcaggcaatgccagctccagagccctccctgagagcctcatgggcaaagatgtgcagaacatatgtttgtcatagccccaaactgagaatgaagcaaacagccatctgaaggaaaacaggcaaataaacgatggcaggttcatgaaatgcaaacccagacagccagaaggacaacagtgagggttacaggtgactctgtggttgagttcatgacaatgctgagtaattggagtaacaaaggaaagtccaaaaaatactttcaatgtgatttcttctaaataaaatttacagccggcaaaatga

SEQ ID NO: 177722 - DNA, 469 bp, Homo sapiens
gatctttaagataatttattacaaatagaaattgttcccccttagtttcaaactgtcatctgttaggcagtcctggtatttcattttaatgtaaaaaaagatctcttagtgatatactctgataattattgaaatctgtcacctatcacagggagaacaatattggcagtactccaactcttactggaggcaaagcacaatggggcaagaaggtaaatatttaaagtaaggaagcttggtttttacagtgaacaacactgaatcatacattgcaaaatgttaataaaattagcagcctgtttatcagcttatctgcgtcatggggtgtggaggggtattgacaatgaaaagcctcatttatcttcatgagttaaattgcctgtataattcatgaaccaaaagcaaagcaaaaaccagagctgagacccaagttggttatataggtcagctctaatgagtttaaatgcct

SEQ ID NO: 177723 - DNA, 104 bp, Homo sapiens
taagtgccatgaaggtgttggcttttatttacctagtgcctagtctctaaaacttaatgggtactcactaaatgcttgttgatcttgatctcctccctttcctg

SEQ ID NO: 177724 - DNA, 268 bp, Homo sapiens
ctgcctgcaggatccctcagggtcttagggagatgatagacacaaaatgttacccacatactctgaaaaatctaaagaaagcccatagtattacattttacccaaccagccatttataattctaactttaattcccaaaaagtcttaggtagattataaacaggtgaggccttatacaaaatccttatgtttctatttataaaatgaatcttatgagctactcactgcagctcccctcctttgccaaaagcctgtagtgaactcatca

SEQ ID NO: 177725 - DNA, 517 bp, Homo sapiens
ggtcaagaactggcacattgtaggtgctcagttaatgttacttcttttttctctaccagaagaaagggaagtgttacacatttattttggttttggtgactgatttaaaacttatgtgggttttaatttagtggaataggatcttgcaggaacaaatttcatttcactttttatcttccaatttaatactctcacacaaaaacagtttttcactttagtatttgttaagcagatgaattatttgtgggtaaagaaatgagcattgcttaaatctcttattagtatgcaaactgcccactgttaaaacctttcttagaggattatacaattagataaacgcctttttagaggtattttaggtaagataatcttactttttaatgaattaaatcatccactcatttagttggtcatttaaacatttgtttgtcatgtttgggtaaggaattgtgctggagtctgtgtgagacttcaggatatttttggtgttcagtgagaggcagtgtagaatactggt

SEQ ID NO: 177726 - DNA, 322 bp, Homo sapiens
ggaccttatgtaacctggctcagtccccaggctgacctgcctgaggcctgctggtctgtggtctgtgatttttttgtctaccttctctcctggccgctaaacgcatggcagctgcatttgctaaagaacacagcgccacctggtggaaagataagagtaatgccttacttttgtaccttatttttgttttctgaccgctgattgattccacataattctgtaaaggtgtattgagccccaattatattcaagacactgttacagtcactgtgtatgtcacagtgagccacacaaagtcccttacctaatgaaacttataatt

SEQ ID NO: 177727 - DNA, 478 bp, Homo sapiens
gcgagactccgactgaaaataaataaacaaataaataaataaataaacaaataaataaaaaaccttctctgggcacgatgctgaagtgagtctttggtattttgtcatccataatccacctgatactttaatctacccaccaccttttctcaatttcctaataaccctacacagccattctggtaagatggaggtgaccctttctttttgcctccagggttgttataggagccaaataggatcaacatgaggacaccattctcctggtcacatggatgagcatgtggctcaatctggaaaatatctattttcccagggaaagtgagcatgtgactaccaatgggtgtcttaccacccaaaggagagagcaaaactgtgggtgaagcctagagaagaagagggagatagagtcttgattacatttcaactgttactcccagtcctgccttcacatccacttcttggctttacagtttta

SEQ ID NO: 177728 - DNA, 616 bp, Homo sapiens
gaaaaactttcatagattatgattattacttattaaatgtgagattttcttgatgtttaagggggtgggagcatttgacagagggaagagtgtgttggcaattattatgttcattttatgatgaagatattgaaagttaagaggatttctcagtcagtggtgaattgaggaaagaaaattgggaggtggggagcatttctaggaattttctcttatgaatccttaagcatattttgtaattattgctttttttgaatcacccttttcagggattagcacagtactttgcatgtattaagtactggagttacaattgaatttatgtgtgtaagaacaataaggatgtggaaggaagaggtatttccagctatagataatcttgtgtttaagcctattctttttatttttctacattttaaatagctgatttcaattcagaaatagaaaaccaaggttaccattgactttcctttcacctctccaaagttcaaatcctgaacttcgatcttttcctagagttttctcttctcctgctgttaaattcactgggtatattttctgtcagtgttacctccccaaagtataggacttggtacacatgccgttgattgagact

SEQ ID NO: 177729 - DNA, 290 bp, Homo sapiens
ttacactaccttctttccatcgaggacgtatcttgcctactgccacagagatatctttttactgtttgtcacccccaccagaatgtaggcttatgagcacaatcagggccactggtgacttcagaacctacaattgtgcctggcatatggcaagtactccgatactggttaacatatgggcaactcattgagacgtggaaaaaggcttctcttaaactcaaccttttctccccacccgcctctgctggttaactgaagttcaaagcactgagtcaagttctcatgacaga

SEQ ID NO: 177730 - DNA, 452 bp, Homo sapiens
aatgtacaaccatagagggaggtttaaaatacctctcttagtatcagtacaaatatagaatatttggataatgagaataacaaacctgacttaataggacatgccacccacccactgcagagtacacattcttttcaggtatacatggaacaattaaaaatttctccgtattccaggccttaaagcaagtcttaacaaatttcaaagggttataattacataggaaatgttctgttaccatggtggaattaagccagatatgaataacaaaaagattttattatttccacatatacttggaaattaagaaactacttttaaatgccccaagagtcaaagaagaaatcacagtggaaataaactgaataataacaaatgcgtgacctatcaaagtttgtggtatgcagaccaggcttggtggctcacacctataatcccagcactttgggagg

SEQ ID NO: 177731 - DNA, 637 bp, Homo sapiens
ggtctctcaaaagtagtgtgtcttctttcagaaaacattcaagatggctgaggaggaaatgaggatcagatttttatttatgcttttctgcttacctgtatatacaccactaaaatatgataaaaatgtattacgattagatactatctaacagaagccacgtgtctggtgtttagctaagtgctatattattgaaagtcaatagactaagttctacagtctaataatgtagaagcaatttggatacacatgcccttatgcaaatacattgaaaaaaggtaagtcctgggtagagacacaagtaagacacacgaaaggttctaaatataggatgtatacccattgtctaagcttgtagtcctcaacatcttacacataaggacgatggacaatttaaaccttagctctattttagtaatgacatgtttagtatgagggtggggcaaactatccaatttttaatgcagtactgtgtggcgaaaagaccaaagatttttttttagtaaaatggagtacttaataactaaattctaagacagagtgcttcattcctctgagtcttgtttttctcattttaaagttcctctctgtattcatctgcttcggttgcccttaaaaattactacaaactgtgtgg

SEQ ID NO: 177732 - DNA, 422 bp, Homo sapiens
attggtgcttctctgaccacattttccctatcacactctttggcaattaaatactggttttcacagatagaattctagtgccattaacatgaatgtcaacttctcagagacgtatcacttgtctgatatttcattactgaggacccaagcacatcagtttcctgatggaataaattccaaggaaaggatttattcagccaatctagcaaataagcctatatatttaatttctaacttagaattcaaagacactcgccttttctatcacttcccgctctctatttttttttttttttagagaacgggtatcacaatcttccccaggttggcctcaaactcctgtgctcaagcaatcctgccgcctcagcctcccaagtagctggaaccacaggtgtgagccactgcaactggcttcacttctc

SEQ ID NO: 177733 - DNA, 161 bp, Homo sapiens
attagaaaggtcataatagcttgctaggtttatttattttctcctcattcctcaattcattgctgtaatttattcttatgtcggaagagtaatcatcatcatccttgtatccagatgttatcttttttacttttcagtgatctgtgataaaatattagtta

SEQ ID NO: 177734 - DNA, 810 bp, Homo sapiens
tatctgagacaggtctcaatcagtttagaggcttattttgccaaggttgaggacacacatgggaaaaagacacaagtcacagtaggatctgtggcccacacatttttccaaagaggattttgagggcttcagtatttaaaggggaaagtgagggtaggaggagtaggggtagaggaaaaaaacaaaaaggagtgtaggtagtgagttaagtggtcacattcttgtgaggctttgattagtgctcactgaatccacatgttacatgtgaagtggggtagaggaacagtcaattaagcatttgtcaggactcagtaaatatgcatatgtctgaggtgggcagagggatggtttctagtcttgactttgtgctgtatctgtgaagataagctgtttacattgtcaaggtaagggaggccaactgaggagatatggaatcttctatcttgcggctgtgtttaggcaaaaggaaaggcagtttttttgcatgactgagtttccaggcttcacttttccctttggcatagtaagtttggggtctgacttgtttgtttgtttgtttgtttgtttgagatggagtttcgctcttgttgcccaggctggagtgcaatggcacgatctcagctcaccacaacctccgcctcccaggttcaagcgattctcctgcctcagcctcccgattagctgggattgtaggcatgtgccaccacgcccggctaatttttgtatttttagtagagacagggtttctccatagtcaggctggtctcgaactcccgacctcaggtgatccacccacctcagcctcccaaa

SEQ ID NO: 177735 - DNA, 587 bp, Homo sapiens
  misc_feature (77)..(77): n is a, c, g, or t
ggctcggtcacgcaatgcactctttcttcatgttccattactctgcctcacacacggcacctatattcaacttcgtntctccctgctgcttccatggccttgtttctgtagaagagtggagcaggatgaaattgaagcagagacagagtagtgaggcagtagagttggagaagacctgagtgtggacctggaagctcccctgcagagggcaggggagaggaaggggctagcatcactgaattggagtggagagggaaatgtatcactcccctgtctttgctgtcatcctctcctcttccttctgccacaaactggaagttcatttgtgaaggggctgcttgaagcccagaaacagtgctgtaaatgatagacgatcacttccctgggacgataatttccctgggagagtccacaaaagtcttttgtaactgacaaggtaggcagaacattgtatatgatcccatgtttttgtaaaatggacaaatccaaccataaatatgtgtttgtgggcaaatagaaaaagattttagcaaatacacagcaaactattaacaatggttgccactggagaggggagatgaggctgg

SEQ ID NO: 177736 - DNA, 571 bp, Homo sapiens
tagattaaacaggattttgcagaccggcctactagaaacagacccaccatgtcgaaatgccactgagaaatgtattgacatctaaaacacgaactcaagtgaatcttgagactataatacactttagtaaatggggaatgtttctatttcttcatagcctacataattagaaggcatgaagtgattaaatcgtaaactcctgggctgctattgccaaagggtacatttaaaggtataatacagggtcttcttagtaagggggatctgtttttagcatagaccccataacaagcttactgttgttagcacatgacggagtggaaaccctctccaccaccacagcccagcagaactgagaggacaagagtgacaagcacacacacagagctcctcagagtcatacaagtggaaaatgagcctttcctggggaaacaagtaactggcggctggtcatttagcagagcattagaggaagacagccttgcttggtgttgataagcagcctgcatttagagtgaacttcaaataatgtctgacaacatcaaaaatatccagaattagtcgtagggat

SEQ ID NO: 177737 - DNA, 324 bp, Homo sapiens
acagtccttgttcttcctaatattgggaggaagagagaataaggtcattgctttctggagtaaccgtccagtgactcatacaagctgaagtagaagcaaaagaaccatagctggttaacggtaactgcagcaagtgaaaaaggggacatagtatccaccatatatttattggaaacccatatactgtctaatttttataaatcattcattcatttataatcggtgcactcactttttaaattcaggtctacattcatttctttgccagtcaatacccatttaaccaccagatcctaattttttaacctctttaataataattac

SEQ ID NO: 177738 - DNA, 201 bp, Homo sapiens
aagctctggggctgcagaaattcactaccgggggtagaatgtccaggtgggagtttggactggtactagctcaacctcaagtaaattcctgaagggtttagaaaaatctgaaacagacgctgacatatgtgaaggccgggctacataaaacatggagatgatgaacttctcaaatggagcagaacaccacaaaatttggag

SEQ ID NO: 177739 - DNA, 458 bp, Homo sapiens
aggtcgagctgagaaactgtctgaactctcaggtgagaagggagctcagagcccacatccaccaccgcgtgtagttgcctggcctctaccactcgcacactgcctctgtcggggagctcactacttccactgcgagcagctgggccactgccactgccttgtgacacacgctgcagcctcagccacagggaccctggcctcccctcccgagagaagggactgggaggcagggaacaggacttattaagtgtcctttccattccagacactggacccagtgatggtgggatctgctcattgattcccaccacaaccccatgaggtaaagataagcgctctcactggctcctctttttaaaagatttttgaaaatgtttaattgggataaaatacatgtaaccaagaatttatcttcataaccatttcttttcttttttttttttttttttgagacaaag

SEQ ID NO: 177740 - DNA, 394 bp, Homo sapiens
tacacctcgcgcccgtatttcactggattgatattgaccctttttcccattgaattgtcttggcacttttttcaaaatcccagaagacttttaacagaaattgataatgtgggccagtcacggcagctcacacttgtaatcccaccactttgggagggcaaggcgggaggattgtttgagcttgggagttcaagactagcctgggcaacatagcaagaccccattctctacaaaaaacataccaggcatcacaggcacacacctgtggtcccaggaggctgcagtgagatgtgaccatgtcactgcaactccagcctggacaacactctccctctctcaaaaaaagaaattgataaggtgattataaatttaagtaaaaatgcaaagtgcctag

SEQ ID NO: 177741 - DNA, 579 bp, Homo sapiens
cttagtggcttaaaatgacaaacattttatttgttcataattctgtgggtcagaaacatgagctggtttcaattgaatggtttgtctgctgacctcacattaggtcactcatgcagatgctgtcatctggaggtcacttgggatgcatggtccaagatagccttactcaaaagtctgctgagttggtgacagctttggctggccttctgtctccatgtggtctcctcatcctcaaggagactggctggggcatcttcacatggtgatggcaacattccaagaggataagagcaaaagcttcaaaggtttcctgatgcctaggcttagaagtcccaaaatattacttccattgcattctattggtaaggcaggtcagaacgccagcccagttttaagggtgcagagaaaggatttcaccacttgatgaaagaagtagcaaaatcacagttgcaaagaaatgtatacagatgggaagccgggagctgtggctcaggcctgtaatcccagcactttgggatgccaaggcaggcggatcacgaggtcaggaaattgagaccatcttggccaacacggtgaaac

SEQ ID NO: 177742 - DNA, 412 bp, Homo sapiens
ggaaatttggaagaaagatgttctcagggagtgctgatggaatagtgtgaacccaaaatatctgaggcaggtctcagtcaatttagaaagtttattttgccaaggttgagggcgcgccgtgacacagcctcaggacgtctggtgatggtggccggggcccagcttggttttatacattttagggagacatgagacatcaatcaatgtatgtaagatgtacattggttctgtccagaaagatgggacaactcaaagcagggagggggcttccggttataggtagatcagagacaaatggctgcattcttttgagtttttgattagcctttcactgaatgcacaatttactggaatagttacgtatgccttagtctggctgagtgaaacaacagggcggaggaagcattccgat

SEQ ID NO: 177743 - DNA, 321 bp, Homo sapiens
acgttgacacttcagagggtagacctcataatttacaatttcccaacagttcctgcaccttagaattttgcttcgatgtgtgtagactcagcagcatgttgtaggcacgttgatgtgttccagccacccacttatataaacactattgtcttataggagactatacattctgactgcagtttaccaaaaaaaaaaaaaaaaaaaaagggggaaaaaggggggaattggccctcccttgggttttaaccaaaaaaaaaatcccctggggttttcaacacatccaaagccttgggggggggagggtttttaaggttggccctt

SEQ ID NO: 177744 - DNA, 611 bp, Homo sapiens
cacagaggcacccacacctctgaagatgactccttggattggaaaccaattgcagggcaaccctgggagccatgtgttaaggatggaaggtcacatgatgcaaggagcctgggtcattacatcaccactgagagctccttatatattctggttattaatcccttgtcagatgggtagttgctattttctcccattcatgggttgtctctttactttgttgattgtttcctttgctgtgcagaagcttcttaacttgatgtgatcctatttgtccatttggctttggatgcctgtgctatgtagggtattactcaagaaatctttgctcactccaatgtcctggagagtttctccaacgctttcttttagcagtttcataatttgaggtcttagatttaagtctttaatccatttttacttgattttgtatatggcaaaagatacgggtcttgtttcattcttctgcatacaggtatctagtttttccagcaccattttttgaagagactgtccttttcccaatgtatgttcttggcacctttgttgaaaatgagctcactgtaatatatggattgtttctgagtctctatgtgttccatggctatgtgtgt

SEQ ID NO: 177745 - DNA, 1196 bp, Homo sapiens
tcgcacttgagaaattattataaaagtaactcagtatccctttgcctacaagagttttagaataatttcagatagggaagctatgcactgattacccctaaacaagtgggatcacagcatgggcaaaaaggagcccaagaagtttggcattgagctggggtagtagtatcccagacccagaccatgagccaaatgaggtatagacaggccaactagagccagaatattccacaaagatattttcaggcctgtggtgcgtagacttttggcatgccgaagtgccagtttattatgggaatcacaggcattgccatcccatatcctgcaatagtctcccattcaatacctctgtaataaggtggttccagaactggcttcctgtctaagaatgttggtactaggaactaacttaagatttttctttcctctttggaagaaccatacagttgtgtatgtcaacccaggcagagagactaagaccttcatttcctatgaagagggatctccagttagcagtcctttaaaaccatcatattaggaaaggactttggcagagaccttctgcatagtcttagagggtgagggccctcaattttctgtgggtcccatcctgttacctactttcaacctaggctcctgtccaccgtggatcgcaccaatatcaaatgaggaggtgtcgttaagtgagggggattctgtttgggtattatagactcatagatggaaagtatctcattttgaggctagaaaggggacaaaggaagcactaattgtgttttttcagatgtcatacaactaaggcaatcggcaaaagagagatcaatttaagagaccattgtccatttagtaagtttaagagagcattgaacaagccattatgcctctattaggcctgctttctgtgaacagtacaacagatgggccaggcactggctcacacctgtaatcccagcattttgggatgctgagacaggcagattgcttgagccttgagcccaggagtttgagaccagcctgggcaacatggtgaaatcctgtctctacaacaaataaaaatgtttgcagggcatgctggtgcgctactcaggaagctgaggtgggaggatcacttaagtactggaggttgaggctgtagtgagctataattgcacccctgcactctagcctggggaacagagtgagaccttgtctcaaaa

SEQ ID NO: 177746 - DNA, 641 bp, Homo sapiens
cgaggcagccagggcgccggaagaggcctggaaatccacgcggcttcccaaagacggcgcctctgttctgcgggttcgtgacgaggatttatttccacccactgcgcctgggcgcaggtctgcgggtccgcgcccactgcgtgcggcgccacggaccatgtcggtgactgatcaggcttttgtcacactggccacagatgacatctactgccagggcgccctggtcctggggcagtcactgaggagacacaggctgacgaggaagctggtggtgttgatcactcctcaggtgtccagcctgctcagggacatggatgaagctggaaaccatgactctgagcaaactattgcagggatagaaaaccaaacactgcatgttctcactcataggtgggaattgaacaatgagaacacttggacacagggtggagaacatcacacactggagccagtcgtggggcggggagaggggggagggatagctttaggagatatacctaatgtaaatgatgagtaaacgggtgcagcacaccaacatggtacatgtatatatatgtatcaaacctgcacattgtgcacatgtaccctagaacttaaagtataataaaaaaaatttataaataaaaatgtttaggcaatta

SEQ ID NO: 177747 - DNA, 808 bp, Homo sapiens
cgaggcagccagggcgccggaagaggcctggaaatccacgcggcttcccaaagacggcgcctctgttctgcgggttcgtgacgaggatttatttccacccactgcgcctgggcgcaggtctgcgggtccgcgcccactgcgtgcggcgccacggaccatgtcggggtctcactctgtcacccaggctggagtagagtggtacaatcacagctcactgcagcctcaaactcccaggctcaagtatcctcctacctcagcctcccaagtagctgtaactacagtgactgatcaggcttttgtcacactggccacagatgacatctactgccagggcgccctggtcctggggcagtcactgaggagacacaggctgacgaggaagctggtggtgttgatcactcctcaggtgtccagcctgctcagggtctcactcgtcgcccaggcttgagtgcagtgataccatctcggctcactgcaacctctccctcactggcccaagtgatcttccctcctcagccttctaagcagctgggaccacaagtatgtgcccgcatgcttggctatttttatttttattttttgtatttttggtagagacagggtttcgtcacattgcctaggctgatcttgaactcctggactcactcagtccacccaggttggcctcccaaagtgctgggattacaggcatgagccacggcgccctgccaaggagtctttttaaaaataatttccttttacaattccctttgtctttaattctcaaataaagcaaatacataaataaatgcatctaatgaataaagca

SEQ ID NO: 177748 - DNA, 662 bp, Homo sapiens
cgaggcagccagggcgccggaagaggcctggaaatccacgcggcttcccaaagacggcgcctctgttctgcgggttcgtgacgaggatttatttccacccactgcgcctgggcgcaggtctgcgggtccgcgcccactgcgtgcggcgccacggaccatgtcggtgactgatcaggcttttgtcacactggccacagatgacatctactgccagggcgccctggtcctggggcagtcactgaggagacacaggctgacgaggaagctggtggtgttgatcactcctcaggtgtccagcctgctcagtctctccaaaaggtgcaagatatcatccagccacttggactgagagctcatcccaatccagttcctgatcagatggggccctgccactcgttccagccaggtgacctggtgttcgttaaaaagttccagaaagaaggactcctgcttagaaaagacctcatactgtcatccttaccaccccaatggctctaaaagtagaaaggaatgcttacattcatgacaccccctagtacaaagcatgtttaactgtaatctatgactaactaccctaattactggattggcagaaccctttttctccttctcttgtttagtcttccaaccattatatattaaaattagtttcttaaatttgt

SEQ ID NO: 177749 - DNA, 597 bp, Homo sapiens
cgaggcagccagggcgccggaagaggcctggaaatccacgcggcttcccaaagacggcgcctctgttctgcgggttcgtgacgaggatttatttccacccactgcgcctgggcgcaggtctgcgggtccgcgcccactgcgtgcggcgccacggaccatgtcggtgactgatcaggcttttgtcacactggccacagatgacatctactgccagggcgccctggtcctggggcagtcactgaggagacacaggctgacgaggaagctggtggtgttgatcactcctcaggtgtccagcctgctcaggtggatccactagatgctgtgattcatggtagatcttcagacgtttggtgggcacccacacaggtacctgattgtcacctggagagacaaaagcaaatcctcttccccataaaattatctttccttttccccagctctttgtatgttcatccctccaccatatatcttgtccagcctttttcttatccttttgtcccatcaggtgttgttcagctgcagtcatgggttgatctttttgtaaattaaaaaaacttaatgttaataaagctaaatgcaattgcaaaaaaaaaa

SEQ ID NO: 177750 - DNA, 421 bp, Homo sapiens
  misc_feature (354)..(354): n is a, c, g, or t
  misc_feature (356)..(356): n is a, c, g, or t
  misc_feature (359)..(359): n is a, c, g, or t
  misc_feature (368)..(368): n is a, c, g, or t
  misc_feature (373)..(373): n is a, c, g, or t
cgaggcagccagggcgccggaagaggcctggaaatccacgcggcttcccaaagacggcgcctctgttctgcgggttcgtgacgaggatttatttccacccactgcgcctgggcgcaggtctgcgggtccgcgcccactgcgtgcggcgccacggaccatgtcggtgactgatcaggcttttgtcacactggccacagatgacatctactgccagggcgccctggtcctggggcagtcactgaggagacacaggctgacgaggaagctggtggtgttgatcactcctcaggtgtccagcctgctcagaatctgcagcctcaccggtcctctccatggtttcctgaaggccatagnangtntctgcgtcnctgcnttgtctgtgtacatgtactgtgttgtctttctctttcgtttgttggtc

SEQ ID NO: 177751 - DNA, 305 bp, Homo sapiens
atatattctaaatccctctgtggctcccctcctcagtcacccaagacacttgacccagcagtgacatggtgaatttggcattgaagcaggaaagacaggagagccagagacatgccactgttaattccccatatgtgcataaaattcagatacctctgggtctatatttacttgtgtttagcatctgcacgtaaagaaagggaagttaccccctgctacctcccatcagtcaagcatcacctgattcaaggacatactaagccacagtcagcccatcccaactttttgccaaaatgcctacccca

SEQ ID NO: 177752 - DNA, 339 bp, Homo sapiens
atcgagggtttctttgaggggataaaattagtgatgatgattggaaactaaaaaacagaattgtgggcagatgcggtggcagcactttgggaggctgagacaagtgaatagcttgagcttaggagctggagaccagcctggacaacatggtgaaactccgtctctactgaaaatacgaaaattagctgggcatggtggcacacgcctgtaattccagctactcgggaggctgaggcacaagaattgcttgaacccagaaagtggaggttgcagtgagctgagatcatgccactgcactcctgcctgggtgacggagtgagactctgtctctaataataa

SEQ ID NO: 177753 - DNA, 451 bp, Homo sapiens
ttaaacaaacaaaaaactgctttgctaaatgaaagctgtatggatttcacaatttgaatttctgaatttctgaaatcttgcattttataccagaaggcagtttactcatgtgtctgatcattctaaaccaatggagagttaagaatgtacatttcatttcggctgggtgcggtggctcatacctgtaatcccagcactttgggagacggggtttcgccatgttgtccgggctgctctcgaactcctgacctcaggtgatccacccgcttcagcttcccaaagtgctggcattacaggcgtgagccaccacgccagggctttatttatttatttttaccacaatagtttgaagcagtaagggggaaggagggtgattatattgctttgtaatggtttgtgatacttgaaacatcacggtgcataataaagtaggtctgcagtaaaaaaaaaa

SEQ ID NO: 177754 - DNA, 399 bp, Homo sapiens
atactcaggcagagaccagaatgcatacagagtctagctgtcattctctgtaatctggagcaagtcaggtttgtctctggaccttctccagttgttttacaactttctagacatgcagtgtatcaacccaacacttttattaagcagctttgacagggtttttgagatgacagctagtcgagattcaacttagcattgtacagttttatttcacaattggaactttcggttttaatacttttaggactttattcattaatgcaacactttttgttgaacacctactatgtaccagggattgatatagctgtaaatatgacatacttagtctctgtctttgtagtactttaattcctgtaacacttgttaaattggattatttttatgaccgtagagaat

SEQ ID NO: 177755 - DNA, 339 bp, Homo sapiens
cacatatgagctactcaaaatgtgcaaatcgtattgtattgtattgtatttgtaacatatctattccttgcaaaaaactgggagttctttgaaggcaagggaagatcttgcttatttttgtatcatctgtgtatgatgcacaaaataggtgaccatttaacgtttgttgagtgaatgaatgtgacatgtttatgaaatctatgattttagggtaaaggacactaaaagggaaaggatatatatttggataatataacgaacttacaagagctgaaaagctgctaatagaaaatccgttccaacctgaagcacattgcaaattcctagaactttctggag

SEQ ID NO: 177756 - DNA, 1511 bp, Homo sapiens
aggctggggaggggcgggggagggaaacaaccaccaaaaaataacattgtctgacaactttgagctaaaatccaggatcttaatttgagattaatgtaagaaatctgtcaggtatttttaaaaagtaactcatcactatttaggagttgactttttctgttgtagctttcattgaaggactattgttttagtcattctctcctaaattccttttcctgagactaaaagattgagctcatacctttgcataacgatctggagagtattttaaacttggcatgttcaaacctggcagactcgattaatatgtggacaaactagcacattagaacattttttaagttccaagccataaatgttttaaatgaacatgggcatgtataaaattaatacttaagccttcaaatagcacagactttcaaaatgcctgttgccttgggtgactgattttcagtgaggctctcgcttaccctacacatttcttcctctgcgtgaagcagtgccaggcacagagtcaggagagggtttgctcctttggcgctctactaccctctgctttcggcagagaaaaggctgctgttttacttcttaaactcctaccatatggaaagcttctaaaaataaactttggatttgtattggacttctaaatttgtaaccttctttatccatgactaaagccaatgtaaatacctttagctactctacatacaaagctgtggcaccgttttagtaagaaagatcaccaaccataatatttaaattatcaactgaattagtttacctttcatttatgtcttagttggcatggataaggacctggttgtgttgtcaagcaaaaactagttggtggtttttagtgaatccactttaattttttgttcatgaattgttggtgtaattacgtagcagacgtattcgtgagaatgtagaagtacactagcttttgacacaacagattgtttaaatggatcgttattcactttgtaaattctggtcagttgggccttctatcagcaagtatataatgagcacctgttacttgccaggcactgctaggtcttgcgagatacaaagttgtataaaagatgattcttgttcagacaagtaagagagaaaggaagaagaaaacctggggacaaccaaatgttttaactgtgttaacagagaaatagatgctatgagagcatgagagcatggaggagagatgagtagagtaatagttggctttttttttttgagacagagtctcactctgttgcctaggctgctggagtgcagtggtgtgatctcggctcattgcaacctccacctcccaggttcaagtgattctcatgcctcagcctcccgagtagctgggattacaggtgtgtaccaccactccgagctatttttttgttgttgttgtttttgagatggagtctcgctctgttacccaggctagagtgcagcagtgagctgtgatcatgccactgcactctagcctgggcaacagagtgagaccttatctc

SEQ ID NO: 177757 - DNA, 622 bp, Homo sapiens
atccattcaactataagaaaactaaaaatgaaaccacttttaagacgggggatggcatgtaacactgaactggagtgaagagcacttgaactctgagccttccttgaatgagagagattacaaacccccacagccttcactctccacattgaaaattcccctccctggggttcaggctgatgtaagccccatctggctttccttccctgttggttgcattgcagagccccaggatgttctaatgatgttccgtgagggctggaggagtccatggttgtgaaagtgatggcactttcatgcctttccataaattcccagaggttatggagggcttttgtaagtcagggctgagaggttaatatttcagcctctgaagcctctgctgtcttggttcaaatcctgctctggtcacttgctagctctatgaccctttgtgcttccatttcctcctctgtaaaatgggttctctcttgaagtatggtgaggattaaatgacttgatttatggtgagaaaataaatcactgagggcttagcacggagcctggcaccaagaaatgtttcgtaaatattagccgcttccataattattatttattattattagaaggttgagtggaggta

SEQ ID NO: 177758 - DNA, 213 bp, Homo sapiens
aagaatctattaggcaatcaatgcaagattatttaactcacaacctctcacttgaactaaaataacttacaaggctcttgttattatctccaatctataggtgaaataaggccctagaaagattagtagctgaattgcctggaattgcttgtatgaagtggaatagagattggaatctttctccactcttccagtttctttcaaagaataata

SEQ ID NO: 177759 - DNA, 223 bp, Homo sapiens
accagtgaatgctggggccgccttggtgctaggccacactctagaggggagctcttctccacactccagatagagttctgtcctggctccttcctaaaacctgcacactgagcaagtccctctacctccctaagcctcagtttccctatatgtaagcatgactgctctcatggtccatgagccctagaggttactatttacaagctgaggtgtcactatcccc

SEQ ID NO: 177760 - DNA, 501 bp, Homo sapiens
tatattcacacatacatctgtgaataaatatacacataaaggtgtcatgcattaatataattattcttatttttaaagttctcagaatgtcatctaaacttaagatatcatttctagaattcttatctgataaccctacttcatccaaaattcattaatttgatcataattcaacttgggataaataaaagttcacatttccattgaagaaaatatttgttaggcaagtactccatgagattgcagaagccaagaacccatgtaacaaaacatttcaaagtttactgttggtaagtaaacccagcagcctctcttatctagaacatgggttagcactaagaagtaagaaaaaatactctaagcagccaaaggacctgtaacaaaatatgtgctttgaagcactttgattttacacttagtagagttcccagggcatttgctcaggattgatacttatttcagatgttgttcatgcagtgttgttcatgtggtgttcctaac

SEQ ID NO: 177761 - DNA, 475 bp, Homo sapiens
gctacatataaaaatttatagtatttaatggaatatgtcttaccacactataatcaaatgtttttttgaattaaaaaatgaaaaccaatcctgttttacttagtttgataaagcactttgttcatcacacttggatcccaataacttttaactgtatgtaatgccaatttctatttttaaaatgtaggtaagccctcatttagccaaaggagtccctacaagttagtaaagaaccagcatacaataaacctagagttccagaaatgtttggaaggatagcagctttactaaagtgctcagttttccacaggagctccttggaagtgatagctcctgtttggatgcattgattctggttgagttacattccatgcttcatgtttatctattttatttgtcagagagggcattgcaaaatgtgggtctacctcaaccttacacatacaagaggttcaattaaaaattaattgaaact

SEQ ID NO: 177762 - DNA, 518 bp, Homo sapiens
cttcacctggagccaggcagagtcagaagagcactacagagtgggtatacagatacccacaggcccccactcagcccctcacacgattcttccccaagccaagggagttacagggattctccatgctgctgcctcgtccacgaggccaggccaggcgccctgactccccctggggattagtcttcagggtggagagagcgcaaagttcctccatctggcagtttctccaggggaaggggaggaggcagggagggaggctgcatatctttgggactagtgcgagatgccgatgctggtgacccagacgggcaccaacactcagccacttcccactggaggccattcagttgacttcctctctccttctttctttccctgacctctttcttctctgtcgcttttcttctctcatcatcctcccgtttcggccactcctctattggcagtctgccttagcatggcagggtccctctggttcataggcagttctggcaacagagctcaaggaaggtgactta

SEQ ID NO: 177763 - DNA, 340 bp, Homo sapiens
tcacactagtatttcagccttctgggtggggattgtttcggggacattttaagttcaatccaaattaggcacttggggattggccaggaaaaatctataaatatctgtcgtttcttctttccctttgcctcagatgaagaggcttttttctttttttctttttttttttttgagacttaactcttccatctgtgttcctagttctatcttggcttttaaagaagtacttctttgtaaaacagcttcagatacttagtagttcctttattcttagtttttgaggtagctccctaccttctccagttatcagataatcagaagacttcacttttccctctgc

SEQ ID NO: 177764 - DNA, 502 bp, Homo sapiens
gtttatatgtcatctttgatttcttttagccgtgttttgtagttctccttgaaaagatctttcaccttcttggttaaatgtattcctagatatttttctctgtgtgtgcctattgtaattgggattgtgttcttgattttctctcagcttgaacattattggtgtatagaaatgctactgacttttgtacactgattttgtatcctgaaactttactgaattcatttatcagtcccaggagccttttggcagaatctttagggttttctaagcatagaattaagttttattttcaacatttcggtgtcaaaagctgaagcgttccatctcagctggctgacctgaacaacattatactaatatttacacaatgaaaatgaacattaatagtcaaaaacacaatgtcaatataaaattgagtttagtctgatgctccttcttggaaagctgacatgaaccatctgcctttttgattatattaaaacctatttttaactataga

SEQ ID NO: 177765 - DNA, 138 bp, Homo sapiens
tgtatttttttccctcctttaagatttaacaatgtttatataaaaagaaacttgctagcagattacatacatgctcaagtactagaactgaatctcaactacttcagttcctggtagaataaatgaatgagtgtaaca

SEQ ID NO: 177766 - DNA, 517 bp, Homo sapiens
caggtgttaaaactaccaaacaaatcttaaaattagaagtttcaaattgttgctttggtcattaaatatttatttactatccactatgtgccagcagttatatgccaggccctgtgctggattaacatccaagatgaacaaggtgtggtccttaccttccagaagctcttggcctactgaggagatagttatgtaatcaaacaaataattccatgtgctaagtgctggtcagagacatgaattccctatcatgggaaatgcagaaagccaagggatcagctattcctggagagtagggtaggtgtaacctaagggtaataaggcaacgttttacctgaatcttgtaggaaaatagcgtgtgacagaagtgaaaaaggacaatccaatccctacaaatcacggaccagtgtgtagagccaggaaagggccctgcgtgtctgaagcgtgtgcagcagcaacacatggtcgtgtggggaaagcagggagtgggaatggaacagaataatttggggagaca

SEQ ID NO: 177767 - DNA, 396 bp, Homo sapiens
taatttctaaacatatgtttctggaaagccttcttgaacaaactttatgccattcttaaccatttatttattcctttgccacctcgggactttccttctttccatggtattactgtgtacccattgagggtactttccatggtattactgtgtacccattgagggtactttccatggtattactgtgtacacaatgtgaatatgtaattataaattacatattcaagttgctgtctttgtatatttacctcttcggacttgagtctaggttgtgattcagatcttttgattgtttttgcattctcccattaattctttcctagcctctgcaaatatactccctggtttacatagctactcactaagaacaagaaccccccgagaaaatataaaagc

SEQ ID NO: 177768 - DNA, 217 bp, Homo sapiens
cttactgttcccagtaattgatagcttttaatatttttaagtttctgttggttattttcatcaatagtataagtatccctatactttttttttccatcaacaatagtatcttgaatactttttatgtaagacaagaatattaggcaccctatccaaccacttttcctcccctcttcctcttttcacttcctggcagctgtatttttacttttatatc

SEQ ID NO: 177769 - DNA, 112 bp, Homo sapiens
ctttttcaatggacagagctaagaaataaacattttttaaaaagtaaaatacttcaacttcagatttatcttggttctcaacaaaattgtttctcattttatttaccccaca

SEQ ID NO: 177770 - DNA, 272 bp, Homo sapiens
  misc_feature (13)..(13): n is a, c, g, or t
gggccggtacccnggtagactaactaacctcagtgtttctgcaagggagtctggactgcccagagtgcatccgtgtcatcctgcatttggacatcatcaccaatttctttccaagggacgcttgtgcccaaacaaaacttgcacacatcagatacatgctgccaatcctgaaaagtgaacatttaaaaccttaaaactgaatttgaatgtacctgatcaatgtaatcacgtttattctgttctcagctctgtgatgtgttaggtctacctgg

SEQ ID NO: 177771 - DNA, 474 bp, Homo sapiens
ccaggttcctgcccgcccagcgcctgcctgattgctgaatgcctgccaagctcctgcctaatctggggagagctttagaagccgccctagggcaggctgctcttttgtttctggaatccaggccactcagcagaggggctggcttcctgcactgcgctgctgcggccttcaagtggacttaggtcaagagtgcctggggaggaatgcagtcccttagagcaaagcccttgtaatgaatgccttccctgcaccccctaattgggttagcgaagtgatcagctagattctcaaactaaacaggataggcatgctgcagtcctacattgttatttccatgacaaagaatctcccttttcccagtgaggggaacaagctgaggctcagagctgctaattctacttggtttgagggctctgcagaggacacactgacagaggcacctcagctcaaaggtagaaagcctcataaaaaaga

SEQ ID NO: 177772 - DNA, 1897 bp, Homo sapiens
  misc_feature (85)..(85): n is a, c, g, or t
  misc_feature (1363)..(1363): n is a, c, g, or t
ggtaaacatgttgcttggaagtatgcttttccagtttcacaaaatgacaccagtggccacagaagttagtaccctttggcctctnaaaatttcgctttatgaagagaaggctactaaaagacatgtaggacttagggttcaaggtggcagactagaggagctagtgtgtactgctctcgtggagaggaaatagtgacgagtaaacatggactctctaagtggatcatctaagaaaccacgtcaggattcaggatgcatcaagggagtaatgggacatggagaacagagaaaatcgaagctgggcagctgcctgcctgggaccagcatgaagacaggagaagctcctcaacacagggaaagaattagtgagtaagagtcctcaggggatccatacttcccacagtgacctgtgcaatcctgagaatgtgaaaaaccccatgactcccttgggcctctagactgatacagagagctacccagagtttttgcagaggcaacactcaagtccgtggggacccccacaggccctggactctggaacagcctggttgaggtgccatggccctgacagaagctgcagtcatggtgctggagatggacagattgctctactccctcttgacagaaaacctgctaaacccctgtggtttaggagagctttgtgttcccccaggaagcacttcgatggtgaattgggtgactccactcatcctgctcctaactgggcaggattcaacttcaccctgctcctaacttgggcagagccccaagcagggggtggggaggacgccctccctctcagaatactgaaaagggtgagatccctgggctctcaggatgttgggggagcagggcatgtctccctctgaagggctttccagaaagggtatagtcttgtctaccagccacagtctctgccttagggagctctatagcccagaacacctaagaaagaaaatgtggacgtggtgccagtgatcagaaggggctcctccaaggcctaggagcaaacctggtgaggttgtcagctctctctcccctgaccacagagtactactgtgcgtatgccaaaatacaacagagctacatggctgagttagaggctatctgccagccaccactcttaaggagcacctactggattacagcccaaatgaaacatcaaaaacattatgccagcatacagcacctgtgaaacctaaggcaaaaatccagacataaataaagattatgtacagagccttggctctctgcaagcacccagaaatggagccaactgactatactcaacttatgtcacagttaaaggaacatcagccctcacacatgaaaaagaatcagtgcaagaaacgctggcaattcnaaaaggcagagtgtctctttatgccgaaacaaacacattaacccatcagcagtagttcttaaccagattgtaatgactactggacagacagagaattcagaatctgggtagcaacaaagctcatcaagatccaggaaaaagttgaaacccaatccaaggtattcaaggaattccgtaaaacagcccaagagctaaaagacaaaatagctattttaaagaagaaatcaactgaacttctggaattgaagaatttacttcaagaatttcataatagtccaggcacagtggctcatgcttgtaatcccagcactttgggaggccaaggcaagaggatcacttaagcccatgagtttgaagtcagcctcctgttctctacaagaaattagccaggtatggtggtgcacatttgtagtcccaactacttgggaggctgaggtaagaggatcacttgagtcagggaggtcgaggctgcagtgagctgtgatcatgccactgctctctagcctgggccacagagtgagaccctgtctcagg

SEQ ID NO: 177773 - DNA, 222 bp, Homo sapiens
cccggctaatttttgtgtttttagtagagacggggtttcgccatgttggccaggctggtctcgaattcctgacctcaggtgatccgcccgcctcggcctcccaaagtgctggaattacaggagtgagccaccgtgcccggcctgcatatatgtatgtacgtatatatgtgtctatctatctagctagctagacactaggcattttggattaggcgcccacct

SEQ ID NO: 177774 - DNA, 314 bp, Homo sapiens
tgacagtgggaacccaggagattcgggtatggacaggcctcgatctatgcacagcaggagactagcatggctgacactaagggtgctgagctgacatacaaaactattcagctttataaacgtgtgataaaaataccgctaagtcactgacattccacaggacaaatcataatagaaatgaaaaaacagccaggcgcagtggcttacgcctttaatcccagcactttgagaggccgaggcgggtgggtcacgaggtcagcagatcgagaccatcctagctaacatggtgaaaccccgtctctactaaaaataca

SEQ ID NO: 177775 - DNA, 434 bp, Homo sapiens
ccaggcatggtggcaggcgcctataatcccagctactcagaaggctgaggcaggagaattgcttgaacccgggaggcggaagttgcagtgagccgagatggcaccagtctgggcaacagagcaagactccatctcaaaaaaaaaaaaattgcactcaaatggatgtggggtcaaaggagcgtcttattctttagggaggtcaagagcaaagtgataagggggtatcactcttcctcatactcaatcctctgtggctcctttgacacttacactacccgccccccgccccatgctttttcactcccttgacacaagtctaaagcagaaacatctaatgagaaaaactaattggtttttttagagatcgattcttgagactttgaccaggttggagagcagtaactattcacgggcacaatcagcatgcactgcag

SEQ ID NO: 177776 - DNA, 165 bp, Homo sapiens
tcagataaaaattgagggagtttatcaccactagacttattctataggaaattctaaaagagcacctacaagtaagtgaaaagctgataaactccctcaatttttatctgaaaaagtcttaatttctgtttgtggaggtagcactctgtttgtggaggtagcact

SEQ ID NO: 177777 - DNA, 733 bp, Homo sapiens
aaaaagctgggattacaggcgcatgccaccacacccagctaatttttgtgtttttagtagagatatggtgaaaccccgtctctaccaaaaatacaaaaattagctgggcgtggtggcaggcacctatagtcccagtgactcgggaggctgaggcaggagaatcgcttgaacccaggaggcagaggttgcagtgagctgagatcatgctattgcactccagcctgggcgacagagtgagactctgtctcaaaaacaaaacaaaacaaaacaaaaaaaaactctggggagtatattctttcagtatacatttatgcatttaaaaaaagaaaaaagcttaatacttcagaaatggtaaatcatttgacaaatgagaaaaccaaattctgggggcatcactgattatagagcctagaccttctggattcaagtctaggttgtactacatattagctgtttgaccttgggcaagttacttaaattttttgtgctatggttgcctcacctgtagagaggacgtaataatacacctaatttaggattgttatgaatttatatatatgtgtagaatttagaacagtttctggcatagactaagtcctattaagaggtgctgttgtaaggatttaactactgttgttactgtcattgccactaatcatcaattatcaatcagttgcctgttataaactatttagagacagaagtgattagaaaccaaactcactccaaaaat

SEQ ID NO: 177778 - DNA, 608 bp, Homo sapiens
cgagtagattaaatgcaaagcaaccagcctcaacaagcaccacacaacatgtggattatgtgaatgaaacacttgtcttctgtactgacacactctacccactagcaatgactgtataatttctaaaaaagaaaaaacgtcccacccaacaaacatgcatcactaaaaagaactgcaagtccttttaaggtagacagtaaggctttcggaagtggcgggtgagggtgttcttaggaagatttttttcttctacttttctgttgtctgcattttcttattcaccacttagggcacaggcaacttgacactagtttctgtaaccaacctggtccagcaggatttctcacacaccctgcacaaaaggctaaccccttacaaaatacttatttcagatttacgtcaaggttcaatgaattgcagccaggaaactgagctccaaacctaatataaaagtctcctctgctaatcactaaaccgatggttagccagaaggtggggaaattaaaactttatactgtttcatttcctctcatgcaaatgtaaaaagagaaacactatcttagagaaatttatttttcttcattaatttatatggaaaatctatgact

SEQ ID NO: 177779 - DNA, 253 bp, Homo sapiens
atattgaattaatagatgtgtatgatatgaggtggggagttcagattgatttttatccttttggatatcagttattttagcaacatttgtggaaaagatcttcccccatgagattgctttggcacttttcttgaaaatcaagtgacatataggtgtgaattcatttctgggctttctttttctgtcccattgatttccttgtctgtccttagccagtctcaccttgttttgattactgtagctttgtagtaag

SEQ ID NO: 177780 - DNA, 469 bp, Homo sapiens
tgtaaaggttaggttaacgtcattagagcccataattaatttaacttctaaacgattcaaaccttccaactttagttagtcaatctctgtttctataagtcactcgtcaagatgccatctgtggggtgctatagtgtcagatcttcttgtgggtaattgtaaacatccatcctttctgagggttgcccacagcatcaacttttccaaagtacgtaaatctgtttaagttctataaacacaaatgaaggtcaaggctgaaattaataggccccacactgtgactatttattgtttaacaaatgtttggttggtgaatgcctttagtggagccttgtctaacctaaattgggggagagcctgagatgggctggagctgggcatgtgtgtttgacccatttccacacacacagaaagattggtgtggcagagtgttaaaaagcttaaaggctgggctctgttctgttgggta

SEQ ID NO: 177781 - DNA, 564 bp, Homo sapiens
tttgatctatcttcaagttcacttattctttcttctgccgctgcaaatctagtgttaattctctctagtgaatttttcagttcagttattgcactctagaattcccatttagttcttttcttacaatttctttctcttcattgatattctttatttgatgcaacattgtcatcttacctcatgttccttctttaatttggtttcctttaattctgtgaacatgcttattatggatatttgaagtttttcctgataaagccaacatcttgtcattctcacaggcagcttctgttgcttgcttttttctattacagttcctgtcttattctttgcattcctcttttttgttgttgttgttgttgctggaaactggacatttcagacaacatattgtatccttgctaggtactaatcttacttcctcctgttattgttattggcttacctgtctgattgctagctggattattttaatgaagtctgtttatccccaacagagttaaactcctgatgttatcagctcctcagggagacacatacttgagtatctccaaggtcactctg

SEQ ID NO: 177782 - DNA, 436 bp, Homo sapiens
catttcttcttttcatgggctgatgttttcctaatatgtgtaaaatatgaattgcaagaaaaatgaaattaaaaaccacaatatataatttccatttcaaaaattattggattcagtagatgtaacatttatctgtcaaattgctaccaaagtttctaaatgcttgctctcaccctctctccttactcctcatggactaggtgagtgccagtttgccatctaggaactagactttgactagcactgcctggagtgttactgcttgattctttttaaaatgatagactagtgattagccattcagttgaacttctctgctgttttccatggatttttgtagggacaccttcaatgtgaagcccattttagtccttaatggggagggatgtttgggattgttttgagggcagatgtagcagcggtgatgagagttgag

SEQ ID NO: 177783 - DNA, 583 bp, Homo sapiens
aagacaagtgacaccaacactgagatgaatcagatagtggaactgtctgacagactttaaaacagccattataaaaatgtttcagaaagcaattacaaattctcttgaaacaaatgaaggaatagaaaaatctcagtgaggaaatagaaattgtgaaagaagaaccaagtggaaattatagaattaaaaaatataacaatagaaatttaaaaaaaatcactggattctactcaatagtagaatggatatgacagaggatagaatcagtgaaattgaggaaagaacaatataaatcccccagtctgaataacagagagaaaatagactgaaaagctctaccttgaatgataactttgatcacaaactagtagtattaaccacgtggaagaggagttgctaaatcaacttaagagaacaaatagttttaggtgagtgacaaataattggaaaattaaaaagttaaatgatgtcatgtataataacatcaacatacagagaaataaatctaataaaatgtaattaaaaactataaaattattgtgaagaggcattaaaagaatccaaaatatatattcatggaata

SEQ ID NO: 177784 - DNA, 329 bp, Homo sapiens
cttggcctcccaaaatgctgggattacaggcgtaagccaccatgcccggccagccacaagtctcttgacgtaaaccaccacatcaagaagagggcacacatctatttgaggcaatggacaggaaagatcagttttgtggcccccaagatcctgccagaagtgtcatcccatggtgctgtgtctcaaatctgagtaggtggggccgagtgacaggggacagccagaggtgagtttcttgatgtactcaccctttaccctggaaggaagccttgggaagacattggcagtggaggaaggggggtcaaggaggtagggaggtgatcattttt

SEQ ID NO: 177785 - DNA, 518 bp, Homo sapiens
tctctggtccatcaggaactaatggtggaatcttcccatcaaagtcaatcgcaggcaaactaaaggtgaaataaaggtctcagcaaaaaggaaatttttcctcccaagatgatcttaggaggccttgtctttcattctttagtgtttctgccagaaaatcaattgttaaattattcattgagtcagatcaggtcattttgaaagtaatcttcagagtgagtgaatctttatcaaagttgacactattcctgatatctgaacagattagttttataatttaatacttaatctgtccacaaaacacaatgagaaaaaaatgctgcagtaacctgggtattgaaggactcgccttcttgattgtttttattctctttttaccttatcaggtgaataaaacttgaaagtaataaaaagagactcataaaacaatgctcattttgatttacacttctaaccccttaattatcagcagcttaactgtctctcctgatttccatctgacttcaggctgagcgaca

SEQ ID NO: 177786 - DNA, 317 bp, Homo sapiens
aagcactagttctctctaccgcctatgacagaagaatcttgactgtacttgtcagttggagtcatctattccttgtatttatctttaataatcactgaaggagttcatttaattcaggagcttacaaggataacaaaagaattggatgacaatgactagcatgaaaccaagagactgacctgcacacaaaatgctagtcaacataaactgtgaatattgattacaaactacaaatatcagtagcgttaactccggactctcctattcaaggagctgatgatacccacagccttgcataactgaaggaaatggctttg

SEQ ID NO: 177787 - DNA, 601 bp, Homo sapiens
ataatagcttcacaaatagagatttttcatctggataagaggaggagagttccagaaagaaaatcctctgggaaaaaaacagattgaatagaatagcaattgtaaattaaaccatttgaaattgatgttttgttgattaaaaaaaaaattgcttgctgagcacagtggctcatacctattatcatttggaacatgctaattgcttttggccaagttatttttttgcagtgagaatcaaatgacaatgtgtatgaattttattttattttattttatttttgagacagagtctcaccctatcactcaggctggagtgctgaggcgtgatctcagctcactgcaacctctgcctcctgggttcaagtaattcttgtgcctcagcctcccaagtagctgggattacaggcaccagccaccacacctggctaatttttatacttttggtagggatgggatttcaccatgttggccaggctggtctcaaactcctggcctcaagtgacccacctacctcggcctcccaaagtgcagggattacaggtgtgagctaccacaccgggccgaaagtatttttataaagccaggtgtggtggttcacacc

SEQ ID NO: 177788 - DNA, 405 bp, Homo sapiens
aagcagaggtgacaccaaacttcattccagaggctaagcctgacccaaatccagttcagccaaagctaggaaaccagtctccctggtaagcctctgaatgtgatgttagtattaaaaggctgctgcgtggtattatactagcagccactgtgtcttagctgttgagaaggacctcctgtgtggtggaaaccggggttttttatttccaaaattccacatgaagcccttcctctactgggggttctgaagaccaactgctcctcagtagtcaggactgtgacaggaaggattttactcaccactgacgcagcctcaagttgtctcaaagtgaggcggtgtccccttagatctgtgttgaggaaaatgaggttctcctcctcactgcgggcccggcgctggcggccg

SEQ ID NO: 177789 - DNA, 737 bp, Homo sapiens
gcttcagcatggaatggaggccttattgccttgcggatggctcttttctctttgttctggaatgagcatgactatcgacttggacactatggtgcagaggaccatcagacaccgagggatggagagacatcccacagggcccagattcagcagcagcagagctacgtagaggatttgaggcatcaaatcctagcagaagagattcgagctgcgaaggaactggaatttgaccaagcttggattagccagcagattaaagaaaaccagcagtgtctgctcagagaagagacctggctggccagcttgcaacagcagcagcaagaagaccaggtagcagagaaagaacttgaggcatctgtggcacttgatgcttggcttcagacagatcctgagattcagccatccccatttgtccaaagtcagaaaagggtggtgcacctgcagctcctgcggagacacactcttcgggcagcagagcggaatgtccggcggaaaaaggtctcattccagctagagagaatcatcaaaaagcagaggctgctggaggcccagaagagactggagaagctcacgacattgtgctggctccaggatgacagcacccaggagcccccataccaggtcctcagccctgatgccacagtcccacggcctccatgtagaagcaaattgacgagttgcagttctttgagcccccaaagatcatctgcagcagagcacatgccccagctacacag

SEQ ID NO: 177790 - DNA, 757 bp, Homo sapiens
ctgctggtcgtggctcgttggagtggctggatttggatggagatctcgctgcctcccggctgggtctctcccctttgctttggaaggaaaggagagcgcttgaagagcaatgtgacgaggaccatcagacaccgagggatggagagacatcccacagggcccagattcagcagcagcagagctacgtagaggatttgaggcatcaaatcctagcagaagagattcgagctgcgaaggaactggaatttgaccaagcttggattagccagcagattaaagaaaaccagcagtgtctgctcagagaagagacctggctggccagcttgcaacagcagcagcaagaagaccaggtagcagagaaagaacttgaggcatctgtggcacttgatgcttggcttcagacagatcctgagattcagccatccccatttgtccaaagtcagaaaagggtggtgcacctgcagctcctgcggagacacactcttcgggcagcagagcggaatgtccggcggaaaaaggtctcattccagctagagagaatcatcaaaaagcagaggctgctggaggcccagaagagactggagaagctcacgacattgtgctggctccaggatgacagcacccaggagcccccataccaggtcctcagccctgatgccacagtcccacggcctccatgtagaagcaaattgacgagttgcagttctttgagcccccaaagatcatctgcagcagagcacatgccccagctacacag

SEQ ID NO: 177791 - DNA, 154 bp, Homo sapiens
tgctataaaagagaaaacagctcgatgttctctggccatgactgaagaacttctccaagacctggctcagtataaaacacacaaggataagaatgtaatgatgtgtgctagaactttgattcagctcttccgaacactgaatcctcagatgctg

SEQ ID NO: 177792 - DNA, 393 bp, Homo sapiens
ttaaaactgactaatgtccagcattagctgaaacagctaatttcaaaaatccaatataaacaaagccaaaagaaacactctactttttcatttcagatatgaacattttaaactaccagaaaaaattagggaattagaagtcgtcaattaaaggtacattatttctcaagtgggagttttaatttacagaaaatattatctcacccttagagtatattagcttactgtgggccattagctccagcagaacatcttcttttgaagatagagcactaagtgcactgctcaggtaaaatttacattttaaagaccttgttgactttgggcagataaatacctttgttttgaaacaattaattaaaatcactaaattgcgtgtgtgtgtatacatta

SEQ ID NO: 177793 - DNA, 439 bp, Homo sapiens
ctccagatgcaggtgtgggacacagctggccaggagcgcttccgcaccatcacccaaagctactaccgcagtgcccacgcagccatcatcgcctatgacctcacccggcggtccacgttcgagtccatccctcactggattcatgagatagagaaatatggagctgcaaatgtggtcattatgctgattggaaataaatgtgacctctgggaaaagcggcacgtcctgttcgaggatgcctgcacactggctgagaagtacggcctcctggccgttttggagacatctgccaaggagtcaaagaacatagaagaagtcttcgtgctcatggccaaggagctgatcgcgcgcaacagcctgcacctatatggggagagtgccctgaacggcctccccctggactccagccccgttcttatggcccagggtccaagtgaaa

SEQ ID NO: 177794 - DNA, 661 bp, Homo sapiens
acattacggctagtacgaggcctcgttggaatcggccgaggcaggtcaggggggtaattctgactcaatggacctaacaggattctcactgaaggcaggccaggaggatggtggaggatggtggaggatgaggaacaggatcagatatcaagggtgagcatgtggcagatggaggattttgctaaactgcactcatagggcttttgctagaatcagacaatgcagagaggaacgcagaagccccaaagctagggcttctttgagaagagagctcagaagaaccggagtggagtttggtcaaggagagaatctttgtcatggacgggggaagaacagcctgcagggaagctggagtggtccgtggtggcctgcgtggactgggggcctgggaaaccatgggaaggatgttgcgctctctcccatgggccgtgggaagccacggataagacacgtgaaggtgggggcagtgggaacatatgggggatggcttcaggaagtatttcaggctagaatcgccaagatttgatgacaaactggatgagagtagcaagctgcgttatcaccatggggatactaattttgtggaactagagaatctgccgtattattttctgattgtgcttgctttccactttgctgctccaggccccccactagtctg

SEQ ID NO: 177795 - DNA, 633 bp, Homo sapiens
atggctccaatgaagcactctgggaatgtttgcagcacttttcttactcctctgttgcctgtcctcatgtctctctcccctaccttgtcatgacgtcttcgagatgggagctgtgggttatttcatcttcatgtctcagccctcagaatgggttctgacacttcgaaggtcattaataaatgtttgttctaaaaatgaatgagtggcttctgtttagagtaacatggcacactgggtacccagaatatgttcccattgaaaacagcaaaaaatgtgggataaaatatattgtcagttttgttggataaaatatattgtcggtttttaaaaaagcattaacaaaagagtaagaaatcctctggctaaaatttagatgaagtcatgaacgcagaggaataactgtggtactgagactggtttttgctaaggaggtattagccaacctatgtagcgtgcttcaatttttatcattttttgaggcacggaatacagtagtcaatacctggggtcaagccaaggtggggttccagtaagaggccttcaccccatagcactgggactcctcagaataatagcaaattagaagggacttgcccacccacagagatacacaaaggactgccaggaaagtgc

SEQ ID NO: 177796 - DNA, 485 bp, Homo sapiens
atgtatatcagattttaaacttcttaagaacatagtgctaaaataaaatcaaagtacttattttttcccctcaatagtagttggagaattgtaggtataagattggggtctcacctacctcagtggaggcaagtcattagttacaaaaaagctacaagccaaagttagccttggggctgcctgtcccaccaactaccaaaaaagactttggggagatgttcaaagaaggaaagaggagaatccagcctggaaccaaaaggcattgaaacacattttcttgtacttttcaagtctgtgcatatagattctgttactgatttaggatcttaaacagtttgtttattttttaaatgcctttcagctcacctttaataacatgtttctttgacttggctgaactgtgcctcagaagaattacaagcgggaataaggctgggataaggctgggtaaaaggttcagtgaactaatccacacctggtccatg

SEQ ID NO: 177797 - DNA, 307 bp, Homo sapiens
gttttttttactcccaatccactgaggaccaatactagatagcatctaagagccattccacctttaacatcacatggacctaagttgaaatagtggtcaccttgtaattgcctggtgggttcttcctgcctgtcgcatggacaaaatcggttcactgtgactgtggtattgctgtaaagagtttaatcaggccgggcatggtagctcacacctgtaatcccaacacttttggaggccgaggcgagtggatcacctgaggtcaggagtttgagaccagcctggccaacaggatgaaatcctgtctgta

SEQ ID NO: 177798 - DNA, 177 bp, Homo sapiens
cagaaaagacacataccccttctactcagagcacattgccagaactagccacttgaccctaccttctagaaggggaactgggaaatgtggaagagctcatgcaaatgcggtgaagaataattatttccaggcggtcgtggtggctcacgcctgtaatcccagcactttagggggcca

SEQ ID NO: 177799 - DNA, 573 bp, Homo sapiens
gtcttagtatattacctaggctgctctcaaattcctgggctcaagcaatcttcccacctcggcttctgaaagtgttgggattacaggtgtgagccactgagctgggccctccaaattcttttttcttttttttgagacagagtcttgctctgtcacccaggctgaagtgcagtggtttgatctcggctcactgcaacctctgcctcccaggttcaagcgattctcctgcctcagcttcctgagtagctaggattataggcacctaccattacgcccggctaatttttgtagttttagtagagatagggcttcaccatgttgaccaggctggtctagaacccctgacctcaggtgatccgaccgtcttggcctcccaaaatgttgggattataggcgtgagccaccgtaccctgctgggccctccaaattcttaaaggaatgtacctgtccagcggactctctccacagggtggttttctaacccaggggtcagcaaatttttgtgtctgaaataacattagatttatagaagagttgtaaagatacaatgagttcccatgtgcccttcacaca

SEQ ID NO: 177800 - DNA, 256 bp, Homo sapiens
cttgtttttactacacacaaatgaagaaattatttgggttttagaaacatttctagtgaaaaagtgccattttgctttatgcaaatgtatcaaagaaaaaaaaggggaaggcatcagatagacaaataatgtagtaagactacaacctcaaaatttggatgtatcccagcaagtaacaatctgacaatactctatcctgattaaaatcacaccccccaagatgtaatagtggtgtagacatttcaagaatagtata

SEQ ID NO: 177801 - DNA, 474 bp, Homo sapiens
gccaactgcaattacttagtgtaagtagagtcgttaaacaccatcaattaatgcagctgtttcaagataatcagcagtcattagagcaagatgcacaagagaaaaaaaatcatatgctgctaacttagcaatgctagaaattatgtgaaccgaggatgagacaggcttgcttagatcttcctgcctgctgacgttagccacctcccaaaatatactttctttctcaaagaagacagtgatttttcactttgaagacagagccaaaaaaaatcaaccatccatgccatgaccttcgaccataaatgcccaagctttgatttttcaggtctgtgtttccattagggactgcaacggagacagacacactggcgacaaaagaggttccagtctgggaaatcaagagatgatcatgaccagagaagtcagagcacctggggagccatttgtaaaacagagaaagggttttcccccttt

SEQ ID NO: 177802 - DNA, 292 bp, Homo sapiens
ttgaattcggattattgcaggcaggatgggagtgaaatggtacattcctttcatgccagttgtggagaggatctccgtgcaggccgttgatagaataatatcctgtgcttccttggtgtctctctctgaggaaataagggcttaatatgtcctattcaattaatcctcaccgcatccttaaaggtgactggaaggcagatagtattaactccattttacttaaaaagcagcggaaacatggtgatttggaactccctgggagccctcgaacttttctctaaactccaccggt

SEQ ID NO: 177803 - DNA, 438 bp, Homo sapiens
  misc_feature (177)..(177): n is a, c, g, or t
  misc_feature (269)..(269): n is a, c, g, or t
ttctgccagatgaaccttcttgctgtgattcataaacatggctgtacctctaaatagactgggacttccttttgctctatccccatttcctaaagaagaaacctgatccttggaaatgttcagtggctgccccaagatgtcggcacaacctcttgtgctcttgcctcctgccacaanaacatatgtcccagaaaagggccactccatcagcctaggtccagaaatgagaggacacatggactgaacttgaagatggcccacagcagacntgcagtcaactctcagcctttatgtaatgcgggaaagaaggaaatgtgaatattatagactactaaaattctaaagttgtaacagggcaaaatgatcgatacaattagcagtggctatcagtctagcatattgtcatgctatatgcatgctataaaactattgaacaaa

SEQ ID NO: 177804 - DNA, 815 bp, Homo sapiens
atttcttgcaggaagctggagctgccacttatgctgggaactgctcaaagagaaagcctcagcctttggctgccaggcctagggccccaggtcacagaatgtgactcgctgctggagatcctaaagcagagcccagttcaaaccagaacgcgccctcctcccacatatccagccagaccaactgcaaggaaaagaaatagtcccagaggggcagggacacatggaacgaagagggtgaggcatctcctgacctcccccgatatgtacggaacttcagccagcacctccttgtctctaccggaaggaagttgcactttgggagaacacctccggccccagccctgtggaacccctctcacttttaccctagcaccgaggccctctcattggttcccattttaagggaagccatttcctgaccactcatccattacttgtgtgtagtgtggtgtttttttatctattgtgttccaagaaatcttggcacagcccccgtgcccccagcttagggtctgcatcctgaaattctcacctgaggaacaaagggctgtggagaagttgtcgtttatggcaagcctcactggaaacttctagacttggggtcttgaaaccctttcttgttccttggtgtctgtggagacaaagagttgccttctagaaccccagcagtggcatccacagccagcctggtcttgagccactgcttaaagttactagatgggggcggggagggagggagacgcgcagagacatgggaggaaacattgtggaaatggtgccaaggccccgccatagccagtcagtacttgttatcc

SEQ ID NO: 177805 - DNA, 297 bp, Homo sapiens
cggcacgaggttttttttttaagtgataaattttcaattttattttaaaatataccagatgtgagattttattggagccataaatatgtcaagagcaatgttggtgtgtgatgggcgatgccccctccttggggcctctctccctgtttagaaattccatcagattcttaataagaggctccagttcgactgcagcaaaatagtctctatattaaagcaattgaatttccatttgccagacatcttgtgctttaagcttccaggttccaggggtgtggggttgctaagccgattcta

SEQ ID NO: 177806 - DNA, 192 bp, Homo sapiens
cgccgtgcgatgcctggctaagaatctccttggagctgagaaccgagagctgaagctggtggctcccaccctgcgttctgaactcacggtggctgctgcagtcctggtgctgttggtgattgtgatcatctcacttattgtcctggttgtcatttggaaacagaaatccgaggtatgaattctctggtgtaa

SEQ ID NO: 177807 - DNA, 299 bp, Homo sapiens
gaaaatttcaggggctgtcgccctgggcctctgggattctcatcacacagtaagtctagttgactgaagcatgaggaagaaagatattgccaaatgtgtctcaatcactgatgtaatttgcagttcacatcttttcagtgaaataacatagagtatatgtggctagctgaaacttattttaagtcacaactggaaaagtaaatgaaagagaagagagaacctcataaattaattgagtggcactttagaagcaggtgcaaccaggctcttgaaagcatacatctcaaccctggaagtct

SEQ ID NO: 177808 - DNA, 329 bp, Homo sapiens
tgatcttggccaaaaggccaagaagcgataggtaacataaaaatacagatagtttgcccagtatcatgaagggaataggagcagacttagctcttggagaaatagaatctttccttatttactgttgcagtaatgagttatttgaatttttatttatttattttagagacagggtctcactctgtcacccaggctggaatgcagtggtagcaatcttcctgcctcagcctcctgagtagctgggactacaggggcatgtcaccatgcccagctaattcttaaagttttttttgtagagatggggtttcactatgttggccaggctggag

SEQ ID NO: 177809 - DNA, 794 bp, Homo sapiens
gaatttcatataaatatattatgtagtcttttcatttttggcttctttaccatagcatgtttttgatattcatatctgagctgtagttcctacaacttctgttgtggttcagtagttccttcccttttgttgctaaataatatttcattgtatatagagaacacaatttgtttatccatttgcaagttaatgaacatttgagatgttttgagtttttggtgaccatgaacaatgccactataaacattcacggacaaggctttttgtggacatatgttatcatttctcttagggaaacacctaggagtggaattgctgggttgcatggttatgtatgattaagtgtggatttatctttataagcaagttcaaaactgttttccagagtagatgcaccattttccatttccaccaacaatgcatgagagtttaagttgtatcagtttttgtaattttaatcgttatagtatggttatggatgattcaaaatatcttctttggtgaaatttctattcaaatattttgccaaattttgtgttggttcttattgaggtgtgagagttctttgtatattctgggtaaaagtctgccagatttttttagcagatgtattaaggcataattgctcaataattactcaataagctgcacatatttagtatccacttggatacatattaacataggtatacacttgtaaaacagcagccacaataaaaatcatgaacatatccatctctcccaaaagtttacttctgcccttttgtaatcctaattattgcatgctttctttt

SEQ ID NO: 177810 - DNA, 283 bp, Homo sapiens
ccgagtttagttgagggcctaagttttcccagcagggcaaggttgagggtgaggatgctgcaggccagttttctatggcctcagaatgaggacaagaagggggagatgggccacagggatgagggtgcctgctccctgcagcagtgtgcacaccacggctgtgcagaggcagcaggtggcaggtattgggaagaagctcttcccttgtgtgtcctaggggctgggcacagcctgatgggccccctttgctcacagttgcagaagcccatccatgtagggtcct

SEQ ID NO: 177811 - DNA, 208 bp, Homo sapiens
agtctaaacctaaccaaatcttctatctctctcaacaaactgtcttaagtccaaacattctggaacagcagtagtgaaccgtttactcttcagaggcaataacaactcacaattttctcaggacactagattagctgagtaactaaatcatcattcagtccctcattcaacaaaacaaacgctcattgctccaaagaggccagccaga

SEQ ID NO: 177812 - DNA, 342 bp, Homo sapiens
aatacagataactcaattaaaaaatgggtaaagaatttgaaaagacagcagctgggtgtggtggctcacacccgtaatcctagcactttgggaggccaaggcaggaggatcgcttgatgctaggagttggtgaccagcctgggcaacatggtgaaaccctgtctctataaaaaaaaaaaaaaaaaaaaaaaaaaacttgccaggcgtggtggtggcacatgcctgtagtctcagctattcaggaggctgaggtgggaggattgcttgagcctggggaggtggagactgcagtgagccatgatcatgccactgcactcccagtgagaccctgtctcacaaaaa

SEQ ID NO: 177813 - DNA, 107 bp, Homo sapiens
tcattgcttgctctgtactgacgaccagtgctcgggacgtccttcccatccgagacttcaagatagaaaaacatccctatttcaatccctttgtgttttgttttttg

SEQ ID NO: 177814 - DNA, 549 bp, Homo sapiens
ttttttgtagagatggggtttcgccttgttgcccaggctggtctcaaactcctgagctcaagtgatccgccctgcctctgcctcccacagtgctgggattacaggcgtgacacgtaagaaagtttctttgtgcccctttgcattcagtactatcccctcccctccagacaacaagtgatttgatttctaccactaaagaatagttttgtctattccagaacttcaaataaatggagtcaaatgagtcggattcttttctgtctcactttcctcccgccgagtgtatttttgagatttatctatgttgttggggatgagtagtttttcctttttattcctttttccttttattgctgtgatactccactttatgaatatgccacaacttgtttatccatttgctttttgatagacattgggttgttttttgttttgtactattttgaataaagctgcggtggacattcaactacagttgtttgtgtagatgtgtatgtgtgttttttttttttctcttggataatacctaggagtggaattgctgggtct

SEQ ID NO: 177815 - DNA, 296 bp, Homo sapiens
ttagttctgccctcagaagtataccttctctccctccctccttctcccccttattctcatcctccagtgatactacatggctgggggtcccctgctgctccatgcccctagccctttagccatgctctctcttctgcctgggaagccctccccacctttctctatcttgccatttcttgttcatcttgcaccattcaactcaggccccctctcccaggaaggcttcttggaaccctgggactgggcaaagaacccgcatcagcctgcctcatcattaaccctcaactgagcttgac

SEQ ID NO: 177816 - DNA, 171 bp, Homo sapiens
ggaaagaatattcatttgagtgtttcaggaagtttggattttttttttaccaacatattatttgtaaaaggagggaaatcagctgcctcaggaggttcttaacatataggaatgtaattatcagattcaaagctgaacagtagtgcgttgccctgtaacctaagtcttggc

SEQ ID NO: 177817 - DNA, 621 bp, Homo sapiens
aaagcaattctcctgcctcagcctcctgagtagcggggataacagggtgtgtcaccacacccagctaatttttgtggaaggtatgatgaaggacgcgtccttcatcatacctaattcagatttaactcttcactgctagacccagttgtgttcaactttttacatattattgccaacacactttatctctctgtgtacagtgttaatctgattttataaatctatatttttttctttaagcaaatttttgttttaaaatttgaagccaatcataaagataatatagcataagacattttcttttctaaaaacaatcagcatcattttaaaaggatgaactaatacaggtgtatgtaatagcagtgtttccaaactggcaatttatgctttaaatttaaaaataaggtcatttttctccatcaggggcaaatgtttacttgtaattttcttcctacagttcgtgttaaattactttttactattattatattgtaaactccttgggatttggcaccatttaaaaattcatctttgtattcccttaatatttggaacagtattgtacatatggtaggtacttaataaaggtttgaatgagtgtgtagatgaatatggttttta

SEQ ID NO: 177818 - DNA, 995 bp, Homo sapiens
gagacagagtctcgctctgtcacctaggctggatcccgagttcaagcgattctcctgcctcagctacttgggaggcagaggcaggagaatggcatgaacccaggaggcagagcttgcagtgagccgagatcgcgccactgcactccagcttgggcaacagagcgagactccgtctccaaaaaaaaaaaaaaagtatagaaaaaaatggatacttgcaaatttacatttatttttgcactgagagtttactgttaaattgtctacaccatcatccctttttctttttatccttagttctagtccaaattatttttgatttgtaaattattaggaaagtttttatactagtttttttaaccctatgtattattacagatggaagtaattatggcatgtgtgagttataatctaaattaggggcaagtatccctttttttatatgatgaaattgtgcataataacttggctagggcaagtctccaaagtaattcagatttaactcttcactgctagacccagttgtgttcaactttttacatattattgccaacacactttatctctctgtgtacagtgttaatctgattttataaatctatatttttttctttaagcaaatttttgttttaaaatttgaagccaatcataaagataatatagcataagacattttcttttctaaaaacaatcagcatcattttaaaaggatgaactaatacaggtgtatgtaatagcagtgtttccaaactggcaatttatgctttaaatttaaaaataaggtcatttttctccatcaggggcaaatgtttacttgtaattttcttcctacagttcgtgttaaattactttttactattattatattgtaaactccttgggatttggcaccatttaaaaattcatctttgtattcccttaatatttggaacagtattgtacatatggtaggtacttaataaaggtttgaatgagtgtgtagatgaatatggttttta

SEQ ID NO: 177819 - DNA, 555 bp, Homo sapiens
ctagatctccaccatttgctacaacccaccttcacagacttaccttccaatcactttcaatgttccttcaatgccaggaaaaatattgctcaactataggaattgtgactttccctcttctgtagcttcacttaccctggtctccactcctagaacacccatctttcccatccccactgttggaggttcacatttaatttcttctgcaatgcttttgtgattccctagtaagaacaatatgttcctacactaaactcctagagcactttctctatttccctatttaaagccttcccattttcttcttttaaatacatcatgtgcacattttacctcctcattaaaacagtaaacttcctggaatcagagactgtctctctttcataatactgttcaccatcatcagtgtcttctattttatattggtgggttactgacccccgcaataactggtaattttcttgtcctaatcctgtttgtacaaagccaaatatgcactggtacaattgtgtggtgagcactatgtggtcatgaatggaagcgcaccactgtctt

SEQ ID NO: 177820 - DNA, 404 bp, Homo sapiens
ccccctcagtggatctgctgtcacaaggagtatagccgtaaaattttagcctgtgaaaatatgtaggaaaatgtaaaaaaaaaaaaaaaaaaagacactgaggatgcaaattacctgtatacttggaagtgatttgcaaaagcgttttgctaaacaggcaacattcaagggcctgtaagaaaccagattgattgttttgcttagcactgctgctgctggagctgctggtggttctgtggccagcagtgaacctgatatgctctgcagtgtataatagccatactgtctgaaacagtcttttgggtttacccagggtaacacccctttggagtgtcccccagaaagaacctacctgctctgagtctccagctatgcacttcacccacctagtcgtctctcccctc

SEQ ID NO: 177821 - DNA, 351 bp, Homo sapiens
tgctgttccttctatcctgtgcttctcctcctgtgtccacttggtggaactttccccatggtttgcttcttccagtaatctctgtctggaccccccatcttctagagagtttattgctccttcctgatccttgtaacatttttattattgtgctcatcatactgtaatatctgtttacatacatacgaccctttactaaagtggtaggaaccacatattatttattgctaaagctcaataacttagtacatgtaatattttaggggctcagaaatgtgaaattatctccctttattgagtttttatgtgccaggcacatattataaatatatgtcaagaaaaagataacct

SEQ ID NO: 177822 - DNA, 110 bp, Homo sapiens
ggtaattttcctaaatatagtaactgcccattatagttgaatagaatctgctttattttctaagtttaagttaaagtattacctttttttgtcgttagcaaattttctgg

SEQ ID NO: 177823 - DNA, 662 bp, Homo sapiens
ctccaaacaggggttcactcagtggaccagggaagaagcatattccaggcagaggcaaagacagggtggggagaggagcgcacacgcagggaagagagtgagaggcagggcggggagggagagcagggggcaggggagctagggacagggcagtgctgaaggatcctgacatgaccctatttgtgtttcagaaaaatcttcctagagactctgtggaggacagataagagggcaaacaggaggcaggacagtcaactaacaggctgctgccatattctgggaaagaaatgattaaaatatacattagaaaaccaattcagacaaaagctttgggtgtagatgtcagggatatccataaagtagaatcacaggacttgacgatgaattagacttggggagggaaggagaaaaaaatctcaagtgacccctggacttctagattactatgcaccatactagtctacttgcccaaataggtttttaaagggagagtccattcttttaataaaggataaatcctccttctaaagcaccataatttctgtcaaacatggtgtccctggccacctcttcctaggcttagtgtcctgggctgtaatgccaccatggctgagcctaagtaaccactttcttcattctctgccaattacttctctgtgtga

SEQ ID NO: 177824 - DNA, 262 bp, Homo sapiens
tgatgtttgttctccctcaaatgccctgcccttattctctgccttactcctacatatactctaggtctcagctcatgtgtaacttctaaggaactgttccgactcacaaggaagtcttaggtcctttcctgttaatcttgtgtattccctaattaagtcacttataacattgtactatataacaattttttattttttatctgccttcttcttttttatttatttatttatttttgagatggagtttcactcttgttgccct

SEQ ID NO: 177825 - DNA, 87 bp, Homo sapiens
aaggcctgatgttaaacattcacacatatatatttaattggaattttaaaagagaaaataaaaatcatagaagtaattttaaagata

SEQ ID NO: 177826 - DNA, 166 bp, Homo sapiens
attagcatgccagcaaaaactccatcttaacagaaatgaaagattcagagcaactaaatccatccctaggtgccagagctgactgtatattatggaaggaaaatacttttcgcccgtgttttgaaaggtcttctttcaccaactctctaactgaactgagatacat

SEQ ID NO: 177827 - DNA, 710 bp, Homo sapiens
tttcattttgttgatattgtctattgaagaacaaaagttttaaatttggacatagttcaatttctctatttttgttgttgttgtttttgttgcctttactttttttttgtcatattcaataaatcatagccaaatccaatgttgtgaagttttctccctggattttcttgtaacatttttatacttttaggtcttatgtttagatcttggatagttttagttaatttttgtatatcgtataaggtaagggttcaacttcattcttttgcacatactcagttttcccatcacttcttgttgaaaagactgtcctttctctattgaatggttttgtcatctttgttgaaattatttgacttacatacaatggctgtatttcttggctcgctgttctgtttcattggactatatacatgtctgtttttatggtagtccatactgttttgattactgtagttttgtagtaagttttgaaatcaggatatgtgagcctctttgttcttttcaagattgttttggcttgaggatcctttgagattcatgtgcattttttaatttttgtaaaaaagaagtcattgggattttgatagggattgcattcaatctatagattgttttgggaagtatggctttttttttttaatgtatacactaagagagagaattcagggtgggctgcttgtaaaggatgaggcagccaatatggccat

SEQ ID NO: 177828 - DNA, 494 bp, Homo sapiens
cctctgtgtgtgtgtctctccttttctctttctgcttgagttgtaacatttctctctggggctgttgcccagattaaagccctggagaaacatgtgactgtgtatagccactgtttagtacctctgaccccgcaaggtggtacaccacatctcttttctggcaaccccccaaaatgagtatttataggatttcagtgtcaagctcttctattaaaacaacgtctctaacatttaaatgctttatttccaggatatccagcatgttctcaaagataaaaaaaaattacataacttatactgttcttttttctgtctaattttaattgcttaagtaaaaacaagaaacaatctaagtcattcaaagctttcagaccagcaggatgtcttggggaaagcctctgaatgaaaaggcccaaatgtccattagtaggggatggattaaatatacttcaggatacctatgtagttatgaaatagagtgaggaagctctcta

SEQ ID NO: 177829 - DNA, 334 bp, Homo sapiens
cctgattctttattatggtcactttcagggaaagaagtccttgaaaatgtatgactttggggtaacttaaacatttgtatcctgggcttattctcactgggttttgcaatccattttcaaatgatcacatccatttttttttctttttttctttttctttctttttttttttttgtttgtttttgttttttgaaatggtcttgcgccatcgcccaggctggagtgcaatggcacgatcttggctcactgcaacctctgcctcccaggttcaagcaattctcctgtttcagcctcccaagtagctgcaatcacaggtgcctgccaccatgcccag

SEQ ID NO: 177830 - DNA, 291 bp, Homo sapiens
atttttaaagaataattggaagcctgacactccttcatacatacaagtaaaacagagattactcttaacatgtcaggaaaaaatttaattggaaaaagcattgatgcagtaatcattaaacaatgataactgggtttgtgggtctcaaaaggaaaactggcagaaatgcaaatagaaatagataaaaatactattgtatttcatatttacagcattccactaccagaatataaggccatattctgagaactgagatttcattgtgctcttacttgtttctccagtcccttg

SEQ ID NO: 177831 - DNA, 396 bp, Homo sapiens
aatggcaatctcattcttcctgtttttaggccaaaagacatatctagaaccagacatagaatcatccttaagtcctttctttcatacttcacatctaattcatcagaaaattatgtctactctatcttcaactacttctcatcatgtccatcactatctccgtggtccaagccccatcatttctcacttggataattccaacagcctcctaacttctctgcttctgcccttgcctctacatagcttattctcaaaaaggtggccaaagtggccttttaaaacattaatcagtgtcacgcatcagctcaaggcctccaatgacttctcatcagagtaaaaaccaaggcctttggaatagccctttaaaatgtggacccatcattaactcattcacct

SEQ ID NO: 177832 - DNA, 853 bp, Homo sapiens
  misc_feature (684)..(684): n is a, c, g, or t
  misc_feature (743)..(743): n is a, c, g, or t
cttgctgtggctttacatctgtactctggaagccaaaatgcaggaaggtatcgagcgggatcggagagcccaggcccctggtaacttggaggaatttgaagtcaatgacctgaactatgaagataaactccaggaagatcgtttcctatacagtaacattgccttcaacctggctgcagatgctgctcagtccaaatgcctggaccaagccctggccctgtggaaggagctgcttacaaaggggcaggccccagctgtacggtgtctccagcagacagcagcctcactgcagatcctagcagccctctaccagctggtggcaaagcccatgcaggctctggaggtcctcctgctgctacggattgtctctgagagactgaaggaccactcgaaggcagctggctcctcctgccacatcacccagctcctcctgaccctcggctgtcccagctatgcccagttacacctggaagaggcagcatcgagcctgaagcatctcgatcagactactgacacatacctgctcctttccctgacctgtgatctgcttcgaagtcaactctactggactcaccagaaggtgaccaagggtgtctctctgctgctgtctgtgcttcgggatcctgccctccagaagtcctccaaggttggtacttgctgcgtgtcaggtcctgcagtggtggnagcttaccttagcctcccgtcaacaactctcacactccctgtgggagcagtctgtgccnaagtggagacactgagatagctctcatagactcccataagctcctccgaagcatcatcctcctgctgatgggcagtgacattctctcaactcaagaaagcagtgtggaga

SEQ ID NO: 177833 - DNA, 795 bp, Homo sapiens
  misc_feature (21)..(21): n is a, c, g, or t
  misc_feature (26)..(26): n is a, c, g, or t
  misc_feature (626)..(626): n is a, c, g, or t
  misc_feature (685)..(685): n is a, c, g, or t
cattcgatgacccccgattantgagnaggctgggcgcccaatcgggcacagggtgactatgaagataaactccaggaagatcgtttcctatacagtaacattgccttcaacctggctgcagatgctgctcagtccaaatgcctggaccaagccctggccctgtggaaggagctgcttacaaaggggcaggccccagctgtacggtgtctccagcagacagcagcctcactgcagatcctagcagccctctaccagctggtggcaaagcccatgcaggctctggaggtcctcctgctgctacggattgtctctgagagactgaaggaccactcgaaggcagctggctcctcctgccacatcacccagctcctcctgaccctcggctgtcccagctatgcccagttacacctggaagaggcagcatcgagcctgaagcatctcgatcagactactgacacatacctgctcctttccctgacctgtgatctgcttcgaagtcaactctactggactcaccagaaggtgaccaagggtgtctctctgctgctgtctgtgcttcgggatcctgccctccagaagtcctccaaggttggtacttgctgcgtgtcaggtcctgcagtggtggnagcttaccttagcctcccgtcaacaactctcacactccctgtgggagcagtctgtgccnaagtggagacactgagatagctctcatagactcccataagctcctccgaagcatcatcctcctgctgatgggcagtgacattctctcaactcaagaaagcagtgtggaga

SEQ ID NO: 177834 - DNA, 295 bp, Homo sapiens
ccttgtgctaagtggagccttccctgcaaggataagactggactgcaattggccaaacagacagtatacacatatatgtactgtgggctcccattatcttatatattccaggtgttcaagatgtgattaacagagtgaggggcggagaagccacataatcagattggtcatgccaagcttgttaactctgatctgtgtaggttcagaaagcttgccaaagcaaaggagacccattctgtccaaacacagaaggagctgtcttgctctcttaagtcctcaagaccttcctatgagc

SEQ ID NO: 177835 - DNA, 365 bp, Homo sapiens
aaatcacccataaaaacaccccattaaagaaagtaagaggttttgagcatggaagaagaaaagattatggaaaaacttggaggtattttcaaatattttaaaaagatgacagctctactctttaacaacaagcgaacttccttgggaggtgaagcacctgtcagggctattgtagatatgactttggcattgggagtggaagttctccatggattctaccttgacatctgctgcaactccagttcagcatgctataggcgaaatttctgtgacgctactgatctcctgccatacctctcacttaagcctcaagggctacaactcttcactaagcccacacaacatagctttctgtaacaatattc

SEQ ID NO: 177836 - DNA, 504 bp, Homo sapiens
gagccggcccccttaggatactcaacagctataaacatgctcaagttcccacctccattaccttcctacccttagctcatgtcttctagctattacctctccttccttattcatccaacctcttttaaagaatagcttacactagtcatctcctttttctcatctgtcattcattcttttatcaactccactctgatttgtctccaacactgtacttacactgttcttgctaagattaccaatgccatcttacttcctaaatcctacagatgcttttcagcatacctctatgcatttaacagtactgatcacctctatccttctaaaactctactacaccagtttctgtgtatttctaccacttccgacttccttcttgggctcattttaagtgctggtactctctagagttcactcctgagcccttttctcttgtcacctctttaggtaatctcaccccctctcattcaaagtatctcctggccaggtatggtggctcagacc

SEQ ID NO: 177837 - DNA, 518 bp, Homo sapiens
tatttttccctcaacagtttgcacctcaacagctataaacatgctcaagttcccacctccattaccttcctacccttagctcatgtcttctagctattacctctccttccttattcatccaacctcttttaaagaatagcttacactagtcatctcctttttctcatctgtcattcattcttttatcaactccactctgatttgtctccaacactgtacttacactgttcttgctaagattaccaatgccatcttacttcctaaatcctacagatgcttttcagcatacctctatgcatttaacagtactgatcacctctatccttctaaaactctactacaccagtttctgtgtatttctaccacttccgacttccttcttgggctcattttaagtgctggtactctctagagttcactcctgagcccttttctcttgtcacctctttaggtaatctcaccccctctcattcaaagtatctcctggccaggtatggtggctcagacctgtaattcca

SEQ ID NO: 177838 - DNA, 315 bp, Homo sapiens
gtgagagcacgagtgtctgagtgtgagcacatgggtgagtgagcatgagtgtccgtgtgtgagcacgtgagagtgagcacgagggtccgtgtgtgagcacatgggcaagaatgagcacgagtgtccgtgtgtgagcacatgggcgagagtgagcatgagtgtccgtgtgtgagcacatgggcgagagtacgtgtgtgagcacatgggtgagagtgagcacgagtgtccgtgtgtgagcacatgggtgagagtgagcatgagtgtccatgtgagtgtgagcacatgggcgagtgagcacgtgagtgtggcacatgg

SEQ ID NO: 177839 - DNA, 124 bp, Homo sapiens
gggggtgggggcagttttgtgtttctaggagtataaggtggacaccagcccttgtagaacctcttgactgacttctctgccaaatgtgggactgagaacatccccgctgcctgcgaatgtcaca

SEQ ID NO: 177840 - DNA, 335 bp, Homo sapiens
gcgccaatccacaagcctaacatgttgtagaggcaaggcaacaaagtactatgcaaaagtctcttaccggccaaagcaaaaacttgggtaccaccaagagacaacccaagaatgcttgcaagtgtttacaaatgagagcttttgttttttcttgaaggttaagggaaccaccatttctgaaatatcagcatatatagtagattttagttatccactgaatgtaaagaaagatgaacttacaaacagtatgacaataacagcctcttctttcttctattcccaaaacctccacagcagagcatcacattaaggaaagcatttgttacctgaattat

SEQ ID NO: 177841 - DNA, 184 bp, Homo sapiens
ccacgtatgatgatttaggtaatcagtgaaaatccatgtcagcagctgccaatttacagatgaattatgtccaatggtttggagatgaatgagttttacagttcatagagcatgacaaaattcatcttagccttccattttatagatgagctaactgatctctgagagaggaacgacctctgaa

SEQ ID NO: 177842 - DNA, 249 bp, Homo sapiens
tcctcactccctacctccttctctaataaccacatggagccacactggtctttctgaccccacaccacactcggcttattccttactctgaggcttagccctcttcattctctgcaggaaaggttcttcccctggctctttgtacatgaggatcattctttcgtcttttctttctttctttttttttttttgagatggagtcttgctctgtcacccaggctggagtgcagtggcacgatctcagctcac

SEQ ID NO: 177843 - DNA, 289 bp, Homo sapiens
aaacgctctcacaaagaaatagaaaaaaatagtcctttacctattaagaaactaaatccaggttaagaaaaaaaaataattatcatacaatttttatagaaaagtccagcaagcaggctgggcatggtggcttatgtctgtaataccagcacttggggaagccaaggtgggaggataatttgaggccaggggttcgagaccagccagagcaacatagcaagacctcatctctaccaataatttaaaaaattagccaggtgtagtggcacatgtctgtgagcagcgttgg

SEQ ID NO: 177844 - DNA, 616 bp, Homo sapiens
gggcacgcgggggctcttctgcgtccccagccctgggccgctgggcctggcctcgccgcggggtggaggaggcccaactacaatgatggagagaaaactgtatagctggaagaagaaaaaccctcctagttgaagaggggggtgaggaaaaaaacctggaccgtggtccacatgcttgactgaatgatgggctcctttcaaccagagtgtgtctcttgcttgttggaccttactgaggccgttggaaagacactcccaacatcctgacatttttctacaaatcccctaatgttccagccatggtgtctcctcccaaaaggagaaaggatggcaccagcagctctggccttctccatcagcttagaaacctgatcccaaagacaatgctttccctcagtcattccagaacagtcctggggctcactggctcaactttggtgctctatgtttaccccacgactgatttgccaggtctatgtcatatccccaagaccatgtggactgagaaagtggggaaggatggttccctatggtcaaagcagggtgctgttaccaggaggaggactggatgctgggctggcaaaaggaacagacatccacccatacatcctgtgga

SEQ ID NO: 177845 - DNA, 183 bp, Homo sapiens
tgtgcgcagaactcagaatccagcaaccatgaattgcagtcacttttgatgcctgcagtgcttcactaattattgaatttgtagcctgttcattggaattatagtctgatagaattttggagctagaaaagtcttttcatttgagataatttcacccatttccctaattgtgtaggtgaggaa

SEQ ID NO: 177846 - DNA, 485 bp, Homo sapiens
tggtgtttctcacatgcttctccttgcacacttgtccagcttcccacaagggacacctacatgacttccagcctggcacctctggacagaattggaaccacctccatgttgcctgctcctctctgctctaatattcccacatacagcttcttacccttagctgatcacaggaattaaggggaaccaagtttgggtggaaatcccagttacttacttcctgctgtggttgtatgtgagaggagatcagtgtggcctcttctgcttacatccactgatgtttttacacttaagccataagcacaggactggtgaagctccctccatccattggtccatctatctgtctatccatccatctatccatccatccctctatcattcatccatccatctatccattcattcaactatctatccatctacctgcctatccatccattcatttccattcatccttctatctatccatcaatttgtccatctgt

SEQ ID NO: 177847 - DNA, 334 bp, Homo sapiens
gcaactgggtttataaagaggaaatggtttatttctatttacagttaggattttgagagagacttgcttgagttatacaccaacacataatgtacacccactgtgtgacaggtactcttccaaatgctttacatatgtgacttcatttaatcctcactagcctttgaacctaataaagtgactattttacgattaaaaacattgagactcagagaggttaagtggcttgattaacatggtgttaaagccaggattcaaacctggttgtgaccagaaaactcttggtctttctgctgtaccacacagtctgtcaactcaggaaacagactacaca

SEQ ID NO: 177848 - DNA, 326 bp, Homo sapiens
tctcaaactagatcatcctaatcttacatgaattcttacagagaattttttttaaaaaggaaatgtcccctactcattttataaaattagtataaccttgataccttgatatcaaagtcagacaaagaaagtgcaagaaaggaaattcagtgatctgtaagcccacggaaaagacaccatgagcaaagctcaccctctggatttaaaaaaatttatggacaagaagttataactgaaattaaatggtggcagacatgtccaaggaatattgtggggatttgatccctttatgaatcttgtgatagataaatgtgtggagatggcaa

SEQ ID NO: 177849 - DNA, 388 bp, Homo sapiens
aattgcttgaacctgggaggcggagattgcggttagcggagatggcgccactgcattccagcatagacaatgaagcaagaaaaaaaagaaaagaccttgtctctaaaaagagagagagagaaaccctgcatggacctccattcatatggccgttctgttactagaagggtccagaccaacacaagagcactaggagccaaagatgaaattcacaaaagagcaattatgagaaatgggagaaagatggagggactgcaacatagggctaatggaagttttagaaaaacagcagaaaatcacagagaagcaatatatgatggacaatcaatgagaattttcaaaaactaggctgggcgttttggctcatgcctataaacccagcactttg

SEQ ID NO: 177850 - DNA, 367 bp, Homo sapiens
tagcttagggactttgaatagtcgttagtgtaatcttcggagatttctgttttggaaaatgtataggattttagagttgatttacagtaggatctaatttttgaagcaatgattgcctaagaaatgattatccccagctacagttttataaccagataaattaaaccacaaatatatagaaaatgtagtctgtgtccattttctgcttagtttggttactaagcaacttgtcttttgtgcacctgtttgattaaagtttctatacttagtaattttgtagctcctgaatctaatttgccaacttttaggttccttaaccgaataggcttgaaacaacatattatttttaaataaaagtgttccctga

SEQ ID NO: 177851 - DNA, 986 bp, Homo sapiens
atagccaaggcagtctttacaaaggacgttagatgacttacatcaccagagatcaagacttttaaagctacattagtgaagacatatgtaggataaacaaagggaccaggggaatatagaaagatccaaacagaccccaaataaagtcacaccagaactgacttttgttgtcaaaggtaacattgcaatacagggagcagggagggacaagattatttattttaattgtgctatttaattagatatctcttagaataatacaggtttttttttaactccaatgcattatagacataagattattaacactttaaggaaaacataggagaatattcttccaaacttaggataaatgctaaaaacattgaccatacaagcaaagattaaattagcctatattaatcataataactgtttatcgcacatgtaccccttaacctaaaagatgaagaagaaaataaaaaataaaataaaatttgaagaaaatgttaaacaaaaatgaaaccataccagtactagaagaaaaatgggtgaattcctctttaacctaggcaaaggaaaggcttctctggctcccaatctggatttaattaatcctaaagttgtatagaatcacaaaatacctcaaatagccaaaacaatcctgagcaaagagaacaaagctggaggtatcacactaccagatgccaaaatatcctgcaaagctgtagtaaccaaaacagcattatactggcatacaaatagacatatagagcaatggaacagaatagcgaacacagaaattaatccaaatatctgtaaccaactgatttttgacaaatgtgccaacaacactctttaggaaaaggatagtctctttaaaaaatggtgctgtgtaaactagatatccgtatgcaaaaggctgaaactagacccgcacctctcaccctacgtaaaaatcaactcaaaatggattaagaacctaaatgtaagacccaaaatgacaa

SEQ ID NO: 177852 - DNA, 532 bp, Homo sapiens
gaactgaaaatgatgatggtatcatttccacttctaaatttgcagcttccttctttcttatcactaagcctttataccaatcagattttaactcgcaaagaaagagggaaatatctccctgtagtaactgggtacgagtgagaaagagacgcaagaataccagaagccatgcaagcgcagaggaggaaccagagggcagagggagtgaagagatgtcacagagggcagaaacctccatgggagggcacaacagcatggatggagcattcaggaaaaaaggaatgccatctggtgatggaaaaacagaaccacctctggtagaattaacatggcggtttgttttttcacctaaaggtaaaaaaagattgaaacagaagaaacattggcgaggcagttccctgtgatggccatcagagggtactgtgagtccggcatggtctagctgctgtcaaacttcagaagatggataaatgggtggtgaaataatttgaaaacagtccttgtaactgcatgtgcaacatttaaaaacttt

SEQ ID NO: 177853 - DNA, 648 bp, Homo sapiens
taatttgactgtttttggttttggtctccaacagaaacattggctgaacccacccatgagtaataaggtagaacagtcaatgccattgttagaatcatttttaaactagttctttattcgagattaagtgctcagcatttactaataatattggcaatctgtagtcaatataaacaaatttccattttcaaaggaatattggttggagttacacaatcaggcatggattgacatcacagggttaacaaaacacacatgattcaaattctacatcaagtttaaagcttggattatccagatattttgctcatgacttaattttacttttctgtgcatccaaaacataccataacctgaaaaaataagccaaagactagaagcatggatttttaaaagtttagtataaaaatagaatactatggcaaaaattaaccagattccacatgtatcaacattgataaatctcaagaacataattccaaatgaagtggcaggccaatatgcacacttatacaatgtgaacacatttaggccagtaccaaatattgttatacatagaatgtaagtatacatgatatagaggattaaaacatccaactgcaagacaagagttatctctgaagaatgagctagggaaacagaggtggc

SEQ ID NO: 177854 - DNA, 493 bp, Homo sapiens
atagagctggtgtggttagagatgataatcaacctaatagtttacattacatcatacttacatttacaaaatagttacattttacaaacacaagaagaacattttaagacagaaatactggttaggttgtcaaaggtaaaaaagcaatgaaaaagaataacagaaaagaatttggcagttaagtcgttatctttgggcccatgatttagaaagaaaaaggctgagaggctaaagaattaataattaagtactaagggattactaattcatccattcaaacctctgagcatctactatgtgccaggtactatatgacttgcttagctatgaactactgtctcgtgatgttgagctgtgaaaggacagaaacataacagtagtggctgggcacttcagagttgagtgggagtttcttaaggatatgggagacctcaacattgttagcagggggagaagaaggagcctgaggaaatggaaggaaagaaaggtgaca

SEQ ID NO: 177855 - DNA, 623 bp, Homo sapiens
ttaatgaacttgaacttttattattagtggcaaagaagtggtcccttagattcagagtaagttggaagaagacgttagtcttcttaaaaccattataattagaatatgacatgatagatttttctaatgcaaatattatgtgaaattttgaataattaggagaaaagatctctcacacacacacttcttaactgtgtaatgttttaataaaattttattgttaaaattatttcacttctcaacttcaatatactgtggagaatattggcagtatgttatgttctaaaacatatctaaagaattgaagttcactaaatagggctaaaaattgtgtttaaaatgttatttggaaaagaaaggaatctctgtgacttagctttttttttaagcttaggttttgatcaagttaataagatttgcatgtaggtttttctatgaccaatgacttattttctctatgacactagagtgtagagtacatcaagatatgaatcagacatttatgcaaggctaggaaaagccatatttaagccacatatgtgttttggatgtgtttgagtaaatgtttgaacttcaacctccaacccacaaataatgaatagaaggctaggtagtcttctact

SEQ ID NO: 177856 - DNA, 431 bp, Homo sapiens
aatgcacttctctcgtttcattcattcatgtatttttgtgaatgtgtttattcggtatgtgtttcttttgcaccttctatatgccttgcactctggtcaggctgtggctgctgttgtgaacaagcagacagggactctgccctagtggatcttcaagtctgtccggaaagacattgatcagtaatgtgactgtgatgagctcagaggaaaagtatggggcctaggagtgcaccaacaaggggtgctaacctaattggggtaggagtcagggaaggtttatattaagtacatgacagcgacatctaagctgagacctcaaaaaattggatagagagagctaggtgagaaggggggatcggtttaaaacagaggcctgaagatcaccaacaattaataattagaggaagagccagaaaaggaggatgaggact

SEQ ID NO: 177857 - DNA, 154 bp, Homo sapiens
caaccagcatcaccttgccagtcatgtgaacaagccaccctggaaagattctctagccccagtcaaaccttcagttgagtgtagccccagccaacatctgacttcaccttatgagagatcttcagcccaaactgctcagatgggcaactcctga

SEQ ID NO: 177858 - DNA, 4392 bp, Homo sapiens
  misc_feature (1)..(2): n is a, c, g, or t
  misc_feature (5)..(5): n is a, c, g, or t
  misc_feature (8)..(9): n is a, c, g, or t
  misc_feature (11)..(13): n is a, c, g, or t
  misc_feature (16)..(16): n is a, c, g, or t
nnctntcnngnnnccnaggagacccccccccccaaccatggacccaccgtcgccaagccggacctcccaaacccagcccacagccacctctccgctgacttcctaccgctggcacacagggggcggtggggagaaggcggctggagggttccgctggggccgctttgctggctggggcagggccctgagccaccaggagcccatggtcagcacccagccagcccctcgctcgatattccgtcgggtcctatctgcgcctcccaaggagtcacggaccagtcgccttcgactctccaaggccctctgggggaggcataagaacccaccgccggagccagacccggagccggagcaggaggccccagagctggagccggagccagagctggagccccctaccccacagatccctgaggcccccacacccaacgtgcctgtctgggacattgggggcttcaccctgcttgatgggaagctggtgctgcttggaggagaggaggagggtcctcgaaggccccgggtgggaagtgctagctccgagggcagcatccacgtggccatggggaacttcagggatccagatcggatgcctggaaaaacagaaccggagactgctggtcccaaccaggtccacaacgttcgggggttgctcaagaggctgaaagagaagaaaaaggccaggttggagccccgggatggaccccccagtgctctgggctctagggagtcgctggccacactctctgaactggacctgggtgccgagcgggatgtgcggatctggccactgcaccccagcctcctgggggagccccactgctttcaggtaacctggacgggtggaagccgctgcttctcttgtcgctcggccgctgagagagaccgctggatcgaggaccttcgtcgccaattccagcccacccaggtcattgccctcagaaaagcgggacacggagaccccgcccacaggcctggcccgccccttccactctacccaaagccagctcgctccataacccgcgcccccaacacacctgccccgcctgcatcgttgcaacggctccaagactccccttccatctattaccagccccgggaatatcagacccgccccttctgtccactcccggccccatatgcacccaaagccctgcctgccaggcaatcgcgaagtctttactccagtactactcttgtatgccctggagcccccaactctcccggagagcccagaaaagctagaagacttccgcgtaaccgcctccggactcccgtggctccacttctttccccaaaggcccagcaatctccctagggacccgacgcaacaggtttgaggctccacgcttcacttgcggtgccttctttggggtgccaacaaaccaaaacgcttccccccatcccactcccatctgcaggacaacgtggagcgggaagagacatggctgagcgtgtgggtgcacgaagcgaaggggcttccccgagcagcggcgggggcacccggcgtgcgcgccgagctgtggctggatggcgcgctgctggcacgcacggcgcctcgggccggcccaggccagctcttctgggccgagcgcttccacttcgaggcgctgccaccggcacgtcgcctgtcgctgcggctgcgcggcttgggcccgggaagcgcggtgctgggccgcgtggccctggcgctggaggagctggacgccccacgcgcgcctgccgccggtctggagcgctggttcccgctgctcggggcgccggcgggcgcagcgctgcgggcgcggattcgggcgcgtcgcctgcgcgtgctgccgtccgagcgctacaaggagctggcggagttcctcaccttccactatgcgcgcctctgcggggccctggagcccgcgctgcctgcgcaggccaaggaggagctggcggcagccatggtgcgcgtgctgcgggccaccggccgggcgcaggcgctggtgactgacctgggcactgcggagctggcgcgctgtggaggccgtgaggcgctgctgttccgggaaaacacattggccaccaaggctatcgatgagtacatgaagctcgtggcacaggattacctccaggagaccctgggacaggttgtgcggcgtctctgtgcttctactgaggactgtgaagtggaccccagcaaatgtccagcctcggagctgccagagcaccaggccagacttcggaacagctgcgaggaggtcttcgaaaccattatccattcctacgactggttccctgcggagctgggcatcgtgttctcaagctggcgagaagcatgtaaagaacgtggctctgaggtgctgggcccccgactggtgtgcgcctccctcttcctgcggctcctgtgccctgccatcctggcacccagcctctttggtttggcaccagaccatccagcacccggcccagcccgcaccctcacactgattgccaaggtcatccagaacctcgccaaccgtgccccgttcggtgagaaggaggcctacatgggcttcatgaatagcttcctggaggaacatggaccagccatgcaatgcttcctggaccaggtagccatggtggatgtggatgctgcccccagtggttaccagggcagtggtgatctggccctccagttagctgtcctgcatgcccagctctgtacaatttttgctgagcttgaccagacaacccgagacaccctggaaccactgcccaccatcctgcgagccattgaggagggccagcctgtgcttgtgtcagtgccaatgcgtctcccactgcccccggcccaggtccactccagcctctccgcaggggagaagcccggcttcctggccccccgggacctccccaagcacacccctctcatctccaagagccagtctctgcgcagcgttcgccgctcagagagttgggcccggccacggccggacgaagagcggcccctgcggcggccccggccggtgcagcgcacgcagagtgtcccggtccggcgtcctgcccgccgccgccaatctgcggggccctggccgcgacccaaaggctccctgagcatgggaccagcgccccgcgcccggccttggacccgggactccgcctcgctgcctcggaagccgtcggtaccctggcagcgccaaatggaccagccgcaagaccgaaaccaggcactgggcacgcaccgacctgtgaacaagttggcagagctgcagtgcgaggtggccgctctgcgtgaggagcagaaagtgctgtcccgcctcgtggagtcgctgagcacccaaatccgggccttgacggagcagcaggagcagctgcggggccagctgcaggatctggactccaggctccgtgctgggtgagcccagccctctccattagctccgcccccaggtgggcccgatccaattagatctgaccaggccctcccccccccccccaaaccacgcctagcacggccaagccccaccctggccccgccccaataagtctgtccaggccctgcctcttggcaagccccgcccccaggtggacccacccaacgaaggtcggcctaggaccctggcagattctctcatccaggccccacccctccatcagcccctcccaacctggctgggccgggcactgagatatctcagcctgggcactccctccagctcagtcacgaccccacccaggactggccaaaccccacctccaagggatgattgataggtcctgtcattccaaccattcccgtctctggtccgacccttcttcaagcatatttaggccccgcccctcagtctggacaagctccgcctccactccaagctccgcccccggagtccctggcactcccaccaggagctggaagggacttccttagcctctgcccttcgccccaatcccccgacccccacaggagctcagagtttgattcagagcacaacctaacaagcaatgaagggcacagtctgaaaaacctggtgagattgccatctgagccctggggcaggtctgggcggtggaggagcaagggttgcggtgcagccctctcctggtttctgaaccccatcaccactgcctccccaggagcaccgcctaaatgagatggagagaactcaggctcagctgagggatgctgtccagagcctgcagctttctccaaggacgcgggggtcttggagtcaaccccagcccctcaaagcaccctgcctcaatggagacaccacctgagctgcccatcctgcctcatcacacgtggtctgggagcagagagatagccatcttagggggggtgtctgactttgccttagccctacttggcctacagtggggagtggagctgctggtcccaaccactctggcagtatgaagttgcccagtaaaatcttgatttcagtgaaa

SEQ ID NO: 177859 - DNA, 710 bp, Homo sapiens
cagacggctgctgattctggggctggtcaggaaaccaagcagcgccccgcgcccggccttggacccgggactccgcctcgctgcctcggaagccgtcggtaccctggcagcgccaaatggaccagccgcaagaccgaaaccaggcactgggcacgcaccgacctgtgaacaagttggcagagctgcagtgcgaggtggccgctctgcgtgaggagcagaaagtgctgtcccgcctcgtggagtcgctgagcacccaaatccgggccttgacggagcagcaggagcagctgcggggccagctgcaggatctggactccaggctccgtgctgggagctcagagtttgattcagagcacaacctaacaagcaatgaagggcacagtctgaaaaacctggagcaccgcctaaatgagatggagagaactcaggctcagctgagggatgctgtccagagcctgcagctttctccaaggacgcgggggtcttggagtcaaccccagcccctcaaagcaccctgcctcaatggagacaccacctgagctgcccatcctgcctcatcacacgtggtctgggagcagagagatagccatcttagggggggtgtctgactttgccttagccctacttggcctacagtggggagtggagctgctggtcccaaccactctggcagtatgaagttgcccagtaaaatcttgatttcagtgaaa

SEQ ID NO: 177860 - DNA, 3543 bp, Homo sapiens
  misc_feature (1)..(2): n is a, c, g, or t
  misc_feature (5)..(5): n is a, c, g, or t
  misc_feature (8)..(9): n is a, c, g, or t
  misc_feature (11)..(13): n is a, c, g, or t
  misc_feature (16)..(16): n is a, c, g, or t
  misc_feature (3459)..(3459): n is a, c, g, or t
nnctntcnngnnnccnaggagacccccccccccaaccatggacccaccgtcgccaagccggacctcccaaacccagcccacagccacctctccgctgacttcctaccgctggcacacagggggcggtggggagaaggcggctggagggttccgctggggccgctttgctggctggggcagggccctgagccaccaggagcccatggtcagcacccagccagcccctcgctcgatattccgtcgggtcctatctgcgcctcccaaggagtcacggaccagtcgccttcgactctccaaggccctctgggggaggcataagaacccaccgccggagccagacccggagccggagcaggaggccccagagctggagccggagccagagctggagccccctaccccacagatccctgaggcccccacacccaacgtgcctgtctgggacattgggggcttcaccctgcttgatgggaagctggtgctgcttggaggagaggaggagggtcctcgaaggccccgggtgggaagtgctagctccgagggcagcatccacgtggccatggggaacttcagggatccagatcggatgcctggaaaaacagaaccggagactgctggtcccaaccaggtccacaacgttcgggggttgctcaagaggctgaaagagaagaaaaaggccaggttggagccccgggatggaccccccagtgctctgggctctagggagtcgctggccacactctctgaactggacctgggtgccgagcgggatgtgcggatctggccactgcaccccagcctcctgggggagccccactgctttcaggtaacctggacgggtggaagccgctgcttctcttgtcgctcggccgctgagagagaccgctggatcgaggaccttcgtcgccaattccagcccacccaggtcattgccctcagaaaagcgggacacggagaccccgcccacaggcctggcccgccccttccactctacccaaagccagctcgctccataacccgcgcccccaacacacctgccccgcctgcatcgttgcaacggctccaagactccccttccatctattaccagccccgggaatatcagacccgccccttctgtccactcccggccccatatgcacccaaagccctgcctgccaggcaatcgcgaagtctttactccagtactactcttgtatgccctggagcccccaactctcccggagagcccagaaaagctagaagacttccgcgtaaccgcctccggactcccgtggctccacttctttccccaaaggcccagcaatctccctagggacccgacgcaacaggtttgaggctccacgcttcacttgcggtgccttctttggggtgccaacaaaccaaaacgcttccccccatcccactcccatctgcaggacaacgtggagcgggaagagacatggctgagcgtgtgggtgcacgaagcgaaggggcttccccgagcagcggcgggggcacccggcgtgcgcgccgagctgtggctggatggcgcgctgctggcacgcacggcgcctcgggccggcccaggccagctcttctgggccgagcgcttccacttcgaggcgctgccaccggcacgtcgcctgtcgctgcggctgcgcggcttgggcccgggaagcgcggtgctgggccgcgtggccctggcgctggaggagctggacgccccacgcgcgcctgccgccggtctggagcgctggttcccgctgctcggggcgccggcgggcgcagcgctgcgggcgcggattcgggcgcgtcgcctgcgcgtgctgccgtccgagcgctacaaggagctggcggagttcctcaccttccactatgcgcgcctctgcggggccctggagcccgcgctgcctgcgcaggccaaggaggagctggcggcagccatggtgcgcgtgctgcgggccaccggccgggcgcaggcgctggtgactgacctgggcactgcggagctggcgcgctgtggaggccgtgaggcgctgctgttccgggaaaacacattggccaccaaggctatcgatgagtacatgaagctcgtggcacaggattacctccaggagaccctgggacaggttgtgcggcgtctctgtgcttctactgaggactgtgaagtggaccccagcaaatgtccagcctcggagctgccagagcaccaggccagacttcggaacagctgcgaggaggtcttcgaaaccattatccattcctacgactggttccctgcggagctgggcatcgtgttctcaagctggcgagaagcatgtaaagaacgtggctctgaggtgctgggcccccgactggtgtgcgcctccctcttcctgcggctcctgtgccctgccatcctggcacccagcctctttggtttggcaccagaccatccagcacccggcccagcccgcaccctcacactgattgccaaggtcatccagaacctcgccaaccgtgccccgttcggtgagaaggaggcctacatgggcttcatgaatagcttcctggaggaacatggaccagccatgcaatgcttcctggaccaggtagccatggtggatgtggatgctgcccccagtggttaccagggcagtggtgatctggccctccagttagctgtcctgcatgcccagctctgtacaatttttgctgagcttgaccagacaacccgagacaccctggaaccactgcccaccatcctgcgagccattgaggagggccagcctgtgcttgtgtcagtgccaatgcgtctcccactgcccccggcccaggtccactccagcctctccgcaggggagaagcccggcttcctggccccccgggacctccccaagcacacccctctcatctccaagagccagtctctgcgcagcgttcgccgctcagagagttgggcccggccacggccggacgaagagcggcccctgcggcggccccggccggtgcagcgcacgcagagtgtcccggtccggcgtcctgcccgccgccgccaatctgcggggccctggccgcgacccaaaggctccctgagcatgggaccagcgccccgcgcccggccttggacccgggactccgcctcgctgcctcggaagccgtcggtaccctggcagcgccaaatggaccagccgcaagaccgaaaccaggcactgggcacgcaccgacctgtgaacaagttggcagagctgcagtgcgaggtggccgctctgcgtgaggagcagaaagtgctgtcccgcctcgtggagtcgctgagcacccaaatccgggccttgacggagcagcaggagcagctgcggggccagctgcaggatctggactccaggctccgtgctgggagctcagagtttgattcagagctacaacccaacacgcaattactgggcacattgatcgctacacccaggaccaccgcctcaaatgaccattgtgtgtcancacgtgcactgacgcttgatgagagacgacggccgatcccacgacctgtatccgcagctcgactttagagatcccgtaccggct

SEQ ID NO: 177861 - DNA, 298 bp, Homo sapiens
gtgcggcgtctctgtgcttctactgaggactgtgaagtggaccccagcaaatgtccagcctcggagctgccagagcaccaggccagacttcggaacagctgcgaggaggtcttcgaaaccattatccattcctacgagtgagaatcagggccccagcagcttagcccacccctgcttaccatgctagccccgacctccagtttagggtggccagataaaatacaggagacactcagttaaatttgatgcaataattgggaccatgcttatactaaaaaattactcatttgaaccaggc

SEQ ID NO: 177862 - DNA, 4286 bp, Homo sapiens
  misc_feature (1)..(2): n is a, c, g, or t
  misc_feature (5)..(5): n is a, c, g, or t
  misc_feature (8)..(9): n is a, c, g, or t
  misc_feature (11)..(13): n is a, c, g, or t
  misc_feature (16)..(16): n is a, c, g, or t
nnctntcnngnnnccnaggagacccccccccccaaccatggacccaccgtcgccaagccggacctcccaaacccagcccacagccacctctccgctgacttcctaccgctggcacacagggggcggtggggagaaggcggctggagggttccgctggggccgctttgctggctggggcagggccctgagccaccaggagcccatggtcagcacccagccagcccctcgctcgatattccgtcgggtcctatctgcgcctcccaaggagtcacggaccagtcgccttcgactctccaaggccctctgggggaggcataagaacccaccgccggagccagacccggagccggagcaggaggccccagagctggagccggagccagagctggagccccctaccccacagatccctgaggcccccacacccaacgtgcctgtctgggacattgggggcttcaccctgcttgatgggaagctggtgctgcttggaggagaggaggagggtcctcgaaggccccgggtgggaagtgctagctccgagggcagcatccacgtggccatggggaacttcagggatccagatcggatgcctggaaaaacagaaccggagactgctggtcccaaccaggtccacaacgttcgggggttgctcaagaggctgaaagagaagaaaaaggccaggttggagccccgggatggaccccccagtgctctgggctctagggagtcgctggccacactctctgaactggacctgggtgccgagcgggatgtgcggatctggccactgcaccccagcctcctgggggagccccactgctttcaggtaacctggacgggtggaagccgctgcttctcttgtcgctcggccgctgagagagaccgctggatcgaggaccttcgtcgccaattccagcccacccaggtcattgccctcagaaaagcgggacacggagaccccgcccacaggcctggcccgccccttccactctacccaaagccagctcgctccataacccgcgcccccaacacacctgccccgcctgcatcgttgcaacggctccaagactccccttccatctattaccagccccgggaatatcagacccgccccttctgtccactcccggccccatatgcacccaaagccctgcctgccaggcaatcgcgaagtctttactccagtactactcttgtatgccctggagcccccaactctcccggagagcccagaaaagctagaagacttccgcgtaaccgcctccggactcccgtggctccacttctttccccaaaggcccagcaatctccctagggacccgacgcaacaggtttgaggctccacgcttcacttgcggtgccttctttggggtgccaacaaaccaaaacgcttccccccatcccactcccatctgcaggacaacgtggagcgggaagagacatggctgagcgtgtgggtgcacgaagcgaaggggcttccccgagcagcggcgggggcacccggcgtgcgcgccgagctgtggctggatggcgcgctgctggcacgcacggcgcctcgggccggcccaggccagctcttctgggccgagcgcttccacttcgaggcgctgccaccggcacgtcgcctgtcgctgcggctgcgcggcttgggcccgggaagcgcggtgctgggccgcgtggccctggcgctggaggagctggacgccccacgcgcgcctgccgccggtctggagcgctggttcccgctgctcggggcgccggcgggcgcagcgctgcgggcgcggattcgggcgcgtcgcctgcgcgtgctgccgtccgagcgctacaaggagctggcggagttcctcaccttccactatgcgcgcctctgcggggccctggagcccgcgctgcctgcgcaggccaaggaggagctggcggcagccatggtgcgcgtgctgcgggccaccggccgggcgcaggcgctggtgactgacctgggcactgcggagctggcgcgctgtggaggccgtgaggcgctgctgttccgggaaaacacattggccaccaaggctatcgatgagtacatgaagctcgtggcacaggattacctccaggagaccctgggacaggttgtgcggcgtctctgtgcttctactgaggactgtgaagtggaccccagcaaatgtccagcctcggagctgccagagcaccaggccagacttcggaacagctgcgaggaggtcttcgaaaccattatccattcctacgactggttccctgcggagctgggcatcgtgttctcaagctggcgagaagcatgtaaagaacgtggctctgaggtgctgggcccccgactggtgtgcgcctccctcttcctgcggctcctgtgccctgccatcctggcacccagcctctttggtttggcaccagaccatccagcacccggcccagcccgcaccctcacactgattgccaaggtcatccagaacctcgccaaccgtgccccgttcggtgagaaggaggcctacatgggcttcatgaatagcttcctggaggaacatggaccagccatgcaatgcttcctggaccaggtagccatggtggatgtggatgctgcccccagtggttaccagggcagtggtgatctggccctccagttagctgtcctgcatgcccagctctgtacaatttttgctgagcttgaccagacaacccgagacaccctggaaccactgcccaccatcctgcgagccattgaggagggccagcctgtgcttgtgtcagtgccaatgcgtctcccactgcccccggcccaggtccactccagcctctccgcaggggagaagcccggcttcctggccccccgggacctccccaagcacacccctctcatctccaagagccagtctctgcgcagcgttcgccgctcagagagttgggcccggccacggccggacgaagagcggcccctgcggcggccccggccggtgcagcgcacgcagagtgtcccggtccggcgtcctgcccgccgccgccaatctgcggggccctggccgcgacccaaaggctccctgagcatgggaccagcgccccgcgcccggccttggacccgggactccgcctcgctgcctcggaagccgtcggtaccctggcagcgccaaatggaccagccgcaagaccgaaaccaggcactgggcacgcaccgacctgtgaacaagttggcagagctgcagtgcgaggtggccgctctgcgtgaggagcagaaagtgctgtcccgcctcgtggagtcgctgagcacccaaatccgggccttgacggagcagcaggagcagctgcggggccagctgcaggatctggactccaggctccgtgctgggtgagcccagccctctccattagctccgcccccaggtgggcccgatccaattagatctgaccaggccctcccccccccccccaaaccacgcctagcacggccaagccccaccctggccccgccccaataagtctgtccaggccctgcctcttggcaagccccgcccccaggtggacccacccaacgaaggtcggcctaggaccctggcagattctctcatccaggccccacccctccatcagcccctcccaacctggctgggccgggcactgagatatctcagcctgggcactccctccagctcagtcacgaccccacccaggactggccaaaccccacctccaagggatgattgataggtcctgtcattccaaccattcccgtctctggtccgacccttcttcaagcatatttaggccccgcccctcagtctggacaagctccgcctccactccaagctccgcccccggagtccctggcactcccaccaggagctggaagggacttccttagcctctgcccttcgccccaatcccccgacccccacaggagctcagagtttgattcagagcacaacctaacaagcaatgaagggcacagtctgaaaaacctggagcaccgcctaaatgagatggagagaactcaggctcagctgagggatgctgtccagagcctgcagctttctccaaggacgcgggggtcttggagtcaaccccagcccctcaaagcaccctgcctcaatggagacaccacctgagctgcccatcctgcctcatcacacgtggtctgggagcagagagatagccatcttagggggggtgtctgactttgccttagccctacttggcctacagtggggagtggagctgctggtcccaaccactctggcagtatgaagttgcccagtaaaatcttgatttcagtgaaa

SEQ ID NO: 177863 - DNA, 3737 bp, Homo sapiens
  misc_feature (1)..(2): n is a, c, g, or t
  misc_feature (5)..(5): n is a, c, g, or t
  misc_feature (8)..(9): n is a, c, g, or t
  misc_feature (11)..(13): n is a, c, g, or t
  misc_feature (16)..(16): n is a, c, g, or t
nnctntcnngnnnccnaggagacccccccccccaaccatggacccaccgtcgccaagccggacctcccaaacccagcccacagccacctctccgctgacttcctaccgctggcacacagggggcggtggggagaaggcggctggagggttccgctggggccgctttgctggctggggcagggccctgagccaccaggagcccatggtcagcacccagccagcccctcgctcgatattccgtcgggtcctatctgcgcctcccaaggagtcacggaccagtcgccttcgactctccaaggccctctgggggaggcataagaacccaccgccggagccagacccggagccggagcaggaggccccagagctggagccggagccagagctggagccccctaccccacagatccctgaggcccccacacccaacgtgcctgtctgggacattgggggcttcaccctgcttgatgggaagctggtgctgcttggaggagaggaggagggtcctcgaaggccccgggtgggaagtgctagctccgagggcagcatccacgtggccatggggaacttcagggatccagatcggatgcctggaaaaacagaaccggagactgctggtcccaaccaggtccacaacgttcgggggttgctcaagaggctgaaagagaagaaaaaggccaggttggagccccgggatggaccccccagtgctctgggctctagggagtcgctggccacactctctgaactggacctgggtgccgagcgggatgtgcggatctggccactgcaccccagcctcctgggggagccccactgctttcaggtaacctggacgggtggaagccgctgcttctcttgtcgctcggccgctgagagagaccgctggatcgaggaccttcgtcgccaattccagcccacccaggtcattgccctcagaaaagcgggacacggagaccccgcccacaggcctggcccgccccttccactctacccaaagccagctcgctccataacccgcgcccccaacacacctgccccgcctgcatcgttgcaacggctccaagactccccttccatctattaccagccccgggaatatcagacccgccccttctgtccactcccggccccatatgcacccaaagccctgcctgccaggcaatcgcgaagtctttactccagtactactcttgtatgccctggagcccccaactctcccggagagcccagaaaagctagaagacttccgcgtaaccgcctccggactcccgtggctccacttctttccccaaaggcccagcaatctccctagggacccgacgcaacaggtttgaggctccacgcttcacttgcggtgccttctttggggtgccaacaaaccaaaacgcttccccccatcccactcccatctgcaggacaacgtggagcgggaagagacatggctgagcgtgtgggtgcacgaagcgaaggggcttccccgagcagcggcgggggcacccggcgtgcgcgccgagctgtggctggatggcgcgctgctggcacgcacggcgcctcgggccggcccaggccagctcttctgggccgagcgcttccacttcgaggcgctgccaccggcacgtcgcctgtcgctgcggctgcgcggcttgggcccgggaagcgcggtgctgggccgcgtggccctggcgctggaggagctggacgccccacgcgcgcctgccgccggtctggagcgctggttcccgctgctcggggcgccggcgggcgcagcgctgcgggcgcggattcgggcgcgtcgcctgcgcgtgctgccgtccgagcgctacaaggagctggcggagttcctcaccttccactatgcgcgcctctgcggggccctggagcccgcgctgcctgcgcaggccaaggaggagctggcggcagccatggtgcgcgtgctgcgggccaccggccgggcgcaggcgctggtgactgacctgggcactgcggagctggcgcgctgtggaggccgtgaggcgctgctgttccgggaaaacacattggccaccaaggctatcgatgagtacatgaagctcgtggcacaggattacctccaggagaccctgggacaggttgtgcggcgtctctgtgcttctactgaggactgtgaagtggaccccagcaaatgtccagcctcggagctgccagagcaccaggccagacttcggaacagctgcgaggaggtcttcgaaaccattatccattcctacgactggttccctgcggagctgggcatcgtgttctcaagctggcgagaagcatgtaaagaacgtggctctgaggtgctgggcccccgactggtgtgcgcctccctcttcctgcggctcctgtgccctgccatcctggcacccagcctctttggtttggcaccagaccatccagcacccggcccagcccgcaccctcacactgattgccaaggtcatccagaacctcgccaaccgtgccccgttcggtgagaaggaggcctacatgggcttcatgaatagcttcctggaggaacatggaccagccatgcaatgcttcctggaccaggtagccatggtggatgtggatgctgcccccagtggttaccagggcagtggtgatctggccctccagttagctgtcctgcatgcccagctctgtacaatttttgctgagcttgaccagacaacccgagacaccctggaaccactgcccaccatcctgcgagccattgaggagggccagcctgtgcttgtgtcagtgccaatgcgtctcccactgcccccggcccaggtccactccagcctctccgcaggggagaagcccggcttcctggccccccgggacctccccaagcacacccctctcatctccaagagccagtctctgcgcagcgttcgccgctcagagagttgggcccggccacggccggacgaagagcggcccctgcggcggccccggccggtgcagcgcacgcagagtgtcccggtccggcgtcctgcccgccgccgccaatctgcggggccctggccgcgacccaaaggctccctgagcatgggaccagcgccccgcgcccggccttggacccgggactccgcctcgctgcctcggaagccgtcggtaccctggcagcgccaaatggaccagccgcaagaccgaaaccaggcactgggcacgcaccgacctgtgaacaagttggcagagctgcagtgcgaggtggccgctctgcgtgaggagcagaaagtgctgtcccgcctcgtggagtcgctgagcacccaaatccgggccttgacggagcagcaggagcagctgcggggccagctgcaggatctggactccaggctccgtgctgggagctcagagtttgattcagagcacaacctaacaagcaatgaagggcacagtctgaaaaacctggagcaccgcctaaatgagatggagagaactcaggctcagctgagggatgctgtccagagcctgcagctttctccaaggacgcgggggtcttggagtcaaccccagcccctcaaagcaccctgcctcaatggagacaccacctgagctgcccatcctgcctcatcacacgtggtctgggagcagagagatagccatcttagggggggtgtctgactttgccttagccctacttggcctacagtggggagtggagctgctggtcccaaccactctggcagtatgaagttgcccagtaaaatcttgatttcagtgaaa

SEQ ID NO: 177864 - DNA, 3881 bp, Homo sapiens
  misc_feature (1)..(2): n is a, c, g, or t
  misc_feature (5)..(5): n is a, c, g, or t
  misc_feature (8)..(9): n is a, c, g, or t
  misc_feature (11)..(13): n is a, c, g, or t
  misc_feature (16)..(16): n is a, c, g, or t
  misc_feature (3881)..(3881): n is a, c, g, or t
nnctntcnngnnnccnaggagacccccccccccaaccatggacccaccgtcgccaagccggacctcccaaacccagcccacagccacctctccgctgacttcctaccgctggcacacagggggcggtggggagaaggcggctggagggttccgctggggccgctttgctggctggggcagggccctgagccaccaggagcccatggtcagcacccagccagcccctcgctcgatattccgtcgggtcctatctgcgcctcccaaggagtcacggaccagtcgccttcgactctccaaggccctctgggggaggcataagaacccaccgccggagccagacccggagccggagcaggaggccccagagctggagccggagccagagctggagccccctaccccacagatccctgaggcccccacacccaacgtgcctgtctgggacattgggggcttcaccctgcttgatgggaagctggtgctgcttggaggagaggaggagggtcctcgaaggccccgggtgggaagtgctagctccgagggcagcatccacgtggccatggggaacttcagggatccagatcggatgcctggaaaaacagaaccggagactgctggtcccaaccaggtccacaacgttcgggggttgctcaagaggctgaaagagaagaaaaaggccaggttggagccccgggatggaccccccagtgctctgggctctagggagtcgctggccacactctctgaactggacctgggtgccgagcgggatgtgcggatctggccactgcaccccagcctcctgggggagccccactgctttcaggtaacctggacgggtggaagccgctgcttctcttgtcgctcggccgctgagagagaccgctggatcgaggaccttcgtcgccaattccagcccacccaggtcattgccctcagaaaagcgggacacggagaccccgcccacaggcctggcccgccccttccactctacccaaagccagctcgctccataacccgcgcccccaacacacctgccccgcctgcatcgttgcaacggctccaagactccccttccatctattaccagccccgggaatatcagacccgccccttctgtccactcccggccccatatgcacccaaagccctgcctgccaggcaatcgcgaagtctttactccagtactactcttgtatgccctggagcccccaactctcccggagagcccagaaaagctagaagacttccgcgtaaccgcctccggactcccgtggctccacttctttccccaaaggcccagcaatctccctagggacccgacgcaacaggtttgaggctccacgcttcacttgcggtgccttctttggggtgccaacaaaccaaaacgcttccccccatcccactcccatctgcaggacaacgtggagcgggaagagacatggctgagcgtgtgggtgcacgaagcgaaggggcttccccgagcagcggcgggggcacccggcgtgcgcgccgagctgtggctggatggcgcgctgctggcacgcacggcgcctcgggccggcccaggccagctcttctgggccgagcgcttccacttcgaggcgctgccaccggcacgtcgcctgtcgctgcggctgcgcggcttgggcccgggaagcgcggtgctgggccgcgtggccctggcgctggaggagctggacgccccacgcgcgcctgccgccggtctggagcgctggttcccgctgctcggggcgccggcgggcgcagcgctgcgggcgcggattcgggcgcgtcgcctgcgcgtgctgccgtccgagcgctacaaggagctggcggagttcctcaccttccactatgcgcgcctctgcggggccctggagcccgcgctgcctgcgcaggccaaggaggagctggcggcagccatggtgcgcgtgctgcgggccaccggccgggcgcaggcgctggtgactgacctgggcactgcggagctggcgcgctgtggaggccgtgaggcgctgctgttccgggaaaacacattggccaccaaggctatcgatgagtacatgaagctcgtggcacaggattacctccaggagaccctgggacaggttgtgcggcgtctctgtgcttctactgaggactgtgaagtggaccccagcaaatgtccagcctcggagctgccagagcaccaggccagacttcggaacagctgcgaggaggtcttcgaaaccattatccattcctacgactggttccctgcggagctgggcatcgtgttctcaagctggcgagaagcatgtaaagaacgtggctctgaggtgctgggcccccgactggtgtgcgcctccctcttcctgcggctcctgtgccctgccatcctggcacccagcctctttggtttggcaccagaccatccagcacccggcccagcccgcaccctcacactgattgccaaggtcatccagaacctcgccaaccgtgccccgttcggtgagaaggaggcctacatgggcttcatgaatagcttcctggaggaacatggaccagccatgcaatgcttcctggaccaggtagccatggtggatgtggatgctgcccccagtggttaccagggcagtggtgatctggccctccagttagctgtcctgcatgcccagctctgtacaatttttgctgagcttgaccagacaacccgagacaccctggaaccactgcccaccatcctgcgagccattgaggagggccagcctgtgcttgtgtcagtgccaatgcgtctcccactgcccccggcccaggtccactccagcctctccgcaggggagaagcccggcttcctggccccccgggacctccccaagcacacccctctcatctccaagagccagtctctgcgcagcgttcgccgctcagagagttgggcccggccacggccggacgaagagcggcccctgcggcggccccggccggtgcagcgcacgcagagtgtcccggtccggcgtcctgcccgccgccgccaatctgcggggccctggccgcgacccaaaggctccctgagcatgggaccagcgccccgcgcccggccttggacccgggactccgcctcgctgcctcggaagccgtcggtaccctggcagcgccaaatggaccagccgcaagaccgaaaccaggcactgggcacgcaccgacctgtgaacaagttggcagagctgcagtgcgaggtggccgctctgcgtgaggagcagaaagtgctgtcccgcctcgtggagtcgctgagcacccaaatccgggccttgacggagcagcaggagcagctgcggggccagctgcaggatctggactccaggctccgtgctgggagctcagagtttgattcagagcacaacctaacaagcaatgaagggcacagtctgaaaaacctggagcaccgcctaaatgagatggagagaactcaggctcagctgagggatgctgtccagagcctgcagctttctccaaggacgcgggggtcttggagtcaaccccagcccctcaaagcaccctgcctcaatggagacaccacctgagctgcccatcctgcctcatcacacgtggtctgggagcagagagatagccatcttagggggggtgtctgactttgccttagccctacttggcctacagtggggagtggagctgctggtcccaaccactctggcagtatgaagttgcccagtaaaatcttgatttcagtgaaaaaaaaacaacactaaaaatactaccaacccatccacaaaacaaccctcccgggggtctttttggggggcggccacaaagcgggtctttaacgcgccctgggcctgtttccccacccccttttttttgacggggggaaacccggn

SEQ ID NO: 177865 - DNA, 198 bp, Homo sapiens
ttagctgtctataattataactgagtaatttttcaaatgctattcatagcctaaacacagcaagacattcttccaatcatgtgataaaaactgagccttgcaaaatagtggtagagtgatatgttcaatggtaccgaaggacatatttaagagaagcctttcaaaagtaaaaagtaatttaaatgttagggagacagg

SEQ ID NO: 177866 - DNA, 440 bp, Homo sapiens
atagcgacctctcatctctgaatcctaaggaacttctgaagaacttcattacaatacagtaccatgacaaaaatcttaaacatagaagcgagtcaagatgtatgcacttatatgtccttaagactaagctgttttatagactgagattggttctgtattgtgaaacaacaacaacaacaacaacaaaacaaaaaaaaccccacttgaattacattctttgtaggaaaaactggcacagggatgaaattacagtgtttattattgttctgcttcttttatctattttaatccagtgtgtcatttaataatgattggagctaggtatgcagaaggttacacaaaagaatttaatagctgctagtagttcactggaggaaacaaatggatgtgaacatatgttgaagcaaatagaaaatttaattacatacttaataagctac

SEQ ID NO: 177867 - DNA, 678 bp, Homo sapiens
aggagaactgcttgaacctgagaggcggaggttgcagtgagccaacaccacaccattgcactccagcctgggtgacagagcgagattctgtctcaaaaaaaaagacacctgcaatcagatgtttattgcatcactattcacaatagcaaagacaccgaagtaaaccaggtactcatgaaacttagattgaataaagaaaatgaggtccttatacaccttgcaatactatgcagccacattaaaaaaatgaagtaatgtcctctgcagcagcatgaatgcaacaaatggccattattataagcaaattaacacagatcaggaaaacaaatactacatgttctcacttacatgtgagaggtaaacattggatgcacatggaaacaaagataggaacaataaacactgggaattccaaaaagaagaaagaaggaagggaaaacaagccctgaaaaactacgtatctacaaaattagccgggcgtggtggcacatgcctgtaatcccagctattcaagaagctgaggcaggagaatcgcttgaacccgggaggtggaggttgcggtgagccgagatcgtgccattgcactccagcctgggcaacaagagcaaaactccatctcaataaaaaaaaaaaaagaaagaaaaactacgtatcaggtataatgtacatatgtacata

SEQ ID NO: 177868 - DNA, 198 bp, Homo sapiens
ttcattccactgcttactacccttctttgcattccgtttactttcagaataaaatccaaacacttaagcacggtccacaggcttccatgatctatccggctgtgcatctcaagccactgtgtcactccttttcctctagtcttaatgaactccttccagtttccacacctcaggctctttcttcccttagagaattca

SEQ ID NO: 177869 - DNA, 172 bp, Homo sapiens
agggggattaaataaattcacattgtcgtgcagccatcaccctgatccttctctagaactttcttattccaaatggaaattccatactcctcaaacagtaactcccgttcttccttcatgttacctttttttttttttttgagatggagtctctctctgtcacccaggctgg

SEQ ID NO: 177870 - DNA, 335 bp, Homo sapiens
aatcccttcagcctcattctgcagattccttcctcctttctcttgtcttttggatctcttggatcccttcctttctgtacccctacttttccatctttcttgatttattccttattttagtgcagccatctgtcagctttctggaggtgtacgggaagtaaattactttaagaatattccatgtcttaaaaaatctaactttgccctgtaatttggataatagtttggctgggtatagaattgtaggttaaaaattattttcctgccaaattttaaatgtattgttccattgccttctagatttctgtatttgttgttgaaatgtttgagaccat

SEQ ID NO: 177871 - DNA, 319 bp, Homo sapiens
tcagtgatttatggtgctgctctgctgggtgtcccaggtgtgggcgagggcagtaaataaagcagatgaggcctgggtcccccacagggagagacagcatcagctggaggatcaggaggaggctggagcctgggactgcctcacaggtggtctcttgcctgtgtccagcttctggacctgggcctggttggggaaagtcacagaaggaacaggacacagggcaaagggtctttgactgacactggaatcctggccagctgaggcaatctgcagctgtcaggcctgtggctttctcggggccctgagttggatgacacgt

SEQ ID NO: 177872 - DNA, 158 bp, Homo sapiens
ggagcagaagagaaaaaaggtaaaaagctcattgaatataatatcaatggtaattaaaaagccaccatttccccccgcagacaagctaactttgagaacctgccagagctttcactaacagcaactgactcattttctcctgtgttggtctcagctta

SEQ ID NO: 177873 - DNA, 710 bp, Homo sapiens
ttagcacttcttgagaatgtttctagaaagatgttatgagaaacaacttatgacagcaacatgagggagggagaatataggtatgttctcgtactttcttaaccacacacctggctatagtagaaattttttgccttgcacacggcagggatctgtggctgtatagacctgccctgtgatgtatcagttgacttacccataggaaaatgaggtctaacccttgttatgaatctatattaggtagtatgttgtagtggcaatagccctacataatacttggtttctaaatgttttgtttcaaatcagagatccttagttactaggagaagatatgtatcgtgtcaagtgtctactctggagccagattgcctgattcaaatcccagttcgtcactgtgcgattggactaattaattaacccctctttccttggttttcttatgtgtaaaatgggagtaatggaacctacctatttatcacatgattgtgaagactttaaaaattgatacatgtaaagtacctagaacaggtcctgatccctagtaagtgccaagtaaatgttaacttattttcatctaaatgttacctaacagtattataagttggtgcaaaagtaattgcggcttttggctttcagtggcaaaaaccacaattgcttttgcaccaaatctataatatgctctatgcttttatcataacactataataaac

SEQ ID NO: 177874 - DNA, 641 bp, Homo sapiens
tcatgttagaaattgatttgaaaatagacttgtgtttatttagagccctggcctcataatggtttgactgaacattatgattatccatgttatcaaagaaacaagaaaaggtatcttctgctatattagagcggtgatttcagagtacagtttcacatgcaggcagcaggtcttctggagatgtaattttatgtcatagactggcagggcatattatagttgtctagctcaggtaatggtaattacaggtaagttcacagtgcgacaaaatatgagtaccactaaattaaagtgagcgtaatctgagtatttctggtttcaattactttttttttgttattttatttttatttttaagtgatgaaatgttcctatgtgaactggaaaaatacaattcatgttttgattttcatttaattagtatgtttcttcagggcttttttcagagtttatttaaatagtgggtagaagaagttaaaggtgtgatcacagttggttcaggaatggcatatctagggggcagttggtagggaatttttttttgtggttgaaagtgaaatagtatttcattactgggattagaagtaatcataatgggcagagagaactgaaaatgactaatatccttcactcagtcttct

SEQ ID NO: 177875 - DNA, 302 bp, Homo sapiens
gcaaagtgctgggattacagatgtgagccaccgcgcccggcccaagatgttcatcttttgtttttattttcctacttgccagagtccagtgccagagatattcatctttgcatgtcctgcctgtatccactttgaagggaaattgtccacctggcctgcctgccctcctggccgcagccagttgaacttgagaggaacacccagctccaccgtggacttcccattcatcggccatggcctatgacaagtgtaggctggctctaaaagatgagttgtggccgggcgcggtggctcacgcctgt

SEQ ID NO: 177876 - DNA, 165 bp, Homo sapiens
agcactttcttccccctgccctcccaaaaaaaaacatagagggaaagataattcattttgcttctagtttgtggctgttaatatggtcatacatctacagtcagcttcaaaatccctcttttattggaaacatggtttaaaaatggatgcaggaatatgaggagg

SEQ ID NO: 177877 - DNA, 345 bp, Homo sapiens
cgactgaggatcacactgctttgaagtgttcctgccaactccctgattcctctggaaaagactctatcacagagagaaagtcagcaatgcattatttgtcacatggcactaacaggaaaatgtaacatcaaacagttttctttttccactcacaggaagtttgtagtagaacccaccaaactctgtccttgtctctggggcatgagttagttattaactactgctaagggtcagtcctcaggctgagcaagtccatattccccagaccagaaaatacagcaaaagggatccacgcttcagtggctcagagcacctataaattcctcctcaccatgagagaaggta

SEQ ID NO: 177878 - DNA, 397 bp, Homo sapiens
aggagaatgggaagtgtgtttaatggggacagtttcagtttggaaagatgagaaagttctaaagatggatgatggtgacagttgcgcaacagtgtgaatgggctggacatagtggctcacacctataatcccaggactttgggaggctgaagggggaggatcacttgagcccaggagtgtgagaccagcttgggcaacatagggagatcctatccccaacaaatacaagaaaaaacaaacaaacaaaaaaatgatgcaaatgtacttaatgccactgaattacatactcaaacatggataagatggttaatttttttttttttttttttgagacggagtcttgctttgtcatccaggttggagtgcagtgatgcgatcttggctcactgcaacctct

SEQ ID NO: 177879 - DNA, 392 bp, Homo sapiens
tcgtggcagctaatactcaagggtgcttattagtgaaagcactgttcttagtgcttttatctatttaaatctcacaaccactccacaaagtatgtgatattatgattcccatttttcagaagacaacacttaaaaataagttagaaaacctgtccaaaagcatgcaattaataaaaagaagtggaagtagaatgtgaacttagtttccctctagggtcatactcttaacaactgttctatgttcttatcataaaaacatttaaaaatacataaaaatccctctattgctacctcacagagagccactgttaacattttggtatagtttctcctagtctttttttgtttgtgtaatatacatgtgcacatataaatattttaagaattggggc

SEQ ID NO: 177880 - DNA, 602 bp, Homo sapiens
gccaacatggtgaaatacatctctactaaaaatacaaaaattggctggtgcgcgcctgtagtcccagctacttggtagactgaggcaggagaatcgcctaaacccaggaggcggaggttgcagtgagctgagatcgcgccactgcactccagcctggcagcagagcgagactctgtctcagcaaccaaaaaaccacattttacgtattatctggacatagtttaaaaatgaaaacctcagcttgtggagaataaaatgaggtaatgttagaagtcattttgtaaactattgtgtgatccaaatataaaattcttaattttctgctttccccagcttatatccatcttctgcaaaacaaaaaaggatcttgtcttattttttagtaacaagttgcttatatagagtgttgatttctaagtgttttcacatttatttaaaatgaataaaatttagtgagagtttgctcttcctgggccctttgcatttaactgtttttccttaattgtggaataagaaacttcatttttgttaaaggtaattaaggcaagtagagaaagtctgggagtttaaaggagaattgaagattcttaactcatgctgtg

SEQ ID NO: 177881 - DNA, 211 bp, Homo sapiens
ctactccatcatgccacatcctacacatggacagcaagagtgaaagatcttagatgtcttccaggaacctcaaactcagcatgtccaaaggtcctcccttcggaaaacaaaaagacctggttcccattcagtgttctctttctctgaaaacgtcatccccagttgctcaagaaaaaaactcaagtcatttcatgactcccttttctcccta

SEQ ID NO: 177882 - DNA, 322 bp, Homo sapiens
gacttctccaagccctaaacatgagatcggaagggtgcttctttgtgggcagtgagaggaagtcctgcttcccaagtgagggagtgaacataaggagtgccctttggcaggcaatggtactggtaggagcgtcacataaccagtgtcagccatcacttccagagctcctgctcagttccaggtatcaggtgctgtagtgaacgaggtggacgagttccccatcctcttggcatttacaggcaagtgggagagacaggtattaaacaactcatgctaccagccaggagttagtgacccctgtggcagtggaaggacaggggct

SEQ ID NO: 177883 - DNA, 1632 bp, Homo sapiens
ttgtgagccctcgtgcctgcaagcagcccttttcccagagcgctctggtattgtcccaggaagcacctggacaatgggctctccctccactgaggcacctgtagagtactgaaatagtccacccagttggccatgaacctgagtgctgtacattggtccacccctagaatgaagcttgatgatatcaaatgtaaattatcaaggtaattttgtacctgttgaaatacagctttaagaaaaagaacaccttactagtaataatgataaacttggaacttcggctgtcaatttagtctagatttggttaaatttaggcatttggaaagtggattcctttatttctcatgatatctggttccagggtcatacctgttctggggagagttttcttacattattttgtttgtttgaccgacagctcacgtgcgtacgaagccatttcattcacaaaactaacttacaacagcccttgccaagctcttagcttgcagaatttacccacttcatatgaacttttcaaagtggaagaataattactcttttctgattgacaagcttccagtacatttttctttgcatgtttaaaccaatcatggatcattttgaaaataaatacactccaaagcacttcttaaaattttgagaatgcaaaaaaggtcttggttaatttattagagtttcatcatagcctccattaagatcagaatattagtttgtagacttgaacttcaagttctcattcacgtttgaggttgggcatcatgttgataaagtccccgaatgtagagagctcagggcagataatttaaccaggtaacccagccacgtcaccagtggggagtgcctccaggcgtttgtgccctgcccatttgcttctccctttagccttgtctggtctcctaaagtctggtgtttgactccccacctccctgattctgccttatagagtttggagggtgaggcccccatggaggtctggagaattcagactgactgccgcatatgggctctgaaacactgactcatcatttcccactacctcacatcacatacgggcttgctggtaggcaattaggccacatttagttgaccagtagtttctgttgcctgggtggcattactgttaagagatttgcttaaagtggttggctcacttctcagtgacttgaacagtttctgactttggccaggatgacagtactaggaaagtgtgctttttaaaaataattatacagctatattgtgctttccagatataggtttctcagagttcaaagcactttttatatacctttaaataggatacaataacagtcttcacttacatatatttgtaagttttggtagctttattagtaaaaatgagatttgaaatgtgaagttctttgctagaagctgtaattgacttagaactaatgaggattacatctgatcattttccttttttctgtgcattattgcatggaagttactagtgtctgtgtcagttgctatgtatctctccagatggatgaatagataaatatatatctgtatatgtattctgtatgtacatgtatgtatgtatacattcatatttagtatttgcattctatttttgaagcatttaaaatataacaacattttggggaa

SEQ ID NO: 177884 - DNA, 782 bp, Homo sapiens
gtaatatgaaacaatacaaatatgtgtaatttaaaagttattactcctcttcattgccatttcattgaagctacattataaatggtatatttttccttggtgttcctcgtgtatataccagcatatgcaaatgcatatatgcacacattgtttttgttttctacaaaagccatattgtacatattactccaacttgctttctttttctcaaagtcatgtttattaaggtctaatttacatcaaataaaatttacccttcataggtgtatagttgggtgaattttgacaaatatatatggtcataaaactgaccccacaatcaagatttccttcaccccaaaaggttctcttatcctcctttatagtcagttcattctcactccctgaaaactcttttctgatccaatagttttaccttttttagtaggtcacataaatggaatcaaaacagtatgtaaccttattcataaacacagtaaatataaatggattgaacactctgaataaatggcagagactagcagaatggatttttaaaataacatgatctaactatatgctgtctataagagatgcaatttatattcaaagccacaaataggtgaaagtaaaaggatggaacaagacatactatgcaaacagtaaccaaaagcaagctggagaaactatactactatcagacaaaatggattttaaggcaaaaattgttactagagacagagaacaacgaaaaaatgtcaatccatcagaaagatataacaattttaaacatagatgtacct

SEQ ID NO: 177885 - DNA, 340 bp, Homo sapiens
gcctctagatccaaacttctgactgaggatacaccccacaggtggcatgtgaacattactactgttctgttctgaatattgaattaggcacaggactcaaatgatcaactttctttttttttttttttgagatagagtctcgctctgtcaccccaggctgaagtacagtggcgcgatctcggctcactacaacctccgcctcctgggttcaggcgattctcatgcctcagcctcctgagtaggtggaattacagacgttcaccaccatgcaaggctaatttttgtatttgtggtagagacagggtttcaccatgttgggcaggctggtctggaactcctg

SEQ ID NO: 177886 - DNA, 510 bp, Homo sapiens
caagacatgggaaaatgcatttgtaaaaagtgagacactctgtgtatgttggataacactggctgctttggaatcaaaccccaaatgctcagtgggttaccatattagaagcgtgttttccttctgtatgatgctctgaggctctaggctgcaggtggccttcctccatacagtgagttaggaccagatgccatgcctgacacctccatctcctaaaaccgtgggatactctaatctcagctggcagatggggaaagaaaggatatgaagaaggaatactcgcttaaataccatcagccaaaagtgacctatatcacttttgttcatgttctagtgccaagaatgtcatacagcccacccaggtacatgggggctgggcagcccttctagagcacagaaggggagcataactttgctggggagttggctgaccctgccacacccggttgtttagaggcacccggttgtttagaccctgccacaccgtggaatttagagacaagggtaaga

SEQ ID NO: 177887 - DNA, 522 bp, Homo sapiens
attactttgtataagttttttggtaactgttcttaaattcaaattttaagatgaacaccattgtttaatcactgagtcagactttttttttgtactttgggaatttacaaatttactgtccattttaaacttgacctgtttatgtgtagcattataaatatatacagaaggacagtagatgcttaatttcagtgcatgttattgaaacacaaatacaaaataaaaacaaggaatatataccatttcatatccagattgacaaaaatgaaaaattctgacaatatcaaatattgggaacgacgtaggggaatgtgaacctttaactattacttgtgttagcaatgatgaaatgcaattaaaaccaaaatctgcttcccccagaaaacatctcttcaaaggtagaagaaaaaggaaacaatttcagtttttaataagtattaaaccagaatgacacgtgtatcacaagcaatctgctaaaagattgcaaagaccaaaagaatgctcacccttacatctagccaa

SEQ ID NO: 177888 - DNA, 343 bp, Homo sapiens
tctcttacagcatagaaagagagaactctccaacgctttttatgaggctagcacaaccttgataccaaaatctgattaggacagtgagagaaaggaaaattatagacctgtcttactacctaaaaaacaaattagcaaagtgaacccaccagtacacaagaaaggtaatatatcttggccaaatagggcttatctcaggaatgcagtgttagtttaggattagaaaattaatcaatgcaatttaccatattaactaagtaaaggagaaaaaaaatcacacaatcaagagttgcagaaaaatcatttaataaaattcaatgttcatttatggcaggcactctta

SEQ ID NO: 177889 - DNA, 375 bp, Homo sapiens
ccgccttgcatattaggacataatcaggaaaacactgaacaactcattactgatttagattattttctgcagtttccaatgcctgacacaggttttcctatgcattagcctctttctttctttccttttttgtttttgtttttttgagacagggtcgtgctctgtcgcccaggctggagtgcagtggtgcgatctcggcttactgcaagctctgcctcgcaggttcacgccgttctcctgcctcagcctccccagtagctgggattacaggcacgtgccaccacgcccagctgatttttttgtatttttagtagagacggggtttcacagtgttagccaggatgggctcgatctcctgacctcgtgatccacccg

SEQ ID NO: 177890 - DNA, 557 bp, Homo sapiens
agggtcttcatcctgtttatctctgcatcctccactggacccacatagttggttcagacttgcttaacacaaaccgatggatgaataagtgagtaaacacagtcggctcatggtcatgggtttctggcacctgtatcaagacagagatgacttgtaggagaagcccctctgaaaaatgcctttcttcaagaaaagctgcttcagaagctccattatgcttctgaaacagggatctccgaccccctggggccatgaactggcactggtccatggcctgttaggaaccaggctgcattgcaggaggtgagtggcaggcgggcaagcagtgaagcttcacctgaatttacagcaggtccctatcacttgcattaccgcctgagctctgcctcctatcagatcaacagggacattagattctcataggagctcaaacccaactgtgaaccatgcaagccagggatctaggttgcctgctccttataagaatctaatgtccagtgatctgtctttgtgtcccatcacccccagatgggaccatctagttgtaggaaaacaag

SEQ ID NO: 177891 - DNA, 481 bp, Homo sapiens
tgctgtgatcacgcaaaaaaaataactttttatgtttacaaatttatactgaaatacacaaagacaaagacaaggtctgactgagatttgctttaaaatactttaaaggggttaaaaaatgaagcaaatacggattctggataatatatgaatattttattctctcaatttgggtatgttacaaaattataatttttaacttgcatgatacaactaatcaaagcataagtgaggaactctagagcttctattagagaattacaaaacataaaagcatcaatgagaaatcctagagcctctattagagaattatataatataatatagcacaagtatgtaagattcacttgctagcagattccaaaacaaataaatgataaaacttaaagacaggccaagcgtgatggctcatgcctgtgatcccagcactttgggaggccgaagcaggtggatcacttgaggtcaggagttcgagaccagc

SEQ ID NO: 177892 - DNA, 273 bp, Homo sapiens
gctattgcagatgaaggcacagaaacagtttttgtggtctcttttctactactggactcaaggtgccccataactttggaaacaccaccatcgatgaggttttcacatttttttttatctatagtttttgaccctgaatacagaattggtcaaatggagtagtatctttatggccctaatacattgctttgtattacagtcatttgaatggaggtctgtattcttttcaacacttccacagaacctagtccagtgtctaacattcagtaggtg

SEQ ID NO: 177893 - DNA, 279 bp, Homo sapiens
cgaatcttggtttccatcatcatcctaagtgaagttttacaggattggattagagaggaattctaaagggctgtatgcccttgtgatggtgattagccgttagtaatgggaaattcctgggtggagatatttatttaacgtgcattcataagccggtgaacactgaactctatctctcccaagctttaacaatctttccttgacacatctacacctaaacatttgtagatttttaagaagaaagattggaaactagattgcttcacccataaaccctgt

SEQ ID NO: 177894 - DNA, 248 bp, Homo sapiens
aacccccatccatgaacccccaagattaggagtggggcagagaggagcaaaagcctgagagagagatcgggggagaacaagatagtggggaaatatatattgattaagaaattgaggctgggcatggtggctcacgcctgtaatcccagcactttgggaggccaaggtgggtggatcacctgaggtagggagttcaagaccagcctaaccagcatgaagaaaccccatctctactaaaaatacaaatt

SEQ ID NO: 177895 - DNA, 356 bp, Homo sapiens
acccagaaaaacatgggctcaaggcatagcactggcgtaaactagctgggtgacacagataaggcagccctaggggatgtcactagatgctgccaaggtccagtgctcacatcctgtgcctctctagagtctgctctgataagcaaactatttttcagtggacagagtacaagaaccaggaggaaactataacaagctgactttaatcaaagacaccatccaccagggattttaattttctgaaactgtaatatgcaagtttattatcccttcactgaacagcacatctgttcagaatatatctgatcaaagatatattcaagatcagggtattaactgtatcatgggccagcaat

SEQ ID NO: 177896 - DNA, 503 bp, Homo sapiens
tgtgccagagaagataattgccactcagtgatagagctcagaacggaattcacgttgtcagattcccaagcctgagtaccaaccaagatctggttggaaagagcaagtgctgtcgtctgagaacatccaccatattctgtactcttcagtagctgttctgtgttttgcttttttgatggtgcccctcctgagggggaggtggagagtatataattgggcatgttttttcattgtggttcctctagtccccaccagtcaactgtgactactatgaagtgcttttgagtacagggctgtaaatactaaaatctgttcctttgcaatttttggtatttgagcttttccagagaacaaatagaaggatttgatgagcttagaaatacatgtgtagaggaacagtgaaaaagacttcttcccaaatggctgctaagtaattatatatttttcatcataattaaatattctcaaaattgtatgtcagtgtgttgaaaatagtgttttca

SEQ ID NO: 177897 - DNA, 164 bp, Homo sapiens
tcagatcacaggaaggggcaagtgacaggtgcctcttcttccaaagtcacaggagggagggagtccccccgtctaagcctcttacctgaccacagtctagttcatggtgtctgaagctgacacgattgacattggaggctggataattctttgctgtaaggtct

SEQ ID NO: 177898 - DNA, 316 bp, Homo sapiens
tgtttccttccaaccatcaggaacagtaaggaattccgattcatcttggtctcttcagcttccgcttctggttatgaaattcactgtttccagccccctttctggccggttcagagaggaagacaccattttcaaattgcttctggtggagctggaaataaacttgaaagttctcttgtctttacctggctttggtttgagggtttgatgacggtcatcgaaaccctctaccggtaacagaaccgtttcatttcaaataaagaccaaggaaaggggcataattagcaatgttatctctggctgtagggtttgatga

SEQ ID NO: 177899 - DNA, 481 bp, Homo sapiens
  misc_feature (442)..(442): n is a, c, g, or t
gcttgatggcagggactgtgtctacctcattctttttatacctggaaccaagcacagtctagttcagaattggtactccaacaataactgctgaatgaattatcctttatttttctgagaaggaaaaaatttaaaaattacataactaccaagttatttctctatagataacttgtggtttttgaaggagaaccgcatttttttttttgagtcagtcttgctctgttgcccagagcaacagagcagtgcgcaatctgctggagtgcagtggcgcaatcttggctcacgtctataatcccagcactttgggaggccgaggcgggagggtcacctgaggtcaggagttcaagaccagcctgaccaatgtggcgaagccctgtctactaaaaatacaaaagttaatcatgtgtggatgtgggcacatgtaatgccaactacttgngaggctgaggcaagaaaatcgcttgaacccaagaggtgg

SEQ ID NO: 177900 - DNA, 292 bp, Homo sapiens
tctgctttgcttggggtatttcccatcctggaagttttaggtgtttcccagagttttctgagtctatgggacccaacctctcttactagagatttcttgcaactttttccctggagactctgtggggctcaacctctcctactagagatttcttgcaccattttccctggagcctcaacccccacgagtggaaatttcttgcactcccctactttcacttcacactcagttgtgtgtctcaatcacacacttttaacctccaggatgtctcaaccaccaaggaagtacttcc

SEQ ID NO: 177901 - DNA, 515 bp, Homo sapiens
agtcccagtcatcaagaaaatgaggatttctcatagtttatcaacttggccaaggtggtgtcttctattgctacccctctgttacttgggtattcactaaacacggtttgggaacagccttaagacccttcatcacctggaaagacccaagtgtgtaaggtctacctcgctatgttctagttttcttagctatttctcctttccctgcaccctatgaaggtcaaaatcatctagactcctttggctagggatgcctgggttcacacattgacaagctggaggcaaacaccatttcctcaagagctctgccacctgtccaaggagagagccatgttgggctggccacagctaaaaactgtcctggcccagtggcatcttcactgcttgggttgtgtgcagttgtatttagaggttcgactggcctcgctgctgctgcagcacctgcttcatacatggcagcattggtgggctccattcggtgtccttggagccaaggcattaaattgaagagtctc

SEQ ID NO: 177902 - DNA, 174 bp, Homo sapiens
attgggagtactgaggggaggtagagtaaagaacaaatagacaggtgctggtagtgactgctatttaccactggtatagaagagttcaatattttaacagtttaccccattggctatcagccttgctaccttattgactacccgtgccattgttactcgaactattcattcaag

SEQ ID NO: 177903 - DNA, 368 bp, Homo sapiens
agtgaaccaggagcaatgtatacacaacacaaagctcaaattcatggagcacaaagccagtttcttcttcgtcctctttttaaataaaagtaagtgcacaaaatcaccatgtataacaaccaagactttgtatatttaaaattcttccaagttatattgcatttacaatacaagcttttgttactgtgagctgttgtcatcctcagaaacagaaacgatttttaaaacacttccaactaaaaagaaaagtgactctttctgcagagaaaattcaattcgtttaaaatagagcatcacttccagggtaaatagtggattaatatattaatgctggctgggtacggtagctcatgcctgtaaccccagca

SEQ ID NO: 177904 - DNA, 265 bp, Homo sapiens
tataaacatttactgtgaacaattttgttggttcattttatgcagaagtattataagaaggttatgtggtgggagggacagaggggaaaagagctagaggatggttagccatggaagaaaggaaatgtagcaaacaagttgaagagtaaaaaacaaacaaagaaaatatcaacagcttcatggttttttcaacgggtcctgtctctctgttttgctcttacagagccttagaataagagttcagatcctattcgctatcctttcc

SEQ ID NO: 177905 - DNA, 245 bp, Homo sapiens
cattagttagtgagaggaactgaattctgtgtcttactgataatacagtagacttgtcatgtattaagaaacctttttaaatgttgaaatattgaaaccctgtcaacaaaagtgaaattgcaaatagcttaccatttatcaaagggttactgacttatttattttgttttgagaatactatttaatagtcttataaaacttgtatttgcactgatcaataatcttttggtcctgaaaagttagtg

SEQ ID NO: 177906 - DNA, 529 bp, Homo sapiens
ggtgcctgccactgtgcctggctgatttttgtatttttagtagagatggggtttcaccatcttggccaagctggtgttgaacgcctgacctcgtgatcaccctccttggcctcccaaagtgctgggattataggcataagccaccgcacccagccaccagcactattttttaaaagatctatttgactgcagtgtgtactcttggtttgttgcttctaattgctgcattgtactctgtagctggagttagggagttattgtaatagtcaattcctactggattggtctagaaaggttgtatggagaattggcattatggggtgagcctcgaaggatgaagaggactggggaaggaaatggagctgtccaagaggacgtatgaacatgccaagaacatttagggaaggacccgttgcctgctgaggccataggtcagggtgtggttgtgtgtggtcataggagaggctggagaggtctcagataacagcgttggacattccctaaagcaatggaagagagaggcagttag

SEQ ID NO: 177907 - DNA, 367 bp, Homo sapiens
tcaaaatctcaccaacttcaacatccaggtaagtatccaatttcttctaggaaagtctctaagattctacctaacccaaatcactatttctttcaatacacaagtttttcgtactcaacacagttatactgtcatttgttttatttctatttctttcttttttttttttttttttttgagatggagtctcgctctgtagcccaggctggagtgcagtggcacgatctcagctcactgcaacctctgcctccggggttcaagcaattctccgtgtctcagcctcccaagttagctgggactacaggcacccgccaccatgggccagctaattttggtatttttagtagagacagggtttcatcatatt

SEQ ID NO: 177908 - DNA, 524 bp, Homo sapiens
ctggaagattcacttttcttgtctcaggatgttttctgatgaagacgtctctgttctgtgaccccgaattatttctctcctctctgttggtgtccttttcttttgggtgaacagatcacccaggaaggagtacactgtgcctctcaatataacttggtttgatgatttggtgtttattttcctctcttcatacttctgataatcactgcaagggtagttgttcttcctttttctcctactcttcccttttccccttataggttctttgattcagacgtcagaaaataaagatggcatgactacatagtcttgtttttatccccatttcctgtgccattcctccatatggaaatgtaccctcaagtgctggctagaggtgactaaagtgaccaaaggtcacttttctacctcttcttcccaccccctcaaaactcccagattggtagctttcaacctaggaagactgctcccagtgctgtttctccctaagaaatgaaactctgaccgggactgttgcctgagga

SEQ ID NO: 177909 - DNA, 1037 bp, Homo sapiens
tgcccagctcccactgtgtctggtgcacacccaccctgacatccttttttatgcctcagctgtgatctagatagatgcttacagtaacttccctgtattagttattcacttgtactttctgttcacgtgtctgcctacaggctcccactttttgtcactttttctctttatacattatggaagctcagtaatgattaaatagatgaatgatgttttaaaaatatattttaaaacaacaccaacaaaacgcaactaaaaagaaaaaaaatttttgtgggggcgcgcgccctggcgccccaggaaaaggttttgaaaagcccattctgggtgggcggcggggggccccatgtggtagtttgagccttgggctcaaaccggctgggtgccaaagggaacccgttggccatgaaccagggtggtgggtttcctagccaagtaaaaaaaccggccgtcggggcaccgcgcgcttttttgagaccaaacccccagagtggggcttcgagggggcatgattcgggggtttcattacgaccggggtgtgccaaggggacgccaaatatcaaattagaccgcgcggcggtggggagacattaacaaaatagggtctatcagtaagggcataactgacgagactttgaaccacgaacaccagcggtttaatcggtcccaatgaatctacatttgaacgggcaaacactatgtctcagcagtttgacgtttaagtgactaaacagaggtagaaaagtagtcctgtatccactggagaatatcatcccagttataacactaccagcctgaggatctagacaagctggcacagagttcggaagtccaatcacagtgggcaacatttggccagtcacaccacaacgtgatagcccgggcccagaaacacgttgaacgaatgcattcccccccacgaacgctgcagctgccgggaacttgggcccgacagccagggcaagcaacagccgcaagcgggaagtcagaagccgaccaccaatcgcgaatagacccacgaaaaacgcaccataaca

SEQ ID NO: 177910 - DNA, 332 bp, Homo sapiens
ctctgtttgatgtaacgaagagcttgaataaaatggtgttggagtttctgccagcatacaatattctagtatataattccaagattattaaagaggctcatagtttctttctatctttctctagctcatcccactccagtagaaggtttgcatttccctaagacagctcccttcatcattatgctcctgcctatccttgctcctgcacaccaaattggctcttctaatttcttatatatacagattatatcataatctggtttatttctgagccaagaagcaagttgcaaaaacccctcatctccagttcagtcagacttgaggaattatga

SEQ ID NO: 177911 - DNA, 320 bp, Homo sapiens
aaatgactggctgtaacacatgagccctggaatttctgtggcttaacaattaaataattatttctcactcatccagttgtccagtgtaagacttagggacccctgagcaggcggccagctctcagcaaagacagcacagtaccagggaagggtcacaggaattttggcacatggccagctggttccactgcacctgcccagggacgctggtctccaggctcctggcttctcagcctcagcacagatgtctgcatccccagaattttaagggaggctgctggaagccggggcaggaggtgggatgagaatgaagcttttca

SEQ ID NO: 177912 - DNA, 379 bp, Homo sapiens
ccacctccccacagagtggttcttctttctcctgtgggctctgctccctgaggccttgctgtccatgtgtcactcatgccccaagctgtagagacagaaggtgttgctccacacttctctggctgtgtcccgtggtcttgctggtcagtttcccatgtgtctctcaagtttcccccatttcttcactgcctggatcctacatgcctcccggctgctatctctgcacccggcttcatcttccttggagcctcatgcagccggcacaaatgaggattgaaggagtttttgtccataacccggggtcctgatgacacccagccccgtgcttttccaatcacaatgctagcatcattgttatcatatttgcttgttggggctg

SEQ ID NO: 177913 - DNA, 150 bp, Homo sapiens
ccaatctcatttggtaaaagagaccaaaatgatgagttctcaactctgtacccaattcaggtgaccctctcaggcttggggacaaacctacttgccactcgccacttacccacaactgcccaccctatcattttcacttacatacacact

SEQ ID NO: 177914 - DNA, 159 bp, Homo sapiens
aaaaagctcctcccttataaatgcatgatactcaacaaaatgtttccagcacttataggacaaataataaactaagtttcaaaatacaagaatttagcttaataccttttataagaccaagaataagaataagcaaaaaatgcttttagctctataatt

SEQ ID NO: 177915 - DNA, 164 bp, Homo sapiens
cccattctatcagttctttgcagaagggaacctgactactgaagcctgcgatagaattctttatttgctttttaaattttactctaaatagaatttactgtttacaacaggcaattccctgacagctttcttctgggcagacatgaaaatacagtaagagctaa

SEQ ID NO: 177916 - DNA, 359 bp, Homo sapiens
cttcccccatccccccacctactgcaagggccacacctcagcacctgcctctaagcctggccctgctggtagcacccagcacaagcagggcactgggagagaactggggaggctggctctacctgccagatgaagacgccacacaaggccacggtcactcggctggtactcagttagcccttcctcagtgacaaatgcttgggcccaaggaggagaggttagaagggtaattggggccttgcagtgcagtgtctgccactgtgggagctttaggtactcagaggaggaaaacctcccaggagagccatggcagctataataggagccagcactcccacccactcctaggccatgctctg

SEQ ID NO: 177917 - DNA, 522 bp, Homo sapiens
gccaagagaaaaacactctgacattttgtgtatactcacagttttccttggtttgaacttcaaacactgatgtgaatcatttgcatatcatctgacaaggctacctacttgaaagagaataaacatgaatctttggtcactgttaagtgaaaacagaatgtttatgcactaacgtttgctatgagaaagagcttatgaataaaatttggtagaatgggtaagattaaagagagactcattacaccacaccatccaattcatacagcaggaatttcccttaaattctcaacaattgattacatctagtttctaatgtttcagggaatcacactgtttccatttgttatttttgtaaacagaacggtgtgcaacagtatgaactctttgtcaaagcagtgacttgaaaaatactaatgcgcatacatgtgtgcatatatctattcagaaatatagacaactgatagagaaagatggatattgatatagacatatatatgattcagctgaacaaaagtatttttg

SEQ ID NO: 177918 - DNA, 349 bp, Homo sapiens
agtgaaaaaagctggccataaaattatttggttctactctcatcttaaatagtttaaatacacagatatacaaatagcaaaaatttattatatacacacacataaatgcaaaaaggaaacaggaaaacacatgaaaacatcaacagttgtctctgagcagcaggatccgtaagttctacaaatactcgcaaagcacctactctgtgccaggtacttttctagggtctgggaatatgtcagtgaattaaacaaatgtcctgccctctagagagagaaataccacaaaaagagaagaaataaagatggaacataaactcagaaaatatcatgaaaaataaagtagggtaag

SEQ ID NO: 177919 - DNA, 409 bp, Homo sapiens
atcacaacgctaattacggtctcttatttactagcaatagaagtctaatgttgtggcgttctcaaggattcaggaatgttattcaaaagcattttgagctccatttgcctttgatgtttgcctccagtttctgaaatttgcccagatgggggaaggggatagagggggtggtcttactatttcctgaagcacaaatgccgcagcagagcccttttagggacatcttgattctattagaatttgcaggtcaaagggcaggttcaactggcctggtagtttaaagcaccagggatagagtgaatagactactgtaatgacttaaagttggatttctgctgctacctactcattatgctaataatgtgcatgttggtcatgtgggcggggggattactaatactttgaaagg

SEQ ID NO: 177920 - DNA, 634 bp, Homo sapiens
tcaggaggtgattgagtgagtggaaggaagtcaggtggtctggccaagcttccccagtggccaaagatgtaaagactaagacccattttgaggactattctgggcaaatttataaagtgtctatatgtgtatttggagcgagagagtgtgttggtattcttgtagagcagctctctccaggagaaacagaccaacattttctcatacgagaaagccacctctatgtaacttaagattttttaatagctacatgtaaaagtagaaacaggtaaaatcagctttaatctattttattaaccccaaacagtccaacatattttcattccaacatgtaatcaatattcttaagaaatcaatgagatatttttatattcttttttctcatggttagtcttcaaaatctggggtttattttgtgatccatctccatttgtattaaccacatttcaagtgctcagtagtcacatgtggccagtggctattgagttgaacggtgcagttttagagcttaaaaggcaaagacttactggcatctggtttatacttagtgagaaaaagttgagtaatgtataacttgtaagttaaaatatttgatatctctatatattctgattttagctttgggcaaaattaa

SEQ ID NO: 177921 - DNA, 199 bp, Homo sapiens
tccctactagactatgggctccttgaaggcaggtgctaattcttactcattatgtccctggaagtgaacacaaactcattattatagtgccatgaactgctgatgacacagctgctctgagtgcccaccccacctgcctagtcattaaccagtttctcatcctacaggtatatgcaaggaatattctgcgttggctcag

SEQ ID NO: 177922 - DNA, 542 bp, Homo sapiens
tccccgtggaagagcccgatggtgcagtttctcacggtcttgtattgtggtcagaggagctcacacaacacacccagtgtactggagtttatgacagacttcattgaatgaggccttgacttccagggaaaaaaaacgcctcacacaaaatccataaaatcggtcatgggaattctcagaataggcctaagtattctttcagaagtgatggatgctttgctttgttttccaagtcacgactgggtgtaccattcttgtagcaagcagaaacatctcagcatggaatgagtattttttatgcaaaagcaacctgcagacttataattaccattattatgtgggttccacagacttgtggcctctgcttgagcattaaacacgtatgaacagattgttccggcatctaaaacaaatgtgttcttgtgtgtgcatgcatgtgtgtatgaccgtgcttgtgtacacgttcaaaaggctctgcacaaagggtaccaagggacaacaaaactctcccctgtgctaactggatggagcgagacgaaggg

SEQ ID NO: 177923 - DNA, 596 bp, Homo sapiens
tccccgtggaagagcccgatggtgcagtttctcacggtcttgtattgtggtcagaggagctcacacaacacacccagtgtactggagtttatgacagacttcattgaatgaggccttgacttccagggaaaaaaaacgcctcacacaaaatccataaaatcggtcatgggaattctcagaataggcctaagtattctttcagaagtgatggaacatagctgttcacgagttccatgtggcatttggagctatgggctttcggtttttgctttgctttgttttccaagtcacgactgggtgtaccattcttgtagcaagcagaaacatctcagcatggaatgagtattttttatgcaaaagcaacctgcagacttataattaccattattatgtgggttccacagacttgtggcctctgcttgagcattaaacacgtatgaacagattgttccggcatctaaaacaaatgtgttcttgtgtgtgcatgcatgtgtgtatgaccgtgcttgtgtacacgttcaaaaggctctgcacaaagggtaccaagggacaacaaaactctcccctgtgctaactggatggagcgagacgaaggg

SEQ ID NO: 177924 - DNA, 266 bp, Homo sapiens
aagttctcacaactaacaagaatagtgtgttacatgtttgcaataatggcccccagtgagtcaggtccccgtctgcctatgcctttgtgtaaatctgtcccttccctgcaacctctactttgcaggtggctcttggaagtaacctaagatgactccacaactgagctcgtaacatgctctctctccctttctctcatactatgctcccttggggaatcttaaaaattctgttatcttggcccttttataacttcttccccattgat

SEQ ID NO: 177925 - DNA, 785 bp, Homo sapiens
ctaatgactagtgtcccacattggacaagataaaatggttgaccagttagagacataggaaaaagtggaatattgaatttgcattgaaagggctgaacttgtgaccttatgttatcttccatataattctaatttctacaatataaggttttaatttactcagttcagaaaatctaattgtttgacagtaaagtttggacctatttatataaagtttggaggaaatatgatcttatcaatatgcactatggaaaatgtcctttttagtctgtgaatttagagctatacctactgcttgaatgaagatggtctaaagatttaaaagacatttagggttaataagttttcatggcaaaacatttaacatttttaaactaaattcagatgagttactcattttttgtgtaccttaattccttccaaatactcttctgtcagaactacaaagttaaatctcaattatagtgcccttttttttatttagggaaataattatcatcattgattaatacattgtacaagggttaactgtcttttaaccatcagggtatagaaaaagtaagttggttaaaacaacttttaagtttattatggagataaacactattgtcatatgattctttagatttccttaaaaattgatctcctatgccaggcacagtagctcatgcctgtaccctagtactttaggaggctgaggtgggaggatcacttgagaccagcagttccagatcaatcttggcaatacagtgagatcgtgtctctactaaaaaaaagccaaaaag

SEQ ID NO: 177926 - DNA, 449 bp, Homo sapiens
cactactctacatatctgttggcctgtagcatacttactgcagaacttgtagcttgatagcccaatgtgttcttgggttatgattctgaaatactgctgagctttaaaaactttagcagctttgaccagaacacctacgttaaaatttctttataactcttcagaatttttttctttttctttttttttttgagacagggttttgctctatcacctaggctggagagtgaagtggcataatcatggctcactggagcctctaccttccaggctcaagcaatgctcctacctcagcctccacagtagctggggccacagatgtgcaccactgcacttggctaatccttaaatttttttgctgaggtgggaggatcacttgagaccagcagttccagatcaatcttggcaatacagtgagatcgtgtctctactaaaaaaaagccaaaaag

SEQ ID NO: 177927 - DNA, 146 bp, Homo sapiens
aagatacagcaataaggaagccagtccagagacatttccttatcacacagttaagaggtgagaaatggaacttgggtttataactagtaccactttgtatcatttagaatgcatgtagttgcaagaaacagaaaaataaacccaaa

SEQ ID NO: 177928 - DNA, 729 bp, Homo sapiens
ttcccccaaaataacttagttgctggctaactggagaaaagtcacaaattcttacagtggatttgttgatttatttttttgtctataactaagcagtgctataatgaaagcagccatcctttctcaaactggatagtagtgagattcattaaatgagatgctactagaatggcttatttcagaaagataccattgcttgaccataaatgttagatatctataaatatgaaattttggattcatactcagcatgcagttccaagcctagcaggaaatccaaaattcctaaataaaaagatttacagataagtcttttttgttttgttttgtttgtttgtttgtttgtttgtttgtttttgagatggagtcttgctctgtcgcccaggctggagtgcagtggtgcgatcttggctcactgcaagctccgtctcccgggttcacgccattctcctgccacagcctcccgagtagctgggactgcaggcacccgccaccacgcccggctaatttttttgtatttttagtagagacggggtttcaccgtgttagccaggatggtctcgatctcctgacctcgtgattcgcccgcctcggcctcccacagtgctgggattacaggcgtgagcccccacgcctggccaataaatcttgtaagaaaatgaaaacttcttatattaagtgacaaagttgaaatgcaaatggcaaactaggagaacatatttgcaaaaa

SEQ ID NO: 177929 - DNA, 578 bp, Homo sapiens
gagtctgagtacgcccatttctacaaggcccaatgtccatttcatttcgagataaactctgctttaggtaggaggattgttggcagtttacggcttccatcaaggtcaaggaactctgtgcaccttccctatgaccccaggggaagcactcgaggactgctgtggcattgtgctgcatcacttgctgcagggagattctgaagaagtgtaaggtctcagtcctgccctgtcccgaagcctccaacccacttctggcaagtgggaccttcccagggaacaatttgttaacagacccaaatatcctgtgattggatggtggctgccaaatgctttggaagctcagaggaaggagagagagcaatggcttggaagaaccaggatataaactaggttctaaagtctgcagggagatgggcttctcagctggggccagtgagcagggaccttaaggcagaaaggagccttgcatgttcctggaaattgagatgcccactggggtaggaaagcaccagaagctctgggaccaggtgtcagagttaagcctgtgaggcaggagagagcagaacaagccctgttac

SEQ ID NO: 177930 - DNA, 542 bp, Homo sapiens
ttgggtcatgccctcaaagcctcttcacctgtccaatgtccctgagggactgctttttgcaggtagggccccgaggtgggcccctggggtgggacccaagagcgaaagggaatctatcgcatcatttctgtcgccttcaccagcaccttgggtccatcactgagtctggggggttctactaggcaagtgtctctggcctcacccagacaccatggccaactctagccatcactccaggcgcaagtgactgggttaccttcaggtgtgaccacacctgtcaccttttgcaggtcggtgccaacagttctccaaacaggagctcaagccaccgtcccacttgccctgtgaagaaggaactgttatcatcacattttacagaccaggtaactgaggctcagagagggtaagtgactggcacagctggtaacaacagagtcagggtttgagcccagtctgtccagttccaaatctcccctttagtagctttctggacatcaagtggtcatcctgcaaccacaggtagccaaagagcctctctaaag

SEQ ID NO: 177931 - DNA, 216 bp, Homo sapiens
tgttcttgttctttagaatattatgattaaaatgaatcctgaatttgttctttactaagaagagggaaatgataaggaaaaagtgtatgtccaagatccagtccccaagccctccctttcaggatggtcagtggccctgcctgtcccttgtcctgtctgccccatgggcccatagggtcccatctatcaccatgcctggtcccaaacccggaaaga

SEQ ID NO: 177932 - DNA, 293 bp, Homo sapiens
tcttttgagttccagcccaccctcttcactgacgtatgaaagcggggttaaaaccacctatgacctcagaccaaatatgaaagtataggttgatagttcttagccgggttttgcggtgtgtgagtgagtatgaggacttcgtggtggtgaaatgtgcccgctgggttttcagctctctcgggtttccctgggagagcctatccgaacccagattaagaaagtcagagggaaccatgggtcttttgagaaagatccaagctgatttggaaatacccctaagatctatgttaaaa

SEQ ID NO: 177933 - DNA, 361 bp, Homo sapiens
gcagaggcatctctccttcctccagactcccagcctctgggattccctcagtctcagcactgattgcataagctgttcctgtctatgttccccattatactgagagcaccttaagggcacgacctgcatctgatctatgttcccaggatccagaggcagcatcaaaagtgaggagacctgaagcagagaggtacaggcagcagcaaacccctctgaaaaactagttggaatcacaccccagtcagaccccagatcttgactgtgccacagaaccatgacttatccccatgggtgtccctatcaggtatccctatcagtgtcctcagaccagagatctcccagaagaggcttgcaagctccg

SEQ ID NO: 177934 - DNA, 299 bp, Homo sapiens
ctaaccagaaacaaaaggaataaaaataaatattagaaatgtctgtggaatttaaaacaaaggcaaaatccctctggtcttgaagatttgacaataaaaaaattacttctattacctgaccacaaagtggaaatctacttaaaaacatacaaaagagctttcttaaaataggcactcttgacttcatgtggaaacatattaatgaatgatcaaaattagagtttttcagcaaatgctatcccaaaccctgggaacccaccctaagagagaaggagcctccctatcccagaagaaagtga

SEQ ID NO: 177935 - DNA, 144 bp, Homo sapiens
tggaggttacagtgtaccgagatcttgccactgctctccagcctaggcgacagagcaagacaccatctcaaaaaaaagaaaatcctgtaagatgaatttgttcctttatgaagaataaatttgtgtctgccatttacaccgtga

SEQ ID NO: 177936 - DNA, 329 bp, Homo sapiens
accagccccactctgttcccatgggattaatgggtcactcaggcccctcccttgccctggcactcaggtgggcaggagcctcggcctgcggcactgggagcaggaaaacgggttagaccaggcctggctccaaactgccatcctaggcttgcctgtccgtcaccaacccacagtctgttcctcccctcaggccttggggagggggcctccagtggtgagggtgccaggtctggagcagctgcacagccacactgggatctctgtctttgagcctcacccatgtttccagtcccactctgaagcagcccctccctgctgtaccgcccagt

SEQ ID NO: 177937 - DNA, 433 bp, Homo sapiens
ctctatccttaatcttgttttgattgcttccaaatggccaagaggtgaaatggacgccttctcaatactgcttcacctgacatttcctcaacaaagcaatcctttgtggtggaaaaagtcataaaaatactcttctcaaggacctgaaaaatctccaagaaaggaaaattacagccagaatactttatttactccgttccactcaggcaggaggaaaagggaactccttgcaacctcctaatgcaggtcctgtgctgacttcccttaatccttccctgccccttccttccctctgtccccgatgccccagtagacagctatgttgcttctatctatgcctgttaccttaggtcgggtctccacatcctggcttctacctttcagtacataatggtgtgctgtctgctctctgtgccgttaaatggcattaatt

SEQ ID NO: 177938 - DNA, 707 bp, Homo sapiens
atttattattttaaatgttttatagagatggggggtcttgccagtacaggctggtctcaaattcctgggctcaagcaaacatcctgcctcagcctcccaaaatgctgggattacacaacaatgccctaaaataagactttcaggtgaagcttatgcatgtctttcctgcttggtgagtagggtatgattagagttggatttttccatcccatattcactctacagaatcaatttagtgttctgcttatctatgggacattgatgtcatgtgatgggtgatgtcatgtgatgggtgatgtcatgtgatgggtgatgtcatgtgatgtgtgatgtcatgtgatgggtgatgtcatgtgatgcatgatgtcatgtgatgggtgatgtcatgtgatgggtgatgccatgtgatgggttatgtcatgtgatgggtgatgccatgtgacaggtggtcatgtgacaaggtgatcctgtgatgagtggtcatgtgatgggtgatgtcatgtgatgggtgatgggatgggcgatgtcatgtgatgggtgatcatgtgacaggtgatgtcatgtgatggacaggacatgactagggagcgtaatgcttgacgtcaagacggcggaggacctgctatcagggatatcgtccaatcgatgaaccattcgcctaatcagggcttttggaggctgaaggcatttgaggacttaatggccct

SEQ ID NO: 177939 - DNA, 694 bp, Homo sapiens
atttattattttaaatgttttatagagatggggggtcttgccagtacaggctggtctcaaattcctgggctcaagcaaacatcctgcctcagcctcccaaaatgctgggattacacaacaatgccctaaaataagactttcaggtgaagcttatgcatgtctttcctgcttggtgagtagggtatgattagagttggatttttccatcccatattcactctacagaatcaatttagtgttctgcttatctatgggacattgatgtcatgtgatgggtgatgtcatgtgatgggtgatgtcatgtgatgggtgatgtcatgtgatgtgtgatgtcatgtgatgggtgatgtcatgtgatgcatgatgtcatgtgatgggtgatgtcatgtgatgggtgatgccatgtgatgggttatgtcatgtgatgggtgatgccatgtgacaggtggtcatgtgacaaggtgatcctgtgatgagtggtcatgtgatgggtgatgtcatgtgatgggtgatgggatgggcgatgtcatgtgatgggtgatcatgtgacaggtgatgtcatgtgatgggtggtcatgtgatgggtgatatgtaatgggtgatgtcatgtggacggtggacacagtatttaggccctatttgcggcccttcatccatatggttgggccatcatattcgtggtttttttgcgtcg

SEQ ID NO: 177940 - DNA, 663 bp, Homo sapiens
atttattattttaaatgttttatagagatggggggtcttgccagtacaggctggtctcaaattcctgggctcaagcaaacatcctgcctcagcctcccaaaatgctgggattacacaacaatgccctaaaataagactttcaggtgaagcttatgcatgtctttcctgcttggtgagtagggtatgattagagttggatttttccatcccatattcactctacagaatcaatttagtgttctgcttatctatgggacattgatgtcatgtgatgggtgatgtcatgtgatgggtgatgtcatgtgatgggtgatgtcatgtgatgtgtgatgtcatgtgatgggtgatgtcatgtgatgcatgatgtcacgtaaacgggtgaggtaaaacgtcgaaagtctctataaaatcaaaaatattccccaaaatccttttgacatacgcataacctcgaacaagagcgcacttttttaaattggaccccaactgaaattttaccgtttttaggcgaaggccccaacaaacccatcaccctatgggcctcttgggccccgtccccctaccccttttttggccccctggggcaccccccttatataccccctaataaaccccccctttctttctcattgtgagtccagcctggggggcaccttttcttcc

SEQ ID NO: 177941 - DNA, 327 bp, Homo sapiens
tctctcttaggatttgatacatcagtcaaatggaatgacattttcaaagcagtgcttctaactgggcagtgcccaggcttggtcaatggccctgactgcctactatctgaagctagcctatgacgcaggcctccagacctggcagaaaagatttaacccagctggaatagatcaattcgtttaagttttttcttttcacaagctgtcagttttgccaactttttaaaaggtgacacttcaaagcaccaatatttttttttcaacaagcaagatgtgatcctgcattcttagccctgctttttaaaattaaatgactaatgaaaacac

SEQ ID NO: 177942 - DNA, 303 bp, Homo sapiens
tctgttttattgatccatttgtttatccctaaaccagtaacaaactaccttaattatagtagctttactgtggtcctgctatctggtaggtaggccaagtctcctcatcttgtcttcaaaattttgctaagtattttcctgttccttcacttctctatatgaagtctacttctagaactgaattatcaagttcctaattaaaccctattgaaatttaagtaaaatttaaaaatttggggatacaatgtctactttataatgctgtgtgtgtgtgagacagagtctcgctctactgcccaggct

SEQ ID NO: 177943 - DNA, 162 bp, Homo sapiens
ttagtacctaactttcacattctaaaattactcatatgcacaaaactgatacagctttggaaatgaagatggccgactatcttctgtgttttaagaaatgatgtgtttacccttggtaaaacgccaagtgcttttccttttatctggactgattacaactta

SEQ ID NO: 177944 - DNA, 171 bp, Homo sapiens
ggaagaggaaaaacaagaacagaggaaataaactaaccaacctaaagggctcatcctttaggtggataactagggagaattggagcacgggaaattcagtgtggaaactttttcatgtcgtatgtctagaaaaggcacagctatcagaatgaatttagaacttctaagtaa

SEQ ID NO: 177945 - DNA, 473 bp, Homo sapiens
atggtagcaagaggggaatctgtgtgtatatgtgtatgtaggaggtactgaactgtatatgggaactctctgaactggctgctcaattaagccaggcatgttggctcatgcttgtagtcccagcactttgggatgccaaagcgggcagatggcttgaacccaggagttcaagaccagcgtgggcaacatggcaaaaccccatctctacaaaaaataacaaaaattagccaagtgtggaggtggcaggtctgtggttggtcccagctaccccagctactcaagaggctaaagtgggaggatcacttgagccagggaggtcaaggctgcagtgagctgagatggtgccactataccagtcaataagaattgatcaattgactgatcattgaatgccatcagtcagtgatgtttttactgatcagctaagaaatgagtattttttttttttttttttatatggagcctcgctgtgt

SEQ ID NO: 177946 - DNA, 400 bp, Homo sapiens
cacacattggttatctgcaaaacatgtgttgacacatttcattatataaccttaaaaaaatcatattcactaatgtcaccattaatgaaaagtctaagtattgggaagctgccaaacctttgcgggcagatacaagttttccaaaatcctaacttttgttcaaaagctcaaatgtaatcatttgctacaaattattatcagctgttttccttaaagtaataggcttactccattttcaagaaaatgtttgccaataaccatagtttgtcagtcattctctcaaggaaaaatgacattcaatgaaaaaagtgactagtttttagccccaacttaaatgacagacgaatgtttttcctggagactaccaggaacagaagtgctttattcccatttcatcaca

SEQ ID NO: 177947 - DNA, 594 bp, Homo sapiens
gtgacctagaggatcccctcgaatcgacggtttctccatgttggtcaggcttgttcgaactcctagcctcaggtgatccacccaccctcggcttcccaaaatactgggactacaggtgcgcgccactacacccagctaatttttagtagagatggggtgtcaccattttggccaggctggtcttgaactcctgacctcaagtgatccgcctgcctcggcctcccaaagtgtgctgggattacaggtgtgagccactgctcctggccaggaaacaattttaatgacaagagtattgctacttacagaaaactgttctcagttgactaaccttatagaaattttatggtgaagtaagaatgaaaatgagaaataggataatcagtgaggagtagtggcttactcatgtagttctagctactcaagactaaagtagaaggattgcttgagctcaggagtttgaatcttgcctgggtgacataccaagagcccatcttgagcaggggtggggcaaaagaaaaaggaaaattatttgtttctggaatttaaccttagaactaaagtacagaggaaaaaggaagaaaactgagagacatc

SEQ ID NO: 177948 - DNA, 417 bp, Homo sapiens
  misc_feature (1)..(1): n is a, c, g, or t
nctatttaaatgctgtatgatgtggccggcgcggtgctcggcctcccaaagtgtgctgggattacaggtgtgagccactgctcctggccaggaaacaattttaatgacaagagtattgctacttacagaaaactgttctcagttgactaaccttatagaaattttatggtgaagtaagaatgaaaatgagaaataggataatcagtgaggagtagtggcttactcatgtagttctagctactcaagactaaagtagaaggattgcttgagctcaggagtttgaatcttgcctgggtgacataccaagagcccatcttgagcaggggtggggcaaaagaaaaaggaaaattatttgtttctggaatttaaccttagaactaaagtacagaggaaaaaggaagaaaactgagagacatc

SEQ ID NO: 177949 - DNA, 277 bp, Homo sapiens
  misc_feature (225)..(225): n is a, c, g, or t
  misc_feature (227)..(227): n is a, c, g, or t
  misc_feature (246)..(246): n is a, c, g, or t
  misc_feature (248)..(248): n is a, c, g, or t
  misc_feature (270)..(270): n is a, c, g, or t
agaggagaatccaaaacaggaagagactgagctggctggtggcgcaggctacattccatgccccagaaggttgaaggaatctgtgaatctgtgacagaagcgtcaacttgagtttatgagagtgtagtggggggcagatctaccacgggagagtagatttgaagaagtctttttttttttttttttttttttcccccaaaggggggaggggtttattttgggttngnaaaaaagggggcccccggntnaaaggggtttggggggcccccnccccaaa

SEQ ID NO: 177950 - DNA, 272 bp, Homo sapiens
tcagaggcagcccgttcccacgtcagaccactctcctttgggaaaggagatctccctcagggggaacagaaaagtaactcctggaaacttccactcatgagtgccaggcatccaagcacctagaagtgaactcaaatgccacttcctcaagcgtgccctccaccagccagggagctgcccacccagcagagtctcaccttaccaaccatcatttgcattgagttcatcacccctacctgtggaatgaaaggcgggtcccaggtgagaaggca

SEQ ID NO: 177951 - DNA, 382 bp, Homo sapiens
gctgggtgtgagccccaggatcccaagatacccgcaatgtaactgcagttgggttctgctatatgtgacactgccctgagtgaggcctgcacttagctgcctacctgggcagatgcttgcatgtgccgacaaggtggtaaaatatactgtctttgcagcaggtccctcatggcatggtaggaagaggatggggcagacagactcagtttcaaggcctggcttggcctttgagtgaagaagggatctcccaccatgtaacctgagagaaggggggatgggacaggtgtgggtaagtctgtagatgttgggaagcaaatgaagaagttacctctgatggcttccattttttccatcaaatatgatgtagtgtggagagtgggct

SEQ ID NO: 177952 - DNA, 318 bp, Homo sapiens
gttatgattgtgtcattgcgcaatcattgtttcactgggctactgagcaaggctctgcctcaaaagaaaagaaaaaagaaaagaaaagaaaagaatgcacacactatgctgaacactttatgtatgtaatttccaaattctcacagccacctagtgtgagcttgtccaacccacgccccacggccctggcccaggagagctttgaatgcaggccaacacaaattcgtaagctttcttaaaacattataagatacgtccgggtgcggtggctcatgcctgtaattccaacactttgggagggaggccaaggtgggagga

SEQ ID NO: 177953 - DNA, 648 bp, Homo sapiens
gtgagagcctcgtgcaggcaggccttcctcaacgtggtgtggagaagagtgacccctggtcaccagtccttgttgcgatagtgaacaggctctcaggggcctgggtagcatttctggctcctctgctcatccttgtagagatagacatcccctaagcttcactgatttaccagccagaaaggggcaggtcatgttcagaacaacactttctataattaccaggatctgattcgctgtattcctttgattttaaggaaatcagctgtaagatgtgtcactgaaaacaactcttttggaataggaaatactaccacatgaagtaaatacacctgttgtgaatatacatataagagtcacctcataaggccgggcgtggtatctcacacctttaatcccagcactttgagagggcaaggcaggtggatcacctgaggtcaagagtttgagaccagcctggccaacatggtgacaccccatctgtactaaaaatacaaaaattagcccggcgtggtggcacacgcctgtagtcccagccactcgggaggccgaggcaggagaatttcttgaacctggaaggcaaaggttgcaatgagctgagatcgcgtcactgcactccagcctgggtgacagagtgagactctgtctcca

SEQ ID NO: 177954 - DNA, 610 bp, Homo sapiens
gcaagcaagcaggatacaagatcaatacagaaaaaccaacagtattttatacaatattgaaaaatctaaaaatggaattaagaaacaacatttacaatagcatcagaaagaatacttaagaataaacttaacaaaaaatgcaaaacgtgtactctgaaaactacaattgttgaacaaaattaaagaaaatctaaataaaatggaaaaacattccatattcgtaagtctgtagacttaacagttaagatggtgttgggcgtgggggcatgcacctatagtcccagctactcaggaagctgaggagagaatcgcttgagcccaggagttcatggctgcagtgagctatgatcacaccactatactcagcctggcaacagagcaaggcctcatctcaaaaaaaaagtatatattgtcaagatggcaacatgccccaaacccaaattgatctatagatgcaatgtaatccctatcaaaatcccagttggcttctttgcagctatcaacaagatgatcctacaattcatatagaactttgggggactcagaacagccaaaacaatctgcaaaagaatgaagttgaacgatttacacttcctgatttcaaatcttc

SEQ ID NO: 177955 - DNA, 222 bp, Homo sapiens
ttttgaaacagatataaagaatttgcaaattatattaataaagttgctaaaaaagcaactttttctgggagatttcaaataatgttacaaaactgagacttacaatagtaacaattttataatttatgtgaattggtgttaatgttttgaattacatactgcagtccatagacagtggtgaatgccagctgttgatctgacacgctagctatttctgctata

SEQ ID NO: 177956 - DNA, 485 bp, Homo sapiens
atctcagaaatcaagaatggtagctacagcccagccaggcttcccagagacaagagctggagggcatcccaggagccagggcagctcaaggcacttcagtggcggccatccccctgtcttcactcctcctgttccttcctcttcatgtgactcagccacaccccttctctcttctcctgccagttcttcccatgtttcttagttcacatgcctaaaagcagagcctgatggttcatcttttttctcaggtcatcacaggtcacatgccagcctatgggttggttccaaggatccactctaagaccaggcataggggaggcaaggttcacatggtccaaaacatgggcatcttaccccagggctgtggtcaggacagtcttgctaagatgaaataataggtgggacgcagcttgggaagtgtggcctgccccatatggctactgctcaccaggcatcgtgctggatggaggggccacagatggggt

SEQ ID NO: 177957 - DNA, 328 bp, Homo sapiens
aagggtgcagtgagccaagatcatgccactgtgctccagggtgggtgacaaagcaagactccatctcaaaaaggaaaagaaaagaaaagaaaattcattcttctccaggcattaacttctcttcttgctctacattcctccctagaccgttatcattttaagccattatgagacccgctcggggcatgcaggtttctcacaatagaggaaagcctctgtctttccttctgtttccagacctaggtggccatgtaagcaatatttcctcttgaacatctcaaagttacccaagtactaaatccaaaaccaaacccatgatccctttcat

SEQ ID NO: 177958 - DNA, 294 bp, Homo sapiens
ttttaaatcgcaagcttggagtgctatttcttactcatatttaacgttacagagttttctcttctttggtttaatatttgtagctcgtttctcttaatgctagaaatcttggttcttaacaacagtatatttatttgttaaaacagtttcatagtatcaaaattatcactactaggggagcagagggctcacacctgtaattccagtgcatcgggaagctgaggcaggaggatcgctccacgtcaggagtttgagagaagcctgggcaacgcagtgagaccttatctctacaaa

SEQ ID NO: 177959 - DNA, 530 bp, Homo sapiens
agaggaaaatcagggataccgttgctggaagaaagaggaatagaagcagcaaggaagaaaggcagaggcctgaggtccacgtagaagcagcaaggaagaaagaggcagaggcccgaggtccacgtagaagcagcaaggaagaaagaggcagaggcctgaggtccacgtagaagcagcaaggaagaaaggcagaggcccgaggtccacgtagaagcagcaaggaagaaagaggcagaggcccgaggtccacgtagaagcagcaaggaagaaagaggcagaggcccgaggtccacgtagaagcagcaaggaagaaagaggcagaggcccgaggtccacgtagaagcagcaaggaagaaagaggcagaggcccgaggtccacgtagaagcagcaaggaagaaagaggcagaggcccgaggtccacgtagaagcagcaaggaagaaagaggcagaggcccgaggtccacgtagaagcagcaaggaagaaagaggcagaggcccgaggtccacgtagaagcagcaaggaagaaag

SEQ ID NO: 177960 - DNA, 247 bp, Homo sapiens
cttgttatttaaatgaataaatactttaaaagttcttcagttataatttccaatgtagtggatattggtaagcataatgcatgtaagaaagagctctttggagtgctcaatacattttaagagttttacaactcgtaaaggggtcctgagaccaaaatgtttgaaaacttgagaaatcctgcttgagaacagctgccccaagatgaagtagacttttcagtggtggtatgagctgtccatgcagcac

SEQ ID NO: 177961 - DNA, 416 bp, Homo sapiens
caaatattgttcctattccatgctcgtctctctttctgagcaataactataattcaaactattttatcatgttccaaatatctcttactttatgttactgttttcttccctgcttcggtatgtaaaatttttattgacttatctttggggtcactaattctttattctgttgtacctaatttttaatattaaaaatttttaattttaattttaatattaaattagtattaaaattttaatattattttaatgttatttttattaaataatattaatattttaatgttatttttattaaataatattaatattttaatgttatttttattaaataatattaatattttaatgttatttttattaaataatattattttaatgctatttttattaaatattaatattttaatgttatt

SEQ ID NO: 177962 - DNA, 441 bp, Homo sapiens
gaaaacaggagtgctctggatgcaactatgaaagaacaagaggattccttctagtgacacaattgttctgtatcttggctgtattgatgccaatatcctggctgtgatattgtaccacagttttccagatgttatttggggaaaatgggtaaagtgaacacagtacccctctgtatcatttctcataactgcatataaatctacagctttctcaagataaaaagtttaagaattttggttttgcatacaaattctaaagcagctggaagaaaatatacccacgattaataattatttaagtattccctcttgacggcatttggcagtagtcttcattttcaaaaacctattgacatagctaatacattttcaaatagattctttatttttaaaacaatacaaaacttttttttttttttgagaaaaaagtctcattctgta

SEQ ID NO: 177963 - DNA, 182 bp, Homo sapiens
cctttttatcactaaataatattccattatatggctataccacagtatccattcacctgttaaaggtgaatggctaaacaaactgtggtacagccatgtaatggatgctgtttttgatgtatgtgctgccagtttttggtgatttgaataaagccgttataaacatgtgcatgcaggttttt

SEQ ID NO: 177964 - DNA, 799 bp, Homo sapiens
ggacagcgagggcctgggaaacgcgtggaacacacgtcccggctcgttttcctctcccactctgataacctgtgtttcgatacgaaacgggccctgcctcattatttgtcatctccctggaggtgacggagggctgtttcaacctcaggggaaaagttgctgtacagaacacaggccagagtgtgccccaaagaaatcaggcggtggagtgatttaaaagtgatcattttctgtagtcctagctactcgggaggctgaggcaggaaaatcgcttgaacccgggagaagaaggatgcagtgagcagagatcgtgccattgcacttcagcctggcgacagagcaagactccgtctcaaaaagaaaaaaagtgatcattttcatgaatgctgcctctaaggtccctcctgctgacaatggccagggcagtgcggaggctcctctttggaaattgtcttcagagctgatgcagactcttttgaaagcagccacagacattggggatggagtctggtggttaaggacttggactaggaagatcaactgggcacggtgattcttgcacagatttttataaggatcctccaagtgtaacaaccatttggaaaactccgggccttgaggacagccagagaagataagttcaacttgcactttgccagagcaggggatctccctcagctccctgcttcaaactaacttacagaactgcctggctgcactgagcacctttcttccttcctattcccactaaggaggtgtccctgcttccttcatagtgggtccttcccctgcaccggga

SEQ ID NO: 177965 - DNA, 266 bp, Homo sapiens
cagttgagatgaagtctccctctgtagcccacactagaatgcagtgagctaagattgcaccattgcactccaccctgggcgacaaaacgagagtccatctcaaaaaacccccaaaaacttagaagctatttccagaagaaagggacaggcagaagtaacactgccacccttgcagccttttaccttgacattctgactcgcagccttatgaatggttctgagaacctaacaatctccctcacctttccaatggtgactcactaggt

SEQ ID NO: 177966 - DNA, 575 bp, Homo sapiens
gattctatcttagatgtaactttccccaggaatccttctgtgttccccttccctcctaccctggctgagtttgaagtcatctgtgcttccacaggttcctatgaatatttccatcgttgcttttaccacattattttgtattttgtgtttgtatcttctctactaatctgtgagttccttgagggtgtcttcatctttttatccttatggtagacaccagacttacgttgagtagatggatgagtggatgagtgaataaatcgggatggaatgtagtgagaaaaaagaccataaaattagatggagccaaattatgggaggccatagaggtcatactgagagtttgggttttgttttgtagagtagcagtgaccaaccagtggctcatgcctgtcatctcagcacttggggaggccaggacaggaggattgcttgagaccaagagtttgataccaggctgaccaacatagtgagaccccatctctacaaaaaattttttaaaaaaattagctgggtgtggtggcacacacctgtcgtcccaattacttggcaggctgaggcaccaatcaccacag

SEQ ID NO: 177967 - DNA, 559 bp, Homo sapiens
ggcaggcagatcacttgaggctgggcgttcaagaccagcctggccaacatgatgacaccccgtctctactaaaaatacaaaaattaactgggcgtggcagagggcgcctgtaatcccagctactagggaggccgaggcaggagaatcgcttgaacttgggagacagaggctgcagctagtggagatcgcgccactgcactcaagcctgggcggcaaggtgagactcgcctcaaacaaacaaacaaaaacaacaacaaaaacttagctggataacttagttatccttgtgtttatctgctgaatctgaccactctattcaaggtcatctgatttctaacgtctggctgtcccagatggggacctggagaactagacagggaaagtgaatgaactggttcctgcagagccacctcccagatgaaatcagagtaaccccatggaggtcctgagtcacggtggcaccttgccctgcttgcctaacaaagacctcctgggaggaggacccagaagagggcagggctgaagaagagtcacagctgaagaatgtgactgtttgcca

SEQ ID NO: 177968 - DNA, 403 bp, Homo sapiens
cctctgagttccttagggctactgataaagtttggatgtttgtccctacccaacactcatgttgaattgtaattcagcatgctggaggtggggcctggtgggaggagtttggataataggggcggagcctttgtggtttggtgctgtctatgccatagtgagttcctatgagatctggtcatttaaaattgtgtggcatccctcacctacccccacttgcttctgctttgccttctgccatgattgaaagctccttgaggcttcaccggaagccaagtagatgccagcactgtgcttccagtatagcctgaaaaactgtgagctcttttctttataaattacccagtctcaggtatttctttatagcaatgcaatcatggcctaatatagctaccattacaaa

SEQ ID NO: 177969 - DNA, 517 bp, Homo sapiens
catcatgggggagtaacatcacagggccttgtgacatgacatcatgagaccaggcatcaacagacaggtttatcattaaagtaacaaaagcaaaaaaacatcaacatctccctgaaaaccaggctacatatcccaggtggctcgttttcattcccctccaggcaccctatctcctttaggatgttatgggtatgatttttatcaaagaacagtacgcaactaactactacctaggaaggcatcaagatgtcaaaacattttaacaaatacatgccaacaggataaaaatcctattctgcctacgtcatgattttaacaaaccatgtggatatattttataaattcaagcaccaatataatggcttaacttcctaagtgactaaacatttcaagtattttaaggagaggaagcataggtctagcaaagcacatttggggtgatgatgtgctacagtcagcatattctctaggaagcccacagcaacatgctttttcttttttttttttgagacagggt

SEQ ID NO: 177970 - DNA, 502 bp, Homo sapiens
agcaaactaaaagaaacatctttagcgctggacttctcagaacctggaatgtggctctatggctcataaaacagcaaggttaagacagagcatgtcatttttttcccagaaatgttgaaacactttccttcccttggcttcagtgtcacctttctcctggttctccatcaacctcttaggctgctccttcttgatgtccttcttgacaatctgctgctgctcagccattctcttttcattccccatggatttctcaagtgtgtttctattcctgcatattaaactttccttgtttttcctgacacttctccttgtctgaccctcccctgttctaaggcaggtgttccatctgtgtgtgcttttgtcatcctgggatgctcccagcatgttccctaccacactccatcaggttttctccccagactctgcgagggcagcggccttgtctccaccattccttcaatgctacgcacataacacagaagctgactccataacattt

SEQ ID NO: 177971 - DNA, 476 bp, Homo sapiens
tcgtgacacttcagactgtctaggtctgcacaggctgcactctaacaaggagtggcatgcatattcatgacccagggctgtgggaccagacacgcttcctagggctatattttacagtgtttttatttcctactcaaatttcttgaaagaaacaactatgaaaaattgattttgtgattatgattaagtctagaacccaagacagcagtgctaaaatgttctcactggaaataggaacagattagaggaggtttgtgtagtatttgatttacagatagacaacacaaaccccaaaatgttggtgctcacttagagggggcagtggagcaaacttcacatctgcctaagaagaatgcataagggttctaccttcgtgaagtcctccttaaaccggaaggaaagatgaatttcacttaaaatatgtaagagtattaaatgtatatttaaatgaaaagtgtggaggtttactattattg

SEQ ID NO: 177972 - DNA, 246 bp, Homo sapiens
gggctggggtagaatgatatgctttgtctgtgtccccacccatatctcatcttaaattgcaactcccacaattcccatgtgtcctaggaggaacccggggggaagtgattaaattatgggggcagttctgaatctcaagacatttgatgtttttaaaaatgggagtttccctacacaagctctttctttgcctgctgccatccatgtaagacatgacttgctccttcttgccttccaccatgattg

SEQ ID NO: 177973 - DNA, 1170 bp, Homo sapiens
taattaaatggtaaatacaatgtgacatttttttcttaccttttcatctaacttgtgtccccttctttccatttccccaaatgcaaccctgaatttcaggactttgtaaactctactctagttttgctttctgtttgtttgtttgtttgtttagagacaaggtctccctctgtcgcccaggctggagtgcagtgacataatcatagttcactgtaaccttgaactcctgggttaaagtgatcctcctgcctcagccttataatttagttttaattaacctccttgaaaaagttgcagcctggtgctttatttaaatatcttgctttctcataatctgtgttattttagtagtcctgtatttatccttgctttcctgacaactggatataaaactacacaaaacattgatttgggcacaaagaaaatcagtaagtaccaaaatagatacaacataaaggtggtggggttttttatgaactaatttgattgaagtgagtttatcttataaaataagccgggagactgaaatggagtctccttcagtggtacaccaaagggagtgtagggtgtagtaggagctctctgcctccgagaggaggaatatattagactgataacgtttaagtctgatgtatggtgacaagaaaaaggccaattttttgttttgttatttttaagttacctacagataatgcatttcattattgcctacttccaactctccctatgtagtatgtttctgatcttctgtgcttgtgcagtgtagatgagctcaccgctttaatttttaagatagaaatgtggaaaactcttgaatcatagactaggggaaggaaccagaggtcctctaaaatatcagaggagtgagaaggaaaggaagagctcctttctagggccatagaataagagtagaagtttttgctcattttttttgtttgtttttactttacaaaaaaataaaaaattttttgctctttgaataacttaacatgaggaatttggaaacaacctctcttgaaaatatattggtattcattcccaaataattcttctaagtaccacttgaccagaggatagggaaaggaggaaaaggtgagtgtatttatatccttgctagtttttgttatatattcagttgcagatctatattatatatcattttattatcag

SEQ ID NO: 177974 - DNA, 517 bp, Homo sapiens
cttgaacttctgacctcaaattatccgcctgcctcggcctcccaaagtacagggattacaggtgtgagccaccgcgcctggccctaatttttgtatttttagtagagatggggtttcattcaccatgttggccaggatggtctcgatctcttgacctcatgatccgcctgccttggcctcccaaagtgctggatttacaggcgtgagccactgtgcccagcctaaaaaagtattcctattatcgatttatttgaatcaaaattaaaactgtgtgtttggtttttatatctctttgatttttatctctcttaactgtcctttataacagttgctgcttctgttttttttccgatattaactataaggcactgtagaatttcccatattctggagttggctgattatgtctttgtggcatcatttaatgtgtacctctgtccctgtatttcctgtaaactgggatttagattcagagactggattagattcaggctctttctgttggtaagaatgctgc

SEQ ID NO: 177975 - DNA, 1148 bp, Homo sapiens
tgctgggattacaggcatgagccaccgtgcccagcctgcatttctatatgccaacaacaagtataatgtttaaagatccatttatagtagcaccaacaaatacgcagtattaaaaagaaaaaagctaaaagacatatgttcatagatttgatcagtcaacataataaagatgtcaattttccacaaattgatatataagtttaacagaattcctgtcaaagtgccagcaagatttttttgtagatgtaaaattgtgaagtcccaaagcctccctcacttctaacatcaactgtaagtttgggcatctctaagaccaccttcaggtttggtaatttgccagcactcatagagctcactgaaaactgttacattcagttacagcttactacagtgaaaagataccaattaacattagctaaggaagtgtcacatatggcaatgtttaggaaagttccaagcatgactttccaattgtcctctctcagttgaatcatggacacctctgtcttcttccagcaacaatgtttgagaatatatttagaattctaaatctgggaagttcattggaggcttggtatccagagtttttattgggattcagttactttgacatgttaaccacccacatggcaaactttagcctccagaccctccaaaggtcaagctgatgcaatacagtccaaaggtcgaaataaaggaagccattcatatcaggcagaacattccaagggctaagagattactccccaggtgctgagggcaaaggccagacctctctttgggcaaggttaatcctttacggcacagtggatatagacaaaattattctaaatttctatgtaaaggcaaaggatctagaatacttaaaacaatttttaaaaaggagaataaaatatgaaaaatcagtctacctaacttcaagacttattactggcaaagatacagagaaactggattgctcatagattgctggaaggaatataaagtggcacaatggacctggaaatagtgggccagtttcttgaaaaactaaacatgaactaaacatgcaactaacgtacaacctagcaattgcattattgcatttatcccagagaaacgaagcaatggagtttatcccagagaaaccgtcgattcgagctcacaca

SEQ ID NO: 177976 - DNA, 657 bp, Homo sapiens
atcaaaattttgaggcccaactagagtagtgatgaggtgagatttatagcaacaaatgcctatatttgaaaagagggatcccaaatcagtaatctaagctcttaccttaagaaactcaaaaaagaagagcaaacttaaccccaatcaagcagaagaaaggaaaatgtaaagtgataccaattctacacagtctctttcagaaaaaattaggagagaacactttccaacttatttttttaggtcagcattaccccggtgcaaaaccaaagtaagccaacacaagaaaaaaagtctacaaatccatattcctcatgaactctagacacaaaaatcctcagtaaaaagtaagtaaattgagcaatatataaaaaggataatacatcaagaccaagttggttttatcccaggaatgcaaggctgagtctacatttgaaaattcattagtataatcagtatattaacaattgaacatctattcatcatttaaaaaaaaaaatctcaatgaactagtaatagaaaggaacttaataaagagcatctacaaaaaatatacagctaaaatacttcataaggggaaagcattcagtcttctagcatttggagctaggtaatgatatttttttttctcaccagtcatatttaccatggtagtaaaag

SEQ ID NO: 177977 - DNA, 323 bp, Homo sapiens
tttttagtaaagacaggatttcaccatgttggccaggctgtttttgaactcctggcctcaagtgatccacccaccttggcctcccgaagtgctgggaatacaggcatgaacaactgcacctggccgattgggtgccccttctatgtgctcccattgccccaggcatagtgtcaccataactcttaccattctgagttgaaaatgattttttttttttgcttttttttctctcattaaatgcaaagcttattgaaaagaggacagtggttgttcactgttgtactcctaacctttgactcagtgtccttaggttggctctagag

SEQ ID NO: 177978 - DNA, 443 bp, Homo sapiens
gttttccccctctattcagtttctgcctccagcatatcctgcagaactaagttttcccaaactcgcctttatgcaatatttctctgatcaaatgtcttcaagtgattccagtaattaaaagataaaagctaatgccaggcattgcaggttttcctatctctctaacttttattctctcattctatctattaccttataccagtgttccttttcagtcaagctggttttcttctacaaatataagccatctctgccttacattttctaccatgccactgaccctcctagaatggtcactcttatcttcagttttctaagttctactcctctctagaaaaccctgtttgagttctaccaagtttccctaatcttgttaaataatattacacctgttcatactgctcattacagtatatacttgattcagaatttcctgtaatgtt

SEQ ID NO: 177979 - DNA, 747 bp, Homo sapiens
ttgtatatttgaaaatataaaatgtgattgtaacatgaaggaaaaataaaaggtgataagtaaaacaataattaacaaaatgtggaggaatgaggagactgggaggtcaggctttctgtctgctagtccacagtccttgtcaacataaatctatttagttgtgggggagggtggggagtgggagaaggtggcaggccaggattcagagttctctctgaggtttctagtttggatgactgagtttatggtgagatggggattccaaaaggggctgcagattctagactgaagataatgaggttgaactttggaaggtttgagaatccaggatgtttagacaggtgtggaactggaggacatgcattgggtgtctggagacaaagagaaagatgaagggtaggaatatgcaattaggaattacacacaaatctgtgataaaatgagctggcctctctgcaaggtgggttggatttgaaggtatgaaaaaagtttaaatgattcattctgaaaacagtagcttaattaagtaaattagcttttcccagaatatgtgcctcaaaaacctagttctgaagagtgatagtaagtgctcctcaaaataaataaatatgcaaagaaacaaacgatatgtcagcaataggttcgaaaagcaagttaaacaaagtttaaaaggtttcatagcctttcatataccaatgtgcctctttttccaaacatattaggccactgaacttttttcttaaggag

SEQ ID NO: 177980 - DNA, 290 bp, Homo sapiens
cacataacctaatcgctgcctattaggagctcaaagtgcagcaggcaaacaacatatgtaaataattacaaatctctacaaaagagctataataaagataggctcaaggaaggcttcatagaataaagtgggaccttgaaggagtaagaggtttggcaaaggaaaaaaaaaaagggtgaggtaggagtggagagaggacaatttgggttatgaaaacacattacaaggggacacagcataaaaaaaaaaaagatgcctaggactgggtaagtgcttttacatgactagat

SEQ ID NO: 177981 - DNA, 404 bp, Homo sapiens
gctatcttcagaaattaaggaatgagaggcaaggaagaaaggacattcatcttggaaagacccaaagcaccttgaaatttggaaggaatgttttgctagctgctaaaaccacctttgtcaccagaatgaatgaagtgcttcagatttaaataattgatcattcttagaagagctgctgtaacacataggggaagtgaaaactaacagatgaaagttttgtcatgcactgtaaagaaaagcattgtctgtgaagttctatttttaaaaatgtctgcttgtaacacctttactgaacatgtttggaaacctggtgaatgcaagaattgctttaaacctaaaagtttgcaccagcttcccccagaccctgagaaggcacccatcacccatggcaatgtgaaaactaa

SEQ ID NO: 177982 - DNA, 451 bp, Homo sapiens
aaaaacaccaagctgaattctaaagtgtggaatccaggttgcaatcagcttataaaggagcttgacaccacactaaacaatttgttagtggaagtcattaccagggcttggatcctttcctcaaggtagggaagccctgagtttcataaactctaatgaagtaatttctaagtgagaaattcagttaggggaccataccaaatctcagccttagagacctgcctatcagcaaagtggccaccaaacagaggccactgctgcccagatgcagcaaaactggtatcacagggcatgtgtgctacaggctcggctggcactgagcactgtgcaagctgtgcctcccacacagtcacaaggaagttagatttgtattttcatatagaatcatttttgatgggtacactgccatcagagattgtaggaatccaggggtgcttaaaacatacaagcg

SEQ ID NO: 177983 - DNA, 393 bp, Homo sapiens
aaataatggactttctccatctacctaaaggaacaaatattatgataccctctttccctctcattctctactgtggtgattacaaataaccagtttttcaaagcttgctaaagaaacattaaaaacattaaagacacattaaagtgcattacagtgcttaggaatatcagaatacgtatttgggcttggtagaactgtgacagatacaaaagttcagttcagatatatgccccaaattaggaagccccttgttatctgcagaaaatggcagtttgaaaataagccctgtatagaacagcaatttctactgaggtatagaaagaaaacattagcatccctgctctatcaataactgtaccttgtccttttaaatttctatatttctgtgtatgt

SEQ ID NO: 177984 - DNA, 418 bp, Homo sapiens
atagattgtccctcaaattgagttttctgatgtttcctggttagattcagtttgtgcatttttggcaagaatactgaataaatgtgttctcattgcatcacatcagaggcctataaattcagtttgtcccattattggtaacagctcccctcatcaattggttaccctgaagtatagttcatataggaatagctgcataaatgctgccttttcccctttatcacttttagaataatgagtcctgtgtaattttaaactgaagtaagtcagtatagagtgattctatacctgttgctttgaggtctagaataagagtgttttgctactaggagaaaggtgttttgttttgttttgttttgttttgttgagacggagtctcgctctgtcacccaggctggagtgcagtggcgcagtctca

SEQ ID NO: 177985 - DNA, 313 bp, Homo sapiens
gatgggactacaggtgcccacgaccacgcctggctaattttgtatttttagtagagacttttcaccatgttggccagactggtctcaaacccctgacctcaggtgatccacccacctctgtctcccaaagtgctgggattacaatcatgcgccaccatgcccagctaaattttgtgtttttagtagagatggggttttgccatgttggccaggccggtctcaaactcctggcctcaagtaatccgtctgtgccttttacccccaacacaatcttggtgacaaggactttgtgttttgttctctattaaatccc

SEQ ID NO: 177986 - DNA, 795 bp, Homo sapiens
cccacagtgacctcttcctattgatgaatagtggctgccttgactcccttgtacccactgccttacctcctatgtgggcttttctgaattgctagcctcttgatctctaccaacgttctgtcttccaggactgagtaatattcttcatctgagatccaggctaccagcctgtttgccaatggcgttcctatccctctgaatgcatcttcttgtgcccctttctagaataattgtccttagtcttaactcacttgacctgctcctgcgagtgaccctgtggtctcagacctgtttttcttggctcatcttgtgctgctgcattcctcagagaagcagaatttattttcctccaagcaggagttgttatgttttccttagttgttttatccttccactttttggttttgttttgtttttttgttttgttttttttgtttttgagacatggtttcatttccattgcccagactggagtgcaatggtgtgatcttggctcactgcaacctctgcctcccaggctcaagggattctcccacttcatcatctcaagtagctgggcctacaggtgggtgccaccaagtgtggctaatttttgcatttttttttttttggtagaggcagggtttcgccatgttgcccaggctggtcttgaacttctggtctcaagcaatccacccaccttgggctcccaaagggctgagattataggcatgaaccactgcgtctggccatcaggcctattttgactttcatttatcactctgcttctctaaaagctggcagcagtgatgttct

SEQ ID NO: 177987 - DNA, 534 bp, Homo sapiens
cagtgcatcctctcatcttttgttatagaaatctgattaggacagtctatgattcacaacccttctgtagttgccactgtcttcaggataaattctagattccttgagaaaagcaaacatataaggcattcacttcacattccagtcctttccttacttttccaatctcacttcctgccatcttccctcccttctgaccaactcctaaccctctaactatattaggcttcttcatgctcctggaacacaccaaacttcttcaaccttcacccctgtgagagttaactttatgtgtcaacttgactgagataagggatgcccagatagttggtggaacattatttctaggtgtacctgtgtgggtatttccagaagagattagcatttaaatcagcatgctaagtaaagaggagctgccctcacccatgtaggtggaattgtcctgtctgttgagaacatgaacgaaacaaaaaagtggagaaggacaacttgtttcgttctctccttgagctggggcatccatctccttttgcc

SEQ ID NO: 177988 - DNA, 228 bp, Homo sapiens
tcccaaagtgctgggattacaggtgtgagccaccgcgcctggccaatcctgtgtttcttaattaacagcatcatcttctaggtgagagaattaggggctcggagaaaggaagtgcccaaggtcaggcccctggaaactgagaggagcaggatttgaagccatgctggtcccttgagggtggcagaaaatccagacatgtgtcaggagctgaaggtggccttcgtcaag

SEQ ID NO: 177989 - DNA, 224 bp, Homo sapiens
gccacctgacagaaagctgtcagtgcatgcagaagagctccctgtggaaggggcacttggtttggtggaatcctctccagagacatgatttttgtcaaggcttcctttatggtatttactactttcatttaatgtcattccctttccccaaacacacacacacacacacacacacacacacacacacactaaagccttaatagttttgtcctctttgagttttc

SEQ ID NO: 177990 - DNA, 463 bp, Homo sapiens
atctctgagatgccttccctggtttcctagggagaaccaaagtgtgttccatgatctgtgtgtctcctccaccatgcggtgaggccctcgaggggccaacaacatacttatcaccacctccagggcccagcccagcacccagcgctgagcggtcgcttgggatactctggactgtagaactgaggggaaccggcttcagccctggctttaggctccctggaaggggagtttgcatcctgggaagggatgtctggccagtgggcttgttctccagcagctagagctggtgggagcaactgctgaaggttaaggcttctgtggggctggtgacccctgtgatgctggtggctgctgtggagctggctcagcacttagctcagagcccttcactgttttttttttttttgagatggagtctcgttctgtcacccaggctggactgcagtggcgtgatctcagctca

SEQ ID NO: 177991 - DNA, 626 bp, Homo sapiens
accacacttctttctagaatctctaaaactcctgccttttcttagaacatgtatatattagactgtatgtaccataacaccattaaaaaacttacttaaaacaataactaatgcatatcaagtattttatacattccaaacactgttcaaaatattgcatgaaattctcacaacaatttcatgaaatatatgtgggtactaatttttctactcatctttcaattccaatctctctgggcaatgagcccaattgatttgttaagagcttcaaagcaaagaaagacaaggtcataagccacaagcattcaaaaatatggggaaaacaaaacaaaccaaagaagaaaaaagaaatagagaatcctctgtcccacagtcagctctggaaggagtcataattgtatacagttaaattatacttaaaggttatgtcaccaaaaattgtagaaagataacaatagaagtgaactcctctcttagcagtgagttcagatttcagttattcaaaagtttcaggcatatgggccagtgagtttcttacacagtaataagtggtaaatatgataagcctttttactattagcacaattgttgacaaatatttttgaaatagtgaattgacataaggg

SEQ ID NO: 177992 - DNA, 331 bp, Homo sapiens
cctgatagtcttgaaagcgatcctcctacctctgcctcccaaagtgctgggatgcgtgagccaccatgcctggccaagagaaggaatacacttcagagaactacttagctgttcaaattcatgtagctggttggctgcagagcaaggattccagagaactacttagcttgttcaaattcatgtagctggttggctgcagagcaaggattcgacccaagctccactacctttcattagggacgtttggtaaactgtcaagtgctgtacagatgtccatttgtttctcttttctcctaacttcagagaccagaacagaccctttaacaaattg

SEQ ID NO: 177993 - DNA, 273 bp, Homo sapiens
cctgatagtcttgaaagcgatcctcctacctctgcctcccaaagtgctgggatgcgtgagccaccatgcctggccaagagaaggaatacacttcagagaactacttagcttgttcaaattcatgtagctggttggctgcagagcaaggattcgacccaagctccactacctttcattagggacgtttggtaaactgtcaagtgctgtacagatgtccatttgtttctcttttctcctaacttcagagaccagaacagaccctttaacaaattg

SEQ ID NO: 177994 - DNA, 779 bp, Homo sapiens
acctttcagatggtgctgagccttgactgcagtgtattttgtggttctgtggcagtgacgacaggcaggcgagacacctgagaaaccccatattctgttccaggttagtctcctgccagctgtgttttgggccagcgtcggaaagccttagctgcaggctctgcccctgcaagagggaggaagcgacctgacccgagtgccttggtaggaccttgcatgtttcccacaagttctccggtcatctcgtgaggtatttctctcccttcggactgctggaggcttggcattctctgagtccctgtgtgcagtggcctggaggttgccctgtacggcctaccaaccagccagcttcctgggtctgcccaagtgtaggtgaccgggtagccctttaatcagcagaaccttattgagcacctgctgtgtgcctggaactgagtacatggtgctaagcagagtgttgggttggtgcaaaagtcagtgcggtttttgctattaaaagtaacggcaaaagtaactgcactgacttctgcaccgacgttatagattggattccggcccttgaggagaacagcttttttttgggattctcctttggttgtgttttcccacatcctcaatgaggctttctccccacccagaggcctttcatcacccctgagggcagggctcttagattagtgggtcaggaaggtgtgggtcttttggtctgtactgttgacagtgggcaggttgaggtccaccttctgtccttccccaagctcctacaatggatggagtag

SEQ ID NO: 177995 - DNA, 552 bp, Homo sapiens
cctttatgaaggccccagtttttacagtaagtccctcactgcccgcacacaacgatgccaagttccaacctgatttgcgtcaccacagttgtgggtttgcgccaaggttagttatcaagcgtagtgagaggataaattcacaaaatgagggacaaaaataagacgagagctgggtacaacggaagtgaaacctgggtggaggtcatctccaaatcacagtggaaggacgatgtcagggatttgtcccaacactcttttgatgaaagaatttgattagtggactattgcactcttaaaggcaaagaaaacaaagcacggcagtgccccgctcggtcgggattcaaaagcagtgaaagctgccttgctctgtttaaagcgacaggactgctctgctattcaggaaagactaaggaggcagcggtatctgcgaagtcctgcgagctcccggcgacaggagtagcgcgagcagctgacgggggaaatccactggcagcgagtcggatgagtcagcgctgagtcacgctcggcgctacgtgccggcctgggcggccg

SEQ ID NO: 177996 - DNA, 487 bp, Homo sapiens
gcccaacaaagtggatgaacccattgcatgaatttagataagtgagtgaaatggtcaggtaggactcttgggcagcactgtggagaatggatttcagaacaagacgagagacaatgagatcaattcaacagtagtgccgtaattgagatgagaaatgatttgagcctaaatctaggttactattttccccctaaactttcctttggcctccttctaacttgaagagggtaaagaaataaggatataggggaaaagaaaaatttagcacaattctgtggctagtaacactattcactcagatgagggaggcagaggggaaacatttaaaaaaaaaatctattaaagttgatgtttctgttggtgttcaggtagaactatgtaggagtcagatggttatgtgggtttggatcaagagaaggatctaggatgcaggtgaagactgaggggtcattagtctttgaggcctttggaaatgctgcgttcaccc

SEQ ID NO: 177997 - DNA, 188 bp, Homo sapiens
cataatactgcaggagagatctttcacaaaaatctcatcacattcctcactttctcaaaactctttggcttggtttttggcttcctataaccacatacaagacagaaaccttaacacagcatgtaatgctcctttcacaaccccagccccgcgctacagtcacatctctaggtagtaccctccactat

SEQ ID NO: 177998 - DNA, 409 bp, Homo sapiens
gtaaaagatctagttacactacatgtgtgccttcttaataactgtatactattggatttttaaatcgaaaattcatctttaatcctacatcttggttctggacagaaaggtggagatttaaaataacatgtaatcagaaaaatagctaatcaatcctacaaaatgggggagaaaacctcgccaaatttcagttttcacacatttaactaatagtaacaaacaacattagtcgtgacgaatttattacccagatagactttcccaatatatttactttggtacttgagaaaaagtattaagtgcagcattttggggtgagggggtggacacacatcttcaatacgcagtttcaccaaaatgagggagtttcctactcccggcgccttctatatttttacttcttaggcca

SEQ ID NO: 177999 - DNA, 257 bp, Homo sapiens
cgcacttcctacaaggacagtttcacaaaatttatttgagatattactcttcattcatttagccttattgaagtgtgttgaagggactgaccccgtctgcagctcgggctgccttgacgtcagtatatccagttaccctgttgggagtgactagtttataaatgggcatggccagagccaacgggagatgagaagacattcactgggacttctaggaaagacattaggataattggccttccatttggaggaagatg

SEQ ID NO: 178000 - DNA, 176 bp, Homo sapiens
tgacctcaggtgatccgcctgccttggcctctcaaagtgctgggattactggtgtgagccaccatgcccagcttgaaactaacttttgaattaaagtatctaagagctgggaggatgttttttgttgtcatgatttgacaaaccacttgctatactgtaggaagtatgcttattgg

SEQ ID NO: 178001 - DNA, 458 bp, Homo sapiens
gcagggtgcgctgataagatatgtgagtgggagaaaagaggagactggctcatatttccctgcctgagacaatctccagtggctttacgttgcaagaaaaatgaaatccacactcttcactttggcctgcaagatcctatatgctctggctctggcccatgtctctgaacgtgtctcctcccagtttccttcttcacggccatctggccacactgccctttccatgtctctaacacggtaagcattctcctgcctctgagcctttgtcctgttcccctgcctgaacaccgtccatgtggttggctcttcatcactcaggcctcagctcagacacttgctcagatcatcaaataggctggcatccaccccctgtgctgtctgcctggctttcacattctgtagcgtgctcatgatcaccttctaaaaggatctgtggcacattctgtctcctcttacta

SEQ ID NO: 178002 - DNA, 377 bp, Homo sapiens
gcagggtgcgctgataagatatgtgagtgggagaaaagaggagactggctcatatttccctgcctgagacaatctccagtggctttacgttgcaagaaaaatgaaatccacactcttcactttggcctgcaagatcctatatgctctggctctggcccatgtctctgaacgtgtctcctcccagtttccttcttcacggccatctggccacactgcaacctctgcctcccgggttcaagcgattctccttagtagctgggattacaggcgcgcgccatgcctggctaatttttgtatttttagtagagacggggattcaccatgttggtcagtcaggctggtcttgaactcctgacgtcgtgatctgcccgcctcgg

SEQ ID NO: 178003 - DNA, 390 bp, Homo sapiens
aggaaggaaggggtacggaggactggcatctgtttggccccaagaaatcctagattgtcgctaaatggggaagaggctactgctcagagttgctgaggagcggagagcttcgtgattcagaacccacactctggagtcggggacacggctttgactgtggacttgtggacctgtcttagttgctgaaagttaactgagataatgcagtgtcaggtatgtcagggagccgggcctcttcttgggcttcttcagcagggtctgcctgaaccagtctgtgggggagaaacactgctcaggtctgtgtttggagtatgggactccataaggagatgaaaacagcttccccagcctttgataaggacagatagttgtggtggggattgattcatt

SEQ ID NO: 178004 - DNA, 559 bp, Homo sapiens
atgaccctgaaatgtgaccaggctgctcccagcgtggagttttgtgctcagtgtctggcaaagaagcgaaaggctcctttaccctcacacccatcctctagtctggacaactgcaaaactgccataaatcgtatcagtgaatggtacccctaacgggagctgaatggcaggctgtacagacggcacgggggtgctgtggcagtgaaaccaaagcaagaagtactgttgataaagttgagcaaagaagaggaaataccctgtgctgcttcccctcctgtcccttcccgtcccagcctcctctttagaggaacttgagagtccgctactgtcaaggagaggaaagaactgccaccccaaaacgagtttggtaatcctgtggttcttattctcctgcactaggtttccccagcctcagccaggcaacatctcctgtacgctagctagggttacacaaatgcaactactcaaaagcaatttctcaacactcctcggctacctccctggtataagccaccttcatctgtcacctgaataactactatagcctcccaatgtctac

SEQ ID NO: 178005 - DNA, 192 bp, Homo sapiens
tgcgcctgtagtcccagctactcaggaggctgaggcaaggaaaatcgcttgaacccaggagacagaggttgcagtgagccaagatcacaccactgtactccagcctgggtgacagaacgagacttggtctttaaaaaaaaaaaaaatcgttgggaatggaagagaattagcgatagaagagaaatggaaaat

SEQ ID NO: 178006 - DNA, 394 bp, Homo sapiens
ccccaaccttttagtgaggagactattcatttgcaagaagcagagaatagaagaatattgggggatctactattaactaaacttgtgttgaatagaagttactaaaacctggtcagattcacatctgtgattccaggttaagggcctcaggcaaggaagcgaagccccacgtggatcctgaaatactggccttagactcgattccacagcaaaggttgcagccacccagcatctgagctgctgggcaccagggcaagtgatggccagtgacaggaaggagctatgcacgcatatatcctctgttgtgtgcactctttaaaagaagagataaggagaaaaaaatatttaaatgatatcatttaagtttcacaataaaccattgactgaaataaga

SEQ ID NO: 178007 - DNA, 230 bp, Homo sapiens
tcacacattagattttctctagacttctaactgaacaaaatggcaattagcacaaggattttggaatacacttaacagaacatgtgtaaccttggaaaggggaatgtctaatggagggtttgcaattgagtagctgctttaagaaaagaaaaatgggtaatgcgtagttgatgggtttgggtgcattgaggggatttaaaaaggccgaatgatgttaggatgcattttgg

SEQ ID NO: 178008 - DNA, 469 bp, Homo sapiens
agaaaaagaggtttaattggacttacagttccacatggctggggagacctcagaatcatggtgggaggcaaaaggcacttcttacatggtggcggcaagagaaaatgaggaagaggcaaaaggcagaaacccctgataaaaccatcagatctcatgagagttatttactaccacaagagtagcacgggaaagactatgcccccatgattcaattgcctccctgtgggtccctcccacaacacgtgggaattctgggagatacaattcaagttgagatttgaacggagacacagccaaaccatatcagagacctacttgagatttgagggtgtgtggtgcgtcactttccctcggtgaggcgctttacctgtgtttccacactcactgtggcactcctctctggttctccatgtgtcttcctagatgtcaccctccacaggctccagtattcccgtctgtctgcgccaca

SEQ ID NO: 178009 - DNA, 651 bp, Homo sapiens
cacagccagaaggccaaggtatcacactttgagacaatgccctgggcgatttcacaatacagccacctcctcccctcccaaagtcaagcacagcacccacatccccgtgaggcggtggtcctcaaggaggagggtgtctgacctggacagtaaatgcaggaaaactggacccagaccttggcattctcagctctttctgcactgagatttgattctctccatctctccaaggaagaccgggatggcaaaaggagcaaggccaattagccccacctgctatgggtgactgtttctgactcatcccatctgcattcagacttaatgacctagcacataactgcaagtacctgaagggcgaagacgaagtctggttcaaaatcatcttcctagcacctaccacagtacctggcacacaccttgactggactgaattcaaactcctgggcacataagctgaagtctgcacagacagggaggggacattctccaggccctactcttcctgtcagggcaccccctccacaggcacactcagagccaactcgcccctgaacaatgaagccattctccctcctgttccaagagcactgcctcacagacagctccgcagtggggattggaatggcgcccatcctataaactgagacccgc

SEQ ID NO: 178010 - DNA, 502 bp, Homo sapiens
tgaggtgggcacggcgctctgggcttgtcagcaaccgctctgctcccgtccaatagccagggatggcaaacacaggcagaggcaccacggtcttcctccttgcgcccctggcagacatcactaatcaatcacagcaacctttttgcacagagcctggctgccaccttcatggtctccacctacatctccaggctgaagccacacagttcccggagcttgggcccaggaggcagtcgaaggcactggggtgttggccccaagtcccaagaccacaaagaatctggttggtttgccgtcggtcctgagggcagccgctgccacttctggggaaagtgtggtgggggggccaggggtgatgctctgtgcccagcacctgtgcagcagcagcaccttgcaggcacatctcccagtcctgatagagtctgcacgcccacctccccggctcggccactgggcaagcaggaggtgaggagtggacggcccgcccagggaggggcggccg

SEQ ID NO: 178011 - DNA, 149 bp, Homo sapiens
cattatttttttaaaattacagacgtcaaaagagtcacacaatacaaagtttatagagtgaaacatgaaagaatgaccttcatccctgccttaggaggatctctggagcagctttgctcatagtgtctctgactgcagtgacttacgga

SEQ ID NO: 178012 - DNA, 295 bp, Homo sapiens
cttagattaaatgccaccttcttagaaaggtcatctcccccatcagtctaaaagagcccttgggtgttatcacatctcttactttttttcttcacagtatttaccactttatcagatattttcatatatatgtgtaggatgtagaatgtcagctgtatgaaaagagtgaccatatctgtcatgtaactgttatattcccagcatcagaaacagtacctgccgtatggtagatgctcagtcaatatttgtggaatgaatggatgatacataaaatagagtgtaacagtagtgattt

SEQ ID NO: 178013 - DNA, 133 bp, Homo sapiens
ctcaacctctcaaaatttctgggattacaggcgtgagccaccgtgcccggtcccttgcaaatattactaatatagcatcaaggtaattagcaacaaaagaagtcactcaaccagaatgttatccagtatgtta

SEQ ID NO: 178014 - DNA, 653 bp, Homo sapiens
acccataccagggaagagctacagagacatgatacagggtagttccttctgatccagggattgcaaacaacttgtttgtgtaaatcaagttttatcggagcacagccatgcccacctggtgacggattgtctagggctgctttccagctacaaggccagagttgagcagttgtgacagtctggcttacctaaaatattgactccccggccctttatagaaaaagtttgtttactcctgttaatccaaagctatgaccaaaagtgcaaaagcataaagttcttcagcctctacgaagaggacacctactttaaatacacttaccttactttccttcacttatcaaagcgcagttgtctggtgtgggatttcctgactcaacacggacagtgctatactgcatcaaaaacccaatttaggctgcgcttggtggttcacacctgcaatcccagcactttgggaggctgaggcaggaggcttgtttgaaccaaggaggccagcctgggtaacagtgagacctccaattcaatttacagaattaaaccctggccgggggtggtggctcacgcctgtaatcctagcactttgggaggctgagacgggtgggttgcccgagctcaagagttcaagtgcgtggggtaggaggcgtggggta

SEQ ID NO: 178015 - DNA, 423 bp, Homo sapiens
tcccttcacttcctaatccttacaccttaaactgctccttccaccttagatcttcttttcagactttagctcctctttgtcattcttaaatttaaaggctctaatccccaatccatactctgatctctaaatcaacctgtctttctagtctgagtctctcccatttctaccaatcctgttcctgaccaagctcagttcttaacatccagaaaggctcttagaaacactggattcttcccataactgccctccacctgggtgactgagcgagactttatttcaaaattaaaaaaaaaaaaaacaagaaaagaaagaatcatgggattctttatgtatggctaggacagaaataataagagtacaaaggtaaggacattaaggaagggcctaaagactaaaggaagaacatgagcaaatgtccaa

SEQ ID NO: 178016 - DNA, 212 bp, Homo sapiens
tgcaaagtctacacaggccttgacaagtgctagaccataggttagacaaagaagcatgcctgtgcctctgacccagaatgagggtaagttgaatatttctttgacagattgatgaaggcttcatagagctggtatcatctgagtcaagtctggagggaagagaaagatatcgggcagatgtcacagtatatgcaaaggaagggaaggtagaa

SEQ ID NO: 178017 - DNA, 784 bp, Homo sapiens
aaccatctgtcttagtcagtctgagctgctacaacaggacatccacagactgggtggcttataatcaacagaaatgtatttcttgccgttctgaaggttggaaagtccaaaattaaggcactaacagatctggtgtctggtgagggtctgcttcctggctcacagagaactagctatcaacaatccatgttcacattctgtccagccacctgtgcctatctatctaatctgatgtagtctagtctatcatcagcctaaatagtcatcatcctaaacattcctttatttatgttacatacatctactcactatcctcacaactcatttataatacaaaggaatgtctaagttctggtacccaccatacccacctcccctttctaaggaaaatggacacaaacatttctttctgcttaaagtttcaggatcatatcatgtgtattaagtgaaatcagttctatttctctgggcagcaaccctgactggacaaggggcaggttcttggggttcctcaactaaaggcaactgtgtttgtatgtgtataatcttaacatatatacacacacatatatatatagtagcttatgtattacacacatatatgatatattctatagatatagatctgtcagacatatgcgtacatatataacttcaatagcttgccataaaactctgcccaaatgaggttctcagtgagaccaaacattcacactctccaaggaagaaaatgaaggaagagaatgtttatgactggctaagtctgtcaccatccagtacagag

SEQ ID NO: 178018 - DNA, 419 bp, Homo sapiens
agcccagaagaatcacgtttctgatacatgggatacattgtgggttctcccatgactactaggacacacaatgagaaaggcctaggaaggactgaaacctctggagccagctaaccatttacacaaagcccaggagatgagagctggggcagggagtagagcgcaggagggatggggtctctctgatcacattgccaccggggaggatgttttctctgtgcaggtctatttaaagtatctacttcccatacgtttctcatgtgtttcccttactgaagtacagtgtttttgaatatgaattcaaatgttttcttgggcccacaatgaaaggacaagagtttctttagaaaacagccacttaaaactgggatgtacttgaaagtcaggcagtgacaagaagccccatgctctaacttaca

SEQ ID NO: 178019 - DNA, 117 bp, Homo sapiens
aagtgctacaccagaagttcaaatgggagaggatgaatttggccagttttagctgtttttgtagggggtgttgtaggaaaaggagaagcttcacagaacagctggtaagtgaacagc

SEQ ID NO: 178020 - DNA, 527 bp, Homo sapiens
cagtcactctatagcatcaaatcgttgacatggcattcgaggccctttgggatctagatcctgaatcctcatctttatttttttgttttttatttttctcttttagagacagagtcttgctctgtcgtacaggctggagtacagtggcgccatcatagatcaatacagcctccaactcctgggctcaagcagtcctcccacctcgacctcccaaagtcctgggattactgctcctggccttgaatcctcatctttagccctcccccagcaaatacacaatttcccttattgttccctacatacctctgtgccttcgtatctacctctcttccatctgcctggaatattctcccccatccacccctagtaaattcctattcaatcctcaagagctaatgatagcacgctgaaaccttcctgaacctttccctccgccccttagcagacttaagtcacttctctctcgtgcagtggagttgtggaaagggaatggcattaggaaacattcactctgtgtgggggtgtgg

SEQ ID NO: 178021 - DNA, 220 bp, Homo sapiens
agcccatttcttgacaatccagataaggagaaaaataagactcacttccctgccctggaaaagcataagaggccagagaaaacaaagtcaacacgtgttcgggacctaaaaaatgagactaatctttccaaaggagggggggtcatgttggaaagcagtaaaatactgagtttgtaaatgaaaatattactagtgtgaaggatcaacgctcaacctaatg

SEQ ID NO: 178022 - DNA, 322 bp, Homo sapiens
aattttaggaacactgaaaaggcatttcaaacaataaattcattaatttcctaatctttccttctatagatactggttctggttttgtatgtataaataataaataaaatttggtgaatacagagttaaagagtttagaagtatgtggaattcattaaaaagtctctttagggctgggcatggtggctcacacctgtaaccccagcactttgggaggctgaggcgggtggatcatctgaggtcaggagttcgagaccagcctgatcaatatggtgaaaccctgtctctactaaaaatacaaaaaattagccaggcgtggtgg

SEQ ID NO: 178023 - DNA, 310 bp, Homo sapiens
tgcctcactccaccttctcagtgtctctgtttcatctccgtgccagtgttctctgggcttcccttttggggtggaagccccatctctcaccaaaggcaatgagccctatgggaggaagccctgtgtcttcccaccctctgcttcccactcaacttgtggctctctcagccaggcagcctctgagttctctgattatccatcatatcgacaaccgcagcacccctgtttttgtttttgtttttgtttttgtttttttttctttttgaaacagtctcactctgtctcccagactgaagtgcaggaaacaaga

SEQ ID NO: 178024 - DNA, 417 bp, Homo sapiens
ttttgtaatccacgcaagttgtattcgttgagaaccactttgtgcccagaaataaaagttcctacgtacacagatgaacagtgtataagccggatgctattgtagccatgtttgtggtaggaaaataagtagaaaccaataaccactgatatgaaaattacatgaataaattatagtataactaccccatctctcaccaaaggcaatgagccctatgggaggaagccctgtgtcttcccaccctctgcttcccactcaacttgtggctctctcagccaggcagcctctgagttctctgattatccatcatatcgacaaccgcagcacccctgtttttgtttttgtttttgtttttgtttttttttctttttgaaacagtctcactctgtctcccagactgaagtgcaggaaacaaga

SEQ ID NO: 178025 - DNA, 310 bp, Homo sapiens
tcgtctacaggagttaaggtcttttcccctcaaatactagagatagtgagtcagtcattttaaatcttcctataaaataaacagcaggttggcaggtgtggtggctcacgcctgtaatcccaacactttggaggcggagggatggtcacaaggtcaggatcacaaggtcaggagatccagaccatcctggctaacacggtgaaaccccgtctccactaaaaatacaaaaaattagctggacgtggtggtgggcacctgtagtcccagctacttgggaggttgaggcagaagaatggcgtgaacccgggag

SEQ ID NO: 178026 - DNA, 772 bp, Homo sapiens
gctcctcgtaggaattcattcatctgaatacctactacttggcacgtcgaggcattcgatttttttaagtacatgtggactctgggggtaagaagcattccaataaataactcatactctcaaagagcttgcatcatagcgagtagaatctatcacatgaaaacaatagtgttagaaatcaggatttgggctttacaacacattcatgctttcccctttcccaaaatatgcccagtttcctattgtggtcagcaggcagcctataaaaagcagggttactcaccttcagctttctaaatgaacacacagtatcaaatatagtaacagaggaagctttatttttatggagccaaactgattgagatcaagagtaagtgctttaaatatacagacgaactcacagatttaagatgcagattctgaaaagctaaagatccaagatcaatcattcgaacgcccaaatatatcatcagagagactgttgcagcatgcacgcagtgccagaacacaagacaggcgccatgcccagagcctccgaaacgtagagccagggccagggtggtcacggtgccaaagagaaatttcagaagcaacacttttgaaatgcaaaacagaatcagaagcaagcaccagaattctgcaaaaatgcaaaacaagtactaggttgagccctactaaaaatgccaagtaagcagcaggccaatcagagccaagacccactcttaatgcagcagctctaccgcgcatgggccttctgggaacacctgcacga

SEQ ID NO: 178027 - DNA, 129 bp, Homo sapiens
acccaagagccatgtcttccggaaagttcaggctctcagctggttgataagcaactgacactctgaccagcctttcttccaaatccttaggctgctggtttgccaatatgctccagcatttctggtctg

SEQ ID NO: 178028 - DNA, 156 bp, Homo sapiens
atgtgatcatacaatttgcagagatcacattatagatatttatatgaatttaatcctttccctaaaagatcctaagaaaaatattacatattctggggcattcaattttacatagggttatatcaggctttgctctccaagatttgtatgaacttc

SEQ ID NO: 178029 - DNA, 244 bp, Homo sapiens
ggaggtttgaaggcaccgctatggagaattggagagagctaaggaaagacagaaagactgcagaaagtgcttagggttccactgaagcggaaatagtgatttgtagtgatacaacccttatgagttatttgatttttttttttttttaagcagcatctggcagtccaagtatagggctgacagtttgggatttttctttccatgttggtgtaaaagaagaacagtgtagtgaaggaagttagga

SEQ ID NO: 178030 - DNA, 314 bp, Homo sapiens
tagacttgagcttataccctcgataaggggccaaatggaagatcccagcctgcccctcaacaagctgtctcttgcatgcctccctcagcgcacccttcctctctttatgcctgagaccctttgctctctaggcctttgacccttttactccagagactggagcctccatctcctccattcctggggttagtaaccgcagttctccatcattgacctcaacagtttaaaaatgtcacctcacctgtaggtgcctccataatccgctagccatttgttcttttattaagaaacacaggacacagcgctgtccctgt

SEQ ID NO: 178031 - DNA, 460 bp, Homo sapiens
tccttgtggtactgtcgactggaccgactttaggaaactaagtgggactatgttagaaatgggctatagtgaggagaagcaaacacacagaatgtaggaattcacattcacatatatgaaagtaggctttgggccaacagaacattgggtgtgtacttttgagcagagtctccctcccttttataccaatgagttgcacacagattcacacagatacagacacaaagagacacacacttttagtatcatagtgataacttccaaagtacatgtacaaaatatttgactcaaaataaacttgacattttcagcctgagtctcctctcctctgttcttgactcacttgaacacacacacacacacacacacacacacacacacacacatacataccctagtcctaaagctggtatcttatttaatggggaaacactaaaggtactttcagtaagatcagtaa

SEQ ID NO: 178032 - DNA, 315 bp, Homo sapiens
aatggttacagggtatccaaagtactaggaaatagactaatgtatttatgagagaaaggacacagcaggcccctttgctaattagagatttgggagcatgggagtaatatgggagccatgtggaggggtgcgggcagtgatcacgaccccccactcctggaggaaggtgggtagctgccaaccctgacttttgaccagggcttctcaaatgccaggttagctggcaattgccattcttccgcaggctcttcctgaagctgggtgggcccctgcctcactcccctctgcaatccagtcctacctttattgtcctca

SEQ ID NO: 178033 - DNA, 547 bp, Homo sapiens
ccaggtgttctggaaaaattaacatcctaaaggatagtgagaagaaagtaatgtggagaggatgacagggcagagcatgggcaaaaattatcccctttgccctggtagtagaatgggtaagtgtttaatgattgagaactacattctactaaaatatggattccagtgcgatgggaaatatgtatgtcctagatgttggaagtctcttcagggggagaagttgtgtgtcactgcagtagaagtatatccctcatttcgagggttcaagactagcctttggtcctacgagagtaaaatttcagcagctttttcctatggtgaggaagcgtggaaacaggccatttttcaagaaaaaaaaaaagaatggggggttctatccccggtggtctcttaattttttaagggacaggactgcgtgaagctgtggagaccatgagttgggagacatgaggagagttaagtatttaattacagaaaacagcctcctagcctgggcaacctagtgggatcctgtctctacaaataatacaaaaattagctgggttta

SEQ ID NO: 178034 - DNA, 261 bp, Homo sapiens
acaacacttaattccagccataggtggcaaaagatgttatggcagggaatagagaggtttaaatactgatgaaataaagggtcaccatctccttaggcacagggaacagcttactttttgccagatttcttaattccacttgtggccaaggccccttccccgtggccttccattttagctcctcgagtttcttctgctcctctttttgtttctgcttgaaagccttatcttcctcgtccatctccttggcctgcattcttg

SEQ ID NO: 178035 - DNA, 136 bp, Homo sapiens
tttcttacttccacctggtgtgaaagttgttatcgcaaaggcttccattttagctcctcgagtttcttctgctcctctttttgtttctgcttgaaagccttatcttcctcgtccatctccttggcctgcattcttg

SEQ ID NO: 178036 - DNA, 393 bp, Homo sapiens
tacttgatgaacattaaagtagccacatgatgtgccttctataaggatatcatatgctgtacatacagtaccacttgacatataggacactctaaaataaaactgtgggcttgcaaggtatggaactgtacatcttctgtgaagtcatgtactggttacaaaaaagttgcaaaaataccagtttctgtaaatgctgcttcttaaaaatatcaataccaaaactgttcactcaaaaatatctctccatttaaccttgaagtgagaagcagaactggcagcattattcaaggaaaaagggaagatccagatatgattttaccagagtcaagaacttggaagacatgaaagaataaaataagtctgctcaagtacataataagcttggtcttgtgg

SEQ ID NO: 178037 - DNA, 697 bp, Homo sapiens
actctttttttttaagtccttgtcctttattggttaaggctgagggaagcagacagaccagttggacatagtagatgggtgtgtgaggtcaaagtgctacctgaaagccagccaacccacactcccctgagatgaatgctaatgcccttcaaactgtgggcattggtttcacacacagcctcttccagggataaaagagggggttcttgtaaagcctcttcttttttcttttttttttgagacggagtctcgttctgtcacccaggctgaagtgcagtggccagatcttggctcgctgcaacctctgcctcccagattctcctgcctcagcctcctgagtggctgggactgcaggtgcccaccaccatgcccggctaattttgggctttttggtggacatggggtttcgccagtgttggccaggctgatctcgaactcctggcctcaagtgatttgcccgcctgggcctcccaaagtgataggcttgagccaccgccacccggcagcttcttgttttcttacctctaccatggagacaagttctggttttcttaggacaactagctctggtcataaagatctctggagtgatcaagtatggtggagtggcagagtgagtgttccaaaaggataagtagaacaggagtcttgcccaggccctattacaacctcagtaccttgaatggcctccccagcc

SEQ ID NO: 178038 - DNA, 294 bp, Homo sapiens
atcacaagattaggagttcgagactagcctggccaacatggtgaaaccccatctctgctaaaaatacaaaaattagccaggtgtggtggtgggtgcctgtaatccagctactcgggaggcttagtgagctgagatcgcaccactgcactccagccttggtgacagggcgagactctgtctcagaaaaataaataaataaagtttatgttttttcaaagagcgtgacctttggagtcaagcagaatgcattgggccatgcccccatcagccatactagccctgtgatcttgagca

SEQ ID NO: 178039 - DNA, 666 bp, Homo sapiens
aaaatggtgctgtccagtggcaccaccatgtatctgggaattgccgacaggatgcagaaggagatcaccgccctggcacccagcaccatgaagatcaagatcatcgcacccccagagcgcaagtactcggtgtggatcggtggctccatcctggcctcactgtccaccttccagcagatgtggattagcaagcaggagtacgatgagtcgggcccctccatcgtccaccgcaaatgcttctaaatggactgtgaacagatgtgtagcatttgctgcatgggttaattcagaagtataaatttgcccttggcaaatgcatacacctcatgctaccctcacaaaactggaatagccttcacaaagaaattgtccttgaaggttgtgtctgatataagcactggattgtagaacttgttgctgattttgaccttgtattgaagttaactgttccccttggtatttgtttaataccctgtacatatctttgagttcaaccctttagtaacgtgtggcttggtcacttcgtggctaaggtaagaacgtgcttgtggaagacaagtctgtggcttggtgagtctgtgtggccagcagcctctgatctgtgcagggtattaatgtgtcaggggaacagtaacttctatacaggtcaaatcagccacagtctac

SEQ ID NO: 178040 - DNA, 800 bp, Homo sapiens
aaaatggtgctgtccagtggcaccaccatgtatctgggaattgccgacaggatgcagaaggagatcaccgccctggcacccagcaccatgaagatcaagatcatcgcacccccagagcgcaagtactcggtgtggatcggtggctccatcctggcctcactgtccaccttccagcagatgtggattagcaagcaggagtacgatgagtcgggcccctccatcgtccaccgcaaatgcttctaaatggactgtgaacagatgtgtagcatttgctgcatgggttaattcagaagtataaatttgcccttggcaaatgcatacacctcatgctaccctcacaaaactggaatagccttcacaaagaaattgtccttgaaggttgtgtctgatataagcactggattgtagaacttgttgctgattttgaccttgtattgaagttaactgttccccttggtatttgtttaataccctgtacatatctttgagttcaaccctttagtaacgtgtggcttggtcacttcgtggctaaggtaagaacgtgcttgtggaagacaagtctgtggcttggtgagtctgtgtggccagcagcctctgatccgccagcaggttttactagtacgattgagtgttactgggatttctctagtggctagcaagaaccatttagttttgtaggacgggtctgtcaggactggcaagtccaagccgtaggacatagtttcatgtataagttgatgtgtgtggacagaaacacgcgtgggaatgtacttgcatgtgagttggaagcggtttgcagt

SEQ ID NO: 178041 - DNA, 994 bp, Homo sapiens
aaaatggtgctgtccagtggcaccaccatgtatctgggaattgccgacaggatgcagaaggagatcaccgccctggcacccagcaccatgaagatcaagatcatcgcacccccagagcgcaagtactcggtgtggatcggtggctccatcctggcctcactgtccaccttccagcagatgtggattagcaagcaggagtacgatgagtcgggcccctccatcgtccaccgcaaatgcttctaaatggactgtgaacagatgtgtagcatttgctgcatgggttaattcagaagtataaatttgcccttggcaaatgcatacacctcatgctaccctcacaaaactggaatagccttcacaaagaaattgtccttgaaggttgtgtctgatataagcactggattgtagaacttgttgctgattttgaccttgtattgaagttaactgttccccttggtatttgtttaataccctgtacatatctttgagttcaaccctttagtaacgtgtggcttggtcacttcgtggctaaggtaagaacgtgcttgtggaagacaagtctgtggcttggtgagtctgtgtggccagcagcctctgatctgtgcagggtattaatgtgtcagggccgagtgttctggaatttctctagaggctcgcatgggctcctgaaccaattgtttctgtcctgctggtctgtctgtcagggttggaaaagtccaagccataggacccagttttctttcttagctgatgttttcctgctagaacaccatggactgttacttgccttgagttggaagtagtttgcatttatacctgtaaatatatttatccttttaatttatgtaaggttttttttttgtatgcaattctggattctttaaagagatgacaatgaattttggttttctactgttatgtgagaacatcagtccccagcaacacgtcattgtgtaagtagaaataaaagcgctgctgttaaaaaaaaaagaga

SEQ ID NO: 178042 - DNA, 637 bp, Homo sapiens
aaaatggtgctgtccagtggcaccaccatgtatctgggaattgccgacaggatgcagaaggagatcaccgccctggcacccagcaccatgaagatcaagatcatcgcacccccagagcgcaagtactcggtgtggatcggtggctccatcctggcctcactgtccaccttccagcagatgtggattagcaagcaggagtacgatgagtcgggcccctccatcgtccaccgcaaatgcttctaaatggactgtgaacagatgtgtagcatttgctgcatgggttaattcagaagtataaatttgcccttggcaaatgcatacacctcatgctaccctcacaaaactggaatagccttcacaaagaaattgtccttgaaggttgtgtctgatataagcactggattgtagaacttgttgctgattttgaccttgtattgaagttaactgttccccttggtatttgtttaataccctgtacatatctttgagttcaaccctttagtaacgtgtggcttggtcacttcgtggctaaggtaagaacgtgcttgtggaagacaagtctgtggcttggtgagtctgtgtggccagcagcctctgatcacaggaaggttgctagatacaggaaggttgctccggg

SEQ ID NO: 178043 - DNA, 427 bp, Homo sapiens
agtgtcttcccacggtcctcaagaaagtccaactcctttataggtctccaagttttccaccaccaacctctccagacttgtttcctcaagagatattgtactctaggactggccataccaaactttccattccaggaactcaacctgggtttttttacctcctcacctctggaaagactattcttaaaattccctatttctggatgctcttcctttcattctctccccacttattgggtcacttctgggcatcctttaggtttcagctttgatgttacttcttcctgtgcagcctgccctcactcaccaagactgaggttggcactctcttccctgtggattccacagcccctgtgctcaccctgaatgtgctacttgtcactcatataaaaatcatctccctccatgtaacttcatggtaacctcg

SEQ ID NO: 178044 - DNA, 460 bp, Homo sapiens
tacatttcttcaattagttgtatatactcttgtcaaccacgtagcaaagttgaaaacaatggcaaggagtcagccaaaaaattctacattatcatcaggaaagcattttgaaacataggttatatccattgtcatcaatgtcaactcactctaagtgcatattctaactcaagatttgaagttgatgatagtattcaggaaacacgtacgatttgattactcatgctcaaagccatgtgttattgaaccagccactttacaaaatttaattaaacttaatgatgaaaattaaaagtctctctgaaagatcttatcaaagagcaaaagacaaaagccacttactattgggggaaatgtgttccttataatatgcaagcttattttcccatcattttgatcaaaacagaagaaaaaatatatgaaaacgtataataacaagcttaataaataaaacatgcaa

SEQ ID NO: 178045 - DNA, 446 bp, Homo sapiens
tttctatacattttacttgcctcctggggatgatgggagcatatgccaggctgagatgggtggcaacctacattttaattctttaaattgctaactccacccttgagcctacaacaagtaggtctgcactgcagaaagaaatcacgtcgccatggggtcgctgcgagtagttccttactgggtgggatgtggaaggggagcgctgagggacagcattgggtggaagcaagatagcaacagctgcagggagcagcagcgggactggggcgaaggctgtgctctggtgagctccgtgtaacacaggagggctgacgctggcccagataggctggcgcttgccagaaaagggcattagcaggaagacccaggagcagattttcaacacgggttgcacagtgtaattaactggagatagtttaaatatccagattttcagaccacaccca

SEQ ID NO: 178046 - DNA, 418 bp, Homo sapiens
acctaacatgactctgaccatgattctaactttgactattgacttacagaaaatacaccatgaagatactgtcaacaaaatccaaaaccagaaattctatgacaaccaagtttttctcctcttgcatcttcatgtgaaaaaagagagatgagggagaacctatagattaaagaaatgtaatacttttacaaattgcaagatgtgaactttatttagatttcaattcaaacaaaatgtagagagttaggtctacctggccaggtagacctaacccagagacaggaaagaatttgccttctccctgggaactggttcaagagacactgcttgggttcctttttcaacttggaaaaagaaagaaacactcaacaataaagactgagacccgttcgcccccatgtgacttttatctgtagca

SEQ ID NO: 178047 - DNA, 242 bp, Homo sapiens
ggcaggcagtccacaggtaagggtagaaaatagactgtcatggtgggaagtgccaagagtgctgaagaggaatcaggataagggcttagagagcaatgggggttgcagacagggacagcttttctgaggatgcatctttcagtaaagacctaaatcctgtcaagaccaagaggccatggaggctgagtgatccagcgtagggaagagcaggagtgtgctctgctggagctaggggtgggagt

SEQ ID NO: 178048 - DNA, 338 bp, Homo sapiens
aacctgcttggcacacatcttccccacctaagtcaagggctacattctcctacttggtgcagcccggaaatcactaagtctttctttcatctctcttttatattaccaattcatcagtgaccccaatggctctacttttcagacatacagagccggtggtgaggcatggtggctcattgctgtaatcccagaagtttgggaggccatgacaagaagatggcttcagctcaggaatttcagaccagcctggacaacacagcaaaacctcctctctattaaaaaaaaaaaagatagccaggcatggcggtgcatgcctatggtcccaactatttgggagg

SEQ ID NO: 178049 - DNA, 504 bp, Homo sapiens
tttttattttaaaagattcttcgaacactaaacattttgctgacattgccttgttcatactgcaatgcttatcattagaactgcaaatgacagacagctacctggttttaaaagcccccaatatgacacagggtagactgagaaacttttcccctcatttctaatccttcctttaggtcacaatgctatgggacttgaattcttcttgaaaaagctttgctttcggctgggattcttataaaaatgatgaactgcagagaaatacgaagggaaagagatcctaaggtcttatgttggagttcagaaacaatcttataaacacaattgtatttaaatttctaatagcacaaagtatggatgtaccaaattaattttaaaagctacagctggttgtcacaggccacctatgtcacctaaaagctgtgataaggcaaaactgaaataatttcaaaaggaaaacaacaaatctcatttggtcttaaaagtttatttcatgaacatata

SEQ ID NO: 178050 - DNA, 268 bp, Homo sapiens
cttggtaagcaggaggagcagaaagaagccagtgcagccaaagcatgctgggtacaggcatgtatggtatgagatgaaacaaaatgcaggatcaaatatttattctgaagtgatgtgggatcagaatagccctatagtcacatgagtttgggatcatcagtttcttccaggatctggtttgcttcctagtcttctcaggttactacctgaccccctgagtcctcccttgcctccaggtgcaaggttttcaacgtcctctggcttcatg

SEQ ID NO: 178051 - DNA, 352 bp, Homo sapiens
gttgatagcatcaatgtagtcactcaagccagaaattctaaatgccatcaattacccttctcctcctgcccctcaccgattaccaggtgtttttgatcatcttctaaatatgactcaaatccatcccttcctttcatcttctataccagggcctaaatttagtcttgcataaactctcatccggattattcgggaactggtctctacatttctagccactttgtaaaatccttacactacactgtaagatatttcctcctaaaaagtgtttctctagtccgggcacagtgtactcacaccctaaaatcccagcactttgggaggcagaggtggatggattgcttgagcctcc

SEQ ID NO: 178052 - DNA, 402 bp, Homo sapiens
gaggatccccaccgtcatataagcggtagccagatgcagtggcttatacctgtatttccatcactttggaaggccgaggcgggtggagcacccaaggtcaggagcttgagaccagcctggcaaacgtggcaaaaccccatctctacaaaatacaaaaattagctgagcatggtggcaggtgcctgtagtcccagctactccggaggctgaggcaggagaattgcttgaacccaggaggtggaggttgcagtgagttgagattgtcccactgcactccagcctgggtgacagagtgagactgtctcaaaaacaaaacaaaacaaatgaatgtaaaacatttagtgaagtgactggtagctagtgagggttcattaagcgcttatatgacgtttattgtgggcc

SEQ ID NO: 178053 - DNA, 338 bp, Homo sapiens
cactcatccactattcattcatctcatcatttcatctcaccatttcatttcatcatctcatctcatcatttcatttcatcattcatctcatcatctcatcattcatctcatcatttcatatcatcattttatctcatctatcatttcatctcatttcatctcatctcattccatcattacatctcatttcatcgcgattagggttagtactaaccctaatcgcagagatgggggactacaggcccacgctgccacacccagcgtgtgtgtgtgtgtgtgttttagtagagacgggggactacaggcacacgccgccacacccagcttgtgtgtgtgtg

SEQ ID NO: 178054 - DNA, 331 bp, Homo sapiens
cccctggtggaagttttccctttgggagaccaggacctctaaccctgaagagcttagagctgtaatgatgtggcggtaaatgcggccacttcagttttcacccttggttcccaaacccatgtattttttcctgtcggggtttgttttctatcgctgctggaaccaattaaagactgggatacgttctaagaaatgcttcattaggtgatttcttcatgtgagcgtcatagagtgcacttacacagcctagatggcactaggtactactaaatgcctgggctatatggtatagccttttgctcctaggctacaaacctgtacagcatgttac

SEQ ID NO: 178055 - DNA, 161 bp, Homo sapiens
aggtaaaagtgctagggtgtccacactcctggcaagagccctagaaaacagggtaaacagtccaaagaggggggtctagtcagactgggctctggtagggacttgcaaagctaggtgtggcgcctccgctttgtaaccaagaacccccagttccttgtaat

SEQ ID NO: 178056 - DNA, 815 bp, Homo sapiens
acagaggccccacagttctatgagtttatcaagcagcagaatatttgctccatcagccagaatctgttatcaggcttcttagagcagctatcattatttcatttttcttactcagaccaatctgagaatgaacaccctagtacattataacaacataagcattagctaaatacatcactggatctttgaaaccttaggcatatttatatacaaaaacaacaaataagaataataataataatggacttaagccttttgttagcatttgtaatatgtccactgaatgcagacatgaacagagcctctttcctttccatctagcttttgaggctttggggaagaagggctgagacgccaagtggcagttgagaaacccccaggagagaccactatgttagacagtcaccccaagagtattgcaaatggggacatcctctgggaggtgagggattcgtgggaatagtgaacggtacccaggagtcacatcccgtatctcttcaactccatcttgtcgtgcataccattccctcctggagttgcccaacactgagaatcccataccgaaaattttatggctgcctaatatctttaaggcacgacaattttgataattccctactttacaagtcccatcttctcaaggccaagccagaaaacttaaaaccctagactcccttgcaactaggtacaagcagataaaatgggtcccatgaatctgatgaagcctcaccagcacttggattctaaaaagcagcagtttaatttaggggactcaatcttttgccatccacgatgacaagctatgtagttgttta

SEQ ID NO: 178057 - DNA, 456 bp, Homo sapiens
agctagaggatccccttttaaaaaataaaagaaatgttatcacttcatgagctttgtatgtaacaatgaatgagatgtgaatgttgaatagttggcagggttcactcaataccaaagagattctcacgagccttatgtgcttatgattcagatttgtcctaaggcaaaaccacaaatttgattataccactcccccactccccatagaactattattaatatttcatggaccttagaacgtggtttgaggagcactggtatgggatatgagcctccaaatgaagccagatcctagaaagaaggcatagtaaccagagccctggactgtgtgtttgttagtcctggggctcagtttcaagttgagcaagtgtgttgtgtgcacgtatacatgtgtgtttatgtattttgtttttataatgtttctatgcaacatgctttaaaaaggaatgacatcct

SEQ ID NO: 178058 - DNA, 726 bp, Homo sapiens
agcgagagagggagcgtggagagctggagcagccgccaccgccgccgccgagggagccccgggacggcagcccctgggcgcagggtgcgctgttctcggagtccgacccagggcgactcacgcccactggtgcgacccggacagcctgggactgacccgccggcccaggcgaggctgcagccagagggctgggaagggatcgcgctcgcggcatccagaggcggccaggcggaggcgagggagcaggttagagggacaaagagctttgcagacgtccccggcgtcctgcgagcgccagcggccgggacgaggcggccgggagcccgggaagagcccgtggatgttctgcgcgcggcctgggagccgccgccgccgccgcctcagcgagaggaggaatgcaccggccgcgccgccgcgggacgcgcccgccgctcctggcgctgctggccgcgctgctgctggccgcacgcggggctgctgcccaagaaacagagctgtcagtcagtgctgaattagtgcctacctcatcatggaacatctcaagtgaactcaacaaagattcttacctgaccctcgatgaaccaatgaataacatcaccacgtctctgggccagacagcagaactgcactgcaaagtctctgggaatccacctcccaccatccgctggttcaaaaatgatgctcctgtggtccaggagccccggaggctctcctttcggtccacca

SEQ ID NO: 178059 - DNA, 425 bp, Homo sapiens
aacggaattttacagttgtttcaagttactattaaattcttactgtgttccttctatgtaaaatgaagacattgttctagttattaaagcaacatgaaagtggacattctaaaatccaagtgtcaaagaagggaggacttacataatgcgatgcaaagggaaaggctaggacaggtgggggcctgcttggctgttgccctaagtgctccattctctcccttcttgtgtccacttatatataagacacccaggcatccatgagtaggcctggtacacaatcctgtcgaagaggctgacttgcctgccacatggcctctgtcctggggacagtgctaagcagcccactctttatttccggctgtgctttattattaaggcagcatttcgttacagtggaaacagcaaagggcaagtggactctgatt

SEQ ID NO: 178060 - DNA, 470 bp, Homo sapiens
ttcattttttttcagacttttgactaattagacaacatgagagaaatgtaaggtaaaagataaatcatcctggtcatttttccacttcctcaacctcatcattttcccctataaataaggtgattctgattggcacaacaatgctcaagatgtaaagctgcagaacagaaaattacacacagtaggatgaagaaattaatttcacggcagtaatggttttctagcttcactaataaaatccctttagcccaagatctctttacgaagaaccatgtatgtagcaaatgctttatgagaaaaacatgtcagaaacatcaccggatatgctcagcccatcttctaaatatatgcatgtatgcattcgccaaatatcatcatgtgcaatctataaatgactggttatctatattttacaaatcttctaactcctaatccactgaactgcttatgctgggtggtgttgggattta

SEQ ID NO: 178061 - DNA, 515 bp, Homo sapiens
tcaggctggaggcttttgcatttggtttggcgaggagagacagcaggatttctgggtgccggacatgcttctcggtcagagctggtgcgtttctttgcagggcaaggtggaggcggggatgccagggaggcatctgctgcatttcttgaggtttcacagggtgcagagcccctgtcctcactgttctgtggggtgctaagggagcaagccatgtggtccctgaactttgagtagatacaggtaatatttgaaaatatttgggaatgtttacacaatcacaaaaacaatgaacacttgtgtagccactactcaggccaagaaatggaacttaactttgaaattccctttgcccctcccaatcccagcttccagctcccgatcctctccccttcctgcaaaaatgtgtttatcagataaacctgaagcatttgagggagtccctgtcctgaatttcgcagttgtcattctctgctgttttttagttttatcacatggggttgtgtttctaagcaaca

SEQ ID NO: 178062 - DNA, 361 bp, Homo sapiens
tatagactgaatggaatttgccaaaatttatatttgcactgtctgctgaataggcagattgctgagtaaagtccagtttgtatttgaacacaataccaattatcttttgtgttttctgtagttttattaagctcttaatagaaatcaagaaaatgatttgaaacctcctttttcaaatcaaagtacctaacagctagggacaatattttttgttgctatgatttgacacatcacttaatgtacggtagaaagtatgatcagtggtaagatctgacagaatcagctctacacgccagggggctaacacagcagtttccccctcttttgcccacaggactttttagttgcaacttctataatc

SEQ ID NO: 178063 - DNA, 242 bp, Homo sapiens
ctttgaaattagatagacttctgtttgaatcttaactctaccacttactcatttcagcaccctaggtctagcacttaacctctctgagtctcaatttcctatctattaaacatgaggagaataatagctactttgtagggttgcagtgagggttaaagaaaatcataaataaattgccttgtatatagtagatactaaatcatcgtcattctagttgttattaacaggtaaggtatgccttc

SEQ ID NO: 178064 - DNA, 776 bp, Homo sapiens
gaagagctaagtgggcagacactatcccagcctgttagggctgctatagccaaactgaaagcgggcgtgttatgaacaacagcaatgaattcctcacagttctgctggctgggagtcctgcgtcagcgcactggcagactcggtgtctcgggagggcctgcttcccatttgtagacggccgtcagctctcgaggggcctctgttatgagagcactgattccattcacactggctctgcccctgtgacctcatcacctcccacaggccctgccttcagttaccgtcacctgagggctgaggattttgacaggaatttgggaggacataaacattcaggccttagcaaatgtgttttattttccaactatcatcaattttaaaaaatcagaatcgtgcttggtgtaatcacattatatagaattacatgttcaaagttatatatgttttttggaaatcacattctaattggttggttggttggtgtatttatttatttatttttgaggcagagtctcgctctgtggcccaggctggagtgcagtgacatgaacatagctcactctaggcccaacctcctgggctcaagcgatcctcccacctcagtctcctgagttgttgggatgttgggactgcaggtgtgccccaccacgcccagctaatttttaattttttttgtagagaccgggtgttgccatgttgcccagactggtctccaaactcctgggctcaagcggtccttccaccttagcctcccaaagggctggtattacgggtgt

SEQ ID NO: 178065 - DNA, 195 bp, Homo sapiens
cagatgcgagtaaagctgctttcactgcttctccgagttcatgctttctggccaaccgtaataaagggagcatggtttccagcgacgctgtgaagaatgaaagccacgtggagacaacctatctccctctgccatccagtcaacctggaggcctaggccctgctctgcaccagttccctgctgggaacacagaca

SEQ ID NO: 178066 - DNA, 551 bp, Homo sapiens
ggccaaggcgggcagatcacttgaggtcaggagttcgggactagcctgggcaacatggtgaaaccctgtctgtactaaaaataccaaaattagctggacgtggtggtacatgcctgtaatcccagccatttgggaggctgaggcggagggatggcttgagcccaggacgtggagtttgcagtaaaccaggatcaccccactgctctccatcctgggcaacagagcaagatcctgtctcaaaaacacacacacacacacacacacattatttgtagtggctcccttaggcactgccagcactgaacaataactcccacaaaattatccacagtggtttccctgaacagtgtctacactgacatcagcacacaacagcctgggtcacagagcgagactccgtctcaaaaaacacaaaaaacaccaacacacagacaaacaaaaaaacacactagtactgagaagttaggtgtctttgtgtcaatcacagactctttgtcaagtgtgcatttaaatcacttatcgttatgagttaactaagccaaatgtgtatc

SEQ ID NO: 178067 - DNA, 306 bp, Homo sapiens
ttatgagggtttacatgttttttttattgtttttaaagttgtttcatgtgggatggtaattcagtctctgtttctctatcttggctggaagtacaagtggctctaggtagttcttttaaataggtcctgaactggacagatttttaagtgaaggaaaaggccttttaaaatttcttgttcatgtccctgggggtaccaaaacattgatgaattgtatccctttctttaggaaagcagaggatcctatcctataatgaagaggtaggtcataatccttcctggaagaaacttaaccaaatgactggg

SEQ ID NO: 178068 - DNA, 263 bp, Homo sapiens
aggtcattcctacactaagatcctaaaagtctgttaacaagaagcaggacttttgacttctcctccaatactcatctcacaccttcctatctgcaatgattgaaaccctatgcatttatctgggcccagcagaaatcctgtccccttgaaaatctttctactcccactgaattcctcaacagaatataactcttctctattaactcttaaagcacttttggcctttatcatagcagtttattgatcatgctctgccctaaatt

SEQ ID NO: 178069 - DNA, 286 bp, Homo sapiens
ggagcagatgcccgcccacggtagatttggtactgaaaggttaagaggtttcccaagtgatgggcactgaggggcaaggtcctgctaagaataagcggggaagagatttaaggaaagtagagatttgaaatcgttcttgagacaaatgggacagcaagttgaccagagaaatacagtaggactctccttggcagtgtggaaggtgcaggtgagtctggtgggttgatgttgatacctatctgctctgtcatgggattttctccagcagtttggggaccaaggtgca

SEQ ID NO: 178070 - DNA, 405 bp, Homo sapiens
gtccagcagatggcagatgccctgcagtacctgcagaaggtctctggagacatcttcagcaggtagagcagagccggagccaggtgcaggccattggagagaaggtctccttggcccaggccaagattgagaagatcaagggcagcaagaaggccatcaaggtgttctccagtgccaagtaccctgctccagagcgcctgcaggaatatggctccatcttcacgggcgcccaggaccctggcctgcagagacgcccccgccacaggatccagagcaagcaccgccccctggacgagcgggccctgcaggagaagctgaaggactttcctgtgtgcgtgagcaccaagccggagcccgaggacgatgcagaagagggacttgggggtcttcccagcaacatcagct

SEQ ID NO: 178071 - DNA, 625 bp, Homo sapiens
gggaactgagccaacttggtacttggcagcagcccttctcaaggctgatgggaggttctgtaatcctctttgcaagctttgtcaccaggtcacacttttggcagccaatcaatagatttatctcattaaactggcagaagagtgtttcaatgcatgctccaacagctacctggaaatagcaattgtgagagatgctaaggtaaggatattccagttcctataaccgtctgattttttgtccttgtgaattttcaatctgctgttttactgggatagctaagttccaggtttattttctcaggtaggctcacccacgacctctgtcctgtggtttgcattcctgaacatctgttagtctttcaaatgcaaggcacaaaactaacctcaagagtgtggctagatctgggagtgaacacagggcctgtccctcacagacgagaggtcaggagcacctttgtttcccaaggcaggttcttgattgatttaccttcatgcgttgatgtctttgctatgtgtgtaaaatgcatgtgttgctgaatcacatgtgaagctctacatgctggggtttatactgtgtttggcatgttgtgggagctcaataaatactaaatcagttgcacagtct

SEQ ID NO: 178072 - DNA, 440 bp, Homo sapiens
tcaacagcacatgtgaaaccacttcctcttcttagcacttggcacatggtatctttggtaatttattaccacatatgtttactgttgcagtctggggggtcactaagaccactcttgggtttaattttttgctaggactcaaataactcaaaaaaatccttacactcatgagtgtttatcaaagtgaaaggatacagattaaaatcaacaaagaaagaagatgcacgaggtagagtccaacagagaccaggcatgagcttccaggtgtgctctcccaggacagtcacacagacaatgcttactcctctcagctgagtcttggtatctgaggattttaccgcggctcagtcgcgaacatggttggctagctgtgtggctggccttaggctccagcccctccagaagtcaaacccatgctatgtagcccaaggccaccacca

SEQ ID NO: 178073 - DNA, 264 bp, Homo sapiens
gtacatgtaacattttgttaagtatatatgagaagtcatcaagtcagggtatttagtgtgttcatctcctgagtacaatacattttgtttactatagtcaccctactctgctatcaaacattgaatgtattccttctaattgtatgtttgtatcctttaacccacttctcttcatccttacctcttaaaaactaaagatttttaccatttttgttttttgagacagagtcttgctctgttgcccaggcttgagtgcagtggcac

SEQ ID NO: 178074 - DNA, 1465 bp, Homo sapiens
agctgcgctggccgctcgcggagggagaggctgcagagcgagggcaggaggactacttccagcaacccagtctcctgccatgtccgaccccatcacgctgaacgtcggggggaagctctatacaacctcactggcgaccctgaccagcttccctgactccatgctaggcgccatgttcagcgggaagatgcccaccaagagggacagccagggcaactgcttcattgaccgtgacggcaaagtgttccgctatatcctcaacttcctgcggacctcccaccttgacctgcctgaggacttccaggagatggggctgctccgcagggaggccgacttctaccaggtgcagcccctgattgaggccctgcaggagaaggaagtggagctctccaaggccgagaagaatgccatgctcaacatcacactgaaccagcgtgtgcagacggtccacttcactgtgcgcgaggcaccccagatctacagcctctcctcttccagcatggaggtcttcaacgccaacatcttcagcacctcctgcctcttcctcaagctccttggctctaagctcttctactgctccaatggcaatctctcctccatcaccagccacttgcaggaccccaaccacctgactctggactgggtggccaatgtggagggcctgccagaggaggagtacaccaagcagaacctcaagaggctctgggtggtgcccgccaacaagcagatcaacagcttccaggtcttcgtggaagaggtactgaaaatcgctctgagcgatggcttctgcatcgattcttctcacccacatgctctggattttatgaacaataagattattcgattaatacggtacaggtaaaaggaccccaacaacactggagatggggagtcccaggaagctcatgtcagccaggtcttggagggcatctcgccagtggtgcgaggcaggggactatactaatctgtattaattgtgtagcaggacttgattccccccatgatgaagtccaccttttggaatccagtgtcctctgaacagaaccaccttttttcttgccattttgagctgcagacaggcggtttattatgacaagtgaagagtcagctgatgtgtactaaaggaggccataggaggattttccagccaggacaaaagagcagcagttttctcctgggctccatctctctgtaccgctagccagtgccgcatttatccatctgtaagaaggccctggtggagaggatgggatgagaacaagaggctacctccagttaaccaggacataaagtccccagcggttcctgtcacacctgctcctccctccccagggtgcatccgtgatcgtggatgtttgcccaggggtgaccatgtttggctggcttggaatgctgtgcattctcagagctctgttagtgtcccctcttgggggtcagagatgaggtgtggcagggtctagaggaa

SEQ ID NO: 178075 - DNA, 1463 bp, Homo sapiens
tgacagcaaagcgacagcaccaggagccaagagcatcttcatggcaaggactacttccagcaacccagtctcctgccatgtccgaccccatcacgctgaacgtcggggggaagctctatacaacctcactggcgaccctgaccagcttccctgactccatgctaggcgccatgttcagcgggaagatgcccaccaagagggacagccagggcaactgcttcattgaccgtgacggcaaagtgttccgctatatcctcaacttcctgcggacctcccaccttgacctgcctgaggacttccaggagatggggctgctccgcagggaggccgacttctaccaggtgcagcccctgattgaggccctgcaggagaaggaagtggagctctccaaggccgagaagaatgccatgctcaacatcacactgaaccagcgtgtgcagacggtccacttcactgtgcgcgaggcaccccagatctacagcctctcctcttccagcatggaggtcttcaacgccaacatcttcagcacctcctgcctcttcctcaagctccttggctctaagctcttctactgctccaatggcaatctctcctccatcaccagccacttgcaggaccccaaccacctgactctggactgggtggccaatgtggagggcctgccagaggaggagtacaccaagcagaacctcaagaggctctgggtggtgcccgccaacaagcagatcaacagcttccaggtcttcgtggaagaggtactgaaaatcgctctgagcgatggcttctgcatcgattcttctcacccacatgctctggattttatgaacaataagattattcgattaatacggtacaggtaaaaggaccccaacaacactggagatggggagtcccaggaagctcatgtcagccaggtcttggagggcatctcgccagtggtgcgaggcaggggactatactaatctgtattaattgtgtagcaggacttgattccccccatgatgaagtccaccttttggaatccagtgtcctctgaacagaaccaccttttttcttgccattttgagctgcagacaggcggtttattatgacaagtgaagagtcagctgatgtgtactaaaggaggccataggaggattttccagccaggacaaaagagcagcagttttctcctgggctccatctctctgtaccgctagccagtgccgcatttatccatctgtaagaaggccctggtggagaggatgggatgagaacaagaggctacctccagttaaccaggacataaagtccccagcggttcctgtcacacctgctcctccctccccagggtgcatccgtgatcgtggatgtttgcccaggggtgaccatgtttggctggcttggaatgctgtgcattctcagagctctgttagtgtcccctcttgggggtcagagatgaggtgtggcagggtctagaggaa

SEQ ID NO: 178076 - DNA, 356 bp, Homo sapiens
cactgaatggccaaagccctgggtgggacagtatgtgctgtctagccaggtcatcctccctctcctcctctgctattctattggccccagcctgcctatcctcaagtttcttatgttggaaaaacaagtccctcttccttgaagccattgtagttgggaacacttgcagcggaatgttttcctaactgcttagacccatttataggcttaagatagggcaacatattaaatggcactattgttgaaggatccaaaatagaattccataaccaattcctttgttatatgctgactttcaattttgagtgataccacattcatgtaccttcctttatatgtgaagatacctggtcaca

SEQ ID NO: 178077 - DNA, 694 bp, Homo sapiens
ggggctttgggtttgtctcacatgccactgcggagaaggtggatgcagccatgaatgcaaggccacaaaaggtggatggaagagttgtggaaccaaagagagctgtctcaagagaagattctcaaagaccaggtgcccacttaactgtgaaaaagatatttgttggtggcattaaagaagacactgaagaacatcacctaagagattattttgaacagtatggaaaaaatgaagtgattgaaatcatgactgaggcagtggcaagaaaagaggctttgcctttgtaacctttgacaatcataactccatggataaaactgtcattcagaaatagcatactgtgaatggccacaactgtgaagttaggaaagccctgtcagaccaagagatggctagggcttcatccagccaaagaggtcaaagtagttctggaaactttggtggtggtcatggaggtggtttcagtgggaatgacaactttggtcacggaggaaacttcagtggtcatgatggctttggtggcagctgtggtggtgatggatatggtggcagtggggatggctataatgggtttggtaatgatggtggttatggaggaggtggccctggttactccggaggaagcagaggctatggaagtgttggacagggttatggaagccagggcagtggctatggtgggagtggcagctat

SEQ ID NO: 178078 - DNA, 326 bp, Homo sapiens
actaaaactccttcatctttgtgttcatagcagagtttcttctctgacagaagaaactcagtaaatatttgttgaagtttgtccttgcctagtaaatgcttgctttctcagtttccttgtggtaaaccaaagggatccagacaagattttcttctggcactaacaaattattttatgatttctagataatgccaaagtggtagtgtaagaagatggcaaggaagaaatgtttgaattccaagaggacaagcttcttaaggtccctgaatattcaaccttttaggtgaagctttattatttgcgtatagttccctggcgctgggtgt

SEQ ID NO: 178079 - DNA, 428 bp, Homo sapiens
ggctgctcactgcaggcaggactggaaatggcaggaaataacagataagaagtaaaggatagcacttggtagacagcccagtggctccagggacacatgtgcttctcagaggccaaggaaggactggttcagtccttgctgctagcagcacctgccagcatgtggattgcagtcccatgtgcctggatgcagaccctgcaactttttagttttgatattcattgttacctctgggcaggaatgagcatggtgaactgaataatagagatgagactggattacgctggttttgatctgtttcaggacaggaattgtttgactttgtggttgctaaaagaaaggcaattctccaaactaagaccatactttattcctgagtttagaattaactgattaaaatcctgagacttatgtttattgtagcacta

SEQ ID NO: 178080 - DNA, 533 bp, Homo sapiens
tatttagtacctttaaactagggcattattagcatatcagtatgagttaatatctcgaaggattaggaaataaatatattccttaagtgtttcaaaaacacaatgaacgacagttaagtagttagaaatagactgacacatggactttttgagctccaagtattaccatgtagatacaagcttggtaaaatcctagcctatgaagtatccatttctttttaaccaatcttttctctttcttcagattcagtttccacatctttctactgaggaaaatctgtgaatacctcttaacactacttttcatttccttttttctcctcaaatatccaatgagtaaagtagctgaaaaactccaatgattctcaatttattgctaacacaaagcaattacttttgcattcactgactgttttcatgtgggcacttgcgtgtgtccgtgtgtttaggagaaacagagagcggttcttttaggttttactttttttctgaaacttcaacctagccaggccttgacaaacgcagacaatatg

SEQ ID NO: 178081 - DNA, 460 bp, Homo sapiens
ttgagatatgatttacatatacaaaattcagctctttaagtgtacaataattttagtaaattgagttgtacaattttagaatatttttgtcacctcagtaaatctattatgctaatttataattaatccccttccccactcccaggcactactaatctttctgtctctgtagatttgtattttctggatgctttatagaaatggaatcatatagtatacagacctctgtgcctagcatattcttttttatttttattttttgagacagtgtctcactctgtcactcagagtggagtgcagtggcacagtcactccagcctcaatcttcctgggctcaggtaatcctcccacctgagtagctgggactgtaggcatgcaccaccatgcccagctaaagcatattctttaaaacaatattcagttactttgtcaacactaaataatttaccctctcccatct

SEQ ID NO: 178082 - DNA, 310 bp, Homo sapiens
gccttcaatattctatgacattttactcctgctttagctttcacttcctgcttgctttgggactcaggatcagctagaggtaagagattagggccttctctggtcttttatgagcatgcatacagccctgtacatgcatgtggactgctagattccctggagtatattaaagctgttcaaaactcccagtggggtttcattctactgcttttccttctcagttttttagttagctttttgtttgccccagctgatatcctcactctggcagctatgatgttaaacaattactactgattgttttcagcaa

SEQ ID NO: 178083 - DNA, 336 bp, Homo sapiens
actaggttacccaaacgcagagaggacaggacatgagtggggtggaaggacaatgataaaggtagtagagccagtaggttgtacgtccttgtggtgtttggaattcttgcaatgggggcattaggcatgactgggaaggcaggagtcagagtgggatgcctggaactgagatcatagagagcagttacaatgtcaaggtctaggctggatgtggtagttcacgcctgtaatcccagcactttgcggagctgaggcaggaggattgcttgaagcaaggagtttgagaccagctccagcaataaagtaagaccccatctctaaaaattaaaaaaatag

SEQ ID NO: 178084 - DNA, 161 bp, Homo sapiens
gtttatctagaggatcccggccgaaattgtttgtaatatagtgggtggagacataatagataggataaataagtgaactatagtacattaaaaggtgctgagtgctatggaaagtaaaatagggccctgtgatggggagcataatggtggtagtgatggtg

SEQ ID NO: 178085 - DNA, 409 bp, Homo sapiens
aagagatagaacatttctaacatccacgaaattccctgatgcccactgtagtcatcccagatcccaggcaatctcttatctgttttctgccactgtagagtaattttgtctttgctagagtttcatataaaagtgcaattatgtgcaactggcttgttttgctcagcatgaagtttttgacactcatctatgttgctgcttgtatcaacagtttgtcctcttttgttactgcatagtgtagagtacttaccccattattttgataatattatccaacattgtggattcatgtcagacaaacacagtgttaatgctttgtataattttttttctctgggtccccacaatgatcttatgagaccataaatggaaaaaactgaggctcaggaatgataatataattgtccca

SEQ ID NO: 178086 - DNA, 281 bp, Homo sapiens
gtctgtgaatttccgtgttttcatgcccacctgcccgtgtctgtgaatttctgttttcatatccacctgtgtgtctgtgaattttcgtgttttcatgcccacctgcgtgtctgtgaatttccgtgttttcacgcccacctgtgcgtgtccgcgaatttccgtgttttcacacccacctgtgcgtctgtgaatttccgtgttttcacacccacctgtgtctgtgaatttccgtgttttcacgcccacctgcgagtgtctgtgaatttccgtgttttcacgcc

SEQ ID NO: 178087 - DNA, 107 bp, Homo sapiens
taactgcacagtggtgtagagattgccctaaaaacagaaatgatagcaaggtggcaaaagcgtcaaaagagtccaccattgtagtcaagctcttcttacgtaaagag

SEQ ID NO: 178088 - DNA, 210 bp, Homo sapiens
tgaagggacattctgactttatatgcttgacatttcgaaaataaaaagtttaaatagaagtgaagacaggttagatttccaattctggataatgaaaacctctgcaggtgaagaaatccagggcatcctgggcagggcccttgctgctagggaagaggccatttcgttggtatttccttcctttcttctctccttccttcctccttccct

SEQ ID NO: 178089 - DNA, 333 bp, Homo sapiens
ctgaaggccctggcctcacctgagtggagtacatcaaggtagcaaaactgcactcacaccccatgaatacatacaacattttgttaaagtactctaatgtaatctaattaaaaagacaaccaccaagctttcaggcatatgggtaggggatgtaacactgagaggagacacaggtgtgcttccaaggccccacagcctgcaggccgtcctcatctccatgtcacttccgccccagaggcccttccacagggccctgctgtctgcaaagtcaccacctggtagatggctggctctccaccttccccacagacaaggactcaaaagccatcacca

SEQ ID NO: 178090 - DNA, 338 bp, Homo sapiens
aacaccctttgccctttttaggggtgattctgagacttggcagagatctttctctggctttactaattgcctgtgtttttctggtctttgcctatcagcattggtttggggggatctgctttggggttggtgagctgccggtagcaggggaccgcatttggagcgcccgtggctgtccagcccccacgtggtagcgcatggaccctgcatgctcaggttttgtggagtgcccatgtcacacatgaccccgagagagggggctgtggcatgattttgcaaacaacgatgtcctgaaagagacttggaacacagaaggcttgtcttgatccagagctggg

SEQ ID NO: 178091 - DNA, 274 bp, Homo sapiens
gatggtatataagcgtatgtcaaagagctgctatcatttagggctacagtaggaatataaaatgctctgtggtgccccttcattatacatctctgttagctaacaactcacttagggctgctcacccaccctaaggctgttcagggaggaacgaggactaatgtggtagtcagtgccccggcatcctccccgctactctttttagtactgaactcccctagctctagtcaggcatgtgattcgccctgaagcgggtcagcaggtatagactata

SEQ ID NO: 178092 - DNA, 312 bp, Homo sapiens
cactagaactttactggagcccatcagccagaataaattgcttccgcatgtgtgttccccaagcacagcgaacattcctatcctataaccctaatcaaattgcactttggtttcctcctcgaatagtgtctatgtatatgtgactccttcctcctgtgcctttcatctctgcttctcctggtctagcgcagcaacggggagaaaatgagcactcagtgagtgattattgccttcgccttgatgaaattaaaaactcatttaagagctgatttctccaatttttgtatctactggatttctctctattatagc

SEQ ID NO: 178093 - DNA, 439 bp, Homo sapiens
ttcactcctgaggccagcgagaccacaaacccaccggaaggaatgaacaactccagacgcaccatctttaagagctgtaacactaaccacgaaggtctgcagtttcactcctgaagtcagcaagaccacgagcccaccagaaggaacaaactccggacacaccatctttaagagctgtaacactcaccgcgagggtccgcggcttcgttcttgaagtcagcaagaccaagaacccaccaattctggacacagtggcgtaccgggaggcagaggttgcagttagccgagatcatgccactgctctgtagcctggtgacagagtaagactctgtctcaaaaaaaaaatgctaagtgaaagaagctggagacatactgtatgattctaatggcattggtggcttgtctggagtggctgctgccatgacgctggttgcagctg

SEQ ID NO: 178094 - DNA, 349 bp, Homo sapiens
ttttatttttagtagagtcagagtttcgtatgttggtcaggctagtctcaaactcctgacctcaggtgatttgcccgcctcagcctcccaaagtgttaggattacaggcatgagctaccacgcccggcccataaaatttatttttatcccagttgtgtgtacttatttacttatgtatttatttatatttatttatttgagatggagtctgactctcttccccagactggaatgcagtggcacaatcttggctcactgtagcctctgacaccagggttcaagccatcatcccacctcagcctcccaagtagctgggattttaagcatgtaccaccatgcccagctaatt

SEQ ID NO: 178095 - DNA, 181 bp, Homo sapiens
gtgtgagtgagtgaatgagtgaatggctgagtgagtggatgagtgagtgaatggatgagtggatgagtgagtgaatgagttaatggatgagtgagtgaataagtgagtgaatgcatgagtgagtcagtggataagtgagtagatgtgtgagtgagtggaagagtgagtgagtgaatggaag

SEQ ID NO: 178096 - DNA, 214 bp, Homo sapiens
cggatggacggctaaataactgctttgctccatgtctttccaggaaaactatttcctgtgcttgataagccacatgagaatccgcagaaacagctcctgaagatgctccaggtgtctccacatctgcgttcctagacacgcctcaaatccctcaacaaacgtgatgatgacgacgcatgggttctgcaggtgctgagtcagcacttttcacgca

SEQ ID NO: 178097 - DNA, 189 bp, Homo sapiens
gtttcataatattggccaggctggtctcgaactcctggcctcaagtgatctgcccactttggcctcccaaagtgctggaattacaggcgtgaaccacctcggcacctagctcctagacatggtttaaaaccatagtgctcatttatcaaatagcaagctcccccttgggtcctagcgtagtcctatata

SEQ ID NO: 178098 - DNA, 302 bp, Homo sapiens
cgagtgtcagagacggaagcgcactacaggcatccacacacagagtgtgcgttcagtcgctttcctgggtggaagcacaagaaaatgtgaacagctgtttcctctggggagagcagtggggcaggatgagaggagtagctctcacttccttttatgctgaaatatttaagaataagttgtgggtatcctcacattactcccctaaatgcttcagtacacatctcttcctggagagtcacacagccactgtcacacacacagtcacacacctcacaaaatgggaaattagcagcagcatctca

SEQ ID NO: 178099 - DNA, 143 bp, Homo sapiens
acagaggcacttagttaagaccttgtcaacaagccacccaaagggttaactatccagatggaatttaaacctactcgtccttttaatatttcatttctagctccccacagctgaggcataagcttggcttgttttaattaaat

SEQ ID NO: 178100 - DNA, 127 bp, Homo sapiens
gattttcagactggcaaatgaccactggcttccacttaaaggcagcaacctgcattagcccctaacaagagtcagcctatccttttaagcattgaaaccaggcattgatatctgctctctagctatc

SEQ ID NO: 178101 - DNA, 264 bp, Homo sapiens
gggagaggagaaaggagtgtggaagagatgggggtgggctgctggcggggacagaatgtggagacttagtcaccagtcatcctgggaaggtctcctgagcacctacgatggggtgggcactctctaggcctggcaacccgcgagggcacagaacagaggccgctgcttccagggagctggcattttatttatttatttttgagatagagtctcattctgtcacccaagcgacagagtgtagtggtgtgatctcggctcactgca

SEQ ID NO: 178102 - DNA, 681 bp, Homo sapiens
cttttctatgctggtggggctttcccatgggagcacatggctggaccatcacttggagtgggataggattgggattcacattcttcctgcatttttttttttgttttgctgatttgcaaccatcaagatgagccctgtttaatctcctggcaaggaatacttgggaagaatgtgctcacagctctcagtgcttttgagatccatgtattgttgttgttacaaccactcttctgtcccctttgagaaatctacacagaaatccacatggcagatgtttgaatctcaccccttccctctcttcctaagttgaggaagagctgagctatggtctgccaacagtggaggaggctcttctggagctcactaacatgactgcaagaccctcattgaggccgagcagtattcagcgtctctgtggcctcctcactggcctccctacctctttgtagtctgccctccatgtatcagccagggacatctttccaagtgtaaattttatcttgtcatgcctgcctctaggttcccagactgtgcttccaaagccttgcaccgtctggcccctgcccacctcctgaaccactcccttccaccttttacacatgcaggccaaccatgctggttttctttcaatttctccaactcctcatgctccatcttgtccctgggcctctgcacatacta

SEQ ID NO: 178103 - DNA, 417 bp, Homo sapiens
agaagaatcctcaaaagtccttattctcagcactgttttcccattatgatcacagacttttcaaatgatgttcttgtccaaagtcccagggggaaaaaagggaaatgagatcactctatgagtttatttttccttgacacatatgggaagggagcattgctgagtttgtaagcaacttggtgggtctcattccgggtatttctctaatgctacagaatacccccactgacttcctaatgaaatgaagttgtaatgaaagccatatggagaaaggcgtcatgtttactgcctgcaccagtgtggggcagggctagtgtcacacatacataggcaatgtgccaccatcctaaatagctccacagtcaccagcaatcatttcctctggccagggtattgccatggtgggaatcatctgag

SEQ ID NO: 178104 - DNA, 263 bp, Homo sapiens
ttttccctctacttctatcctgaatcccatgaagacaggtatttttgcctattacgataacaattccatctatatggattgggttcttgacctctcagctcacacagctaacttaaaggtgtcaattactgctggcagggactagaactctttaatattgattgacctgtgaagtgctaaggcaggccagctcaaaatccaaaccaagatgctcgtttatttgcaaggtaggatcatgtgcttcagaaaaccaactacaataa

SEQ ID NO: 178105 - DNA, 829 bp, Homo sapiens
gcatgccaaattaacatgtcataaactgaacacctgatagtctgtaccaaaaccctttcttataactctttccatatctcaaggatggataactcaattcttccactgatcagaccagaaatcttggtatcattcttaattcctctctttctatttgaaattccttcaaaacataatcagaatgtgaccacttctcacaatactgtctgctacctctcttgaatcaaatcatcatcctgttatctatattactgaaatatcctcctaacagtttcttggcttctgctctttgtctattctcaatgcagcagccagaataaacttgttaaaatatgtcaaagcatgtcacttctctgctaaaaatcatctgatagtttctgctttcactcaaagagacaaagtgagttctgcctgatgctcttctccccatgactttctccccttcctcttctgtgaatgtgccagcgatgctcccgtctcgtgacctttacacttgctgtttactgtgctagaaatactcttcctcagaaaggcaagaggcaagaggctggctctttcactttcttatttcgttacaaaataaagtcactttcttagtcaagccttcactgataatcctaagatttcaaactccctcccccaccggcactttatatctttcttccctgattttcttctgcttggcacttactatttaacatactgctttcctcattttattcatgttatttatcagttgtctcctctcctaaattacacacacagcgagagcagggatttttatcacttttgttcactgatgtattcccaactcctagaagtatctgga

SEQ ID NO: 178106 - DNA, 236 bp, Homo sapiens
tgtgcgaggtgaggaatgaaagagcatatagtctcggtgagaggcaatagacaaaggttattagagtgagtttggtggcgagacggaaatgttccaggccctgccccttttatatcctcatctcagacttggcttccactttcccagggcttccttcctcacactgaatggaattttgcctgtgggaccagctctctgtgtgacagtgtagggatttgatttgatttttttaaatg

SEQ ID NO: 178107 - DNA, 572 bp, Homo sapiens
aatctgaggctgtagtgattctggtgtacttttcgatgggtcagttataaactttgctgtgggtccctgaaacaaaaactaaatgaggcttccctctaatcttgttttacatccttgagagcatgactttgtgaccatgtggggatactctctcttggtctccaccatccagagaacaggaattttcaagttcatgtcaggcacccaatccgaaagggctgggagtctgagatgagtcagcacattcttcatcccaaatgtgtcaagcccttgggtgagttttgtctgaaaaggtcccatctctatagggcatttgtcatcttttgctatcttaagcccatttctgagagtgaattcttggggatcatggagatgcctcttctaccctagataccttttgcttctaatgtaaaaagaaaggaaaaaaaaaactggaaaattatcatctaaactttaataggcttcttagattgtgtcactattggaactgactacctcattgaaagaaaaaggttaaattaaaagaaagatgcataataatgacatggttagtcttagaaaattctcttgag

SEQ ID NO: 178108 - DNA, 557 bp, Homo sapiens
gggaggaataagcaagtgggtgttaatattaatcattgatattgctatcactgcctcttatttattgagtacttatctttgacattgtgttgaataccttctgcaaatgatctcagtacatgtgacaagtctttgaggtagtagcattagccccattttacagataagggaatggagtttgagaaatcttatggtcatgcagttggcaactgctggagagagggtttaaatctaggtcagtgtggctttgtgcacactgctttttctgcaagttgttggtaggagagaggtcaccttaatttaccagaattttgttttctgtaaagagaatgactttacccaagagttgaacattctctttccagaaatttaatgagcagttctgctccacgatggtgcttggaagtttagctaaaactgctggttataaactgagagcaacctgtgtgtggattgaaagggaagggtgtgcagtcattggtaagcattttcctatggtgtgactctgacgggcaagggtgccatcgctaagatggaaagatactcctgcaaattga

SEQ ID NO: 178109 - DNA, 123 bp, Homo sapiens
gtgctgtgtgtcacagcgcaggacaacaccagatgtttctgttgggttgaatttctattgggttaaatggaattaaattaattgagtcaaactgtgctttgtgcctctgtagaaaaatttaaa

SEQ ID NO: 178110 - DNA, 276 bp, Homo sapiens
gctttttttttttaagatatattaatctgctgaaatccaaccttatgttaaaagagagacacagctaaaagaaaaacacgtcccactgattcaggagaaatgcaaaaccactgataatctcagctctgacaaaagggaggctgtggagctagaatcttccttaaagagcattggcctttagaatgtcagcaggaacttgcaacctgccagaaaaccctgagagctgaagagggtcaacttagttccttaggaggacctgtaggaagagaagtccag

SEQ ID NO: 178111 - DNA, 397 bp, Homo sapiens
aggtcacagtgttcaggaaacgactgaatttcattcaaacttcagtgaaaagccactgaggattctaagccaaggggtgacatggcccactttatatgttaagaaagtctgttacaagtggcccatagaggggtgatcattgaaggagaagactgtctaagggtggcatttgtctaggtgagaggtggtggcctggactagaatagtggcttgcagagaagaagagaatcagatgcatttggatatatttgggaggcaaaaaggacaggacttgcttatggttcagatgaagcaagaataaaaaatgctgcctgggtttctggctcctgtggactgtgaggacattcgctgcaaaggcaccatgctgggggatgaattaagaggtcaggtgcagatt

SEQ ID NO: 178112 - DNA, 395 bp, Homo sapiens
tggcttcaccaagggtgggtttcccagcctgttttcaagttttggatatgtgcatgtacacagtgagtcagccaacttgggttctggcttactgaggttggggccatggagctgttactctggctgggaagcatgggcatgtagttgcctagccagcctgaggacatgtctgccaagagtagcctatggggctgtttcttaggctcatgatgtgggtgcaaggctgtttggctggccttggggatggggggcatgtcttctgagggtagccctatggggatgtttctctcacacaggacacagccacatggctctgagcagtctaatatttctcaagtgtattagaattcttcgttcaacaaaatatctgatgatttaagttagaaacagctaat

SEQ ID NO: 178113 - DNA, 331 bp, Homo sapiens
aacgctgagcaatcaacacacagattagataggtagctttagatcattacaatttaaaaaaacattttaaaacatgatttccccagtgttagggaggcatcttagggatgaaagcctccagtctgatggattcccagttctgcggagtgaaggcagggcatatgaggaaggtctcagtccaggctgattccttaagcccatgaaaagcagatgcatgcagacatacagaccccctccttatcccattcaccgcattcttccattttaaaaaagtcacctgggtatcggctggtgcaagtggaatcagcttttggaatcagatcattccaga

SEQ ID NO: 178114 - DNA, 287 bp, Homo sapiens
ccttgtcggtctctctgaccgtattccctggacaggtaatttatcccttctgtagtttgattggctgtgaaatggcatttataatgtttacttgaggcttaaatgagataaagtggataaaaagtgcatagcccaggcctggcggagagcaagtacttggctgtctagcattcgtacgtgcaggacaccctgcactgtgtttgatgtatttcatctccacaagggctctgtgaggctggcactattatcatccccattttacagagggagaaagctgaggcacagag

SEQ ID NO: 178115 - DNA, 340 bp, Homo sapiens
gaggaatctattttctgttatttaaggatcacgatgagccattttcttgtaactaactagaagattatagactctagcatgtgtgtaagtgtatggatagactctaacatatgtatatgtatatatgtggggtggtatgtctatatatatatgctgtgtgtgtatatgtatgtgtgtatatataatacatatctatgcaaatggtcctactgaaaatttgccaatggtacaaccaaattcagaaaaacaatatgaatagtaattaacagcttgttaaatttgaaatgcttttaaatttatctcacctgttcaagtaataaagtgacatggttctactctg

SEQ ID NO: 178116 - DNA, 842 bp, Homo sapiens
aacttactttataattgttaaatgtcaagatttccttgacatttctgagatcttttaaacaaatgcagcatatccgtagttataatttttattatcaaagacaaatgccattaaatgtctgctttataagaacaatattgaatgctataatattaaatctaatgattctttttccattacaagtttaagaaattagtgtttgctttattttgtgtttattttctgtttagtcagttattctcagtcaacagtgtagatactatagaaacgtttatacattttaaaaagtcttcagaattagagacattagtgtgtagttgttataaatccacagtatttagctgtgtctatcttggttattgaagcatacatcatgcaagaagtcaaaaagaacacccttcaaatactttctgccaggcccagagttcagtgcattaatacttgcattagtataacaagcttaagaggtaggtactaatacctctttcgacaaatgagaaaagcaagttcagtaatgaaagtttactcagctgttttaactcctgggaatataaatgtagaggtaagatgcaatcttgcagcctaactccagagcccactgtggtatactctttcctaagtccagagtttatatgccataaacaaatattttaatacaagcttgtattaagggaacaaaatgagattaggaaaattgttaatgccagatatatttgtagatatttttaaatataaatggataaatattaatgcacacgtatatacatacatatataaatttatatatgtgagaaaaatcactcctgtataacctggcattttatataaagcaaaatacttat

SEQ ID NO: 178117 - DNA, 222 bp, Homo sapiens
ctgtggcctgctcagtcatcttcactgcctctgttccccagcttgtcactgagagtggtattagtctagggctctgcctttgggtcttttctcaatctactcattttttttacttcctctccctaaacaatattatttattctcatggcttcaaatagcatgggaatgattcctgaattagtaactccagttgttttctttttttttggagacagcatatca

SEQ ID NO: 178118 - DNA, 490 bp, Homo sapiens
aggtctaggtcatttgtattcataaataataagtaagtataagcaaagtttattttttaaggtcacaactgatactgctttttccttttgaggtaaatttagagatatttccttaatcacctgttgaatatgactaatgaaaaataaataaggatcccaatagaaatctaggctgtttttaacattttaatagcggttgtgactaattcagtgattatgtagttgtaataattattacaataaaaataatagatgttaatactaataagaactcatcaaacaactggatttaaacataaaagcctaagtgaagaaaataatttatttcctaacaaaaagacacataattagagataaaatatttgtgagtgagccagataagaaatgaaagatagcttagaatgagaaaaacaaattaatactttctaaaaattaatacacctatagagtgctatatacaaacatttttaagagcattttcacacatgct

SEQ ID NO: 178119 - DNA, 317 bp, Homo sapiens
atggctatgttctaataaagctatttatataaatgtgcagcaggctaagtgaactctagtttgccagcccttgttgaaaggtgtcagctcccaatttggcttttttgtttgtttgtttgagacggagtctcactctgttgcccaggctggagtgcagtgatgcaatctcggctcactgcaacctctgcttcccaagttgaagtgattctcctgcctcagcctcttgagtagctgggactgcagacatgtgccaccacacccagctaatttttgtgtttatagtagagatggggtttcatcatgttggccaggatggg

SEQ ID NO: 178120 - DNA, 312 bp, Homo sapiens
cttgacctcaagccatcctctggtctttggcctcccaagtgctgggattacaggcatgagctaccatccctggcctgaaggtggtatctgttaagagcattccctgagcatatttcaagatgactactcttaccctcttcctgccataagcaggaagcatttttctatgatcttcactgtgagaactgatgaagtttctggaggtagagctcacacatttctgggggccccctatgactggatccctggatttttacctctttttttttaaaaaacagctaattaaaaaaaatatttagtagacaagaggtc

SEQ ID NO: 178121 - DNA, 507 bp, Homo sapiens
agcctaggcgacagagcgagagaaccgttttaaaaacaaaacaaaacaaaaaaagaatagaactatatgagaacattataggttgagtataccttgtgcaaaatgcttgggaccagaagtgtttcagatttcaaattttttcacattttggaatatttgcattacacttactggctgggtatccccagtctgaaaatccaaaatctgaaatgctccaacaagcattggattttcagatttgggatgctcaacctgtaatagacaaattcctagaaacttacaaactaaactaactcaagaaaatcgaaaatctcaacagacctatcataagtaaagagattggatctgtaatcaaaaacctcccaagaaagaaaacttcagaaccaaatggcttccctaggaaattctaccaaacattttttttttcccggagacagagtctcgctctatcccccaggctggagtgcagtggcatgatcccggctcactgcaacctccacctcacgg

SEQ ID NO: 178122 - DNA, 475 bp, Homo sapiens
aaggaattggagagaaacaaaagcagtaagcaggcaatggttgcccagactagatggtggctacagtgatcattatggtagaactgtgtccccaccaaaacgatatgctgaagtcctaacccccctgtacttctgaatgtaacctcatttgaaaacaggattgttgcaaatgtaattgcttaagctaagtaagggagggctcctcatccaatgtgattagcatccttgtaagaaggcagtcatgtgaagacagacagggtgtgcagactcgcactatgtgcagatggaggcagagacaggtgtgatgcagcggcaagccaaagaatgccaaggattgcgggcaaccaccagcatgtaggaagaggcgagggagggttcttctgcaggtttcagaaggggcatggcccagatgatttgatttcagacttagagtttccagaactgtgagataatacatttctgtagttttaagcca

SEQ ID NO: 178123 - DNA, 444 bp, Homo sapiens
cagtgtggtttatgtttagaaaggcaggtggggctgtggctcacacctgtaatccaggcactttgggaggccacggcaggtggatgatgaggtcaggagttcgagaccagcctggccaacatggcaaaaccccttctctactaaaagtacaaaaattagccgggcgtggagtgcatgccactgccttccagcctggccgacgagtgagactccatctcaaaaaaaataaataaataaaaaataaaaacggtgtcctctgggccaggcacagtggctcatacctgtaaaatacctgtaatcccaatgctttgggaggtcaaggtgggaggattccttgagcccaggaggtcgagaccaatctgggcaacatggtgagaccctatctctatattttatttattttatttttatttttagtttgattttttttgagaccgagtctca

SEQ ID NO: 178124 - DNA, 315 bp, Homo sapiens
tcatcgtagctgcgtattcctgttttcagtgtagtaacgttgagcatttatgttcctagcactcttccaggtaccctgtgcgttatgaggcaggcacatctctcctgaaagaatttatattcttgtcagggaaataaggcttcagataagaaaaaattcgggggaaagtgccgaattccttctaccctaacctgcctccatttcctccctcctccgagttgagatgattgggtcagagccagctcttcctgggcttgggaagaggagatggggcttgagtgctgctgcccccctcataacctcagagtctatatt

SEQ ID NO: 178125 - DNA, 171 bp, Homo sapiens
taatgctttttgaaaaatcagggcttagctgcttctgaaaagatgaatgtactcttaggggtccacatttgacttttttccaaattcaaataaaaattagtggggcaggatgttaagcaggataactctacttaaagcagaaaatctttaaaattttggtgtagataaatt

SEQ ID NO: 178126 - DNA, 623 bp, Homo sapiens
tcaaaagctgaggctaaaatcagaggtaaataataggttttagccagatatctgtatttgcgtgtctaatttaggccatttacaaagtccattcagagaggcgctgaacccagaaaagcatcatgtgtaaattaacttttatgaagattattaatcctgtttttttaactataagtaaaatccagttaatactgtactgcctatattgttttatttactaaaaaatttttaagtcctacttgaaaaactagaaagtgaaatgcttttgaatatgcagatgtatcttatgaaactcgattcgacttcgagctcggtacccaattttaaactgtaaaaactaaattacaataatgccccatggtaactagaaaagttttttttaagctaatatattcttttgtaaaagaagggatttctatgtttttaagcatatgtttgtaagatacacgttggaatataaattaatttggcattagcttaacttgctgtacaaaaattcaggcttaaatttatacttactgtagatgtggtctttatctcagcagtgctgtatgaaagcagagactgaattggtttctcttaataaatgctgcttaagcaacagctggcagtagtcctcttta

SEQ ID NO: 178127 - DNA, 375 bp, Homo sapiens
tctttccctaagaacttcaattttgccctgtcaaccctacactttgaataaatatatattgggtgattctgaacctctataatacagtttatctttgttgtatttccaaggagttagaggttgagccagggaaagacagaagagatatgagggttacagggaaaggaaaaaaggaaagaaaagatgagtaggcttgaggcagagaggaaaaggacatccatatagacccgaaacacggaagaggctgaaagtctagatgtggtgaactttggggcaagtccatcttggtcctatccctccctcatccacagagggcacaacctacccaaacagacccacacctcactaggacagcagtattaccatcacaaccac

SEQ ID NO: 178128 - DNA, 539 bp, Homo sapiens
aaagaattatggatgattccccctactttctctatttcctgatttttttacaacaatcccatgttatttgcataacaaaaaaccaattaggaaccatttcaactgcacccccacgcaaggacctacccagggcctgtgcgactgtcattcctgctgtccagaaggctccttcccctaggaatccataagccaagctccctcagcttctttagggctttggttgtccagcacttcatctcaataaggatcaagggttcttctctgagtaggaatctcacttaacggcattccttaagtgactaacttttaatggacaatgattttaatgttactaaaacttggtcagctgggtatggcagctcacacctgtaatcccagcactttgagaggccaagacaatcgtctgaggccaggagttcgagatcagcctgggcaacatggagaaatctcatgtctaaaaaataataaataaattagctgggtgtggtggtgcacacctgtagtcccagctgcttaggaggctgagacaggaggactgc

SEQ ID NO: 178129 - DNA, 150 bp, Homo sapiens
gccaggtggggggcacagaaacctcccgctcgtgcccagctgagcctgccttcctgtgccaggagtgagagcgctctctggaccgcagcaccagcctttgcttcttgatgctcaccacttattcaggtcaaagcctggcaactccctcac

SEQ ID NO: 178130 - DNA, 296 bp, Homo sapiens
ataagcattgctcattagtaatgacttaataaatgttgcctctccatttagccttacaaaaccttttctgcattaagattgaccttgccttagttcctacaaagaagctgctggttggagaggtgttaattgtcttctaaacaacttcatctgattaacctcttggcttgctccggtgccagcctcccagggaaagaaatcttatatcattattactgttaaaagaaatataagctctgaatatgcaatacatgcccagggtagcaagatgaataaaaggttatatagtgaaaagt

SEQ ID NO: 178131 - DNA, 555 bp, Homo sapiens
aagttgatccacaggtttaatacaattcctatcaaaaccccagtaaggtttcagtaaggtttttttgtagatacatacaagaatattctaaaatttggctgggcacagtggctcatgcctgtaatcccagcactttgggaggcagaggtgggtggatcacctgaggtcagaagttcaagacaagcctggtcaacatggtgaaacccccgtctctactaaatatacaaaaattagcgagcgtggtggcaggtgcctgtaatcccagctactcgggaggctgaggcaggagaaaagcttgaacctgggaggcagaggttgcaatgagccgagatcgcgccactgcgctccagtatgggcaacaagagcgaaactgtcaaaaaataaaaaacaaaaaaaaaaacttttttttttttccgtttaaaaggtgggttgtccatccatgcaataaatattgtggagtggctactgtgtgctaagcactgttgtaggcacggggattttgtaagtgaccaaaattagaaatctcagtccttgaggtaatatacattcttaagg

SEQ ID NO: 178132 - DNA, 339 bp, Homo sapiens
tgacaccccccccccaagatcacaacccccaatccttagttcatgatgccattcagagtgtgtgtttttttgctaaatagcataaaattacatcctttcaacttaaacaaactgctctgcaacgccgagggccgctgaacgggtgttttaaatgtcagcatacggtagccacttgtgttgtctggcactttttgattaagagcagctgcctgtaaaggcctctgcgattggttaagtggccctgggcagcctgcctcggccggcctggctttggtcagggtcaccgagaccgagccgggtgggagccgcctgcgcctggcagccgggccacagcggccg

SEQ ID NO: 178133 - DNA, 129 bp, Homo sapiens
agagaggaaagatatgactggtgtggggacagcacaggcaacactaaggaggaagtggactttggcagcctgagctcacacaaggtctgagtggctgaaattggaacaaagagccaggccacatgggga

SEQ ID NO: 178134 - DNA, 651 bp, Homo sapiens
tctagaggatcccaagtgtccgtgtagtctcaaaaggaaaaaaaaaatcaatgaatgtatttctagcctatagatagttactgggctagtgctgccacttggcctggtgcttcagcttgttcatatcgtgacacacctgcaaattaatgcatttgtctgacacactggggtaagcggatgaagctgtttggggctagaagttactagctggatatgagaagacaggtgcccaggaagtctcaggccccactttgctatcttaccctagggctgaggggatcagcatcttgaagctaacaagtagctcattctcggcacactggttcagaattttagtctagcccatcagtactctgtgtatcagccccataaagcaagcaggtaaccaacaccaaattcaaacaaatctgctggactgttttcccagagtcaatcagttactggctatcatcatcaaactaccagatttaaagtgtgtgtgtgtgtgtgtgtgtgtgtgtgtgtttgtgtgtggagggggaggcggagggggtgttctgggtgaattctaccctctctttcagctcccactctcacttagcaaggacttctttttagtatcaaattaagagaaagtgctatgaagcataaaagatgtaatagacacagatt

SEQ ID NO: 178135 - DNA, 914 bp, Homo sapiens
tggtctctaagctgcttgattcgccaagtgcagtaggagggagggggatgaaggaacattctaagaagttctaagacacctcagaaaagggcagactagttttattccttcacagagaagaggtgaagcctggttttactttaaagtaaacatgcccagtagctgagggctacttggagtggcggaggaaggaatgtgaatcacagcacacgaaatggagcactcagagcatctgctttgtgctgccccatgaggcctgctcaccaaagtgaggagctcacagaggtgcagcccctcatccaagccaacggcctggaggtaggaaagtgaggcaggggaagtctgattcccgagttggactcttagacataaacagataccgcttctcttgggagttttgctgcaacagcagcacagaggagagagagcagctcccagtagattttaaccagggcaactgtatcccccaaaaaacatccaccaagacagttttgcttgctacaactggggatggggagaaggagttgctaatggcatctagtgggtgggaagccagggaggctgctaaacatccaacaatgcacaggacagcccccaaaacagaatgttcccgtgcaaaatgtccacagtgccaaggcagagaaagcctgaattacctaagaaaacagggcagctatgactcactgggccctgctgtatcaggtactgtctcagcgctttatgtgcaccatctgatgtcatcctcccaacaattctacaaacagttactactctctctcttctacagaaaaggaaattgaggcaagagaaggcaagccatggacacaggccagtcagtggtggagttaaaattgaaaccaggctgggcgcggtgcctcacgcctataatcccagcactctgggaggccgaggcg

SEQ ID NO: 178136 - DNA, 296 bp, Homo sapiens
ggcctgagccaccatgcccgaccctttttttttcttacagggacatcagtaacagtagattagcttcttccccaaaatgacctcatttttatttgattatctgcaaagaccctgttgccaaatagtgttacatttacagatcctggggatttggacttcaacatatcttttgggggaacacaattcaatacttaatagacttggaagcgggtatgttggttcagccctggggaagagggcttaagtggagtcagaggcatcaaagagcagagaagctgcctttatggacgtatgag

SEQ ID NO: 178137 - DNA, 204 bp, Homo sapiens
aatttctcctcagctctgaatatgtgatagaatttggaacagtcatctggcaatgcctaactgcctggcactaagactttaaactagattctgtgaactgtaaatcatagaactatgtgatcttggctcttttaatgtttaagtgcagcaaatattttatgcttatcaatacaaaggaagcatatattctctttttcctatagt

SEQ ID NO: 178138 - DNA, 357 bp, Homo sapiens
tattggtccacactgtgaaagaagcagtttgtttgttttgtgggtgcgcttttccctctgtaaacatgttttgaggccaagtgattggtaaatgttttataaactggaagtataaacacagacattctcttccaaaaatggatctctaggacttccctagggaactcgctcttgtttgttctaaattctgaacctggttttaatgaaaatgttacacgtctaatatttgaggtggtaatcctgacatcaaagagaagaaatgttgaaaaggttttgagacaccctaccaaaagccatttctgcttctgtgaaggacacttaaattacatgccttaataaaggaagaaaagagacgag

SEQ ID NO: 178139 - DNA, 459 bp, Homo sapiens
aagaaggaaattacttttaggtcttgaccaaagggtgttccaagtgaagaggtcccaaatcttagtaagcgggcaaaggtggttttatttttttcagcattgcttcattaatctgaatgtaaaactatagaaaaaatagtctctaatttagctagaaaataacactcatttgcttgctaaggtctagcaacaaaagaatgttaatgcacattactacctattactacaacagtgaacacaaaatgaaatgagcagatgctgatttaccttctctggtgaatcatgcatggcacgaaactgcagtcctgaagcaagctagaccatctgtgctgttttctccagatgagccaaatttgatgacaaaccattctccatatataggagtttttctttctttctctccattttatattagaaagtatagtttccccaatagaagatgcagaaaactattttgca

SEQ ID NO: 178140 - DNA, 161 bp, Homo sapiens
gttaggcaaagtcggagacaaatacatagctaccaattgttgtagttatttatatgacttaattcaagtatgtaaaacaaaaacgtagaaaggatagaattttgcttcttgtattaaataaaaagcatttttgtaatttatgatccagccctcaccaagtg

SEQ ID NO: 178141 - DNA, 370 bp, Homo sapiens
aggtaagatcctcctcccttccttcctccctagggcaagaggcttgcaaaattcctgggccctaggcaagtggcttcctccctgggaccccaacaggaaaatggaggagagagatgggcccagagagggtgcctcacctctgatttggtttggaagcagaagactaagtgcacagcctagaggaagccccttcattagctcaggcagcctgcaactttatcatcagcagtgggacctgctgcctcctgaagggtgggcggaggctgtggcagcagcagatgtaacagggcctctgccagggagttaatggggccctgggttggggtaacagggtctccggatggaggaaatgtggtgtggggacagggga

SEQ ID NO: 178142 - DNA, 263 bp, Homo sapiens
aattaggtgagtatgtgatgtgctaaactggattcctcagctatcattaggaagcaacatagccactctgtgctctcagtggctgctttgtagaaatagctacctttggccaggcatggtggctcacacctgtaatcccagcactttgggagtcgaggatcacttgaggtcaagtgacttcacttggtggatcacttgaggtcaggaggatcacttgaggtcaagagtttgagaacagcctggccagcatgtgaaaccctgtc

SEQ ID NO: 178143 - DNA, 226 bp, Homo sapiens
agtgtgccagctagctgtagactaactaaagaagaattaggaaaacctaggttttagttctggcccactccctgggtagtaacttcacctttctgacaatatcagcatctttcttccagggtcatgttgaaaattaaatgagatcctggatataaaactggtagataaactgtagaatgcaacacattttctttctttcttttttttttttgttacatagagtctc

SEQ ID NO: 178144 - DNA, 323 bp, Homo sapiens
tgtctggttctgtggctactgctggagcagtgaagacatgggaccgcaggcatctcacagcaatccacttgggctagaggacaccagcgaagtggcagcaggagtgacagctacaggagagtggaggaagggatgagctgcagttctcactgacctgctctagccaggatgccagggatcctgcagaggcagcctgggcccagacaatagctggggaggttgttctgtggatccctctgttccgcctgaggataaagtgatctttagagacttgtctcagcctagaggggatgggttcaagtgatgatgagggtggaacctac

SEQ ID NO: 178145 - DNA, 276 bp, Homo sapiens
ctcttttgttaatcacatagttgcattgtgttttcttttttcaaatatgtatgagcagcataaaattggatgttcctttgaaacaacagcagtcagaagtccatgaggaggtgtcttctgactgcgaggataagggtggatcaccttaatgcaatcagggaatgatgtgttagaagcatctatagttcctgcttcccctaatttctagctgtagccatttgaagattctaagcaagtcctcaactgttcagcagagcctctggtccagcatgagac

SEQ ID NO: 178146 - DNA, 455 bp, Homo sapiens
cccagagttgaatatgagttgttttggcaagatcatagctcactgtaacttcaaactcctgggctcaagccatcctccctcctcagcctcccagagtgctggaattatagacatgagccgcctcacctggctgtttcgttgttgttgttgtcgttgttgtttttaaatgacctgtattcttaccattcaaaaatgtggaccgcaggtcagcaacatcaatctaacctgggagcttgtttgaaatgcaggattttggccccatcctagaaccactgtatcagaatctgcattttaacaggacgttaaaagatgttctgtttgcatattaaagtttaagaagcactgatctacaccatcctccccaccccccagctatcccccaaatcatcttaatgatttagggatggctccctacatagactaccagcagtatcatgtgaaccaggccctcaaag

SEQ ID NO: 178147 - DNA, 267 bp, Homo sapiens
tttgtctgatttgcaagacctgtttcttgtagatttgatcataaccctgagaaatattggcagactagtctgtcagggagtaatattctacccaaactcacacaggaacattttgaatgctgctgagagtccaaagtcaatagggttgccaggatgagcaaataaaaatctagttaaatccaggacacccagttaaattggaatttgctcaacaaaaaaagtaagtataattatatcccattcactatttgggacattcataaacta

SEQ ID NO: 178148 - DNA, 320 bp, Homo sapiens
tccactgatgggatactaatacaatagagggatcttcactagttgaggtcaaatcatgaaacagttttatttttccaatagctgtatcagcagtgttctttctatcactccctcccccacttcgcatggggcaatgggcttctttaactacatttctgtccagttctccaacttttcagtcactactgcttattaaaatagtttcagtcagactaaagatttggttctattcattttcaaatgccaatctcacttttcattctgagtcctcctggtgcctccagggcagattagaattgaggctcctgggcttgaaacat

SEQ ID NO: 178149 - DNA, 285 bp, Homo sapiens
tgcatgatacgactcgagcttgtaccctcgataaggtcaaacacttatagccaactgaccttcaacaaagcatacaaaaacataaagttgggaaaaggacaccatattcaatgaatggtactgggaaaattggcaagccacatgtagaagaatgaaaatggatcctcatctctcaccttatacaaaaatcaactcaagatgaatcaaagactcaaatctaagacttgaaactataaaaattctggaagataacattggaaagactcttctagacattggcttagg

SEQ ID NO: 178150 - DNA, 533 bp, Homo sapiens
tgaatgggtagtgaaagacagagatatgaactatagccttgtgtcccattatagaaacaaagactgtagtaagtagctttttgcattttctctttgcttactatatatatagtataagatattgaaggtaaactttataaggtagtctttagttaacagaatattcagaggcactatgacagattacatacaaatatagctagcaatgattgttgttgtgtgtctccttatttgggggagagggtaagaactccatttgtataaaggatagttttgtcttgttacgtagacacagattgttgaatggaatttcaagtgtgtttagaagcattcataaggaagctgagcagccaggggagtggactgtgacagttatttactgcctctccaaacatactggctctcagcttcaaatctaccctttattgccatactttgtgataaggatgagaattgtgtaaatgttctcctttgctagctgaaaatgttacagttttgtcagcagagggtgctagagtaacactgcagtaaga

SEQ ID NO: 178151 - DNA, 888 bp, Homo sapiens
caagcttacttgaaaccaggtcatccttttttcacagaatcttaggagactaatgtttcatgcctgggggaaccatatcctaacctcttagccagaaacgaaaccagaggcccccatatatagagatccttggatgagtattcatgtgtgatactgctcattaatctgtgatgatatttaaaaccccagacaatgtagtagcttttcttgtactacttgtttgtcccttattctgaaattacatgtcgtgtgtgtgcgcgcctaagtatcctttttaaatggtagtgttaggaaatggtaattgtctcttaaatgtcctttattaacaattcatgatagataaaatgttcttttaaaatgtttaattattttgtgaattctaaaagtttgctttttaggagagatttttttgctccagggaataccattcttaagctataagactatatctgagatatagtctagggtctatgaagtccagaattttgtaagtccatgtttcgtcttcatatgcccataattgacttttaaatacagatcccaaagccttacttatttggttgcataggaacctccccgttaccatggtgcccagcactgccttacaactccagatggcactgagcggaccctgctgtgagcagctccctattccatgacagtgtgttgagctctccattgtcagaggctggtagggtgttcagctagaggtgccgaggatgaggtaactggaaattctgaagcgcacaagagaaggcatggcttgaaacactgacctgaccctcagcataaactgaccgttgaggaagttggtgaaactggaagagaggccccttgccaagcacatctgagagccaagagtcagcagagaaagagcagcccccagag

SEQ ID NO: 178152 - DNA, 649 bp, Homo sapiens
gcatatgcagtctttctttgactgaaatgccgttgtgcagtgcatgactgtattttataagatgagcctaattgtgttatacttctcgggaatgaaggcataccctgcagtaggtttggattctgtgtttgacagatgtggctgcttttctttgctttcactttcccctaaaggaaataacagtagtaagatgaagaaagaggaaactagtagtgaaaattaagcaggtgaaatatttatataaggcaggacagctgtggtctagacatttacacagaattttactagagtaattgcttatctcagaattcattcaatatgctaatttctcgtagcagattgcctgtccggcaatgcacatggcatacaatttttgaaattctgcagtgatgatggaataagcatttctaacccatttctctgttatagcaattgccacattgcctggtgtttatacgtcttttcatcactgcactgagttactatcaattactgggtctttagctttctactatatttgggatatagaacagagtaagtactcaatacgtatttttgatgaattaatgataaagagaaagaaattccatcaacaacgtatgttatattgttttttctccagaggtaactaacctaacttgatatatag

SEQ ID NO: 178153 - DNA, 523 bp, Homo sapiens
agatttgtagcatatccttgaatctgagacctcggattcagagttgaaacgcctgtagagcacgtctcgcctgtgaagagattctcctcctataatctgctatgaattttttggatgtatttttccacagaatacacctacgggacattttaacatatacagttgctgaatttgtattgaggcatagggtgaaaaagtgatttttaaatcttaattcaaaagcccaactgataaacaaatacaatttttgaaattctgcagtgatgatggaataagcatttctaacccatttctctgttatagcaattgccacattgcctggtgtttatacgtcttttcatcactgcactgagttactatcaattactgggtctttagctttctactatatttgggatatagaacagagtaagtactcaatacgtatttttgatgaattaatgataaagagaaagaaattccatcaacaacgtatgttatattgttttttctccagaggtaactaacctaacttgatatatag

SEQ ID NO: 178154 - DNA, 643 bp, Homo sapiens
agaagaccttccttttcactctcaagacagcatccttggatattaattaccttttgttcattatcccctttcttatgagcaccatctagttgttgaagcaacagattttcatgttgtagttgagatattctctcctctacgtagtcccactttccaaaggatttacttggcttaggtccttttgtacactttataaaaccaaaaccttttctctgagagaatttcttgtgtcatggagtttactttttagggtattgaattcgagcttcggaaagttgctcagttaaaaactcattattatcttttagttcagaaatatcagaactcattttctttcttgtaaagaaacgtcttgtgctctctgtaaagcaagttctaggtctctttttgttttcacactttgatcacactcacttatagcagcagccagtctagcatggaatgactcaacttcagcttccagtctttccttgttttgattttccttctccagtttagacttgagcattgtattctcagttttgaggtcgttaagctgttgaccatactgggatactgtttttgttaatgtttttccattcagttttatagtctcttgaaggtcatcattcatttctttaacaatttcaatgtcctttttccc

SEQ ID NO: 178155 - DNA, 369 bp, Homo sapiens
ttggagacttcaaggaaagctttggaactgacttttgctctaaaggatgaatagagagaccttgccctgcccccattgcacagaatgcaccaggctgctccagtagctggaatagcatgaccagaagccaagatgacaagacagagcaccgtggggcccagcaggtgggagagcaccacagagcttcttgtgtgaggtcacatcttggaggggagatggatgcaggctatggatgggctaaggaaggtcttatttgccatgctgggattacaggcgtgagctaccacgtccagccttagttattatatttttaaatgtacaataaattattctctagtcactttgtgctatcaaatactagagcttatt

SEQ ID NO: 178156 - DNA, 530 bp, Homo sapiens
ataagaaacaaatgagtccccagaacatacaagttaagattattcaatcaagggaggcagtcattaccctttaacctctgaaagaaaactgcaagtaggcatcaaactaaccctgagatgggagagagtagaagttcccacacccagtgaattgtaggacattaggtaattattggtgggaagtaaatttgagtggggaactgaatttcaactgacttttatccttgaagatggtgcttctattttctcaaattagaaggttatgaaaattgcatctgaacaacaagttgtattagcataagttctagaagaaactgagaaagcaaggctagtctgaggaaaatttataccgctcacatttcccttctgaattggagaatagaattgaatagcaaaattgtaacctacctttcaaagatgcattttatagtgaagtatattttgtgaacttttatatcttctattcttatttttctattgccctattttaaaatctatcttgaatttattaaatgtatatgtctctgttt

SEQ ID NO: 178157 - DNA, 355 bp, Homo sapiens
tttgtacctggagagaaagagaagcacgccttttgggagcaaggagagcttatcgatgagcgttatcagaaacccccagcaaaggctggctgggtcactaaaggggcagggtgggcgcagcgctgctacgaccgtgaggcgcgcgtctcggaaacaggctgacttgccccggacgcgtcatcagcttcccgagggtctctcctccctgccctttccccttgagccgccccgcctcattctcgggaagtttcaggaacttccaggggagttgcaagtgcaatttaagcacaattcccaaggtattcaggttttcttaccaacgcggagatagtgggattcagcaagtttaagagga

SEQ ID NO: 178158 - DNA, 739 bp, Homo sapiens
cacgcaggaagctgaggaggagaacagacgcctctgggccactggccgggccacttgagcgtgggaccgccgagtgtgaccctgaggccgagtgcgtgcgggactgggcgatagctccgccaggcaggattttgtttgtttcacctcttgaggtagtcccggcgtgtagtacataataggcgcttaatatgtgtattgtaaagaatgagtgcctggccatttgtatttgccttgtgagcgcgtgtgtgtggcactgtgagggttgcgggaccgacggaacctctctggctctggcgggttgtgtttccgcgtgtgtgtaatttgagtgtgagtcagtgtgtagtgagtgaagggatctgactggagaaaaccacagtaaatacccggggctgtgatttttgtgactttggtcaatgggacgacaggctctgtggtagactggctgtgcttgacgtaacaatgtggtactatgccgtgtggttgccggcaaggctatgtgaagatgagaatgtgtgatttggaaaatctggatgtggaacatcacgggtgccagtggaattgtgactctgtgtgtgtataaaagtttgcaaccataggcctatatgtctgtgggataaagagaatatgttgcgtcttcttggagtatcagctttatttaaacatttgcatcagagagttgcgatttatgtgccaaagatttttgtctttttatattgaattaaatgaattttttacaaag

SEQ ID NO: 178159 - DNA, 432 bp, Homo sapiens
ccatttacatctcttaggattggttgaatagagtatggcctattgaatatacttttgatgttgttgccagtctcttttcaaatgtacacgtgacactatctgaagaaatactagaaacacctagtaaacatttttctaatatctattgttaagctatattcaggtgatcacattttgaggcttggttttctgcttggctatcagtgataatcaggtaacatatagggtatctgtgagctgctgactttaataggtcagcctgtgtaagtgtataagacctacctttttggagaccaataatgtggtagtttcctgtgcttagacttgaagggagcacttgttttagacctctataccatggtttgagaaatcttttccttagtatgtaatatccatttgcattcctgatgatcttaccctgtgtgattagta

SEQ ID NO: 178160 - DNA, 234 bp, Homo sapiens
gttcatctagtaacttatagctctacccataacacattatcacattactgaacagcatttattccaacatatatttatttaggcatacactgtgtgcacttggctaggtacataggtagatttaggaaggccaagacagggcccctcttcttgcttacacatacgatgtttaaaaagcatgacaaatgtcataaaaatgcaaataaaatacagcaagggaaggacttataatta

SEQ ID NO: 178161 - DNA, 332 bp, Homo sapiens
tccacccaccttggcctccaaaagtgctgggattacaggcatgaggcaccgtggctggccttcattgtttttattgaagttaggctgtgctgctgcttccctgaatttcctcttagtatatgattaacaacgtgggaattaactgactatcagtcccgacttcctgtccccgggaggggtagtttcagagcatctagaaaaatccaaaaagacaccgtcttctctctctgctgccagagtcagactgagcatctctaacccttccaagagctagacaagaaataagaactttttaattttcgattcacggggtgcacctgcaggcttgttac

SEQ ID NO: 178162 - DNA, 425 bp, Homo sapiens
tcataaagctttcctcagtacttgggaagatgaatcctctaaatgggctggtttcccattaaggaacacaactcatggctcattctatacatgtaactcacacacatcccaattaattcaggctacagtgttttcctgccagtgtaattctgtagactgtgggggctgtggctgccctgactaacatttctaattaccctggcactaacaacactcgaagtgggtatttccaacaccgctggcactaacagatgaagctggctgatattttcaactgcttttaaattaatagattggaaacgatacttcctgttcctctttataactgcttcattcctggcacaagattaagaatggccaacacaaggatgctggaattcatggtgaactttctccctttggtcttgtgacttactcctcctgat

SEQ ID NO: 178163 - DNA, 603 bp, Homo sapiens
tgaaatggaaaaggtaattgtacatatttagatcagaaattgcttggagttgctgggatttattataaaggcttttattcatatgttttaattaaacttacatttttaaaacacatacaaatatattattatgaagtatatgagaaaaaaagaaaagctttctctctacaatttatttttaagaccagaacttaagaaatgagaggcacaccaccgaggtggctgccagtgtcaggcaagggtttggcagagaacaacctaagacaggaccaaccactgacagattctactataggagcaagaggaagtttcagggaagagaaggcaatgacctacagaatcatgacctaaataaatggtggtggtttaagcctttagattataggttagtttattttgttccaaatggtaattgatacgtaagtagagttagatccttttagaaatctttcccagcaaactttcaagtaaagatggtggattgagcaaacacatctgctttcatcttctctttgtccccagtaaactcagagtaaatgataattttagaagtgcataaatccacaaggataggaatcaagtataagaaggatagacaagata

SEQ ID NO: 178164 - DNA, 457 bp, Homo sapiens
aaacacatatcctctctggattttatcctagatcttaagaaacctaacaaataattatctaagcaatgagcaacaaatcatagtaaataaataaataaataaataaccaaagaaacagagcaggagaaacaaaagccagcagaaacaagtgatggcagaaacagacttgcagagaccccaaatacagaaatgatcaaatagaggctcaataactatacttacagagtttaaagaaataaaagacaattttaaacccagggtacagtaaattgtataaaaaaattgcaacagatttgaaaaatataaaattgaactttcagaaatgaaaatctagtaatagaaatttaaaacttaatgagtagccaggaaacattttattattgaggtatagcagcttaaaaattgttcacatatacatttataaagggtctcacaatctgagggaaacattttccac

SEQ ID NO: 178165 - DNA, 610 bp, Homo sapiens
cagtgaggcatcttatctgccagagactctgaaagaatagacatcaagttattggggttttagcgtaaatgacatgaaaaagcttgtctggtccaagagccaatacttttggcatgttggatgcctgcgcagctagctaaccagcaactggctagatggatggaggagacaataactgtaggcagctccatctgcatgggttggtccctactactggtccaccagtactctaagctcttggctcttcagtcctcacattgttttgcccctgcctctgctcccacccaatataaaggcaatctaaccacagaaggtctgttactttatcctacattgaaagccccttaacaatggattgacatgcccaaaggtgtatttgagagatatcatcttggctgcagtatagacagtggagtggagaataaagagcaggtagactacatgaaagctattgcaataatctctgcagtgaaatgatgaaggcttcagctaaagtggtggcaacagaaacagacatgagttgggacaaaggagatggagacaacatgacttggtgatggattaaattttggagataaggtagagaccagggtctagacctttactactt

SEQ ID NO: 178166 - DNA, 196 bp, Homo sapiens
gttccgcgccagtgggtgagcaggggttaaattggtgggagttttgatctagcaggacttgggttggctctggggaataccgtgggccagttagtaagagaagaagtaatgatgggcaagaagagtcatggcttatttcatggaggctctaggaaaactaattaagctgtgtgtggtaaatatgaagaggctaggt

SEQ ID NO: 178167 - DNA, 941 bp, Homo sapiens
ttatctctgtcttgagttatctctagagacaccatttcttctcaatatcaaatgacatatttagttaggaaacagaagtaaactggcattgtggactctatgatattttaaaggttaatattattcattactaaactaattaggctaattgccttctcagaaatgtagatttgaatatgctgtagatgttgacagtttattcccacatagctgatgctgcaattggagtttaatcagcaattctatgatgctttcacattcaaccttcaaattcaggcattctttctgggcaaaagcatcagcgatgttactgagtttcaaccttgccctccccaaggggttttcagctgacagcagggcctagtggcaacagtcctgagataggagttgaaggcccaggtcagtgagtcccaaagtgcccttcttttaatagcagaatgagaatcccccaggcccaattcagggagccttggaatctgcatttccacaaggtgattctgatgtaaaagcactgatcaagattttatcttctttatcctgggtcagccaagataaagtatataatctcttacaccttgatttgcaagtctctatggtggaataatgatatttgtatctccttttctcctaggaatattaaagagacaacattagtgaatatatatttaaaagtaaaaatctcagagtttgagagaacagcgtaacgtggtagtaaaataacaggttagcattagaaaaacttggttctagaacccagtcagccacctactcactgaacttgagtctcgattttcacatcttcaaaaaagagattaatacctacttcccagagttaggttaaaggagatagtatgtgtataaaatttgtcttatgattaccacactgtagatattcaataaaaagtagatattactaagaatgagaggagctataaatttac

SEQ ID NO: 178168 - DNA, 471 bp, Homo sapiens
ttggcagggctgttttcttcccaggtctctctttttggcttgtcttctcccagtatcttcacacggtcttttctctgctgtgcctgtgtcctaatcttcttttcttataaggtcaccatattgtattagggcctgccctaatgacctcatttgccttaattacctctttaaagactctatttccaaatacagtcccattctgaggtactgtgaatgaggacttcaacataggaattttaggggcctcaattcagcccttgacagtgtggttcaggaatgcagttccaaaatacactcatgttacctaagccttgagttcctcaggtgggcctctgagggccagcagggaagacaaggtcagccagctttaggcttgggtgtggacttggtggccaccattactagtttaataagatcttactggtggcttaggcaagttggctgttcctcaggaggttattggcataggcc

SEQ ID NO: 178169 - DNA, 423 bp, Homo sapiens
acgttgacacttcaggaaggtaaactattaaggcaactgcagtataaaacagtataaacatgttttaaggagctaaattaatcaggtggtagaatcacaaaatgtttaaaatatatactaactcggaacatcaatactgaactcattctaaaaataacttcaatcatcttctaaatctaataatgaagtccaaatgcacatgagcactatacaatagcatctagtcaactatggcattgtgacacactatcactgttataaagagtgaaatattactcaagcagccacagtacccaagtttatacatgatttgttcttacaaattataaccgatcaaacattacacttaatactaccatgggccgggcgcagtggttcgcgtctgcaatcccagcactttgggaggcagaggactgacatact

SEQ ID NO: 178170 - DNA, 111 bp, Homo sapiens
ctcacagtacagtagcctcaaactcctaggcttaagagatcttcctgcctcagcttcccaagcagctgagactataagcatgcgccaccatgcctagctaattaaaaaaaa

SEQ ID NO: 178171 - DNA, 449 bp, Homo sapiens
tgctgaatgaatgaatgaatgcaggcatgtgtgaatgaacaacagaggctgggtcttgtatactgtggctggctgtggccatcagatccaaggatacagaagctgagacccaggcaggccagcaacttaaacaccacaacccccaactgggagcctcagttttctcatctgtgagatgccgacaaagacatctggacttaggtcacaggattcttgtggggataaaatgtgatcgatgatctgaaggtattttgaagacttccttctgcataactgagggaggtactcctggaaggtgcctccctaaggaagataggaatatggtggaagagaaatacttccctgaggccacatgggaaaatgtgaaggacaaaggttcccttcacagcaggagtgtcctggaagacctgtcccaggcgccatgaatggcagcctatatctggtccaca

SEQ ID NO: 178172 - DNA, 358 bp, Homo sapiens
tctggttttcaaaatctcaccttcacttcctcgtgaccagaatgcttgaggctgtcttctacaaatcatttttttctccttgttctattcatgctgcttctccatttttccttatgtatatgctcctaaactactactgtatgatcctagggctctgtagtgcccctggctctccagaatacttcctgtaaatatgcctgccacttctgcaacagatttgggggtcactaaagactttcaaatttaatgagttaatccctttgacttcccagcaaaaagtgggcaaagcaggccaggtgcagtggctcacacctgtaatcccaaaactttgagaggccgaggtgagtggattatttga

SEQ ID NO: 178173 - DNA, 254 bp, Homo sapiens
gtttggtgggaaaaatggttatgacagagcaggtaatgagtcagggtgcaatcagtaatcagaatgagtcagggtggagcaggtaatcgaaaaaggttgctttgtgaggaagtttaaaagtagaaggtaaaggattgaacatactgacatattgattctttgaaaagaaatttagaactcatatctaacagcatggtggcacacacctgtggtcccagctacttgggaggctgagtcaggagaattgcttgaac

SEQ ID NO: 178174 - DNA, 319 bp, Homo sapiens
ccagagaggctgttgctttcctccctccccagcccttccacccccagactgtatgttcttctttaaggttgagtcttggaattcagaacttggtgagcaagacctgactagaacagaaatggaaatgaccttttcatgcacagcatgagcatgacagagaatgggctgtgtgttaactcctctctgatattgctgaggtcctttccagccctaaaattctgtgatttttctgatacttgggcctttgaagatcctaatacccaatcctttctcaaacattaaatttgtagcagaggggaaaaattaaattcctcctttt

SEQ ID NO: 178175 - DNA, 309 bp, Homo sapiens
ctgagatcacaccactgcactccggcctgggtgacagagcgagactctgtctcaaaaaataaaaataaaaaataaacaaataaataaacagcagttggtatccaatttctacatacaatttggtaaacagtatctaccaaacataaagggccaaataattccatcttacccaaactgaaccacgaacactccccatcactaaggctagtaaataattaatactgaaaccagatctggaacacaagagaggatctctactttgttcacaactccctccccagtgcaccccaaaataaaaataattctctg

SEQ ID NO: 178176 - DNA, 411 bp, Homo sapiens
cagaatttttattaacatatttttattgaggctttttctattttgaattattataacttttatatacactggaaggtaagggaggtgttcaactttattgtttgcatatggctatctagttgtctcagcactatttgttgaaaagactattctttgccaccactgaattgtcttggcactcttgtcagaaatcaatttactgtatatgaaactgcctcagttctattccatctgtctttatgtctatccttatgccagtgccatacagtcttgataactgtactgttttattgctttgaaatcaggaagtgtgaactctccaactttgtttgttttcaaaactcttttggctattcagggtcccttgcaattccatatgaattttaggatcaactttttcatttctgcaaa

SEQ ID NO: 178177 - DNA, 700 bp, Homo sapiens
tcttctgggcagcgctgcctctgctcctgacagcccaccagcttcctcggagccttcctgctgcagccgctcagggagagcaggcctttcctccagccctgtggcctgcacagacctcctcagctgggcctccaaggaggagcaggagggtactaacatttggaacctgccttcaaggcacgtattcatgctttttaagcatttatagtttaacatcagtggctcggagaagacccatgacttaggaagtgaatctcttaagtactaatggattaaaataaagttgtagaaaacataggaagcccctaaatctgaacactgtgaatgcacctttctctgtcttcactcttttccctgcaaaacttaaagcgttaatatgtccttcaggaaaaggcaactacaagaatagagaaagagtttacattctggaacacaaaactctaccctaaatgacaaaaacaacagttacttgctctattttcatcttaccttagtgtcaaatcaacagtagcatagacacagctaataaaatgacagttttgattttggaaggcatgtaacataagccacaggcacaacttctcagaagagctgtgatcttttttttttttttttggagatggagttttgctcttattgcctcaactagagtgcaatggcgccatctcagctcactgcaacctctgcctcctgggttcaa

SEQ ID NO: 178178 - DNA, 183 bp, Homo sapiens
acatttccatcactaatagtgagtcacactagcaataatttgcacctagcttgtgaatcttaaagcccccaattattgaaggaggtagaacatagtgaaatgcaaacacatacctagtctatgtagttttatcttgaggcagttcacacatgaaaatgtaatctgttcttttgaatttcttaa

SEQ ID NO: 178179 - DNA, 523 bp, Homo sapiens
gagcttgaggcataaatatggatttttaaaatattgcattaagtattatttactataattaatgagctatttgggaacgcccttaaattttgtgctggcccttgagtgactatgcaatactgatcaagaccatagctcatccacacgctttccttccttcactaaacaaactcttcagagcattgctttgcatccaactgtactaggctgtaaggatgcagaggtaattaacaccaagtcaggccttcaagaatgtcatttgtctagtgggggggaacaaatcaatgccactttgaattctacatgcaccaataaagggagagtacaggataagcatgcccataaggcaggaagtctcagttcaaccccgtatgaaaccttccagaaaatgtttcccagggctatgatgctccagctaactcattagaatgaaaagtgtgtccgatgaagaacaaggctaagaggagaggtgccctgggcagaggagttagcacacacaggcgtgtccagattcagtcagtgg

SEQ ID NO: 178180 - DNA, 694 bp, Homo sapiens
gctcagtctgggagggtcttccgctgagcactgtgtgcccatcacgcgtggtgtccactgccagctgcccctgtgagtccctgtccttgcttggagcctgctgcttgtctcagatccttggacccagccctgaccccagtccagctaagctcaaccctgaccggtcctccttcgagactctttcagcctaagatctccaaccagacctgcccgccatgtcggctgcgcccggcctcctgcaccaggagctgtcctgcccgctgtgcctgcagctgttcgacgcgcccgtgacagccgagtgcggccacagtttctgccgcgcctgcctaggccgcgtggccggggagccggcggcggatggcaccgttctctgcccctgctgccaggcccccacgcggccgcaggcactcagcaccaacctgcagctggcgcgcctggtggaggggctggcccaggtgccgcagggccactgcgaggagcacctggacccgctgagcatctactgcgagcaggaccgcgcgctggtgtgcggagtgtgcgcctcactcggctcgcaccgcggtcatcgcctcctgcctgccgccgaggcccacgcacgcctcaagacacagctgccacagcagaaactgcagctgcaggaggcatgcatgcgtaaggagaagagtgtggctgtgctggagcatcagctggtgga

SEQ ID NO: 178181 - DNA, 662 bp, Homo sapiens
tttaatgaaaaacatgaacagtaagtgttgaggaggatgtagagaaattagactctcctacattgctggtaggtatgtgaaaggatgctgtgttccctcaaaaagttaaacaaaattgccacatgacccagcaattccactcttggctctttacccaagagaatgaaaaaatatgttcacacaaaacttgcacacaaatgattacacagcattattcataatagtgaaaaatgtctgccaaccaatgaataagcaaagggtggtatatctgcatggtggaatattattcaaccataaaaggaatgaagtactgatacatgttacaacatggacggaccttaaaaacatgctgagtgaaagaagccagacacaaaggctacaaaaaaggccatttatatgacatatccaggataggcatctttatacagacagaaagtagattcgtggttgccgggggctgggggaagggaaatacagaataactgctaatagggatggagtttctttgtggtgagttgaaaacattctggaattaaaaagtgatcatggttgcacaacgttgtgaatgtgataaacaccagtcagttatgcactttaaagaatacattttgtagtatgtaattgtacctcaaaaaataaagtgacaatcatatacactcaaa

SEQ ID NO: 178182 - DNA, 1088 bp, Homo sapiens
acaacttttggtgcatatgtgtcacacgccccgtttgtgacaagtccgtcccagacacactaatcacttgttgaatcagtcctgggctttctcatgcaactccatatggctgccacagtgcccagtcagtggaggaggcttttcattgtcatctccacatttctatgggtttcttgaggacaaggactactcattctgggtccctagtggctggcactgtgcatggctttccctctgtaaataagcatttgctggaatggggtggagttgagacttctccctgtgtggatcaccttctgtcttcaggttccagtttgacgatatcccttgcctggaattacctatgataccctcagtattatccagagttcagtggggactgcgccctctctggtcctgtgactttcctgtaacagtgcatcctcagtgtctgtggtcagctgacgtcactaagccatttttccacatatgccgcttttcttgtgtaattgtcttacttgggttcccaaactcagggtcttaatataagctctgagggaaaaaaaatccctctgtttttctgtgtctctgtcccccgggtgtgcctggcacagagacaggcagcattacctttgctgacctgaagtgaactcacggttttccccattcagtcctgcactattcgtctcatcccaactctaggctgccgagggatcttggctcctactcctgtcacctgatatgccacctgccactccaggcccagtgaatgagcttgttaacactgcctttctattctgggattcgcttggtcattcagaatggtgaaagaggccagcaatcgaggtgcacagggcctggcagcgtctggctttgcacactggacacacagcctatgacagttggtgaaagccgggcttttgtgacctatcgccagggtttgaagtcagccctccattgacatcagccctccagaagtgagggtagtttttttgaggctctttccaagtaatacttcccaggctgggctctgggatcttagggctttggaaaggtagcagcaaagctcgtatgatacagccagtatttgaaaagccacattttgcatt

SEQ ID NO: 178183 - DNA, 443 bp, Homo sapiens
ttcattccagcctggacaacaagaacgaaactccgtctcaaacatagaaaccattagtttatactcattaatcaaatttctaaaatgggacccaaaaaaaaaaaaaggtcactactccatagtactccatgagcaacctcaggtttctgacaacatagtactccaaagtatggcgccttgacatagtaaatattctaagacattagtagaacaacatagacaagaatgttcgtatgaccttcctctgaagcaggtcttaagaccctcctgggagtcttgcagagtatgcgaggaatctgaacaaataaaccttgctagatttctccttgtttattatccttagctcatattatttttgtcttgttatatttctgcatgactctcttcatcaaacctagtgcaaacacactcaggtttaagcccttcttcaggtccttatttcc

SEQ ID NO: 178184 - DNA, 1257 bp, Homo sapiens
gaccagaggtcactctcatggacatcttgcttttggtctgatttgtccggcttctttacaacctgttttatcagcaaggtctttatgacctttatcttgtgccgacctcccatctcatgctgtgacttagaatgcgttaattgtctgggaatgcagcccagtaggcctcagcttcattttacccagctcctgttcaagatggagttgttctggttcacacgcctctgacaatacaattcccaattgataagtgataccttggaatcagtgtgaattatttttacactactgcacacctgggaatggtgaatgtgtgaggcctgtcctctctcaggctcataggaaaagacagaaatgatcttgcttctttagggattgacagaacaaagacaaaggaccctagactttgggaatagaaatctgttgaaatgagctggaattggtaaaataattgattttgtttatgaattgataaaagcctactttcaattcatcaaatattgttgagcatgcaacagtatgctcccgtacctaaggtgcagtctctgccttagagttgtaatccaggaaggggctgcaagagagactcagaagatgtggtctgacaatatataagcacaatgtctgacccttaaagaatgacaggatttcaacaggcagacaggagaggaggaggaattctaagcaaaggctttcacatgtaaacggtgaattcttagataagatctgttttctatataccaggaacagtttgctggcatttgaggacgaggagtaagttcaaatgaaaactttaaaatgtttccccaaagtgttcatatgaaattttaaggatgtgcctatggactgggaataatcaaataacataaaataaacataaataacataaaccataaaataataccattttttttctacttttaaaattgggcccagaatatagcttgcagtgttttcttaattgataaaacttcagttcatcaccttcaattaatatgttaatgcatgaccatttgctttgtatatatctaggctatatttataattgtggtctgtcttctttggccaagtatgtatgtattccgttatctcttagctcctttgtattcaggctatgcacatttattataatattgctctattccatctttaattaggcaagcaaatattctaataaaaagtttcaaagtgaattttgcattatccagtactagatacatattctgtaactttggggcaagatatttgccaggctta

SEQ ID NO: 178185 - DNA, 724 bp, Homo sapiens
tccaggtatttcaagtagaaattaagaaaactttacggaaaaactatctcagcacttcagtttaactatttttcaaagtccaaggagggttttccccagtgtaaaagcagaaatgagaatttcagatctaaagcggttcttgccttttcttttccctccatgcacatgtgctgacaacagaaagtaaaatttgaaaagaaaacccaggctagagcattggggtcactcatttcccatccagcgaagggagagctggtgcctggctgggggaggttaggaaggcaagtcttgggatctgatcactcggctgggagtgggtaaaatacctggacctcaggaggccggattgcagcgccagtgttctctacctgtgtggcctgttcctgcctggggttgggtaccaagtccaggtggaagtggtccctggagcatcctctctctgaagtgtttctttgtcaaacagaatactccctgctgctgccccagaactcatcactgttgacacatggaccaagaactagcagaggaggtgatttataatctctaaatgaattgctctaaaagagacaacaagcactctgacttaagtaaaggaagggagggtgggtggaaaggaaggaggatcataaagaacattctagattgcatactttggtaatcacagcagggccttattgcagttagaacaaaagcctggacacacttacctctcagttcaggaaaa

SEQ ID NO: 178186 - DNA, 799 bp, Homo sapiens
tggagtgcagtgacaagatcatagcatagttcactgcagcctcaaactcctgagctcaagcagttctcctgcctcaggcctctcagtgttgggattacaggtgtgaaccaccatgcctggcccatatcaaaatttatttgaggggcagagattgctactagagtcaggagtactaatagtaaattgtaagggacactttactacctgctagcagagagaaatataatgggaaagccacagatttggtgttggagagaattccagagccattaagttagagaagacagcctcactagcacctagagggcatctttgtacagtaaaatacttgaaatggttcaattggaggtacatggttcaagaaagcaaagatgtctataagacattttagggcaattcataacacaattattaaaataagaccgttttggcacttttaaaagcggtgacctattcaagaactagaaaaccggaatttttcattatattcaatttttgcccaaaagtttaagaggaagtattatactagtttcagtatatatttgccctaattttatcaaggtgtaatatattttcgtgatggtgagggtggagagagaacacagtgttcacatccaaaacataacttatgttcaaagggagaagtaaatctaaaccaccaagctgttacctttgaaaacaattaatggagtctattgtgttttaaccaaacattttagattaaaggattttgtattaaaggcaattcagatactccacaactcaaagataatgttggaatctggtttaaataaaataa

SEQ ID NO: 178187 - DNA, 637 bp, Homo sapiens
ggtttcaccatgttgggctgggcaggctggtctcaaactcctgacctcaagtgatccacctgccttggcctcccaaagtgctgggattacaggcgtgagccactgggcttggcctgagcactttttatagtgtagcaattatttgagcattcagatttctaaagtaggatgcatgtggatggtgagtaaatggtagcagaactcagataagagtgggatgcagcagtcaggaatgacacccattcttttaaaccaagaccctgagtggggaaggcaagtcaaccaacactgactgtaggatcaactcaaaagctggtctttacatgggaacacattctggttactctaatggctttaagtcttagcaaccattactccgacatatactgcgtttttgactgtgactataactgccagcccatatctaaggtgcatttgcataccataccttttcctttttgatgtagccgtgataaccatcagcatgctttgctcaagtacttcatattcagtaggacttaccagataagaaactcaggagctgctcctctctgagccaatgagaaactcagttgctgctcctcccaggggcacttatctttagttgagttagcctttaatcagattgccattataa

SEQ ID NO: 178188 - DNA, 585 bp, Homo sapiens
tgtatcctcactgcctagtgcaagcctgccaaaagcatctgtagaatgaataaatgaatacataaatgcattttttgcatggatttaaacattaatgtttcatatttgaattttagattcaagagttggaaaaaaacagagacctagccaaaatgctggcatacaggaaatggttaatgaggcagtagagtatgtatgtagtaataggaacatgtgtttttcattctcattactgtttcaggacgaggctcataatgtaagccaaatggaatatggttaaggcttttgggtctggagtccacagagtctgcatttcaggttcagtttctgcagtttactaagtgtgaccttcggccagttacttaatctctctaagccttttctgtcatctacaaaatgaagatattaatagtactgcttatagcatataaatgttgagacttaaatacaataaattgtggttcatacctgtaatcccagcactttgggaggccgaggtgggaggattgcttgaccctgggaggcggaggttgcagtgagctgagattgcaacactgcactccagcctgggccacagagcaagac

SEQ ID NO: 178189 - DNA, 184 bp, Homo sapiens
cccactgcagatctgctgtttagacagatgcagaggtgactgataagccggggtcatgtggcttcaggagtcttaggtttctccatgcagcggtgtcaggataggctcaccagctcctggccacagtgggtaccagcgacctccttgttgctgaatccaccgaccactctcggtcctcatcctg

SEQ ID NO: 178190 - DNA, 188 bp, Homo sapiens
acgcaaacccgtgtaaatagagctaatatttcaagggaggtcatgctgtatactcttcccctgagaatagatgatggctgactgccggactgatatgaaatttatctttgtgagggagaagaaggattgtgtggcctagagggcaatatccagggcttgtgaatcctaagaggggccgagatacatca

SEQ ID NO: 178191 - DNA, 476 bp, Homo sapiens
agcccagtgaatccgttgagttcactggcccaaagctacagtgactcaggaccatatgcccctgcacccctctgtgaaggtggtcagaagaactagactcagcctgccattggccatatgcctacagactcatgtccctcaatatatgaaagccttgtccctagtaggttttctctaggaagtatacattgatcaccctttttacaggtaagttatgttatgtaatggtagccgtaagttaagaaacagataaaggcaattgtgttttatttgtaccatcaaagttatttttattaaagatttttatgggttcttttgcttttgcttttgcattgtaggctttagagttgcaaatcttagatctctcttggttacttttattgtgatcataaatataatatgattcaagaatcaggtgtaaaattaccatgtccacactgtgattctgcaagattttaccaatgaaataagctgca

SEQ ID NO: 178192 - DNA, 389 bp, Homo sapiens
aacttggtttaaaagaaaacctaaaaacctctctatcaaaatatgagtattaagaatgatctgaatatgcatcatggtacatgaagctgctccacagcaaggaggtgggaggctaagaaaacaccacctcggtagataagttaacatttaccaaatgcctagtggatgcacagctgcttattgatgaatgtcagcttcagcatcttggtgagagtgcgtcacatttcttttttcctagaagaatctctttacatatttcatgcttttggagaggcaggtatgtctccatgataatatacatgtaattagctccttaatgttaccaatctatcatggagacattccaatttacattatacacaagctcactattagtttcctgagttagg

SEQ ID NO: 178193 - DNA, 301 bp, Homo sapiens
attgtaacaggtgctccaacagaatgtgctgctgacctggataaaggatgtgagacagatgatcagggatgaatccatagtttgaggttcaaacaaatgtgtagaatgggattatttactgagatggaaagcaataggaaggcagaaaattttaggagagaaactcaagatggtaaacgccaatcagaaatccttaaaacataccatggagcttaacaaattgatagcatgatttagctagaagaagtggcagacgatttctagggagcactagagaagagccatcacttctcagagtatg

SEQ ID NO: 178194 - DNA, 217 bp, Homo sapiens
caggaaacttagactaactcacaaagcaaaagtattcctctgcaaaatccgcagggaaatgagtattgccagtgtcacttgggatctctgagaaccaggggtaggatgaaagttagtaaatatgtctgagactaaggactctggatgctgggtgagcattaatagaggttcccttttccccttgcactatcaccctggcatggttaggtctacctgg

SEQ ID NO: 178195 - DNA, 496 bp, Homo sapiens
caaaatattatttaatgctaaacagctattctgttgatagtacaggttgagcatcccaaatctgaaacctaaaatgctccaacattttttgaaacattttgagtgctgacatgtctcaaaggaaatgcatagtggaacatttcagatttgagatgctcattcagtaaaacgtaaatattccaaattctcaaaacaatccaaatctgaaacacttgtggttccaagcattttagataaggaatactcaacctctacataatgatgtaatgcacctttcctgtaaaacgtcatgcctttcattaacttatttcattttatatactggtattaacctagtttataatatgaactgtgtaaaacctaacataccgacccccctaccccccgccacttttttttcgagacagggtcttgctctgtcatccagtttggagtgcaatagcgcaatgactgctcactgcagtctcaacttcccagactgaagcgatcctcccgc

SEQ ID NO: 178196 - DNA, 283 bp, Homo sapiens
gtgtgaatgatgggggattgtgcggggctgctaggcttctctgactctaggagagggaatccctgaagtagaagagacccatgtccactgtcctgtggtataagagaatgtgccaaactctgggatagcttagcatgtggatgctggaaggacttaacatcaaacaccatggccctgggagccacagtcaagcactcctgtggtcccacttggttttgagggaaaagagcacgtggtttaaagttccctgggtcacttgtatgatacgtgtcatccgactatt

SEQ ID NO: 178197 - DNA, 443 bp, Homo sapiens
cttttcttcttcaaaagatgcaaactttaataggcaaattatgttgccacccactgcccacccaaaaaaaccctactgagtaaaattagcactccaggaagacaggtcatatttatcttgggccattgattacattttccaaactgctatttttggaaggcacctcagcttgagaagcacaataataaattggatggatggaggaagagatggatgggaaagagcctggagcttagaatcagaaaggcctgggtttgaatctttgctctgccacttaccagacttaggcaggtcttttaacttctataatatagttcctgcattaataaaatgaaagtaatactacctacctcattctcataagagttaaacggtgttctgcaagtcaagtgcttaaaacagttctgggacacataataaacttcgaacaaattgagcttcca

SEQ ID NO: 178198 - DNA, 239 bp, Homo sapiens
gaaatatacatctgccactaaaaacattagtgtgcatcttacatgttgacagaaatgatgtcctggacttgtgggaaaataaaatagtttgcagaattgcatatagtggatatgtgtgtagaggcagaaggagagccagtgagcaaacaagagagagagacagaaatagatactgacagacgaattcatcaaattatgagagtgttatggcacgactggtttggtgatgagactgatga

SEQ ID NO: 178199 - DNA, 249 bp, Homo sapiens
gatctagaggatcgtcattcataccagaagaggacagctaaatcagagagctatggaaagttttctggtggagttgacatctaagctgagtgcgaaggcttttgctaggcaaagaagggaagaaaagtttttcagatagaggataacgtactggaaaatgaacgaaacaaggtgaagtatctggaaactgtaagtaatttggtgtgactgaattaacttaaagcatgatatgtttgggtaggaataaaa

SEQ ID NO: 178200 - DNA, 164 bp, Homo sapiens
tctaggaaatgtggatacaacaatggacaaaacggacaaacctatgtcctcatgtagtttacattctaaggcctataaagtattgtctatttgaacacataaaatgtattctcccagtttgggcagaaacaggacttctgcaaggcctggagaagtaaggaaga

SEQ ID NO: 178201 - DNA, 211 bp, Homo sapiens
taagattgagttttccttggctcttccccattcatttagattttagtttgatgggtcaagtatatttctttaaaaatgtgtatctcttattgtataattgagtggaaagtgctgagagtacagtctgaatgcaaagaatacactagagaccgctattggaatgcctgaactgtgacactttgtaagtctcccggtgaggatgtttgcagtg

SEQ ID NO: 178202 - DNA, 446 bp, Homo sapiens
cgtggtggcctaggatatatctgcacttctcaatcgaaggcaatgttgcctcccagggaatatttggcaatatccgaagaaatttatgattgttatagctgaatcagagagggtaggtgctactgtcatctagtgtgtaaaggccagagatgctgctaaacactctgcagtgtccaggacaacccctgacaacaaagaattatccagccccaaacaccagttgtgctgagaaacgctggtgtctgtgaccctttcaggctcatgggaaaaggcggtcagagagggtgatagctggaggtgggtggacctgagaacaggctccttacatactttgctgcagtctcatttgcttgtggcagttttcaccttgcctctcctacctctctaccatagaactcttactcatcatgttataggttttcatttgtttattcctgtgtagccat

SEQ ID NO: 178203 - DNA, 575 bp, Homo sapiens
agaaggcaggaagcttatgtgtacaattcagttttgcattatcctgggtagagccaaagagactgaattggattctaataggttagaaagacaaatgaattagaagcagccaagatctgcaaatttccacacaagtctgtccatttccacgggggtcttttgagtgattttcactgccatgccaagtgttttcagtgacctactcaaaactggaggaggagacacagtacgttgaacatctacctcttctctgagcttcatttcctgctctgggctccatcctctggtcctcatccaattacctcttgctctgacataccgaagcctgccttttaatgccaaaatttattcattctttcacacatcaaatagtttattggctaaattctgtgtacctggtaccatgccaatcaaaatggtggttcctggtcaggaacgacggctcatgcctgtaatctcagcactttgggaagccgagttgagtggatcatttgaggtcaggagtttgagaccagcctggccaacatggtgaaaccccgtctctactaaaaatatacacaaattagccagccagg

SEQ ID NO: 178204 - DNA, 340 bp, Homo sapiens
tgaaatgaagctaacgtttaactccagtcacttggctctagaatccaacgttttcatctacatactgtattaggattctctaagtatgttgtacagagaagagaaaatcctggattttctctgtttcattgaattcagatatttcacttagttatagaattaacctaatttttcttttgcacataaaccttcaaagggtatggagatgttgaacatcaacattggattgtttttcctacctggggttggggcaagcagctggaagttgggaatgaaatagggcagcatgtttatactccccaggggcaaaatatctgtgccccctgtaagagggaaacaa

SEQ ID NO: 178205 - DNA, 141 bp, Homo sapiens
agctcctcctctacaggatacatttcatccagctactcctctacggacacatttcatccagctcctcctctacggacacatttcatccagctcctcctctacagggacatttcttccagctcctcctctacagacacattc

SEQ ID NO: 178206 - DNA, 424 bp, Homo sapiens
ataataaactcactgtattttctttcattaaataagcacagattgaatgtccccttaccataggcaaatggctgtttccaaatccactgtcatacttcttattgtcatgcactgttcatgaaattatggaaggctcggtaatgttcagggcaattggattcattgatacataaataaatgcatttctgtcttcattgggaagcaccctccctgctcttggtgtccctgtttgtcagcacctctgttgtcctttatctaaataagctgcaggaggtaaggattgcctgtaagtgatttttgtagagggtttagtgtgccctgttattaatcattattaatcatctaggcattctgaaatagtatttttcagattgtgtggaaataagtatttctacttatttttggtaggattaaattatccaaa

SEQ ID NO: 178207 - DNA, 412 bp, Homo sapiens
tacaaacctttagctagacacagagcgctgattggtgtgttggcagtcctttagccggacagaaaagttccccaagtccccactggacccagaagcccagccggcttcacttttcactgctacttatccctggctgctgcataaacaacccccacaccttccctgggatcttgacaaccttgtgaagccacagtgatggtccctgcacccactcccacgcccttgtccagctctagaggcctcctgtagcccaacccacaagccacaaaatgaggaccatcatggcggtgccggaaatctcacccctcaatgcccacctggaatcggaagtctcaaaacctgtgtagcatatcacatgcagctgggtcgtttcctggctaggttaccctgtcaggatctgtgacttttctgt

SEQ ID NO: 178208 - DNA, 1633 bp, Homo sapiens
  misc_feature (696)..(696): n is a, c, g, or t
gatctttgctctaagaaaacctgatattggctggcacagtggctcatgcctgtaattccagcactttgggaggccaaggcgggaggatcacatgaggccaggagttcgagaccagcctggccaacatggtgaaacttcatctctacaaaaaatacaaaaattagctgggcatggtggtgcacatctgtaatcacagctacttgggaggctaaagcacaagaatcgctggaacccaggaggtggaggctgcagtgaattgagattacaccactgcactccagcctgggcaacagagcgagaaaacctgatattgagagaagaatgtggatcttacagattcagacatgcctgggtttgaattctagctccaccaccttgggcaagtcccgtcacctgtgggccccattttgcacatcagtgcgatgcagcaatgacacctcccttgcaggcgatgcgtgaagaatgcccggcacagtgggcatcatcatttcacaaacacgtatactgctgacacaggaagacagagcaggagcccaatatacacggactccgtttgtcccttgccctcctcgagtctgtgcggctagaattagacttagcacagtgggctgaggggccctggatggggtggctgcattgctggcctgagtggaagccctctgcttccacccccatgtgtctccggagcagggagangagcacccgattgggaggaggaaacaaggtttccagccttggcttggccacgcacttgctgagtgcccttgagtaagtcacttcacttctctgggcttcagtttaccgtgggtaaagtggggtgaagtagaaggacctttccaactctgatttgacaactctggggcatggagctggggactgctcacaggaaagcccagctgactttccttggcttgcttctgagtgagggcagttgtgactgcagcagggaagctctcctgaacgccttgctctgggatgcagtaatgattacagagggctggggagcaggagcttgtgtctccacttcagaaaggagaggcctgaggctcggaaagggcaagtgacttacccaaagccatccagcattgttgtggcggggcacctgtcccttacccatagctgctctgaagggactgctgggtgggagttgctgcggtaccgtaggggaaagcagaagggtggcatgggctggaacaatccagaaagacttcccagagagccttgaaggatgagaaagatttggattagtacctctcaaagtggcttttgcaaaatactcaagctggaggcaggatatggtgaagaaaagtggttcttgggctgggttcagtgactcactcctgtaatcccagcacccaaggatctcttgaggccaggagttcaagaccagcttaaacagcatagtgagaccccatgtctacaataaaataaaataaaataagtaagctgggcactgtggctcataactgtagtcttagccactcgagaggctgagatgggaggatcattcaagtccaggagtttgaggttacagtgagctgtgattgtaccaatgcactgcagcctgggacagagtgaaaccctgttgaaaggaaggaagagagagagagagcggaaggaaggagagagagag

SEQ ID NO: 178209 - DNA, 216 bp, Homo sapiens
actgggccaggtgcagttaagggacacccgccacctcccctccttaacccattcaatgccaccgcgccacctaggcgcagtgtcccggccgcctcaggccgcaccccttcggcccttggtccccacggcctgaagggtggtgatgaaatacacggagcactgcgttaggagtcagtgaaggaaacaatccgggctgtgcactggctgagtgacctg

SEQ ID NO: 178210 - DNA, 378 bp, Homo sapiens
aaaaaggatcccatgcatcttcttaatggttcttttatcctgtctgcaatgtaagttgtgaagaattaccatcttaaagacagagtcagaaacaggattaaggtttggttagtttaaacaccattacccattaaaaattaaaacagattactgcaatagcatctccataatgttcattatgaagaagataataaaagggacaattgtgcttctgcagttttacagtgtatatatccaaaaatggtactcaccataaaatgatttaaagaaaacatcctacactatggcaaatacaaaaagcgaaggaaaacataagaatgaccttgatcactattttcatttaccaatgtaatagagctcctagcatgctcaattaga

SEQ ID NO: 178211 - DNA, 370 bp, Homo sapiens
tttgaaggtggagttttgcccttattgctcagtctggaatgcaatggcacgatctcagctcactgcatcctccgcctcctgggttcaagcaagtctcctgcctcagcctccctattggtggtgttacacagcagcatgtatgtgtgcatggctgtgtgtgtacacagacttctgtagtcacatatgtccatgtacaagcccatgtccacatgtgtgtacacacatacatgcagcagataagagacaactgcactatggtcgggcatggtggctcacacctgtaatcccagcactttgggaggccgaggtgggtagatcacctgagtcaggagttcaaggccagcctgaccaacatggtgaaaccttgact

SEQ ID NO: 178212 - DNA, 394 bp, Homo sapiens
tggttcctggcttgtagacagccaccttctcattgtgtcctccaatggcctctgtgcattcgcagagggagagatatcttctcctctttttataaggacaccagttctattgaattagggcctcactcctaagacctcacttgatctttattacctccataaaggcccatctctaaataaagtcacattgtggggtaggccttcagcatatgaatttagggggacacaatgcagtccataacaaaagccaccttggagccatgagtgggcctaacgttaggtatgcatggtacaaatataggatgaagccaactatgaggcaagaaaactaggaagctaaaaagaggttcataagtcccattgttaagtagttggattaaattcctcttttttt

SEQ ID NO: 178213 - DNA, 365 bp, Homo sapiens
acaatatcctttctgcttaaggcagggctgggctaaaggcctaaccaaggctcccactgtctcatccttcactttgcagagagctccttggtccagaaaaggtctttgtacatacacatgtgtctctgttccaatttccaaatgagcagggcaggacatacccaacgcttaggtggctactgttgcttgactgacactgggttcagcagaggtgggaaggaagtgttcccagggacagggagctcacagcggccttgagggagaaagacactgttgctctgttatgaggcacgtgcagagtaaataaggaagtggtgaaaagcctgtgtttttaactgtctggggaatgagtgattgctatgcat

SEQ ID NO: 178214 - DNA, 293 bp, Homo sapiens
ggtagaggcgagaaaaaagaggcagaagtaaacttcttcaaactgcatatatgacaagagtaactggatggctctgagaaagcagctttcatagcaaaaaggaaagtgtgtaagagaacttgatgcaacgccctgttgacaactttgtcactgtttagatactcccctcccttttaggtacctgaatgacctcaggtgaaaactgattttgaaaagagtcatctatgcaaatcctagacagaacattttttactgatgaatatagaaagggtgtcgatgaagggtttcgatga

SEQ ID NO: 178215 - DNA, 378 bp, Homo sapiens
ggtagaggcgagaaaaaagaggcagaagtaaacttcttcaaactgcatatatgacaagagtaactggatggctctgagaaagcagctttcatagcaaaaaggaaagtgtgtaagagaacttgatgcaacgccctgttgacaactttgtcactgtttagatactcccctcccttttaggtacctgaatgacctcaggtgaaaactgattttgaaaagagtcatctatgcaaatcctagacagaacattttttactgatgaatatagaaagaagaaagctcctttatctatttgacaagctctttttcatcggcctgtttaagattttgcatcagctcttcagtatcaaagtcaagatcctcccagataaaatccatgaa

SEQ ID NO: 178216 - DNA, 270 bp, Homo sapiens
tagaaggctacactggaacccagaatcccaggatgaagtggacaaaagtatgctcatctggcagttccgtaaacacaaacttaaccaagtcactaacctctgccaaccaaccaaacgctacgtagcaactcattctagtgataaatagttaagcacaagaactaggcaattctcatcagacaatgtacccagctgcaattccaggatgtggaactagaacgctaagttctagaaaaaaagaatccttacttttcttatgtcttactcctt

SEQ ID NO: 178217 - DNA, 398 bp, Homo sapiens
tcccgttgatatgatttatcacattggttgatttgcatatgttgaaccattcttcagctgaaggaaggagtccttctagaagccacaagctgtgctttctgttttgggggaggggtgacgtaaacactccattggctgccccagctggcgtctcactaggttgtgtgtacctgaagtgaactggctcagagcccagcacagcaccaggacttgtccaggaattgcagtccttgtggcctagactgcctttcatttaggaccccagagcactttggtctgcagtggcagggcttgccagaagtcaggttccaactactgggaaggacaattcatctctggctataaatatctaggtgtctaggtatcaatatatgcaaatctaccgtgacggtatcctc

SEQ ID NO: 178218 - DNA, 218 bp, Homo sapiens
tctataactgttccatgtcattggtcattgggttatgccccttctaacctgtacatgactctacacatctctcttttaactgtctcctcctctccattcctttttaacaccgaattagttaagaaccctatcagtgttgtttttgttttaattttttttttttttttgacagagtctcgttctgtcacccaggctggagtgcagtggcgcaatctcag

SEQ ID NO: 178219 - DNA, 615 bp, Homo sapiens
  misc_feature (564)..(564): n is a, c, g, or t
cccacttataatttttttctcttccctgccatatatatagtttataactttctatattatttcaactgtaaaatacaaactcgtttttacaaaacgaaaaacgcaacttaaaaaatggttaaactattaggctgagcacagtggcgcatgcctgtaatcccagcaccttgggaggctgaggagggcggatcacgaggtcaggagtttgagaccagcctggccaaaatattgaaaccctgtctctaccaaaaatataaaaaattagccaggtatggcggtctgtgcccatagtctcagcctcctgaataggtgggatttctctacacccagccaacttaatgttttataatgtctcttattttcttatttaacctcgttattgggatgttgatttacagtgaagaatccattgcattagtaagggtgatatcttagtattttgcttcctgggtgagctagctttgcttatttctgtttgttaactaggccttttgatatttttatagacaatctgcttcatcctgattctgcggcattccaaactgtggtatccttgggggttcncttaacattgctatggtgccagaagatttaaaatcaggtatggctgtgggg

SEQ ID NO: 178220 - DNA, 718 bp, Homo sapiens
cttatataacaaagtcactatttacactatgccagaaaatgaattctgagcaactttaaaatatgatgaataatcttatacgtaaactttaaaagttaagtatacggctgggagcagtgtctcatgcctgtaatcccattctatggtatgtcgacaaccatagaatggaagaaaaaaagaatttgagattttcatgctctgccatactgattttttttttttcaccaaactttctcatcagactaaagtgacagcaagcgaatacaatgttttaagaaaaggatgaaacaacccccaaatgcttcttaggactccattttcaacatggtcttgaaatcactcactaacatgaggtcacacaggcaagaaaagacagaggcagagacagaatcctgaggacaggtgttgcctccactctcctgtctttggccccacacaccctgagccacaaatcctttttccttgagaaataggatcgtacatgaatcttcttatacattctgaatgtctccttacccacatttgctcatattcaggccttgacattaaaatgacatctgatatttttaggctcaaatcatattttgtcttttaacttttaggttcaggggtacatgtgcaggtttgttatacaggtaaacttgtgtcatgggggcttgtggtacagattattttgtcactcagatactaagcctagtacccattagttattcttcct

SEQ ID NO: 178221 - DNA, 516 bp, Homo sapiens
aactgggggatcgcacctaaactgggcgcatcagatataaatggggcagaaagcgaaatacaagggtgaacacgaaaaggatgaaacaacccccaaatgcttcttaggactccattttcaacatggtcttgaaatcactcactaacatgaggtcacacaggcaagaaaagacagaggcagagacagaatcctgaggacaggtgttgcctccactctcctgtctttggccccacacaccctgagccacaaatcctttttccttgagaaataggatcgtacatgaatcttcttatacattctgaatgtctccttacccacatttgctcatattcaggccttgacattaaaatgacatctgatatttttaggctcaaatcatattttgtcttttaacttttaggttcaggggtacatgtgcaggtttgttatacaggtaaacttgtgtcatgggggcttgtggtacagattattttgtcactcagatactaagcctagtacccattagttattcttcct

SEQ ID NO: 178222 - DNA, 274 bp, Homo sapiens
cttggtttttagcacagagttcttgggggcttgtcctcacctgaacagaatgggaaatcagatgtatttttagaaccctgtagagagaagaataggagagggaaaggagtggaagaaactcaaaaccagaggggagtcctttcagagaacagggagaaagatacatggagatattttgaggtttagaaataaagtcaaactttttttttttttggaagaaaaaaagaatttgagattttcatgctctgccatactgattttttttttttcacca

SEQ ID NO: 178223 - DNA, 321 bp, Homo sapiens
tcaaggtcatatagcttataaaagccagcttatgtgaaatatgggtatacttatgaaaagtttattatgctaaagtatatgtaatacaaaatttaccattttagccttttttttcttttctttcttttcttttcttttttttttttttttttttttttggccccccaggtaaaagtgccgaaccaaaatcagggcccacgtgcgccccccacctcgtgggccccaattggaaccctctaaatagcggccccccaaggtgctgaaaatcacgaggcatgaacccatgtgcacgtggcccattttaaccctttttaaggttgt

SEQ ID NO: 178224 - DNA, 408 bp, Homo sapiens
ccctccacagaaggtacctccctgacacctcagcacctgctggcccctgcacctgcctcctctcctccacagcaggggcctccccgacacttcagcatcttcttcacgtgtatcgctgtccctgcacagcccgagcccacagggccaccggctcctccaggccagggctccacctgttgtgttcaaggccaggccccactggatctgccccacgacctccactgaggcctggggtgcagggtgcatgtcgactcccacaggtatgacaggtgctagtgaggggtgaatgagggactggcacctgctcaccccacaaaagagggctcttccctgagcaccgtcattgtaggagccgtgacccccatctgtggggaacgataggtggggggcacagtgatgaggatgtgg

SEQ ID NO: 178225 - DNA, 164 bp, Homo sapiens
acagtgagcagtgatggcgcaccactgcactcccagcctggatgacagagtaagaccctgtctcattctttaaaaaaaacaaagcaaggcaaagcaaagataatggtctggacgttattcataatcactaaaattggaaataacctaaatatccctcaactggg

SEQ ID NO: 178226 - DNA, 215 bp, Homo sapiens
aaaaatacaataaagatttacagaaaaagagaaaagaaaaacccagatgcagctcaactcccacacatgaatgggatggagcggggagtatattttaaagaaaccatgttggctgggaacggtggctcatgcctgtaatcccgtaaatgtagcctcagtttcctcagctgcaaaacgggattaacaccgttcctcagacctcatgtaagtgacat

SEQ ID NO: 178227 - DNA, 627 bp, Homo sapiens
tgatcgtgtgtgtgtgtgtgtgtgtgtgtgtgtatgtgtgtgtgtgtgtgtgtgtgtgtgtgtgtgtgtgtgtctttgagcatttctcttcattcctggaatgtgtgtgtgtgtgtgtctctttgagcatctctcttcattcctggaatgagccatggacagtaaagttgtgtgggaaaagaaggctctttggggaccctgacatgaagaagtccactaagtgggagatcttctctcatctatggcaaagtctcaggatcctgttcagatatcggggctttcatactcctgttggtggctatttgggaggcagcaagatgtgaagactggatgtgttcagaactaggaccaaacgatgccatcaaatacttcctcctgccagtcatggtttccccagaagtgtagttcctgggacattcatggatatgagctattcactagttgggtcagactaacagggactctcagtcccaaaatctcactcttattgacaataaatatcaaactatgaagaaacagaagtcccattaccagaaagaccaaaattaaactcctggatcttcaccccatccagtgggaaacacagatgctttctccctttccagaatataagcagccaagttcatt

SEQ ID NO: 178228 - DNA, 786 bp, Homo sapiens
tttcgcggagccttggcggaaaccctactgggagccggtgtgtcccccagtaacatttgcaaatgaaagaagaggcgacctgatgtctaatgatgacactgctcttatgaccaaaggaatgtgagctcgtatattcttttagaatttcctaaggcactcatgaaaggtggccgggtaccactgtatcaatggcccagttgcccatctcctggcgagagatttccctaagtgacctggaagtgtcactattaccaccaccccacatgaatcttgtgctggaggcgactagagctgtgtgtccctcagcagaagcaggtggcataagcaagagttccattttggtttcattttcagaggaccccaattgcgcagtctgcaagaaataatgtgcctctcaggatggttccaagctgagcccaaatcactgagggagattcactgcttgctaacatgaactttattcctggataaacaagtcccaaaccgtcttgtccatatgccaccacggtcaggtcaaaacacacattatcagctgggtgcggtggctcacgcttgtaatcccagcacttcgggaggccgaggtgggcggatcacttgaggtcaggagttggagatcagcctggccaacatggtgaaaccccgtctctactaaaaatacaaaaaaaaatccggggcttcttttgggtgcgggaaaaaagtattaaaggcatgggatttgttcttggcccctcttgttaagggaaaagcggcccccaaagaggagaatttaacgaggaacttataaaa

SEQ ID NO: 178229 - DNA, 724 bp, Homo sapiens
cctcttaaatcttctcccctctgctttggctttctatatgctactaaatcaatgcttgctcaataaaatatctgcttgcctaccagaatatgaattccacaggagcagaaactttgccttttttgttcactgctatatccctagagcctagaatggtgtcttatatgtaacaggttgcggaatgaatggggttaaattcacaatataaacaggtttaaaaaaaattatctatagcaggctggaagcggtggctcatgcctgtaatcccagcactttgggaggctgaagtgggcggataacctgaggtcaggagttcaagaccagcctggccaacatggtgaaaccccgtctccattaaaagtacaaaaaattagctgggcttgatggtgggcgcctgtaatcccagttactcgggaggatgaggcaggagaatagcttgaaccccagaggcagagctgagatcgcgccactgcactccaccctgggcaacaagagcaaaactccgtctaaaaaaaaaaaaaatctatggctaacagaattcctataaaaacatatagtgttcaatacttatttacttatgaaccacaattactaaattgggatcacagtactttctattcctaaaaattgaaaaatcatgtagaagtacatataaaagtcataggacatacatgtacatatatgactaatccaactatttcaggattcaacatgcatattccct

SEQ ID NO: 178230 - DNA, 529 bp, Homo sapiens
cctcttaaatcttctcccctctgctttggctttctatatgctactaaatcaatgcttgctcaataaaatatctgcttgcctaccagaatatgaattccacaggagcagaaactttgccttttttgttcactgctatatccctagagcctagaatggtgtcttatatgtaacaggttgcggaatgaatggggttaaattcacaatataaacaggtttaaaaaaaattatctatagcaggctggaagcggtggctcatgcctgtaatcccagcactttgggaggctgaagtgggcggataacctgaggtcaggagttcaagaccagcctggccaacatggtgaaaccccgtctccattaaaagtacaaaaaattagctgggcttgatggtgggcgcctgtaatcccagttactcgggaggatgaggcaggagaatagcttgaaccccagaggcagagctgagatcgcgccactgcactccaccctgggcaacaaggtcgacgcggccgcgaatttagtagtagtaggcggc

SEQ ID NO: 178231 - DNA, 286 bp, Homo sapiens
gtgagtgatctcagcggaattcccctttaagcttcctagtagcgcgtgcaaaaaggaaaacgtgtggatctaagactgtgcacaaacaaaagctgttcttctgggaggaaccaatccctcagcaatcacacttgactccctcgagggaaagctggaaggggagagggcgtcaggatgcgggtcccggtgtctctgtgcagctcatcctccttcagaggcccctctgcttctgtccatccctccaattgccagtggtgtcagcatttggggccgtgatcagatggag

SEQ ID NO: 178232 - DNA, 180 bp, Homo sapiens
aaaagaagccaggcacaaaaggctacatgctgtccagttccatttatataaaatatccaggataaattcacagatacagaaagtaggttggtggttatttggggttgggaggataaaagaatagagagaaactgcttgataggtaagggatttttgctgtgaagtgatggaaatgttttg

SEQ ID NO: 178233 - DNA, 619 bp, Homo sapiens
tgagatggagtctcactctgtcgcccggctggagtgcagtggtgtgatctcagctcgctctaacctctgcctccagggttcaagcaattcttctgctgcagcctcccgagtagctgggactccaggtgtgcgctaccacgcccagctaattttcgtatttttagtagagacggggtttcaccatgttggccatgatggtctcaatctcttgacctcatgatccgcctgccccggcctctcaaagtgctgggtttgcaggcatgagccactgcacccggcctttttttgttttgttttgttttgttttgttttttttgcactccagcctgggtgacagagcaagactgcctcaaacaaacaaacaaaaagagacagcctgtgtattagtaagatttctttcagttccaagtggcaaaacccagttcatactactttaagcaaaagtaagaacttactggccagtgtctggagaggccagggttagtgcaggcatggctggatgcaggccctcaaagggtgctgtcaagaatcagcctctccccacatcactcagctctgctgttctttgagttggcttcattctgtggcttgctttttttatatgatggcccatagcggc

SEQ ID NO: 178234 - DNA, 881 bp, Homo sapiens
ttgggtgtgggaaaggctaaataaactcccatataaacctgagaattgtttcttaaaatttccatagcttgaaacacattcttgccccttttccacattgacttaccatgaatcgctgatacagtaaacactgtattcattttaaactaagtattcaagggctgggcacagtggctcatgcctgtaatcccagcactttgggaggcagaggtgggtggatcacttaaggtcaggagttcgagaccagcttggccaacatggtaaaaccccatctctactaaaaacacaacaattagccaggcgtgatggtgcatgcctgtaattccagctacttgggaggctgaggaaggagaatcccttgaacccaggaggcggaggttgcagtgagccgagatcacaaaactgcactccagcctgggtgacagagcaagattcagtctccaagaaaccaaacaaaaaaaaaacaagttttcaaaatagaaccaacacaggagctgtctagaaatataagaggaaaaaaaatcaagaaaaggaacagaaaaagaatgggccaaaaaacaccagaaaaaatatccctatagagcaggtgaaaatttaggccaaatattttgtcatgaattataaaaatttaatgaaacaattatcactgtagaacaaaactaaaaagcagaaatacaaaaactcaacagagctcagttagaagcagaaataaaaatatcagagaaatgaaaaaaatgagggaaagaatagactacggaaactgaaaaagaaggcaggaatgagaaaagcaagcagagctgaacaaacatggaaataatagagtaaaatgtgaatgttatgaagctctacagtgtataatcagcaaaaattgagtggcaacc

SEQ ID NO: 178235 - DNA, 302 bp, Homo sapiens
acagagctcaggggcagctctcgcagaaggtggagaacttagacaaattttcattcatagtcaacagggtcccaggctcccctttcttcgtttttcatttacatgtaaatagtggggggtcgggggggtggtaatggagaggggattctggagctcagttcctggggcaaggggtggcaggagaccttgaagccagtgaggccggttctattgcactctttcaactcggtggaagcagaagtactataaactttgtagattcatccttgagggccctgcccagaaatagaactgtacagtcc

SEQ ID NO: 178236 - DNA, 185 bp, Homo sapiens
catatgggttttccagcccactccagtgtgatctgcaccctggcagggccccaagggccaaggccgcattgcccttcgggctggagatgctttgccggactagcctgaggccttgtctagacagggctgagctgtttgtcgttggaaattgaggctcggccagaggcgggagcccctacagtgcc

SEQ ID NO: 178237 - DNA, 283 bp, Homo sapiens
cttgctgcgtctccagctagtgacacaatctaattccgtttcagtgtgtcctgggacccatggcactgtcacaggctcagcgctttgacatttttcacctggttgtctgcgctgcccactcacagatctttctcactctagcctggcggcccctttccaattcatccttctctgtgcttctgaaagatctgttaaaaacgtaaatctgggccgggcgcagtgactcacgcctgtaatcccagcactttgggaggccgaggcgggcggatcacgagatcaggag

SEQ ID NO: 178238 - DNA, 273 bp, Homo sapiens
atgatgtgcatgacagcttgggctcaagaggggaggtgaccttagcaaggaatagaagtggcagttctgatagtgtggagatgatctcaggcagaaactcccaacagcagttggcaagggtcccagcatcaattccaaagccccactcgtagaaggtcacccttaaaagatcttcttctctattacctttagtatcctgtcccttccaaatgttcctttcccattccctaattatccattttcagtgagagcacgagattagccaagcttgca

SEQ ID NO: 178239 - DNA, 438 bp, Homo sapiens
ccaggctggggtggagttggtttcaggatgattcaaatgcattacatttattgtgcactttattattattacattgtaatatataatgaactaattatacaactcaccataatgtagaatcagtgggagccctgagcttgttttcctgcaactagatggtcccatctgtgggtgatgggagacagtcacagatcattaggcgttagattctcataaggagcaggcaacctagatcccttgtgtgtgtggttcacagtagggtttgtgctcctatgagaatctaatgtcaccactgatctgacaggaggcggagctcaggcggtaatgcttactcacccactactcactcctgctgtgcggcctggttcctaacagaccctggaccaataccccatccatccatggcctgggagttggggatccctgatctacactaca

SEQ ID NO: 178240 - DNA, 310 bp, Homo sapiens
catggataggaaagtgagataaagaaaggtgaaggcctagggtaccgagaaagtgggtgtagtttcaggttgggagtggagggagataagctgactacagtcacagccacaagcctgaggaggttttcagacccataggaacttgaactatgttctaattccacctcctttactccccagtcttcagaagagtctgtgctaataacagctttgggtaaataaagctttgagaaatgaaggagagggaaattttctctgcttgaggcaatgagatccgagagggggcagcaatcatgggtggagagaacta

SEQ ID NO: 178241 - DNA, 401 bp, Homo sapiens
atacttttactcaaccacagattttgatgtataggaaattctttatataggttcattaatttttttaagaaattacagcatcataaaaatccacactggaagttcttaagaaatgttggccgggcgcagtggctcacacctgtaatcccagcactttgggaggccaaggcacgtggatcacttgaggtcaggagtttgagcccagcctggccaacatagtgaaaccccatctctactaaaaatacaaaattagccaggcgaggtggcgcatgcctgtaatcccagctactcggaaggctgagacacaagaaccgattgaaccaggaggcggaggttgtggtgagccgagattgcaccactgtactccagcctgggtaacaaagcgaaactctgtctcaaaa

SEQ ID NO: 178242 - DNA, 324 bp, Homo sapiens
ctccaaccgagggaaacgaaagcctgagaaacaggacggccctgtcaatactcgttgagcagaactatcactcaaacttgataaagggagattagaacaggctccctaatgccagaggtattcattataagttggagttctttatttattttttattttcttaaacaagcacaagtggtcaatggaaaatacatttttacaaggcaggttttcctgcaggaaacaaaagtaggcaggcttcagtgcctgaccaggcttcagtgcctgaccaggcttcagtgcctgaccaggcttcagtgcctgaccaggcttcagtgcctgacc

SEQ ID NO: 178243 - DNA, 493 bp, Homo sapiens
ttcgtcagaggtttttggggttgagtttttatatccgttagtttagttttgtatatttgatggttattagtgtctagattccatcaaactctcagtgatgtagcatttccagagttgggtgattttaacttgtcatcaagatgtcttttcaggattatagtcagtaatagccagatattgcccaatactggtaccgagggtttactagcccttagctggtaagggtcctttctttctcagcaattaagtgtataagacttattcttaactcccaatcacaaaaggagatgtttggttccggtagagctctggggatgtggtttagtaaacgcttccctgagggcaagatgatctgacttcatttctaaatgacgttaggattggagaaggataatgcccaatttaaccttctctggggaattttgaattaggccttctgtgttctctgttataaatactagaagcattgtaagtattagcacacatgtagaat

SEQ ID NO: 178244 - DNA, 502 bp, Homo sapiens
tttatataaaataaatttactgacatctcttctactttgtagacaagagtaaaaaaatagtggtacagggatttggatatcaaaaaggttctgcagttaagctgatcagttccagcaagatggaagatcaacctcaccattcatgaaaagaaaacaatggctttaagtcaccaccaccaccaccatgaagacaaagccaaggacagaaaaggggtgaccggccttcgctcaggagtttgtcaaaagagttaaaagttggccattttgttttactgcctattttatttctccccgactttaagaatgggtcctaagcttgcaccacttgctcgacatatatattctttgccttcatctcacctgactcataagcaaagtcttcatattgctgtagttgctatttgtaaagccttcaaagttgccatcttagaaatattttgattaaacaagatgcagaaagttaaaaaataaaaagacagagagtgtgctggagggaaaaaaa

SEQ ID NO: 178245 - DNA, 571 bp, Homo sapiens
ggtttccctgagtgggcttcaggagatccagtgttactcaaagtctagtatatattcaggaaaagagaaaaataaaaaggctaggctccaaaaggtcttgaatagcttactaaggaatttgtccattaatccacaggatacatagttgaataagctaggaactatttgtagtgagaagagttgcttttttcttttttctttccctccctcatcatcttacctggataactgttacccactaaactaaggtaacaatgggataatgggtggtcacagatgctccaccaggagaactaatcatgagagtctcatttctcagtgccctcccacaaagcccttcctcaaaacacccatctgcctcctccaaaccccaataatcaatgaaacttcatagcactaaaaggctgacacagttgtattagaggtgtaaatgagaaatattcagcacctagagcaggaggcaatagcaccagtggggtcaaaggaaatctgtgaaggaggaaacaaagagagaatccaaaaacaaaagaaggttttccaccaaccacatgatcaactcacccaggctgag

SEQ ID NO: 178246 - DNA, 166 bp, Homo sapiens
tccgcttatgagctgcgtgatcttggccaagttaatcattcaatgcttcagttttctcatctgtagaataagtatgataacagtacctgccacattggaatgttctatggaataagtatgtggaaaccatttacaacacattgatcaacaaataagaatcatcatc

SEQ ID NO: 178247 - DNA, 504 bp, Homo sapiens
tagaataatgataaaatgcattaaggcaaaaccaagtcaagatattctaccaaatgacctaatattttattcagtctgagttcctctccagaacaggtggaatttgtaacttcataaggcctttgaggggtagaggggtgagacagacccatcttcctgcctcctctcaaagctggtaccaggctgcctccagaaaggaggatgggaataattagaaaatctttattggatctggaacattgtttagacaactaggtacaataaactgctatggatattaactttacttttgaaaacacgcagctaaaatgggattctttgaagatccagtcaagatttcctcattcttggggaactaaatacattctaaacgtttaaaatcctggaaagcaactaatcacttctaatgagctgccaattgcttgtgggaaactaaaaaataggaattttgccaatcacaagataagcagcatgctgaagtgggaatcatggagcttgtgggaa

SEQ ID NO: 178248 - DNA, 287 bp, Homo sapiens
tggagagtatgtctcattgtctgtataaacaattacaacaatgtacctgtaattttccagttcataatcaggctgtaagaatgagaacaatttgttttatgaaacatggagaaagactaatctttgctattactctcagtgcaggtttatcagcaagacttggagtagataagccacaggcatacagatgaggaatcacattttgaaagctttaataactccctagtggtatgcaacaagctgctgaattaacttgtctttgcatactcattgcacatgcatcactg

SEQ ID NO: 178249 - DNA, 645 bp, Homo sapiens
agttttcttcaattagttaagattttgttttccaaatcagttagattggtccatgagcaactggactattacaatcctgtataaaaacagagattttgaatttaaaggtgtgccagcattcctagtgctatgtaggaatttagtgtcgtttttaatctctatatgcttgggtatctatctggaggtgattttgaaagttaacgtgcacctcttatcagcatgctttgaggagcagagcagtgcatttgtgtatgtgtgtgaaaatgcattataactgaatgcacaaaaatgttttctcattgtcttgctttttccccacctctttcttacacacgtgtgaataaggttcctgaactggatgtagtgagatttagtcactagcatcagcagctacatttgcttttggataacggtgtccatctcccaaacttttttgctagtctgtcttcctaactcctccttttctttctcttcctcttctttctcttcctgtctctatccttaccctatgctactttgtttgcaaaagtaattcttgagcttttgctgagttaaggagacaaggttctcttctgatgtgaatgaaacgacatcattctaggtgtgaatgaaacgacactggtttgtcgatgtttgtttagtcta

SEQ ID NO: 178250 - DNA, 353 bp, Homo sapiens
tccaccattttcactgatgtcacttacgacatgattttaaatctctgaaggctcactgggcacatgcctgtagtcccagatactcgggaggcaaaggaagaaggatcctttgagtccaggaattctgggctgtagcatgctatgctgattgggtgtccgcactaagttcagcatcagtatggtgacctcccgggaaaaggagaccaccaggttgcctaaaaaggggtgtaccagcccagttcaggaatagagcaggtcaaaactcccatgctgatcactagtgggatcatggctgtgaatagccactgctctccagcctgggcaacacagtgagtgagaatgtgtctcttaaa

SEQ ID NO: 178251 - DNA, 801 bp, Homo sapiens
gtcctaatttcactgctgtgatgggaaaataatgagacaaccaacaaaaatccccttacagtggggggagataccacagtgaattcatgatggttcttaaatgaagtgaaattgtttggtttgtggctctgttttcttggtatgaatgaaagaagtatgcaaccgtcacgtaactttattttatacctcagtttcctctctagttccctaaaagcatggaaagagaaaagaaacttgccaggccctttagtgaccaaactaatgtttactctcctctgtaggagagtggtagatttggactctggagagttgattgctaatagccattttaaggacttaccacaaatgtgacaccatttcgccctgattcacattattaagggtatgaacgcattagaaaagcaaatggctcccttgttgggctagaaatgataggaaagagtgttggcaatctagtcaacagtattctcctagattcataaacacttcgctttcatctgcatcacctcatcccatcctgtgaggcgaagcagtggtgatagagggcaattttggtttttaacagatgggaacattgaaatataaggaaatcagcctgggcaacatagtgagaccttgactccacaaaaaataaagataaataaataaaaattagccaggtatggtggtgcacgcctgtagtcccagctactcaggaggttgaggtgggaggattgcttgagcctgggaggttgaggctgcagtgagccgtgatcataccactgtactccagcctgggtgacagagcaagatactgcctca

SEQ ID NO: 178252 - DNA, 842 bp, Homo sapiens
gtcctaatttcactgctgtgatgggaaaataatgagacaaccaacaaaaatccccttacagtggggggagataccacagtgaattcatgatggttcttaaatgaagtgaaattgtttggtttgtggctctgttttcttggtatgaatgaaagaagtatgcaaccgtcacgtaactttattttatacctcagtttcctctctagttccctaaaagcatggaaagagaaaagaaacttgccaggccctttagtgaccaaactaatgtttactctcctctgtgatagagcagaggtggctactaatggtagcgacctcgtggcagtagattgactagactaatagaccattgtgaagggaactctaccacaacatgtgacagccaaatttcgcccggaattccactttctactcacggcttctgacacggcctattagaaaaacgacaaatggctcccttgttgggctagaaatgataggaaagagtgttggcaatctagtcaacagtattctcctagattcataaacacttcgctttcatctgcatcacctcatcccatcctgtgaggcgaagcagtggtgatagagggcaattttggtttttaacagatgggaacattgaaatataaggaaatcagcctgggcaacatagtgagaccttgactccacaaaaaataaagataaataaataaaaattagccaggtatggtggtgcacgcctgtagtcccagctactcaggaggttgaggtgggaggattgcttgagcctgggaggttgaggctgcagtgagccgtgatcataccactgtactccagcctgggtgacagagcaagatactgcctca

SEQ ID NO: 178253 - DNA, 814 bp, Homo sapiens
ctgaagagtgtaagcctttctttcttcccatgtgttcagctctcccagggcaatatgacatactctgcacaactcctacaatatttgaccccaggtcagacatagaggtccactgcgaccccaggacacacagaggacttggatggtgccattagaaacagccacttatgggcctgggcataggagggcattcctttggcagaggatctgcctgactaacaagcccagaacaagtcacctgaattaaaaactttggacacatgactcagaagaccccaggtgttttaccttttctaccagtgccagaagtagagtgagattatttaagttagtctccatggcttggggcaacttcccaacccaaatgggtcatttagaaagcagggaatgtttcagaggtcagtgggccagcaggtcaatttggccagtagcgcttgtaagttttttgaattagctgccaacattgaaaaacctaaagattttaaaataaaattccaagttcaaagcttctcttgaatattcaaaaaatggcagccacatggccctcatccccacataacaacagtcacccccactgtccaagtccttggccttatgatgaggcaggagccattgtcctgacagcaacactcacttagataacttgcaagagcctgctgggattttggatttcccaccaggcatcaagagtctcacatgagaggttgagaggagatctctggtcgagttttctccaaccaagcaacatctgggtgctgtgagcagtgggcaaaaacagaaaagcaagagaaggacctcatttcaaggaagaaca

SEQ ID NO: 178254 - DNA, 751 bp, Homo sapiens
ggctggaatgcagtggtgcagtcatggcacactgcagcctcggcctccctgggctcgggtgatcctcccgcctcagcctcatgagtagttgggactacgggcatgcatgcaccaccacatctggctaattgttttgtattttttgttgagacggggttttgccctgttgcccaggctggtcttgaactcctggactcaagcaatccactcatgtcagcctcccaaggtattgggattacaggtgagagccactgcacctggccagtactttattttcatacagagactgagagtaagacttcatttccaaataaaagtaggttattaaatattgctttatatatttttaaagttcttacagaaagaaagcttccatatactctagaccattttgagattctttcaggctgtgactcttaaggtcagctacatttttattgacagcaatcctggaagaaaagtaaagagaagtgagaatataatgttgtgattctgttaaaatcactcaaaatgcttgaaattgataatactttttggcatgtttctttctaaaatcaatgtgataatatccgctgcattgataaacatagttagcaagcatttttgtacttagcgtttgtgtataaaatgtaaaggaaggttttttaattcagagaaggtgctcatgtttgaaagacaatatatggatctggaagaagtaaaagtaaatctttaaactctaattgcaaggctgtctgctcatatttaattg

SEQ ID NO: 178255 - DNA, 404 bp, Homo sapiens
tctcctggaaccaccagggggcatggattctgccgcagccctctctgtgcctacactcatacccttcatcatgccatcctgcgatgcacagactcagggcaacctttgtccttctatctagacttctgctggcagagtggcagctcaaattgtggatttgtctatagctcatggagcagggaaatgggtctgtctacgtcgacaaagagctccaggctagggttccccaggcaacacccagcaggaggcacaccagagccctgcccagacaggccacccattctgatgggccagagatagactggaagaggccaaccctgctgaccatcccagcctcctggaggcttgtcagaggaccccagcttccaagggcaggaaggaatagggaagttgctgcctttgtg

SEQ ID NO: 178256 - DNA, 269 bp, Homo sapiens
cttgttaatatctggccaactgttagtgacaaaatgaagttttaacattccctgcccaagaggatccttgagacctagaccagtgtattttctcatttgttcctttaatctatctaaaaattctataggcccttcatctttcccttgctgtatatcaaatattcgggtaagatactgagttcggggtaccaattttttttttttttttgagatggagccttgctctgttgctcaggctagagtgctggagtgcagtggcgtgatctcgg

SEQ ID NO: 178257 - DNA, 345 bp, Homo sapiens
ccccaatggcgtgcattctcacgatcttccaacctactaccttttgtgatagctatttttatcctctttcaacaactgaaggaactgaggcctaaagctctgcagttaacttgtggtgaaactggaccataaacccaggtccaaaaaactcatggtcttggctgttacatgatgttttggcattagagagaaaaaatctaccacatggtaaagggaaaagtagcttgggttgaatttcaaatacttggattggaatccaagctctgtgaccttggacaagtttctttctttctttctttctttttttttttttttttttgagatggagtcttgctctgccgccca

SEQ ID NO: 178258 - DNA, 255 bp, Homo sapiens
tagagtgcatcttgaaggcagagattctgtgtcacttaactttgaattctacccacatgtgacactgcctggcacatagtatgcattccctaaatgtttctcaaataaataaataaatgagggatgaaagatactcccatatggtcacagtgtaccattataacatttgcaattcttactatattatacaacatctgtaagccagttttataaatccaataatcatgatatggctaaagggaacatagatatctt

SEQ ID NO: 178259 - DNA, 399 bp, Homo sapiens
ttgtttggtgccctggaggttttaatcttgtcctcccatccgccccacctcggggcactgcatcctactgagatggggggttgttctctttcttttgcaaagtggagagaggggtgatcaggtcctgaacccaaagcaggtttgcaggcagttttaggaatgacatggagtttgaagctctggaaatagattcctttaggacaattcatgttgcaaaccccgcttagaggtctgctgctccaggggcagctttgggcagtgagtattggggttcaaagcacatttctgttgtagaacagtctcagcactggggaaggcctgtggattaaatttccctgactcttagtcagtctttgggatgtcccagggaggatttggggtcccctttgactcctggcc

SEQ ID NO: 178260 - DNA, 137 bp, Homo sapiens
gccaggcaactccttactcttggctctcactcatctgttagctggtgctccactctatcccatgttagagatacacccacgctcctcaccaaagcctcgcactgggcataagcactcctgggccaagtccagttcag

SEQ ID NO: 178261 - DNA, 590 bp, Homo sapiens
atcttttgcccattctttccatgcatttcttctacaggcataattgtgtcctttgcttgttccatgtaagtaatacaaaagcaatgttgaaaaatgtccaatgtctcacttttgtcatggcttcagcccccagcatgaatcttcctaggtctagatgcatgaatatttaacaggcttaatccatttaaagtgatagaaccttaccatgccttcatgaatgcttccttcaaggtctctatcaatactagccccctccatgaagtcttccctaaataatttatcaaataatcttttggcttctgctaaattcctattaattgtactttcagtctatctacatcttctggcacttgaccaacatcggctcctgatccccagagaagtaaacaggcaattacaatgtgctccaacaacagtacaagaatttgagggcacacaaaaaagaagggcacataacataatcatgaagaataagaaaaggcttctaaaaagaaaagaaataaaggatttgggtgagggaattcaaggtttagaatctgaaccctactttaggtagaggagcatgtacaaaaacttgaaatagggcaatc

SEQ ID NO: 178262 - DNA, 1346 bp, Homo sapiens
ttggtgtctatgttgaaaatcagttacttttttttttttgagatggagtctcgctctttcacccaggctggattgcagtggcacaatcccggctcactgcaacctccacctcccaggttcaagcaattctctgcctcagcctcccgagtagctgggattacaggcgcctgccaccaagcctggctaatttttgtatttttagtagagacggggttttaccatcttggccatgctagtcttgaactcctgatcttgtggttctactacccacctcagcctcccaaagtgctgggattgcagatgtaagccaccacacccggccaaaatcagttacttatacatgtatggattggccacctattcttgacgataatgtcttgaaatgttgtttggggttaagatggtgcagagctcactggaaagacaatcaggtaagcaacttgaattctaaaatcctcatttccataagcccaaattaagcagagcttcatgtatcttctggacccagtccaagccatcagggcagatgcagggaggctttggggccttagacagcctgtggccacctgaaccaggctttgcccatgacatgctccactggttttataagcagaagagagagcaaacgggtttattttcaaaatggagcttggatcctcagaagaagcctcaggagagggaggagcagttgctagtcagtgcacattccagagggcccagggcatgtttctgtgcagtgtgtatgtgtgagtgtggtgtacacgcacgtgtaccaaggcagtaacatttgctccctgtggccccaggaagcagcacggaggagacagggagtggcagtcccaccatggagactgagcaggggcacatctcgtgtgtactcatatccaccctcacacacctggtatacattgagctccagcagcagtttctggggatgtgaagcttctctgtctccacctccagtccagctctgaggggaccagcccttgcacctccccttgctgtcccagtgcctgcacaggaacaaagtatgacctcgcttaggaaacctgcctagccctcgcttctcctagtccctgccccagggcacagagtcctggcatctctactccctgtgctgtggaggaggaggctctgctgcataccatgtttggggaaacgattgcccacacaaccatgtgtttggctgagcaagctctccaggcccacagctagcctgctcagaatgccagtaagtcctcattcataccaagtcctcttcctctgctggggagctttttcgcctgagatcccaggctccacacatcacctgtccacgcagtctgcctaaatcctggccaggaaaa

SEQ ID NO: 178263 - DNA, 516 bp, Homo sapiens
aacgaagtcatctgtgcataccggaggttcatataaatatgtccataggttgctacaaccacattattttgtatgtagtgtcagtatctcctctactagtctgtgagtaccacgagggtgtcttcatctttttatcctcatggtagccaccagacttacgtcgagtagatggctgagtggctgagtgactaaatcgggatggaatgtagtgagaaaacagaccataaaattagatggagccaaattatgggaggccatagaggtcatactgagagttagggttaggtgtagtaaagtagcagtgaccaaccagtggctcatgcctgtaatctcagcactttgggaggccaggacaggaggattgcttgagaccaagagtttgataccaggctgaccaacatagtgagaccccatctctacaaaaaattttttaaaaaaattagctgggtgtggtggcacacacctgttgtcccaattacttggaaggctgaggcaggaggattgcttgaagctggt

SEQ ID NO: 178264 - DNA, 307 bp, Homo sapiens
gaggtcatgccatcgcagtccagcctgggcaacaagagcgaaactgtctcaaaaaaaaaaaaaagagttacctttcagaatgggctcaaccgcttgaatgatttggagaattggaggtaagagattttggtgttaatgactttcacttccctgtcttatgtccattcttcctgcacgattgttgtttgtgggtatgcgtccttctgcacgtaatctgtttgaagcctttccagtgatcccatgtctataccccctttcccctgtgtagccatcccattggcctggatgcttggggatggtttgtcta

SEQ ID NO: 178265 - DNA, 577 bp, Homo sapiens
agcggcgccctttttttacttagccaggtacaatgtgcatgcctgtagtcccaactacttgggaggctgaggcaggaggatccctcaaaccgaggaattcaaggtggtagtaagttatgatcatgccactgcactccagcctgggtgacagagcgagactccatcttaaaataaataaataaataaatatgacctattatagatatcgtcattatttgtgttgctgataattaatttttatgaaagattctaatagcataattaatttagaacagcttctgaaagccactcatctattattaaattttatataattttggaaattaagaatatgattttagcatgtctaaagattttgaccaggtgcagtggctcacacctctaatcccagcagtttaggaagccaaggctggcagatcgcctgagatcaggagttcaagaacatcctgggcacatggcaaaaccccatctctactaaaagtacaaaaattagctgggcatggtggcacacacctgtaatcccagctactcggagggctgagacacgagaatcacttgaacccaggaggcggaggtt

SEQ ID NO: 178266 - DNA, 534 bp, Homo sapiens
cccaggaaacagggttttaagctctggattcattttgttaaatcacgtaatacaggatagggaaggcagcagcggcaagctctgtttgttagtagtgaagttgcgcaggtgagatagaagctgagtcacgtgccacctgtcacggtctcttcctctggaccaggcacagttgtgctgttgtccgtcatctccttaccaagctggtgggagctaaggaccttctgtgtttctaggagacctcaattccagttttagcagagtctgggaagtttcatgttttatttatagagtgcagaagtatcacttttcattcagttacaagtttttagaagagatcatctgaaagacatcatactttaaagtgtaatttatgttattttcaagacttaatccaaagtgtattgttttgaataaaaagtattgtcattggtccaaacatgtatgtaaaagatgtaattcagtttattttactaaagaatactaaatgtgtataaatgattgcattaattacagcagatctaaaacagtgggaga

SEQ ID NO: 178267 - DNA, 424 bp, Homo sapiens
cttcagactccacttcctcatgtcccagaccatattcaactcaattcaatttggtgtttgtcactcctgtgtctttgggactgctcttaaccagaccactgatgaataataatcttgccaaaccagcaatcacttctctgccctctcctgtgactttctagtgaaacccacaatttcttcctctcactctcttggtttttctttttctttctttctttttttttaagatggagtctcactctgtcacctaggctggactgcagtggcacgatctcggctcactgcaacctctgcttcctgggttcaagtgattctcctgccttagcctcctgagtaactgagattacaggcatgcaccaccacgcccagctaatttttttttttttttttgagacggagtctcgctctgtcatccaagctggag

SEQ ID NO: 178268 - DNA, 151 bp, Homo sapiens
tcaacgtgatgttgcagtggagcatgagctgcggcagcggctcctggttcttgtggaagatagagtccaacaacttcagcttggccttgaaccctcacacggacattttattctcacctctggcaggtggggcgcgaaggtgagcccgtcg

SEQ ID NO: 178269 - DNA, 741 bp, Homo sapiens
ctggtctcgaactccttgacctcaggtgatcacctgagctcaggagttcaagaaagaaagaaaagaaagaaaggaaaagaaaagaagaaaagaaagaagaaaatcccatttacataaagaaaaccttgacttgagtagaaatagcagaataggtaaaaagcgagctgtgtctagacacagtttagtaaaattgctgaatcccacaaataaagcctatagaccaaacaagaaaaatttactaaactggaaaaggaatcagactggcatcagatttctcatctgctgcactgaatactaaatgatactaaatgatagtgtgcaaatcttggtacaatactgaagtaaagcaaatttgacccgagaattctacttatagccaagcttttactcaaatatgaaggcaataacaactcattttagatatacaaagactcaggaaatacatcaagcatgtagccttcccataaaattacttaatgaagtactatggcagaaaaaaagaacaaaaaagagaagaatcaagatgatgaatacaagaaaaagatagtaaatagaaaatagcacagcaaacaggtaaaagttacagtttattactgatgtggttataaaatttaatgcaagaaacaattctcaaaagagatttgctataaagttaaaaatgttacaacatattctccaaattattttaatagaatgtgggatggagcagggaagaaaagaatgttcaagcatcatttggcg

SEQ ID NO: 178270 - DNA, 280 bp, Homo sapiens
cagggatgtcttccccatttggaatacttctctcctctatactctcttgtttcaactgtatgttaagtattcttctcaccctggccacattctttttgtatcccttagtcctgttttaatttctaaaaagcacataccactatctgggattacattgtttaatttatgtgcctatttaccctctgctatagtgtgagtcacatgaggtcagggttttgctttgtattattcacaactgtttccccagttctagtaacagtggccaagcagattactatcc

SEQ ID NO: 178271 - DNA, 758 bp, Homo sapiens
gcccagtctgatctcaaactccagggctcaagtgatctttccacctcagccttccaaagtgctgggattacaagtttgagccactgagcctggccttttctattttaattgagtgtttttatcctttgacatacttgacaggcttcccaaagtcaaatttcaaattctaaattaagtcttttcggcctcaaactaaccttaggttatcccagaatggcccctggaagcctaagagagacgtattaggcttatttgatatgtaaattatacaggaaacctttgcattacatttatatgaacatgttattaatatgtgttttaaaagtatatgagattcctaaaagtctgatgtgtctttttgtatgttatcagtcataattatggctactatgtaaacttgttatagactacagaaaaaaacaaatttccttgtcaatcgcatcattgttgtaaactcttaccaggtctttcaccatagccattctaaatcttgttgttcgtagtaaattgctttattctaatgttttttctaaatgatctttgcaagcaaatataatcctaaagcattgtgtcttcaaagaggtttatgagaaggataaaaagtctgatacatactctggaatacaggcctctgttgattattaagttggactgaataagaacttgagaaactccaatggtaaaaactggacttaaaattgctaatttatcaagtagaacaaaaattaattacatgggacggaactgatgaggactga

SEQ ID NO: 178272 - DNA, 529 bp, Homo sapiens
  misc_feature (482)..(482): n is a, c, g, or t
cagaaggacttgggccccccacgagcggcgccggggagcgggtcttccgctgggctcttccctgttcactcgccgttactgagggaatcctggttagtttcttttcctccgctgactaatatgcttaaattcagcgggtcgccacgtctgatctgaggtcgcgcggctcggtggagagcggccgctctccacccacccctgctaccagtgccagcccacctggccccacactgaaggcccgcttccgcagtctgctggagaccgcctggctcaatggcctggctctgcccacctggggccacaagtcctcaagaccagaccagccctcaccctgcccacagctgctggacagccagagccatcacctgtagcactggttgccagtgctgtgtgtatagcagtcactctccacccttcccttctgcctgcccagctgccccggggccacgagtggatgctggggctgtggctgctccctgganggggttccatctctgacctgtgcccattcggggtggtggcgagcggt

SEQ ID NO: 178273 - DNA, 4510 bp, Homo sapiens
  misc_feature (52)..(52): n is a, c, g, or t
accagcggagcgctgggtgtcagtgagcagcgaggagccgcgcgcccccgtncccgcgtctgtccgtgcgcccgagcgcccactcccgggtctgaggtctgcccggcgcgccgcttgcagagcatactcagggccgcgcacctgccccgcgcacctgcccgccgcccgctcggcgctccgggcttcgctagccagcctccctgcgacagcgcgggggctccggccgtgcctccgcgtccgccccgcgcctcagccgggcccgggcgcagcgctgcggagggcgagggccgcccggagtccggccagggccggcgcggcgatgatgaacaggttccgaaagtggctctacaaacccaagaggtcggatccgcagctgcttgcccggttctactatgccgacgaggagctgaaccaggtggccgcggagctggacagcctggatgggcggaaggacccccagcggtgcacgctgctggtcagccagttccgctcctgtcaggacaatgtgttgaacatcattaaccagatcatggatgagtgcatcccccaggaccgcgcccccagagatttctgcgtcaagttccctgaggagatccggcacgacaacctggccggccagctgtggttcggtgccgagtgcctggccgccggctccatcatcatgaaccgggagctggagagcatggccatgcgcccgctggccaaggagctgacgcgcagcctggaggacgtgcggggcgccctccgtgaccaggcgctgcgggacctgaacacctacacagagaagatgagggaagcgctgaggcacttcgacgtcctgttcgcggagtttgagctcagctacgtctcggccatggtgcctgtgaagtcccccagggagtactacgtgcagcaggaggtcatcgtgctcttctgcgagacggtggagagggccctggacttcgggtacctgactcaggacatgattgatgactacgagccggccctcatgttcagcatccccaggctggccatcgtgtgtggcctcgtggtctatgcggacggacctctgaacttggaccgcaaggtggaagacatgtccgagctgttccggcccttccacacgttgctgcggaaaataagggatttgctgcagacgctgacggaggaggagctgcacacgctggaacggaacctctgcatttcccaagacgtggagttccccatccgcgcagacgtgcagggacccgctgccctggcgcctgccctctctgcccctctcccccctgaggggccactctcagctaaggccaaagacccggatgcagagctggcctgctccatgcagtacgacgaccaggagctggagcagctcagccgcatggtccacagggcgggggacgagatgtcctctttgctttcaccgcccattgcctgccagtccccagctcacaggccaggagcggagggcagcccaggcggggaggcctctccaggtagaccgcgcctgcggtcaggcagtgacgaggaggagcgcgtgttcttcatggatgacgtggaggggacggcagaagccctggccaggcccgagtccccagctggcccatttgggtgggcaggcagtacctgggccgacccccaggagaaagggcagggtgggccaggcggagcggcggggatcagcttgcccgcctcggaaaaggaggaggacttgagcaacaacaatctcgaggccgagggcacagatggggccagcctcgcgggcaccagctcctgcagctgcctggactcgcggctgcacctggacggctgggaggtgggtgcggatgacgcagagacggctgagatgatcgcccaccggacagggggcatgaagctctcagccacggtcatcttcaaccccaaatcgcccacttccctggactctgcggtcgccacccaggaggccgcctcggagcccgtggccgaggggatggatggcggcccccacaagcttagcactggggccaccaactgccttctgcattcctgcgtgtgctgtgggagctgcggggacagcagggaggacgtggtggagcgtctgcggagaagtgcagcccgggaggcgtcattggtgcctcgtacgctgccggcttagccaaggccagcgacagggcccctgagagacaggaggaggcgcccccaccctcagaagatgcctccaacgggcgggagcccaaagcccccacttccgacaagtgcctgcctcacacctcaggttcccaggtggacacagcgagtgggctgcaaggagaggctggggttgcaggtcagcaggagccagaggccagagagctgcatgctgggagccccccggctcacgaggcgcctcaggccctgtcgggctccagcagctccacagctgggtcctgctcctcagacaagatggggccagaggcggccccagcagccacgcatgctgccccacaggccacaagagagaagatccggtccaggttccacggcagccacgacctcatccaccgcctgttcgtctgcatttcaggtgtggctgaccagctgcagacgaactatgccagtgacctgagaagtattcttaaaacactgtttgaggtcatggccaccaagcctgaaacagacgacaaggaaaagttaaggaaggtcacccagactctgcggagtgcggccttggaggactgtgcactgtgccaggagaccctgtcatcctctgaactggcagccaagacccgcgatggggactttgaagaccccccggagtgggtgccagacgaggcctgtggcttctgcacggcgtgcaaagcacccttcaccgtcatccgccggaagcaccactgccgcagctgtgggaagatcttctgctcgcgctgctcctcgcactcagcaccgctgccccgctacgggcaggtgaagccggtccgagtgtgcacccactgctacatgttccatgtcacgcccttctacagcgacaaggccggcctgtgacgtggtgccaggggcagccccaacccacccgggccaggaacccccaggaaggtggggccacgctgcaggcaggtctcactgcgtctcatgaggccgctgccgctgctgcaggggcacccagacctccagagcatccagagcctctgtcctgcccacgctagcctccctgcagggaccccgggccggctgcaggggccaacaagaggtcagctttgcccagcaggggacccggaggagcctggtggctgcctcagggcagggtgcctggcggagaaggcctgggccctcccactggtccctcggagatctgctggggctatgggaatcggggcgggtgatggaggtggacaagagtggggccactctgcgcctctgctgttgcggtgaatctggaagccggagcaagggccactccacaggctctttggcacagcagggctccctatgtgcctcccaaacgtcaaatgcaggctacccattctccccatcagctgcccacctcgttccccagccctcacccctcacccctcaccatccttcctcaggacttggctaaacaacatgcatctcatttcttcttggagtggggagatgcgggaagctgacccagtggtcctctaggcaggcagggtgctcctggtgtctgcccaccactgtccccttgctgatggcatgggggtccgaccaggcactgacaccgcaggcagaggttgctcggggccttgggtcgggtttaccaatcagccaggacgcccggggccaccagctcagctaccacttccccttccctctgcaccctctggaaccctggcccaattcctcagaccccagagtggcctgggacccaagctgccgcagctgagtggccccagcggacacctcctcaggcttaaatctcaggcttcacattgcaatgacgattgcagttttatttttggagatgacacacctactgcttcttttctaggataaatctaattactgtttactggtggagtacatatgcatagaaacggcttctgtcggggggagagtatataatggaggaaatattatgtattgagattatatttattttctaaatgctgtaatttgaagccatttccataaatctatttaaggattgcagacgctctcctttcttccatgaacgcggatcttttttctctgtctggaaagcgatggtgttggtgctaacatgcattgtcctctaagaagctggaggctcctggactcttgggacgactgaagggcgggacttggctcccaccagccctcaggagcagtggccaccccctgcttcctgcaagctccttcccaccttccagggctctgcccctgtgatgcccatccccccctgcccatctacctgcccagctcctcttctcacaggcatcttcagctcagccctctggcctgtggggggcagggttagtgctcatagccaccccgacttggggcctgccctgcctggtggccctggtcgtagggctgtgctaatcacgcctggagcggctgccttctggag

SEQ ID NO: 178274 - DNA, 4427 bp, Homo sapiens
gcgggaatgcacaacgttatgctcatcacctgcgtccaccaccgtcacccctgacggcgagacgcgaggtgctaagggcttgtccaggctaagcgggttctctgcgtccttaagcccactttgcagatgctaatcagaggggacaggcggccaagaacctggagcccacccgggcgtctgtgcccagtgccgaccctctaaattcccttcccacgtggctcctgttgcgtctgggctgtggaggattcctctaaacaggcacagccaccctctggaggtcggatccgcagctgcttgcccggttctactatgccgacgaggagctgaaccaggtggccgcggagctggacagcctggatgggcggaaggacccccagcggtgcacgctgctggtcagccagttccgctcctgtcaggacaatgtgttgaacatcattaaccagatcatggatgagtgcatcccccaggaccgcgcccccagagatttctgcgtcaagttccctgaggagatccggcacgacaacctggccggccagctgtggttcggtgccgagtgcctggccgccggctccatcatcatgaaccgggagctggagagcatggccatgcgcccgctggccaaggagctgacgcgcagcctggaggacgtgcggggcgccctccgtgaccaggcgctgcgggacctgaacacctacacagagaagatgagggaagcgctgaggcacttcgacgtcctgttcgcggagtttgagctcagctacgtctcggccatggtgcctgtgaagtcccccagggagtactacgtgcagcaggaggtcatcgtgctcttctgcgagacggtggagagggccctggacttcgggtacctgactcaggacatgattgatgactacgagccggccctcatgttcagcatccccaggctggccatcgtgtgtggcctcgtggtctatgcggacggacctctgaacttggaccgcaaggtggaagacatgtccgagctgttccggcccttccacacgttgctgcggaaaataagggatttgctgcagacgctgacggaggaggagctgcacacgctggaacggaacctctgcatttcccaagacgtggagttccccatccgcgcagacgtgcagggacccgctgccctggcgcctgccctctctgcccctctcccccctgaggggccactctcagctaaggccaaagacccggatgcagagctggcctgctccatgcagtacgacgaccaggagctggagcagctcagccgcatggtccacagggcgggggacgagatgtcctctttgctttcaccgcccattgcctgccagtccccagctcacaggccaggagcggagggcagcccaggcggggaggcctctccaggtagaccgcgcctgcggtcaggcagtgacgaggaggagcgcgtgttcttcatggatgacgtggaggggacggcagaagccctggccaggcccgagtccccagctggcccatttgggtgggcaggcagtacctgggccgacccccaggagaaagggcagggtgggccaggcggagcggcggggatcagcttgcccgcctcggaaaaggaggaggacttgagcaacaacaatctcgaggccgagggcacagatggggccagcctcgcgggcaccagctcctgcagctgcctggactcgcggctgcacctggacggctgggaggtgggtgcggatgacgcagagacggctgagatgatcgcccaccggacagggggcatgaagctctcagccacggtcatcttcaaccccaaatcgcccacttccctggactctgcggtcgccacccaggaggccgcctcggagcccgtggccgaggggatggatggcggcccccacaagcttagcactggggccaccaactgccttctgcattcctgcgtgtgctgtgggagctgcggggacagcagggaggacgtggtggagcgtctgcggagaagtgcagcccgggaggcgtcattggtgcctcgtacgctgccggcttagccaaggccagcgacagggcccctgagagacaggaggaggcgcccccaccctcagaagatgcctccaacgggcgggagcccaaagcccccacttccgacaagtgcctgcctcacacctcaggttcccaggtggacacagcgagtgggctgcaaggagaggctggggttgcaggtcagcaggagccagaggccagagagctgcatgctgggagccccccggctcacgaggcgcctcaggccctgtcgggctccagcagctccacagctgggtcctgctcctcagacaagatggggccagaggcggccccagcagccacgcatgctgccccacaggccacaagagagaagatccggtccaggttccacggcagccacgacctcatccaccgcctgttcgtctgcatttcaggtgtggctgaccagctgcagacgaactatgccagtgacctgagaagtattcttaaaacactgtttgaggtcatggccaccaagcctgaaacagacgacaaggaaaagttaaggaaggtcacccagactctgcggagtgcggccttggaggactgtgcactgtgccaggagaccctgtcatcctctgaactggcagccaagacccgcgatggggactttgaagaccccccggagtgggtgccagacgaggcctgtggcttctgcacggcgtgcaaagcacccttcaccgtcatccgccggaagcaccactgccgcagctgtgggaagatcttctgctcgcgctgctcctcgcactcagcaccgctgccccgctacgggcaggtgaagccggtccgagtgtgcacccactgctacatgttccatgtcacgcccttctacagcgacaaggccggcctgtgacgtggtgccaggggcagccccaacccacccgggccaggaacccccaggaaggtggggccacgctgcaggcaggtctcactgcgtctcatgaggccgctgccgctgctgcaggggcacccagacctccagagcatccagagcctctgtcctgcccacgctagcctccctgcagggaccccgggccggctgcaggggccaacaagaggtcagctttgcccagcaggggacccggaggagcctggtggctgcctcagggcagggtgcctggcggagaaggcctgggccctcccactggtccctcggagatctgctggggctatgggaatcggggcgggtgatggaggtggacaagagtggggccactctgcgcctctgctgttgcggtgaatctggaagccggagcaagggccactccacaggctctttggcacagcagggctccctatgtgcctcccaaacgtcaaatgcaggctacccattctccccatcagctgcccacctcgttccccagccctcacccctcacccctcaccatccttcctcaggacttggctaaacaacatgcatctcatttcttcttggagtggggagatgcgggaagctgacccagtggtcctctaggcaggcagggtgctcctggtgtctgcccaccactgtccccttgctgatggcatgggggtccgaccaggcactgacaccgcaggcagaggttgctcggggccttgggtcgggtttaccaatcagccaggacgcccggggccaccagctcagctaccacttccccttccctctgcaccctctggaaccctggcccaattcctcagaccccagagtggcctgggacccaagctgccgcagctgagtggccccagcggacacctcctcaggcttaaatctcaggcttcacattgcaatgacgattgcagttttatttttggagatgacacacctactgcttcttttctaggataaatctaattactgtttactggtggagtacatatgcatagaaacggcttctgtcggggggagagtatataatggaggaaatattatgtattgagattatatttattttctaaatgctgtaatttgaagccatttccataaatctatttaaggattgcagacgctctcctttcttccatgaacgcggatcttttttctctgtctggaaagcgatggtgttggtgctaacatgcattgtcctctaagaagctggaggctcctggactcttgggacgactgaagggcgggacttggctcccaccagccctcaggagcagtggccaccccctgcttcctgcaagctccttcccaccttccagggctctgcccctgtgatgcccatccccccctgcccatctacctgcccagctcctcttctcacaggcatcttcagctcagccctctggcctgtggggggcagggttagtgctcatagccaccccgacttggggcctgccctgcctggtggccctggtcgtagggctgtgctaatcacgcctggagcggctgccttctggag

SEQ ID NO: 178275 - DNA, 464 bp, Homo sapiens
cacagcgattggcgcactttctcctgtcttctctttcaggacaatgtgttgaacatcattaaccagatcatggatgagtgcatcccccaggaccgcgcccccagagatttctgcgtcaagttccctgaggagatccggcacgacaacctggccggccagctgtggttcggtgccgaggtagcgggtggccacccgggttcggaggtcctgatgtggggtggcgtctagccatgtccctgcgaaccttgtgcatgggcgcctgcaggtgccgggacctggtgtctcctccaagagctccgtccactctgggttacgtggtgtggtctgagcctggtaggccgtgcacccctggaggatctgggaaagccatgaactggtgcccccaaaactatacatacaaatgaaatttcccatgtggtttttatgaggttcacaggcccccagacagccaggacctaaaagtg

SEQ ID NO: 178276 - DNA, 1892 bp, Homo sapiens
cgacggccccccttctccactagtcacccagactctgcggagtgcggccttggaggactgtgcactgtgccaggagaccctgtcatcctctgaactggcagccaagacccgcgatggggactttgaagaccccccggagtgggtgccagacgaggcctgtggcttctgcacggcgtgcaaagcacccttcaccgtcatccgccggaagcaccactgccgcagctgtgggaagatcttctgctcgcgctgctcctcgcactcagcaccgctgccccgctacgggcaggtgaagccggtccgagtgtgcacccactgctacatgttccatgtcacgcccttctacagcgacaaggccggcctgtgacgtggtgccaggggcagccccaacccacccgggccaggaacccccaggaaggtggggccacgctgcaggcaggtctcactgcgtctcatgaggccgctgccgctgctgcaggggcacccagacctccagagcatccagagcctctgtcctgcccacgctagcctccctgcagggaccccgggccggctgcaggggccaacaagaggtcagctttgcccagcaggggacccggaggagcctggtggctgcctcagggcagggtgcctggcggagaaggcctgggccctcccactggtccctcggagatctgctggggctatgggaatcggggcgggtgatggaggtggacaagagtggggccactctgcgcctctgctgttgcggtgaatctggaagccggagcaagggccactccacaggctctttggcacagcagggctccctatgtgcctcccaaacgtcaaatgcaggctacccattctccccatcagctgcccacctcgttccccagccctcacccctcacccctcaccatccttcctcaggacttggctaaacaacatgcatctcatttcttcttggagtggggagatgcgggaagctgacccagtggtcctctaggcaggcagggtgctcctggtgtctgcccaccactgtccccttgctgatggcatgggggtccgaccaggcactgacaccgcaggcagaggttgctcggggccttgggtcgggtttaccaatcagccaggacgcccggggccaccagctcagctaccacttccccttccctctgcaccctctggaaccctggcccaattcctcagaccccagagtggcctgggacccaagctgccgcagctgagtggccccagcggacacctcctcaggcttaaatctcaggcttcacattgcaatgacgattgcagttttatttttggagatgacacacctactgcttcttttctaggataaatctaattactgtttactggtggagtacatatgcatagaaacggcttctgtcggggggagagtatataatggaggaaatattatgtattgagattatatttattttctaaatgctgtaatttgaagccatttccataaatctatttaaggattgcagacgctctcctttcttccatgaacgcggatcttttttctctgtctggaaagcgatggtgttggtgctaacatgcattgtcctctaagaagctggaggctcctggactcttgggacgactgaagggcgggacttggctcccaccagccctcaggagcagtggccaccccctgcttcctgcaagctccttcccaccttccagggctctgcccctgtgatgcccatccccccctgcccatctacctgcccagctcctcttctcacaggcatcttcagctcagccctctggcctgtggggggcagggttagtgctcatagccaccccgacttggggcctgccctgcctggtggccctggtcgtagggctgtgctaatcacgcctggagcggctgccttctggag

SEQ ID NO: 178277 - DNA, 610 bp, Homo sapiens
ttatcaatatctagtggttatcagtaggtagataattgtggcgctccttcaacctctaccctccatccttttcaaggccttctagttccttaagagaactaaatctaggcctggtgcgatggatcagttgagggtcaggagttttagaccagcctggccaacaaagtgaagccctgtctctactaaaaatacaaaaaattagccaggcatggtggcacttgcctgtaatcccagctactcaggaagctgaggcaggagaatcgcttgagcctgagaggcagagattgcagtgagctgagatcgcaccactgcactgcagcctgggcaacagagtgagactctgtctcaaaaaaaaaaaagaactaaataatctaatgatgctgttacagcatattgatcttttatatctattccttccttcctgagaataagatttattgtaaagaggttgaagactaaaaatgacctgttaaagttatctacattttccaagaaattaactacatatttacttttctctgtctcttccatgccaagctgtagatttttttacagtagagttcctaaaaatagttttattctaacaaaccatattgaagtccaaaaggac

SEQ ID NO: 178278 - DNA, 317 bp, Homo sapiens
gagacggagtcttgctctgtcgcccaggctggagtacagtggccaccatgcttggctaatttttgtatttgtattagagacgggatttcgccatgttggccaggctggtcttgaactcctgacctcaggtgatccacccgctttggcatcccaaaatgctgggattataggcatagccaccatgcccggtcgacttctagagtttcaataacagagatgtgattcaagaagggagacatgttttgtagatggcaggagcttcatgaaaagaagccaatgaagggcaggacgtgtagctgtctacctacaggaaacca

SEQ ID NO: 178279 - DNA, 266 bp, Homo sapiens
ttctacattcttaatgtcttaatgatagttttacatcattaactagtatctaaaggtacaacttaattgtagagcaaagctcatcaacaccaacagtgaataatgtactttttttttttttgagacggagtctcactctgtcacccaggctgaagtgccatggcacaatctcagctcactgcaacctccacctcctgagttcaagtggttctcctggtctcagcctcctgagtagctggcactacaggtacaagccaccacgcctg

SEQ ID NO: 178280 - DNA, 358 bp, Homo sapiens
cagattagtagatctttaagagtagtaataaattccctagtccaaggtcaactcacaaagaatgtactcattttgtaggcttgcttgaatagatttaggtgtaagattgttctcagccgggcacggtggctcacacctgtcatcctggcactttgtgaggctgagacgggtggataacctgagctcagcagtttgagaccagcctggccaacacggtgaaaccccgtgtccactacaatacaaaaattagccaggtgtggtggcacatgcctgtaatcccagttaattgggaggctgaggcaggagaatcacttcaagccgggaggcagaagttgcagtgagccgagaatgcgccact

SEQ ID NO: 178281 - DNA, 339 bp, Homo sapiens
tgtcacaaattcagacccattttgcctgagcttttttgcatttgtgaagaagtgatcagacttgacagtagagttgttgggagagtttgaaagtatgatatgggtatggggtgaaattgatttccagcttaattaaatctattgtgaacttgttagtgaagcaaatctacatgttaattgttgtaaaggagttcccctcaactcacttccatggggctttgtgttattctcaccgccccctcccctgcctaccattccagttgcttacccactcatcctcagcatggcaggctcggccattcctcaacaatgacgttatttgtccttttaaaatattcc

SEQ ID NO: 178282 - DNA, 190 bp, Homo sapiens
ttttcaaaaccccaaaatgagcaagtttaagcccagagctcagtctgtgaccagggagaaccttccggactttctttttcatcttccctccacttggggctccatgcctttccttgacccttgcttgactaagggtaaatggttttaccctggtcactgaacataaaatacttaaaaattctcgctgggc

SEQ ID NO: 178283 - DNA, 172 bp, Homo sapiens
ggaaaatgattgggcacccagcccacagcagatgcgctgaggaatccagccagggggagctgggatgcagtgggagaggggacacgcagggcctggctgagaagcctcgcgaggtaaccacaggcggaaatctgaaaaatgaagacgttcccaccagttccagaaaacaggg

SEQ ID NO: 178284 - DNA, 582 bp, Homo sapiens
tagcatgtgatgctgaggcactgtaagtcgtgaggatcacccgctttaggagccattcttccaaaatcttaagtgagtgaaaaagaagcagagatagctttttgtatttgcgcatggaggcagagttcatctgttgcctgagctaacagtatactattagtgaaactctggccccagggcaggaccaactaactaggtagggcagtgatgaaaaagggagagtcttctcagtggagtctggtctgggtagagatgtcaaaggcaaaccatcacctccttgacttgttggctctaggtgatgatgctaacctgacctggagggatagcccttctatggggtgggcaggggcagccagaggtgttctgaaaaccagagaagtctcctcactggaaaacatttattcctgggatctgtcagttgatggcagaaatgttcattgttaaagagccatttctttggcttattaattggtcctctgttagccagtcaacaatactgtacccagcacagatatccttgagaaatgaaggagaaataaagtctttcctagataagcaaaaactgatggaatttatcatcac

SEQ ID NO: 178285 - DNA, 431 bp, Homo sapiens
agcatattgattacctcaaaaagaaaccccattcttttaggcattacccaagccccataataacccctccacttctgccctaagaaactacttatttctgtctctccatggattagcctattctggatgtctcataaaatgcaatcatgtaatctgtagtcttttgtgacttgaagcttcttcgtatagtctgggtataagagttttaaaaatctgatagacagtttgcaaatatgttctctcaagtctgtgggttttgatttccttctcttagcaacatcttttgaagagcaggattttgacgaagtccaatttatcaactttttcttttatgggtcattcttctagtgttatagctaaaaaaaacctctgcctaatctatgatcacaaagatttccccctatgtctatgtcttcctttaaaggtatttt

SEQ ID NO: 178286 - DNA, 215 bp, Homo sapiens
tgacctcatgatctgcctgcctcagcctgccaaagtgctgggattacaggtgtgagccactgcacctggccagaggtaaaattcttaagtttaacaggatctttctggttttctagcctcatctctgtcctcttagcgccttagcttcactggccctttttcagatccttcacatgccaagctcattcttagcacagggctttgtatatgctctt

SEQ ID NO: 178287 - DNA, 704 bp, Homo sapiens
atctcaggttgggagcaggctggttccctgttcagatcccagctctgccatctgccggctgggtggctgtgggcaggttactttgccccttggtgcctcactgtcttcccctctgaaggggatggccggggcataaccgcatagagttgtaagattgacacgagttgatgggtgtgaaactctttagcgcagcattggccattaggaacacctgttagccattgttgttgtgattatggtggtggtgatggctgtggtaattgtctgggagatgtttatgagtgctgttatattattcccagaattgattgaagtcacacttttcaaagaaaacagacacatttgtcccttcttggatccccacttgttttaaatcaatgcaacttaacaagacacatataatctgtaagcaggggcttgcattgtttccaaaacctttactaaagctctcactcacccttccagtttgcaaactattgttagagaacggaggttctcaaacaatgcaagtacccaggccccacctcctagacatctgacataattggtctgagatgcagtccaggcggttggagttttaaaagctcctaggtgattctaaggtgcagccagggctgagacccactggggtcagggggcatagcagaaagaacacaggctgtgcagtaagaaaaaccccagatcaaatcccagatctgccagtt

SEQ ID NO: 178288 - DNA, 582 bp, Homo sapiens
tactgtagttggtggtttcatcatagccccatgcacccaagtggaaacgggtgcttcttcctgctcccttgcccctacatcaatctaacaatctcattggtttttattacttaatcttttctaggatctggccctttccctctctccacctcactcctgcactgcactgacccagcctggcccacctctggccattcctccatagactgaggtctctcatggggaactgaggtcaccctttgctgcctcacgctgcctctgggatcagaggctcttggatgtgatttctaaggtcatctcctcttctctcctctcctgcctccttcaccagcaccaagcttcctacagctcctggaatggtttcctccacccacaaggaaagtgagtgacctctacacaatcctcacctcttgccaggctaattcttttcttttttgagacatctgcagatgccacctcctgtgggaagtcctccctgattacctctctctcctcccacccttgtttagcaataccatagttctttctcaatgaagcaattagtccttgaggcaactgacaactccacacccccagttccct

SEQ ID NO: 178289 - DNA, 187 bp, Homo sapiens
catgcttaagaaagtaaaatggaaagtggggggagggggaggggtcattctgatgatatagtttgaggacctggatgtagccacacctgtagctgtcaactctgtgccatagtactgcttttttttttttttccttcatatttaaatactttctagaggcaaggtctttttatgttgcttgggctgg

SEQ ID NO: 178290 - DNA, 555 bp, Homo sapiens
aaatccacagcaatgcatccgtacctaaaatccatcccaggcaacaaattgatttgaaaagctgtggtgtttagaatcataaaaatgatgaaggaagtgaaaaagtcagataagcaacattctaaaagttaagacacatgtgagtaaattagatcagctttttaactggggtaaggaattgagggagaaagaaagggctgccctgtcctgcctgctgacacacagagagccctcagcatgaaagaagtgaagaatattgtgaagtaggcatcagagaagtcaggagcacagactccagaagtgttcagtgggcaccaaccctacctctgccactttctagctgtgtgaccttggctatgttgtagtctctctaagtctcagtctcctagacagtaaaatgaaggtaatattggtactagtgacttcatcttccaccactcacccactcctgaacatgtcaagcacccccggcctcagggctgttgcttttttgttccatcagtgtggaatatccatcatccagagaaattcaaggtctactccctcttatacatt

SEQ ID NO: 178291 - DNA, 371 bp, Homo sapiens
accagccaggaaataaaaattttccaggtctgaatcctgggtcctgctgtcttggttctgtgagctccctgccctcaatctcctttcatgtacatggagctccctgccttcctaaggctgccagaaggctggaggcgagacccaccccagagtaacaagtccagagtgatgtttaacaactgtggattctctgtctccctttctcccaaaggagaaacagattgttttctttttaaatgagaaaggtaagacaggaccccctaccatcaaaaagcctacaacccatctgcaaagccaataggcgaacaacttaataataaaaagcaaacagagaaagacattataatgaatgtacaatgtactagggagac

SEQ ID NO: 178292 - DNA, 147 bp, Homo sapiens
aacccagcgtcagggacccatctcaggcttcctcttattcaacattccacacctctaagggagcgtagtccccttggggagcacagcctgcccctctcagctcagtgatggccatgaggcatgtgtgcagaggtgtcggtgcagtga

SEQ ID NO: 178293 - DNA, 339 bp, Homo sapiens
tgccaatcactcttctatgtgctggggaatcagagatgaacaagaaaatatgactccacttcccatttagcctacatttatcacccctgtattggaaggcatctattgtctggcattgtaatcagctgacacacagaattaactacgtgagggaacatcttctcttctctcacctacaaggagaggagacattctttacagcatccactctgcccctcacaacccagacaaaccaggttggtggcccagcaaagggaaacacttgtgacaactgtgaattttataaactcaaggctagagagggaggtgttaggtgagaaaaagcaagataaaagagga

SEQ ID NO: 178294 - DNA, 467 bp, Homo sapiens
caaaggtcccacctcttgacacatatgcttagagcttccacatatgtactttggggagacaaagacagccacagcacctggttagcatccccctgactctctcctgaggcaggcacctgcttagaacctggggctcgccccactctcctgacctcctctcctgggggccaggaagtgccccacgggggccgaccctgtccacctccgtggctgtgctccagctgacttgctcgggccctgtcctgtgaatggaggaaggatgttgggctcagccttcgcacctgccccggtagattccatgataagggacctgagcggcctggcccggcgccacactccgaccctgttcctgactgcacctcccgcagccactcccagcctcggtttctctatcggtagataagcctctagcacacctcagcacctgaggctgttgggagggaggagcgagacaatgtgtgcggccg

SEQ ID NO: 178295 - DNA, 483 bp, Homo sapiens
taagacacctgccagttggtgagtcatcttattgctatggcttcagaggactgctgtacagctggagtatttaggcttgaaattgtttgattaggtatgataagcacattcctctgatttacaggttgccatatataggtaacttatattgaactgtgactagttttgaggtagtggaaggaaggtaatatttgctgttgctctttaaaagttgtctcacttatttccttggtcctggcgtactacccttaagggatggacttacttttttcctgctaaaagacataagattggttgacagaagtcaaagggtggaacaccttgccattacttctgctcaatttgtcacttttaaaaatagtttaaaagctggaagcttgtcaataggaaaagtaaactcatttttaaaaatttattttcacaaggcaaataatgccttaaagtggcttcttttttaaaatttaatttaattaattctattct

SEQ ID NO: 178296 - DNA, 730 bp, Homo sapiens
catctcaggctgtgatgaggactatcaaggaaagaaagaaacaggaccatggggtagagaatgactggagataggagatcccttctgacatgttgatctgcaataaggtggcacagaaagaataaagcctggtcagctatggaaagaactagggagacttactccaggctgaggaaacagcaagtgcaaaggccctcaggcaggaaaaaaatgtgcttgtgccaggaacagtaaagctggcaaagtgggtgaaacattgtaaaccatgagaggagtgaaacaggatgagatcagagaaacaggagggaatcccactgctaggttctttagagctagagcaagcaacagttcaaaatgtatcgaacgtgcaataagattctactgaagaaagaaattgatatggcgaaatttgagagtctcagagcaatgactctagctgctgtgtggaagagggaccctcaagctgtgcatctcaaatggacatgagtcactggggatcttgttaggtgcaggttctgctccatgtctgaattggggcctgagcagcaccaggtgatgctgattctgcagttccatggacaacactctgagtagtgaagatcaaggactcagagtgaaagcaggagaccagttaggaaactttttcatgagtccagctgagtaatgatggtggtttggtctaggatgacgctggtagacatggagagaaggggatgaattcttgatttgt

SEQ ID NO: 178297 - DNA, 299 bp, Homo sapiens
gaacaatcttaaatgagtgttttctcccaaattctttttgcatatcctcagattggtgtccctgcaaattcatggtctcaactccacccagtaatctgatgttcacatagttaagtctgtctcccattgctcactgtgtctaactgagaagaggaggaggattccattttctctcagggtttcccttcctcatctgcacagacacctatcttttctctcttatcctcgtgccacaatggaagtggcgctcccatgtcccatcatctaaggctgattccttaacttgagctcttgagtca

SEQ ID NO: 178298 - DNA, 309 bp, Homo sapiens
gcaagagaattgcttgaacccgggaggcggaggttgcagtgagctgagatcacgccattgcactccaacagagcgagacttcatctcaaaaaaaaagagcaaaagatagacataattagaaagtaaggatgtttaaaagaacatttaattttccaaaagatatttttatagcaagagaaatggcgagataataaaacatttaaataagttgagatttgttatataaaatttattacatttctctggattttcatttagctttaggccgtaagtgtgtgtctatttgtttgtgttttatgtgttttgtcc

SEQ ID NO: 178299 - DNA, 709 bp, Homo sapiens
aaactttttcccctaagggaactacaaacagaggtttccctcaagcctcttctaacagcagccagttcatcaagcccacagaccagaccctgaagagccccatggaatcaataaccactttgcttttgaaagaaaggggaagagggcataaaccagagacacagacacactaacctgagttcatcccacagtggaagataggaaatattggagatgaactggagtttggtagggttgcagcagaatcctcagaaacaaaacacgatgcccaaggaagttctaaaccaacaataaatgtcatttctccactcccacacatatatacacttgttgcataaaacagctgtatacctttaagaacagcttaaaaatcactggatcccacaaagaacacaactatataagatgactactaattaaaagattcaaatcagatgattttgttataatgttctgcagacacaggcaaaggaggtatgtagaatgtctgtaaggaatccaggattctcagctagctgataacgacttcatgctgctgctttatttcatttgacaccttccattctcgtatcagctactgcgtgcaaaccaaacctcccaagaatggtgaccctgtcctcttcagttcacctaacaccctggccaagaagtaaattaaaatgcaatgtatttcagctcctataaatgttacctacttactctatttaac

SEQ ID NO: 178300 - DNA, 169 bp, Homo sapiens
gcaagctgtttaacgatgcccccagcctagaaaggcccaggcttgggtgttcatgctccgctgttgccttcttgaaattcataatcatctttgaacaaggggtcccacatttgcatttttgctctgggtcctgtaaattacgtagccaggcctgcatttgtcctgggag

SEQ ID NO: 178301 - DNA, 461 bp, Homo sapiens
ctttaagtgaaaaccccacatctgagtttccaaattaccaagctatccacagcaacattcctccaacactaccattctgcctagtgagctctccattcgtgtatctgtctcctaatctcccacatttctcctctcaccctctaagagaagcaactttcatctccacaagtttaacaatctctcctataggaagcataacaccaccttaattgcattgtgctgactctcttctactagacagcatgctcctcaaagatgggtacattcttttttttgagacggagtttcgctctttttgcccaggctggagtgcaatggcatgatctcggctctcggcaacctccgcctcccaggttcaagcgattctcctgcctcagccttccaatacaccagtattaacttgccaagcagcccacagttaggtctcagggttttagtgagcctgttcctcttgactgaaa

SEQ ID NO: 178302 - DNA, 706 bp, Homo sapiens
ggcctgcatcccctttctgcccaaatgggtttttttgctaccatatcaaagaacctgacatatggcggcataggaagcagaagctaagcctctctccagctgctgctgtgtaaaatccatgcgtggccaaagagaagtcaggggattatgacataaatggtgctgggaagaaccctctgcctaaaactgtctccttctcctggtgctacaaccggaatccaccatgagagagtactttcttcggttctttcctcctgtccttgacagagtaacacgttaatctggttcttggtggtgttagggactgattctctcaggaaaggcacacatggtatgatggctcttcccagagtctatgtgatgctacataacttcagtatctagctgagacatgcttcctacatgactgttaaagcacagccaatccaggccaagaagactagtaacaggcacgttctgaaagatggaagcagcactgatagatcaaaaccaccactgcatatgtattacactgttttgttcaccattttcctaagtgtgttatttagaatattggttattacaaggaaaaataaagtggggaggctggttaggccttgtgagttgggaaacttaggttataaaaactaaataaagtttttctactgtgagactagaaaaaaaagaaggaaaaaaagggggggtatgggggggggaaaaaaggttt

SEQ ID NO: 178303 - DNA, 718 bp, Homo sapiens
ggaagaaccctctgcctaaaactgtctccttctcctggtgctacaaccggaatccaccatgagagagtactttcttcggttctttcctcctgtccttgacagagtaacacgttaatctggttcttggtggtgttagggactgattctctcaggaaaggcacacatggtatgatggctcttcccagagtctatgtgatgctacataacttcagtatctagctgagacatgcttcctacatgactgttaaagcacagccaatccaggccaagaagactagtaacaggcacgttctgaaagatggaagcagcactgatagatcaaaaccaccactgcatatgtattacactgttttgttcaccattttcctaagtgtgttatttagaatattggttattacaaggaaaaataaagtggggaggctggttaggccttgtgagttgggaaacttaggttataaaaactaaataaagtttttctactgtgagactagatgtgcaggagtgaaaggtgtagagggtcttgttttccaaattcgatctcagaatctttttgccagaagtgtctcatgggacttatctatagtggaacacatttgaagacctactgctctattaagaaggcagccggacaacatgttctaatacttcgtatgctttgtgacctagttaaaatctaaacttaagtcgccatggccagtggcctttagattaagctagc

SEQ ID NO: 178304 - DNA, 216 bp, Homo sapiens
tgaaatatgccaaacatagacaaatcccacatgttctcatttatatgtgagatataaaacaattgaactcccagaagcagagagtacagtggtgggtacagaggctgggggtaggtggaatgggaaaatgatagtcaaagggtacaaagtctcagtcagataaaaaggataagtttgatttttttggacatctactgcacagtgtggtgaatatag

SEQ ID NO: 178305 - DNA, 376 bp, Homo sapiens
tcactctagacttggtattatcttagatatatttattgtctccatactcttgtccagtcagtctccaagctctattacttcaagttactctcattgttgaccttcatttccattcaacacaggacctggtccaagcctttctttcagtgtctcacacctagtttactggtcagggggcctaatagtctctgaatgtcaaatttaccactctgtccaacatcataacccagaccaactccatcaagatgcttgtatcatcatagtgcttccccattctgaaactttgaatagatccctatttcctaccgtgtcaaattttaactctccaccctagctttcatagctgacatgtccttgccccagtcttaacgatcaa

SEQ ID NO: 178306 - DNA, 540 bp, Homo sapiens
gctggattttgttatggcacactgttaaatcacttggagtcagctgtatccttttgatgcttgctcttaagcctaatgtgtcaggtccagaataacttttagtccagggctaatgaagccccactgctacagaaacattcttctgagaattctggcagatgccccagctacaactcttcactggtagaaacacggactattctcagccttgtttgaactctaggaattgttctgcctactctttttcaggattctttgtctgacctcagatagtttcttgtcacgcatacacagatcagtactcaaaggctggacagaacccgctgtgtgtttccagagccatgtccacttccctgccgtagctccctctttcccaacacaccttttcttaaattccagccaccttagctttgatctgttcaacacacaaagaccactgggttttatttggattttcctctctgcactgcagcctgccagctgcttttaagtggtaagctcaggcaataataaaacacacattgcttctcaggaatcaca

SEQ ID NO: 178307 - DNA, 617 bp, Homo sapiens
tagtagagactgggtttcactatgttggccaggctggttttgaacccctgagcttgtgatctgcctgcctcggcctcccaaagtgcttggattaggagcgtgagccaccgcgcccggccgtatgacctcatttatatgtggaatccaaaatagtcaaacacacagaagcagaaagcagaatagtggttgcaagaggctgagaggtgggaggaaatgaaaaggtgttggtcaaagtgtgcaaagtttctcatgaagagaaactttttttttttaatttcatggggaaattaaaaaagcaaaaagcaaaaaaacaaaaacaaaaaggaaagtgtacaaagtttcagtcctgcaagataaacaagttctggaggcctaccgtacaacatagggcacatgattaacaaatacggcgttgtacatttaaaactttgctgaaagggtaggtcttatataagatcttatgttatcacaaaaggacaaacaaaaccaaagcggagtgaagaaatgaactggaagggaatttttggaggcaattgataagtttatggcattagttgtgataatagtttcaaggatgtatacttatttccaaacacgtgaagttgtatacattaaat

SEQ ID NO: 178308 - DNA, 335 bp, Homo sapiens
tggctccctgtagcctcaacctcctggcctcaaggatcctcctgcctcagcctcctgagtagctgggaccacaggtgaacaccaccatggctagcatttttaaaaatttgtttgtagaaatggggtctcaccatgttgcccaggctagtctcagagcaatcctcccacctctgcctccctaagtattgggattacagtcatgagccactgcgccttttctgataaaagggatggccatgtctggcactgcccacttccccatcttcaggccacagcggcacagacatcgtgcctggtgctgtggcagccatcttggaaccacgaggtaagtgtca

SEQ ID NO: 178309 - DNA, 210 bp, Homo sapiens
ttgtggatgccaagaaaaaagacccttcaataatggacatcactgaaatccacaagctgatcaggagacctgtactgccctggtgccaggagccattaaaagatggaatgtgctgcccttaaagagaaacggataaaggtaactaacagtgaagcctatgcaccaagtggagcataatcatcatgaaggcactttgggcaaaaaatgtgg

SEQ ID NO: 178310 - DNA, 371 bp, Homo sapiens
tctctctctgagtttgtgtgaatgtctgtgttgattgcatgcccatgcaaagatatttgctctctgcatctgagcagcaggaagccattagaagaggaaacccatattggatgagaatttcattccacacccaggaaagcagggttaggatgtgggggcaccagctcaggccctggtagctgtgccagggacctaggaccctggcattgtgaggtcccctcctctcagagccagaggatggggagaaaggacgagatgcttggctgctgaaaccatggactggtggtgaccgccattcccaccaccctaatcatgcacttgtgatattaataaaaataatttatgtcatgtgactgctttttaactagctg

SEQ ID NO: 178311 - DNA, 302 bp, Homo sapiens
ggacctgtaatcccagctacttgggaggctgaagcaggagaatcacttgagcccagaaggttgaggctgcagtgagccatgatcgtgcccctgcatgccagcctgagcaacagaatatgaccctgtctcaagtaaacaaacagataaacaaaaacccaaagtgattaacaaaataaggatgagaggagggaaagcctctttttagagaagactgccaactaatgaggagaaaaggaaagatagaaaaattaccaattcacaaccaccaatgtaatactgatttaggcaggagtcgttaataa

SEQ ID NO: 178312 - DNA, 540 bp, Homo sapiens
aggaatagaaggaaattacctcaacataataaaggtcacatatgaaaaccacctgtttcatcaatgaaacactcattgatagaagactgaatacttttcctctaagataaggaacaagacaagaatggctacttttgccacttgtactagaagtcctagccagggcaattagtcaagaaaaataaaaggcatccatagaggaaagaaagaagtaaaattatccctcattcacagacgacagaaccttatatgtacaactctaaagatgaccaaaaaacttttagaataaaacaaattcagcaaaactgcatgttattagaaataagaatcagtaacgtttctatacactaacaatgcacatcccataagggaaattaagaaaacaattccacttacaataccataaaaaagaataaaatgttcaggattaaatttaaccaaggaagcaaaattcttaaaacatttaagtatacacttaaaacgtaagtatacactggttggacgcagaggctcacacctgtaatcccagcactttgggag

SEQ ID NO: 178313 - DNA, 442 bp, Homo sapiens
cacactgggggctctggctgcacagactgattggatgattgatgactaattgctaacggctaattctaaccaggtatgaggagctgaacaggggctgccgtcttctccgccttcctccacctgcaggagtctctgtctgtcttgggcatggatcctatgctgcccgagtgtgtaaattaaggaataatagagctgcagaagcataagccctcaatgatggggaatatgtttgtctgctaagaagcaatttcagcgaaaattaactccatttcaacagaaagagtgaggcttggcataagctggccaatcccagaggacaataaaattactttgtcaaagctctgcttgcttaaattaaccaagcgagcactccaggatcctggctagatacagcaagtaactaggttttaatgaacaaaaatagcttcttggataaatgaga

SEQ ID NO: 178314 - DNA, 166 bp, Homo sapiens
acggagacatcaccacatggacacaccgtcacactaccacagggacacacagacacacaagagacatcaccacattgtcacatggacacaccatcacacacatgaacacacagacacactgccacatggacactgccacacacagacacaccgccacactgtcaca

SEQ ID NO: 178315 - DNA, 414 bp, Homo sapiens
tcctcaacaaaacactacgtaactgaatccaacagtatattaaaagataatccaccatgatgaagtgggtttcataccaggaacacagagatggtttaacataggcaagtcaataaacgtgatatactacataaacagaatttaaaacaaaaatcacatgatcatctcaatagatgcataaaaaggatttgacaaaatccagcatcctttatgattaaaaccctcagcaaaattggcatagaagggacataccttaataaaagccatctatgacaaacccacagccaacattatattgaatgaggaaaagacaaaagcattccacctgagaactggaacaagacatggatgcccacttttaccacttctcttcaacatagtactggaagtcctagccagagcaatcagacaaga

SEQ ID NO: 178316 - DNA, 586 bp, Homo sapiens
tggagacaggtctcactcctgtcgcccaggctggagcgcagtggcacactcccaggctcaagtgattctcccatctcagcctcctcataagtagctgagactacagacgtgcaccaccatgtccggctacctttttgtatttttggtagagataggtttgccatgttgcccaggctgaccagctgggcaggctcaactaatccgcccgccttagcctcctaaagtgctaggatttcaagtgtgagatgccacacccagccaagacacttttaattaagatataaaacctaatcaaaagtaaagtgcttctttagatccacactgacaattagcatcattagctgaatgtcctcttcagcaagaatgcagacgggccgggcacggtggctcatgcctgtaatcccagcactttgggaagccaaggcgggtggatcacgaggtcaggagttgaagaccagcctggccaatatggtgaaaccctgtgtctaataaaaatacaaagattagctgggtgtggtggtgcacgcctgaaatcccagctactcgggaggctgaggcaggagaattgcttgaactgggacctggg

SEQ ID NO: 178317 - DNA, 563 bp, Homo sapiens
actcttagttcattaggtaaaacattttaaaatactgatacctaattttaaaggaagtatattaaaattgaaatgcttatacactgctgatgacattacaaattgcctcaatctttttgaaaattaatgcaaaaaccagaatgatggtaatatcctctgatctagtaagttcatgtctagaaattttacttaagcaaaaaatttaaagaaatgtgcgctgtttcaaccttgcctagcacttcagagtcagtattacagtcaatttaaatgagctagagcctggtttaaggcagtgtaaagatctatatttgagacatccaaattgccatcctgtactccaaaggtgttatctgtatgacagaacaataaatgaaatctacaaaataaaactttatcaaagctaaggataagtcacaaacaagccaaattctacattttagaatctcatcactggaacacaaaggctccagaacaagaggccaacattatgaccagactttcagggtgaagaaacatataaaacacaaaagaaacgaagatattctgagactcaagaacagagt

SEQ ID NO: 178318 - DNA, 556 bp, Homo sapiens
ccagttgtgtcaatgtggatttgagtgctacatgaaagtacatttttagtacttgcttctttttattgggaaactttttgggtatgtgtggaacaacttgagcatgagaagctactttttgaactattcattttataagatctatagatcaagtctttctgatgaaaatgtaggatctaaattgagatgtactctgtttaaaatatacattggattccaaagacttgataatgcagaaaagaatgcacaatatctcaataatttttaaaaattgatttcatattaacatatttggattgagttaagtaaaatctattaattttacctgttactgtgtacttttttaatgttgctactagaaaatttaaaattacacatgcttgaattgtatttctgttgaacagagtttaataatttttggcatcatagaccttttaatagagtaaaatcttagctgtatagaacttctgggaacttgggcattctaaatagtgaaatcatgctaggtagcaaaattttctggataggtatagtttatctctctagatgtgaaaat

SEQ ID NO: 178319 - DNA, 237 bp, Homo sapiens
aaaccctgtaagtctcaagcagaggccttttttaaaatcaaggtccataggcttaggcaacagttcagtaacctttgggaaaaccacagggtgtgttttacctattgttatgcaaacattgttcttccagagctgacctttactcacagggatttaacagccatagtaagtcagggtttgaattccctgtgtctgagttgcggatcaagtttacaataaccatgttcacaattgttt

SEQ ID NO: 178320 - DNA, 306 bp, Homo sapiens
ctagaggacccactaacctaatcgccaaacagggcacgttaccatattattctttctctccaagttcttcgcgcaagaactctgagttccttacaggcagcagtgtcttgactctagatcttgggggatattcttaatctctgcttgctgtgaacacatgaggcactccttgtcagaggctacaatgtccccaggatgccgggctaggatacaaatgcttgtgcctgggggagtgcagggctctgggaatcagcacgtggaggttttgtgctctaagtgatgaagattctctgcgattagggcagt

SEQ ID NO: 178321 - DNA, 370 bp, Homo sapiens
cgggaacaaaaggcccaagtttggagtaatggggcacggggagattccaacctctccaggctgtgccacttactagctgtgtggctacagttatgtggctgcgtgagcctcaagttcctcatgtataaaacggaggtaaaaacagtcactgcctctggggttgctggtgagcattacatgagatcagtctcataaagcactcagcacagttgcggcgtgcagtaagtgtcaagcagtggcagcctctgttaggagctgggactttctccaggcactggggagccataggcggatcctgggcagggaggtggtgtgattggatttatgctttagaatggcatggagaaggggtagagtccagaaggaggga

SEQ ID NO: 178322 - DNA, 513 bp, Homo sapiens
ctgtgaatgctcacacagcgcctgggaaggcggataactcagagatgcttttctgggttacttttgttctgaggtaagagagggcagcaagtggaccccgatgggctgcagaagccggttcgcagcagggactgattacataagtgttggcagtgaccccggtaagtctggtgttccttataaaccctgctttccacagttgagcagaagacaccacagatgagagggagcccctccctcactgagtggagtcttaatgggacgtttgtgactctcccttggacacttgtactctttctacaaaagttaatattccctgagacattatttacatccggaatggggctgtgtgactggaggtcctcacctgcccatgttttttgcatgttttgtagcaaactgataatgaccaatgtcagaattatctggctttatattttgaccttgttcattagagtagtgttaatgaaggagaaagcaagttaggggctggtaccttgctttcccttttta

SEQ ID NO: 178323 - DNA, 246 bp, Homo sapiens
agaaatccatgctaatgtgcaccattgtcactctagggggtaggaaacatgctgattgagtttattaaacgtgtgaaatgcaagccgggtgcaacccagcactttgggaggtggaggcgggaggattgcttgaggccaggagttggagaccagtctgggcaacatagtgagaccccctgtctctacaaaaaaatacaaaaaattatctgggcttggtggtgtgcgcctgtagtcccatctgccagg

SEQ ID NO: 178324 - DNA, 583 bp, Homo sapiens
caaaacaaatttatttgccataggaagaagaactagtctgaagccacagcggtgtgccccagatgaacataccagaaagcactaagaatgtactctcagacacaagccaaaaaaacatggtccaaactgcccagctgagaacaactgccatatattacctaattggttaaataagaccagaatcaaatgatccaagaagttaaccaactagcaaacaaaaggtgctaaaataaaaggggcttgggtcatataattctatgggctcattactgaatttctgtgcaattaattgttagcatagttatttgaactatgactatcaagaacaacagtatgtccagaaataagaactactgtcaagaatggtggagtctgagattttaccctacttgcaaactaacttgtaagcctaacacagttttaaggatgctggcagataacacgagacccctgggccacagatacagcagtaatcagagtatcagcattttcttttacctgcttcctgatcctcaatttctacatgatgatacagagggaaaggatacataatctgaatcctttatactggacagtaagcaaa

SEQ ID NO: 178325 - DNA, 389 bp, Homo sapiens
cgctcgtaccgctgatcgcttagcccgttggtattcaaaccaatgctatagcctgtagctacagagtaactgagagtttctagcaactaaagaggaaaaaaatgtatatacatagaatccaaatttcttttttccttttttctttctttttttttttttctgtgacatggtcttgctctgtcgcctaggctgaagtgcaatggtgcaatcccagctcactgcaacctctgcctccccggttcaagcaattctcctgcctcagcctcccaagtagctgggattacaagcatgtaccaacacacctggctaattttttttatattttagtagaaatggggtttcaccatgttggccaggctggtctcaaactcctgacctcaagtgatctg

SEQ ID NO: 178326 - DNA, 408 bp, Homo sapiens
gaaaaacaattttaaaaattgacaaaactaaggttggttttttaaaatgataaacaaaattaacaaacattaactatactatgaagaaaatgcttaaataaatatacttagaaataaaagagtagactttaaaactaatgtacataaataaaaagtattatagaaactactgtgaatgattatacaccaacaaattgagaaacctaggagacatagattcattccttgaaacttaatctacaatgatggaatcatgaagaaatagaaaatttgaacaaacacacaatcagtaaaaatatttaattggaaacaatacatatatgattaatttacatttattacagtgtcctaacaatgtaaagtccagaatcagatggtatcactggtaaattctaccaaatatttaag

SEQ ID NO: 178327 - DNA, 309 bp, Homo sapiens
gttaagctgcctctgcctgttgcctcccattacattcacaaacactccctgagcatcagttattttccagtcagtgtgctagggctagaggatgtgagaaataatcctcgccatggaggagttctcgatgttgggagaaatagaaaattaaatcacaaacctcattacaacatggtaaaggcaatcatatacatacggaaaaggtgctttcatccctcttctgcaggtgtatacagtttatattgccaaacagtgtgtgtgttccctgatggcacaaactgtatcttatgtttactttttttcttccct

SEQ ID NO: 178328 - DNA, 385 bp, Homo sapiens
aggcggaatgtgatgtactgatgtgcatggttggtatcgagttctctaggtggatggatggacagacaggtggatgatggacagatgggtggatggatggatgagatacactacagatgatatgagggatgctggctgagttaaggcctaggaagtgcgttgccagcaggctcttggggacactagtgtgtgtgggcaagtgcaggtaagtgtctgcaaggccctgcctgtgcagtcctgtgtgccggaggaggggtgggaacagcagctatgctgtgtcagagtggactccagcaggtgtgtgccgccagctctggagttggggccactggactcctggctccaccacatttgccgcctgggctgcatcacttggtcttgctca

SEQ ID NO: 178329 - DNA, 590 bp, Homo sapiens
ctgtttctccccttttcctgacccgctgaatgggaatgtatctttatttcccctgggtatccagtacagagatctgtatctagtgatttcttaatagatcttgtttgctcactttccttagcatgttccctccgagttaggcagattctggactacttgaatccctgccacttgttactgcctcctaccctgcctgaagagcccctggggcctgagaagctcctctctgccccaccttcctcctcagttggtcttagcaagattctcccagcagaagctgaagatgctgaaggagctctccagggcatgtgcacactcgtctggcttcttatcaccaggaaggccgaaaacacagaggaacatgcagccctgggatagatgacaaacaaagaaatgagacacttacctgggaaaggaatgtggcttgcctaaactaaaccagctccaccgaatgaacccagaccctatccttgaacactcttctgttggaaatatcagattctacatgattcataaaatggaaatgctgggccacagcaacatacacttttttttttttttttttttgagattctgtcgcccaggctgga

SEQ ID NO: 178330 - DNA, 1634 bp, Homo sapiens
cggccgctgggtccgtgaaggggagtgaggcactcctcaccctgtggcagctcctagtcaggaggcctctcccctccacctgcacgtcatgtggctgtggctcccaggaccagcgcctggagcgggtgagtgaacgtccctctcctccgtgggcactgcctccgctgtgagccacccttcaggctacgtgcatttccgcctgttctcagggtttaaccgaaaccgaacattaaccgtagccctaacgcggctgagggatccaggccttgcctctgggccgggtgagagacagacactcgccaaccagtccgcagtggctccccgtgtgtgcgaggctcccgcctgcgtgtgtgcgtgtgcatgtgtgcctgcgcacaggggagggaaagttcttcagctgccgagggcgggagtaggggctggagcagcaccctgcggggaggccccacaggagaatcgatggttctgatgctgtcagcctctgggtgcaaattctgagggcccgggagcgtctggcggccctgagcagcttgctggggaagctccgtggaggaggaagtccggaggcatgtgatgtgaatcagctgacatcatcttgacgggagccctgtgaggcggacacttaactccagtttcacaggagggagccatggatttgctgcgggagctgaaggccatgcctatcacgctgcacctgctccagtccacccgagtcgggatgtctgtcaacacccttcggaagcagagctcggatgaggaggtcattgcactggccaagtctctcatcaagtcctggaagaagctcctggatgcttccgatgccaaagccagggagcgggggaggggcatgcctctgcccacgtcctcgagggatgcctcagaggccccggatcccagccgcaagaggccggagctgcccagggcaccgtcgactccgaggatcaccacatttcctccggtgcctgtcacctgtgatgccgtgcgcaacaagtgccgcgagatgctgaccgctgccctgcagacggaccatgaccacgtggccatcggtgcggactgcgtgcgcctgtcggctcagatcgaggaatgcatcttccgggacgttggaaacacagacatgaagtataagaaccgtgtacggagtcgtatctccaacctgaaggatgccaagaaccctgacctgcggcggaatgtgctgtgtggggccataacaccccagcagatcgctgtgatgacctcagaggagatggccagtgatgagctgaaggagatccgtaaggccatgaccaaggaggccatccgagagcaccagatggcccgcactggcggcacgcagacagacctgttcacctgcggcaagtgcaggaaaaagaactgcacctacacacaggtgcagacccgcagctctgatgagcccatgaccacctttgttgtctgcaacgagtgtggaaaccgctggaagttctgctgacccctcgtgtagatgtgctgcagccttgggccctccccggcccacgtcctccgttgacacagcttctctggagaccctagaaggcggcatgtcctgccctcaacctgcctgcctggattgcacctttctgccctttccccctcattattagatgtttctttttgcc

SEQ ID NO: 178331 - DNA, 312 bp, Homo sapiens
gcaaacagcttctcattttcccgggagtaccttctgccaactttgagaacaccaattcctaattcctgttccagtatccactttggttttatacataggacatcttttcctataagttttccctgaatgttttgtttctattttttttttttaacatttcttacagatgtctataaaactctcagaattcttataaaatactctttgatttgaagaacgtagtcatttccccttaggcttatgatgcctcagtctccctataagagatacgaaccaggttgggcgtggtggctcatgcctatagtcccagca

SEQ ID NO: 178332 - DNA, 584 bp, Homo sapiens
tctgtttatctgtggggggatcatccctttgacggctcttcccaagcccctgttcagtctcaagtcagctctccctactccctccagtgaccaggcccctttcaggtcattagtcagcaaaccaaagaaggcaaattcttcaaactgaagtcagcaaactagaaggaagaaagtgactctgatgctgctaccagaataatcatacatgttttttaaaaaggatttatttttaaaaattgtggttatatatatataacataaaatttaccattttatgttaaccattttaaagtgtacagtttagtggcattcagtacattcacactgctgtgtaaccatcatcacgtccatctccagaattctgtcttctccccaaagagaaactgtacccattaaacagtagctaccctttcctcctcccttcagctcctgggagccaccattctacttttcgtctctatgaatttgactactctaggtaacccatataagtggaatcatacagtctttgttgttgttgttgtttaatgactggcttatttacttagcataatgtcatcagggagcatttatgttgtagcgtt

SEQ ID NO: 178333 - DNA, 435 bp, Homo sapiens
tgtaccattctgattaaggcaaggatgcagatccacccccttcctcttcatcaaaatctacacaggcctctgtacctggggtttcttgatgtgattggacttactatcctgactgttgaaggcagactacatggggccactgtggaagaaaaatgacatcacactccctaatcctcccgctatgccatgagggactgggtagcattatcctttgtgttaaagtgagatactgctcatgggaccattaactatctgagctgttgtcctcaaacccagcagggaacaggaactggactccaaccccaagagcagcagcaggacatgaacagggctctcaagccctttatcacttaacttttctgagtctcagttttttcatatctatgtgtcctatgaccaacctgttctcatccttggctattttatttcccctat

SEQ ID NO: 178334 - DNA, 479 bp, Homo sapiens
gtagagacggggttttgccttcgcagagttgtggaaagtgactgtcactgtgtttaatctcggctccagcagccagcagaaacctcagccagaaacaggggctccctgcgcccctgcacctttccacgcggagcccagcgtgccctcccctggcgaagctcctgaccacagccctccatgcccgcgatggctatactgtgcagggtacccagggcacagggcagccccactcctcatttgcaactgtgagcactgccattggattcctggccaccatcctttgtttagcctgtgctatgtctggtcactgtcttttggactccttactgcctgcttgtgccagtgtccaccaaatataaggcttatccagcagggtggacgtcctgtgccagaggctccatccatggcaatagttccccgagagccacctagacacagaacacctcattcctgttttccaaccgattttgtctcattga

SEQ ID NO: 178335 - DNA, 128 bp, Homo sapiens
taaatgtggggctggtgtgcaataggtactcagtaatgctggggcggtgtgcagtgggtgctcagtaaatgctgggccagtaagcaataggtgcttagtaaacgtggggtcggtgtgcagtgggtgct

SEQ ID NO: 178336 - DNA, 391 bp, Homo sapiens
accaacgccgctgactgcatccaacgccgctgactgcatccaacgccgctgactgcatccaacgccgctgactgcatccaacgccgctggtcaccatgaaccacattgtgcaaaccttctctcgcggtcacagcggccagcgtccccaatacgagatgcgcaaggaggagcaggaagtggctaccctgggggccgcgttggatgcagtcgactgcatccaacgccgccctccgacgcacaccacacgcgcgcgcgcgcgcgccgcccccgccgctcagtgactgcatccaacgccgtaatgctggggcggtgtgcagtgggtgctcagtaaatgctgggccagtaagcaataggtgcttagtaaacgtggggtcggtgtgcagtgggtgct

SEQ ID NO: 178337 - DNA, 398 bp, Homo sapiens
tggcctgaattgatatttagtgatgcataagtggtggatattactgcaatttccttcatacaactgacaggagttgagcaccttctcttcacattgctccaggtttcagatcctcaggtgggacaggccagttctgaggtttctgatagacacctcccagcgttggacagtgccttttgttaagaggggaatgcttttggggaccacagcctgtttacacacaactcaggctctagagctcctttagcctcttccaattgcacacacgaatgtaattcactgagaggaggactggccccagccagacccacctgtcctgtgatcttagaacaatctgcctttcctgtgggtggatacttgctctctggatgatcaaatgatggaagattgcatggggc

SEQ ID NO: 178338 - DNA, 479 bp, Homo sapiens
agaaaaaagaattctgtctcaagatactagggacgctaaaagtttgctgtttataaaggggattttatacaatgcgtacctttgactttgtgccttcttgccccaggagttactccttttaaatagatagctcatctacagatcctgcagataatccttctggtataaccagaatacgtagttatttatacatatatgtcccataattttttcctttcaaggtaattgatgaattatactaaacaaacaattttctggctgacaagtactgtactttagtgaatttgcttgattaaattgtaataatgaaattaaattttatgcttgctgtgtgtctacaaatgcagttcctgttgaaaatgagacaatctgaagtgccttctaatggacatcccacttccttaatgtttcttttgtatgtgtaagggagaaagtctaatgtctgttctttccctcatagattcttagttgagacactc

SEQ ID NO: 178339 - DNA, 314 bp, Homo sapiens
ccagccccaagttggtcttgagctcctggactcaagtgatcgtccaaccagcatctcattttctaaagaaagaagtacttagaccaggtttgggacatgtctctgaaaattctgggctggtgcagtggctcatgcctgtaatcccagcactttgagaggccgaggcaggcggattgctagagtccagaagtgaagaccaggctgggcaacatagcaaaaccccatctgtactaaaactagaaacaattagccgggtatggtgacatgcagctgtagtcccagctactcggaggctgaggtggtaggatcacctg

SEQ ID NO: 178340 - DNA, 98 bp, Homo sapiens
tcctcccttccttctttccttgctttcgccgcgcactccgccgccatggagcagcgccgcgtcaccgacttcttcgcgcgccgccgccccgggccccc

SEQ ID NO: 178341 - DNA, 195 bp, Homo sapiens
attgatttactacactacatgtgtgaataaagaaaatgtgacgctttcaaacacgggtcattctactccacttgaaacaaatacataacaattgatatagatgccaataagattagaggcaaaataagctggatatagctagaataggaaatgatttacactactaagaagagagctaaaccgggtacttatgag

SEQ ID NO: 178342 - DNA, 330 bp, Homo sapiens
ctgttacccaggcgggagtatagtagtgtgatctcagcttaatgcagcctccataccctgggctcaagaggtcctcccacctccacctcctgagtagctgagactacagccatgtggcaccgtgtctggctaatttttgtatttttgttagagatgggttttcaccatgttgcccaggctggtcttgaaatcctgaactcaagtgttctgctcatctaggcctcccacagtgctgggattacaggggtgcgccactgcaccctgctgaactatatttattagtacactttttcatacatgattctgagttagaattggacaaaagagaaa

SEQ ID NO: 178343 - DNA, 409 bp, Homo sapiens
ggctgggatccagtggcaagaacaagatgaacatttcttcatgaccatctccaaatccctatttgcctttaaataattaatgacaaaagtatatctgctgtaagaatactgtttcttagcagagaactattttaaatggtatgattcttactatcttttatttgctctagttttaataacatatttaatagcaacatctctctcatgccctcactctggtgatcacctaacccccaaccccgacagacttcttcagtatggaggcacttaggacatctcgggatgtctttagtggtagtatttgaactacagagtcgttaagacgggcaacttgggagactgatagctgagatttgaatcacattttcttcacttattgggtgtggaattttgggcagattatgtaatc

SEQ ID NO: 178344 - DNA, 203 bp, Homo sapiens
cagatattagggacaagcaggaattatgattctaaattactctataaaccttttggctaacaacatatttcaaagggatttggaaataactctccccaaagtcattatttgtgaatatttattttatagagcactgaactgtttattcaaagtattgcacatccatagacatgttctctttaccacactatcctgctgttagg

SEQ ID NO: 178345 - DNA, 219 bp, Homo sapiens
gccagccgggccggcaggagggcggcgcggcacaaccatgagctttgagggcggccacggcggcagtcggtgtcgcggggcggagagcggggacgccgagcctcccccgcaacctcccccgccgccgccgccgacgccgccgccgggagagccggccccggtccccgcggccccgcgctacctgccgccgctgcccgcgtcccccgagacccccgagcg

SEQ ID NO: 178346 - DNA, 680 bp, Homo sapiens
tatcaggctctggtctttttgttctctaaattccaagacatccatatccagtagttctctctaaactgtctcacttgactttgaggaggagaattaaagaaaaatctaggaaataagatatggtggtaaatttattttctgctcacaaaaaggaaaataatctgatggattaattaagagttcaaattgacagtcttcctcccctgcaagttcaagcattgagtgtacatacagcttaataaaaaatgaattgtagtcatgctgatttgggattgacatacttttttggtcactggctgaatctacatgtaaatttcaggatcctaatttgtcatcctcattgaattattttcaaagttagggtatgttagactaagtatattcctttaaatgtccagttttatatttgcctcatttgattggtcattaaagcaggatagtttgcattaggaattttatcctctgtgtatctgcagctgcaccttttgttctcttcggtcatagcaaattggcctcattaacagcagaaccctattacttaaaagaaaaatatattcgctcacagttctggaggccagagctctgaaatcatggtgtcaagggttcattccttctggaggctctaagggagattccattccatgcctctctcctagcttctggtggttgtcagcgatttt

SEQ ID NO: 178347 - DNA, 310 bp, Homo sapiens
acgttgacacttcagtagaaaccacacttcaaatttcgaattttgattcaaaattctttataataactttatcgtaaaataggctttgtgttagatgattttgccccaccgtatggtaatgaaagtgttctgtgcacatttaaggtaggctgggctaagctataatggctggtagcttaggtgtagtaaatgcattttccgttggtttttttttttttttttttttaaaaggcacagtctcgtttttttgcccaggctgaagtgtaaacgggggccccgggctcaaattcgaaataatggccatggtttt

SEQ ID NO: 178348 - DNA, 713 bp, Homo sapiens
  misc_feature (61)..(61): n is a, c, g, or t
  misc_feature (90)..(90): n is a, c, g, or t
  misc_feature (116)..(116): n is a, c, g, or t
  misc_feature (147)..(147): n is a, c, g, or t
  misc_feature (153)..(153): n is a, c, g, or t
  misc_feature (166)..(166): n is a, c, g, or t
  misc_feature (189)..(189): n is a, c, g, or t
  misc_feature (236)..(236): n is a, c, g, or t
  misc_feature (244)..(244): n is a, c, g, or t
  misc_feature (263)..(263): n is a, c, g, or t
  misc_feature (289)..(289): n is a, c, g, or t
cccagatacatgctcccactgccccgacactcccgactccaggcccaatgactgaaccttnctttccaggctgggaaccactcccctccncatcccctccatccccatatctgggngttgcatctatatctaggtcccagtgggccntggggnactccctcttttnaagtcctcccctctgacctattnccgtttatatcccacccgactgattttagcgcctccaatatatgacntgattgtntcccgctggaaaccagtgntttgtgtctgtgtgtaaacagggccnaggatgacctagaatattgactcctgagttttaaaacttgtacagcagatttttgttgtcctagctgcctttagcacactcccccgaatgaaccatttcgacctagtatcttgtttcctacttctctaactgaagtgtcccaacagtccccttgctgtctcctcccttcaggtccttactgcccctctgtttctaaagggtttaagtacatacacacttaaaacttttcgggtgtcatctttgtttggttttgtaatactcacctttggcctaaactcctatataccggtgtctcctatttcttttctccgaggttcctgtttcgagtgtctgtagtcctcttgttcctccaagttcatgttttacttttcccacttacagcgtcctgtttccatttgaagtgggcaaagtgagagcttcccac

SEQ ID NO: 178349 - DNA, 715 bp, Homo sapiens
gaagaaggtgcctgcttctcctttgccttccagcatgattatgacagtgagggccctggagaatgacagatttacaagatggagacaacctggatccctgagtgactgcatggaggatagcacccccaccaacttgagtaccctgatttcttgttacctgtgcgagaaataacattccatcattagagtcattaaacatttgagtctatttgttacggtggctcggtctatcctaaaggacacactgctctacttaacttcaggaacgggataatgaatactcaataatgaggagccccttatatatttcagcaagatatttattacttcatgtagactacactattactttgtgtagacaaggctgagaaacaaggatggttgctgacctaggtcagagaagtagtactgactgaaaaaccaaacctaaaggttaatgaatcactgtccaaccatatatattcctttgggctttattatcagttctgtccttttcaacatttgtagtaatgacttggatgaatataaagaatgctcacttcccaagcttgcaaaatccaccctggattggacaatcgtgattcacaaatatcttggcgttttatttgcattgtgttgttgtatcctaacaactatggagagaataatgaataaaaactttgacccaatgggcaggggacagaagctgggctttaaagggaaaggtgattgcgcc

SEQ ID NO: 178350 - DNA, 528 bp, Homo sapiens
ctttgttcatatatttgttgaccattagtatgccttctttgagaaatatctgttcagatcatttgcctattcaaaatgtaaatgttatgctatgtatactttaccacaattttaaaaagtacacacacggtgaaaaaaaaaaaaaacaattagctaactggtgattgtgtgaaggatgaactggattaggccaaggtgatcaagaagaagattggtagattaacgtggtcaggaggtcatgagaacttcaaatgaggcagtgaccatcaggaaaaaatttgtaagaagaatggtcaggaccaaatgagtttggtttggtcctgctgagtttgaggcatatggtggaaactgcccagctccctccttcagaaatgagacactctttccctagctggcctggtataggctgttaatggccaccagctgtgttcctttatggggctcgcccttggctggagctacaaggagttcatgggtgactttggccagaggagttgatgaggagaggaaggtctgggttgcagagga

SEQ ID NO: 178351 - DNA, 414 bp, Homo sapiens
gtggtgctgggagtggcataccctcgccagtgctgcagagaaggagagaggcctctgcggagggaaacacctgcggctcctcttccccctccctccagccccagtcatgcctctaagttacttgtctcttgccaaataggcttcccaggatggtttgacaaagtttgatatgaactcagggaggtggctagcaaatactatcagcctgagacagaggtaaggtcaggtggccagtcctgtctgccctctccgatgagcacccaggttagggtagagctctggggacccacaatctctctcagacctttcagctcagtcccagcctgtccctgcccattagacacataaagtccagatccccctgaaacagctccgtccctctggctctccatgggacagctcctctgcattttc

SEQ ID NO: 178352 - DNA, 386 bp, Homo sapiens
gcatcagttattcttctgtgaaattgggataattttacttttgtcaagggctgccctgaggagtgaatcagatgctatacgtaagctcagtgggtacaaggcctaatagtagtggcttaatgcgtgtactcttcttctttttccttaatagaagaataaggtgaaattaaaaacaaggttgataattacatgtatattttaatgattcatcaatcaataaatgataacattaacaataattttactgtcagtacttagaagttaaaaggagaatggtaaaatcagtctgttgatcctaaaagttttattttttctttcatcctttcataaattatatctgaatctagattactgaaatgcaacaaataaaaatatttacaaagcta

SEQ ID NO: 178353 - DNA, 670 bp, Homo sapiens
aaatacggctaggtcgaggcgggtgcgaatcggccgatgaatttaacttactttaatgtaggcaaactatcaatttttgtccattttcctgtttgttaacatacctctcctagatattcttttcttgacccaaatgaaatattaacctaaggtcaagctgggagagagaaacaactgagatgaatgtctttactaaaataccgataaatttgtcaaactcaaaaaaaaattgacgtgataaaattgggcatcctttgtgctggctgctgcacgaggcctcagttttagagattcctttcttaaatgaacgtggcttcttgagagatttcctgtaagtatctactcttcagggactgtaggttaatgtgctttttctctgtccataagtgtgtgctccctgacctttgcctaagtaattctttctcgtcttctggctggaagcgtcaagtcaagcactgtcttaggaatgcctttcctgaccatctagactgtcatgccccctaattcacaccctgttgtggcttcctgtactgtttgctttttaatttgatttttgtctctccctccactagattctaaactctgtgggggcaggagctgactgttttttggacttaacgtatctgtttttgctcaccactgttccacacctagaacagtgtctgtctgc

SEQ ID NO: 178354 - DNA, 290 bp, Homo sapiens
tcatagagttccacttttggaagtgttccaacctgcacccaggaggcttctgcagtcttttttgctgccagaatgtccgccctgatttacacctgacttcggcaacatctgagcattcatatctgtgctacatgctggctgtagccatgggtctcattctaaaacatccttgccttcaaatacaggcatgaggcagcagtggaggaaggagaggtaagaaactattcatcggccgatctcatgggcatgctgacggcaagagttatgaggtgtaaacctgggttcacatc

SEQ ID NO: 178355 - DNA, 378 bp, Homo sapiens
ctcaatccttaacctacaccacatggctttacgtgatttggccatgtccgccctctctacctgcatgccttgccttccctctttcagcctgcatttcagatacatcaatctttttctagcgctttcaacaaggcccaggctccttcactaaattagtgcctgatcaccctggagagttagggacatatccacaagcctcgatggactccccattctacatcagctccttgggtacaggctttcatagaatgatgttcctttccaccatagtgcttgcctcagtgtgaaattacacagcatttagtgtgattatgtgatgaacacctcactctctgaccacaataaaagcatctggagagcagggaccacacgactttt

SEQ ID NO: 178356 - DNA, 299 bp, Homo sapiens
cttcacccggacaagggtgtcactccagcacttagtcccctcatcatcaattttctcccattagcatacaaacacaatcttatctaaataaaacaaacggccgggcatggtggctaatgcctgtaatcccagcactttgggaggcccaggtgggtggatcacctgaggtcagtagtttgagaccagcctgtccaacatggtgaaaccctgtcgtctaaaaatacaaaaattagccaggtgtggtggtgaacgcctgtaatcccagctactcgggaggctgaggcaggaaaatcgcttga

SEQ ID NO: 178357 - DNA, 518 bp, Homo sapiens
agactctttcttcctcactagatttgaagaagcaaactgggctattgtcagcatctgtgtggagaggttcagatgacaaggaactgaggactgcctctgatcaacagcccggaagaaagagatatcttttctcagcaagtagcagttcttttctacagtcaagcctcaggagctaagcagcctgacacttgtgagttatctggcatgaagtaattattttctcagaagatcttatcattgctgatcaagtatgagctctaaccaaggagctgcaaaacccggcatgtgttcatatttcactgaagaatacctaaaaaaccctggtatctgcaaatgtaatttgcaaagttgacaccttatttttccccagttagcattttctttagcttctgcaacatttaggtttatagaagtgtatctaatatctaaactttatagtacatgcaccagaaatgttttgtttctctttcatgcttttaaaaaatatatgttattaaatagagtgaaggtttaactgt

SEQ ID NO: 178358 - DNA, 239 bp, Homo sapiens
aaaaaacggaccttctaaaagcaatcacagctggaagccctatgatcacaaatacagtttataataaaagagggtaaacagctctgttgtaaaacagactgtaggagatatgaaaggccatcaaatacagggatcttggcacctgttgtgtgttctttcccttactcacagctctctctgaccatcctgacagatgggctggcttgggcatgtggctcaggatgaattttcccaaattt

SEQ ID NO: 178359 - DNA, 642 bp, Homo sapiens
atttggcgaggcagtctcatttggcgaggcagtctcatttggcgaggcagtctcgaactcctgagcccaaatgatctgcctgccttgacctctcaaggtgctgggattacagacgtgagccagcattcctggcaaaactgtagttaatattgataagtataactctattccttcaagcaaaggccaaagtattttggggaatctttgtttaagaagacaggtatgtctatcacacaccttgtaaaacttttcatttgaaaacaacaaaatttaaaacataaaactccagggtggggaaatgtccagctgtctggaaaattcccttctttgccgtgcctcattccctggccatgcccgatgcctggagtgatgatgaactcatattgctagttctcaggtgggaatgatgcctcaggaaaaaacactgtgggtaaagaatgctttctgcactagcttctgactcactccacggtgatgtggtgggagcaattccaaccaaccccagcacggtgctagcatcctgaaagggagctcattaccaggaggaagggagagctcagtgcaagcatccaataattcactctctttctccaccaagcggttactccttaagggctctaaactgaatgacttacagagcga

SEQ ID NO: 178360 - DNA, 551 bp, Homo sapiens
cactttgcgtttatgttgaatagcattgctcggaagacagatctgacagcaaattatttatggtcactcaccttcttacttgtgtgcctagggcaagctgaataacctggctgggcctcagctttctcatttatgaaatggagatcctaatagcactgatgttgcagagcagacacagaaataagatcatacttttaaattgcttgtatcaatgtaagttgtaccgtcattgtaaataaattctggccaaattgcttgtatcaatgtaagttgtaccgtcattgtaaataaattctggccgttagtagttttctttctcctccccatcatagggaatattccagcctcttttgaggcctgcagcaggccagttgaggcatcaccattgaagttgctggtgcagtgtacaccctggcacaaggaccttatctgagcccccacactctcctgcttgctgatgggcaagccctgggctggctgatacctccaatctctttggagacagctggccatatggcaaaaaggctggaatggcatctccactctgtgac

SEQ ID NO: 178361 - DNA, 177 bp, Homo sapiens
atcaattactacacgtaaggtgtatatcaatttggtccggaaaggtggaacaactctaaatgggtggaggaggagccttgccaggttataagtggatgcaaagattttctgattggcaattggttgaaagttattatttcaagacctggaatcaacagaagggagtgtctgggttag

SEQ ID NO: 178362 - DNA, 639 bp, Homo sapiens
tgggaagattcagcacaccctagcagttgtcataccgtttctgtgctgtctttttgcaaaaggcttttgtgtcattgctgctagaaaaaggctgacctcctaccttgagcatccagagtggatgactgcattttttttccagaattctaagtcacactgcttttttccccttgttcaaaaaggtcagctgtgtttgattatatctttgctgcttttaacttgtcttttcaggaaactttttttccttttttgtccctactccctagcacactactaaaaaggaaaatgaaaagtcgttgaagtctttcctactggcctgtgataaaactgctcaagcagctataacccaagatgttgtctcttacgtttgataatgaatcaaatctgataggcgacacctcaggaaaaactgggcttatatttgctactagcacaatgaataggatatttaaacatgctcatcatgtaatgaaatatttatagtcaaggtttttttgtttgtgtgtttttggtttgggattgggttttttttcttttttaaattttagattgcttcagtataagatatacttttatgctgatacaaaaaaattgataacttttgttgtgtgggggtggtttttcttgagactattcaga

SEQ ID NO: 178363 - DNA, 421 bp, Homo sapiens
aagtattgggacgataacgtgtgcttaagtgtgggtaataagggagcacagatggtctagttttgcagagtgtgtgaggagcgggctttcattctttcattaacacacaggaacaaaacaaagccagcagctcgtcatccaccactctcccgcctgtccagtcagccctggggctcctttgctctctttctagaaacatttggccaatcaaaagtttgggataaggattccactcccttccctgtctcatctagcctctgctgctcacttaactatctgaattcactcaatcaaattatttaaactcgacatgcctcagcctcttcttctgtaagacaggtagagagccacctttaactgtagaattctttaaatattaaaaagtaaatgagatgatgcatatagattcacctaacacata

SEQ ID NO: 178364 - DNA, 541 bp, Homo sapiens
agcttggccttttcataaaaatgtatgtgggtacctgcaggtgtacagacacagtttacttgaagttaacgacactggaaggatccttataataagcttttaattagatattacaaacaaggaaaatataggaacatgagagctggaagaaattacctaagtccggttgcgacgactgcttgcgccaagttgttctaagacccaaggaggcaaggcatgctaacgtgaaccctaatgaggatggagaatcaagttcaagttctcccactgaagaaaatgcagccactgacaatattgccttcatgattaccgaaaccactgtccaggttctttccagtggggaggtgcatgatattgttagccaaaagggagaagacatacagacggttaatatcgatgccagaaaagagatgaccccccgacaagaagggactgacaatgaggatccagtcgtgtgcctggacaagaaaccagtgatcatcattttcgatgagcccatggacatccggtctgcctattagagacttcaactatctttgag

SEQ ID NO: 178365 - DNA, 600 bp, Homo sapiens
gctgggtagatgcgcttcctctctccacctgaggccctccagctgcaacactctctcgatggccaaacttccacaaagcattgccttccttcccgtctcccacagatgcttcaccacgtccggcccccagctcctctcttcctctgtccacagctactgctcatggactacaacatgccacgtctgcattttggattttgactgtcttgagcttgccgctcacatctgtggttacctcctggacatcactgcacatgctgcagcatctcaaactcatttcactttcttcaaaacaccccctgatgtttctttcagtgaatcctctgtccagctacatgtattgcttatggctgacacccatccctcaccacgtaccagctgtagccttgggaactacatttgatgcgtctgggccttagtttccccatttgtaaagtgatgatgaaaaatcatactcatttcgtagggctattgtgaaaattcagtgtgttaatatacgtaaagcctattgaagaaggcttggcatgttgaaagggttcaacatgtgttatcatatagctttgattctggttttacaaaagtagatcatactatgctatc

SEQ ID NO: 178366 - DNA, 456 bp, Homo sapiens
ctccaacctggaaattaaatttttatgggacatttcattaagggcaattaatttgtaaaacattctgtgggccaaagaaaacctctcagatctacaaaaccctgatctggagcccctgtggggggcatgctcaaatagttggccaggatgcttgtgtcctttaacgctgttccctgggccccactctagagattctgattgagtagatctggagtgagattcagaagtgtgcaccccggccgggcgcggtggctcatgcctgtcatcccagcactttggaaggctgaggcgggtggatcacctgaggtcagcagttcgaggccagcctagctgacatgttgaaacactgtctctactaaaaatacaaaaattagctgggtgtgatggcaggcacctgtaataccagctactcgggaggctgaggcaggagaatcgtttgaaccctggaggcagagg

SEQ ID NO: 178367 - DNA, 178 bp, Homo sapiens
aaggtggtgaaattaacagggaagagaggataatgtctccaggtctatatattaatttcccatgaaattcaatcaaatgtcatagatggcatccacattacacagaataatgggggtaaagcaaattaatatgaaatggccccgcttgtgagaccagaggacaccccaactagtctta

SEQ ID NO: 178368 - DNA, 344 bp, Homo sapiens
caaataagcatttgaaaagatgttcaacatcattagccattagggaaatgcatataaagactagaatgagatactactacatacttattagagcagctaaaattaaaaatagtgattttccaaactttttcttagtttaggcccactcaacctccattattttgtcttttaatgccttccgacaaattaaaaaaatgtgtccaggctgggtgcagtggactttgggaggctgaggtgggtggatcacttgaggtcaggagtttgagaccagcctggccaacatggtgaaaccccatctctactgaaaatacaaaaattatctgggtgtgatggcgtgcacctgt

SEQ ID NO: 178369 - DNA, 476 bp, Homo sapiens
ggcccccgttaggatactcaatttagtagctgtaaaacaaacatatttactctgttatgattctggaagttagaagtctaaaattagtctcactaagctaaagtcaaggtgtcagcagggctggttccttctggaggctctaggagagaatccttttccttctctgctccgagagactgcctgcattcctcagtttctggcccttaatccatcttcaaagccaggagtgcagcgtcttgcttctgttgtcgcatagctttcttcttctgtagtcatgcctccctctgcctcccttctatcaggacacgtgtgattacattgcacagataatccaggataatattcccatctcaagatcgtgccactaccctccagtcagggaaacagaacaagaccctgtctcaaaaactaataataattgactgagccactgcacccagcctatatattgttaattacttttaaacaaggtgtag

SEQ ID NO: 178370 - DNA, 347 bp, Homo sapiens
agatatccaaaattccactcctaagtcctaggcagatatgtctgtgtccccattcctgtaaacagccccactacaaatcacttcaggttgtttaaattaactgtttagatgtaacttttcattgccaacctgacaggttggtgccaacttgttatccctgaagtatagcgtaaagcctggaacttagcagatacttcacaggtatgaagaaataaacataattaaggcaatacaactaactgctaatttaaattttattagtgctggtattggtagtcctgtaaatacagtcagaggaattctctcaaaagatgttggctaacaggttattaaaaatactgctactc

SEQ ID NO: 178371 - DNA, 226 bp, Homo sapiens
ctgcagcagttccaggcatcacatccagagctggcaacatttgctcacattgttagaaaacttctagaatcctcccagcagagttcctcagtgtgtcctattggccagattctaaatgtgcccatttcctttttttgcttttagagacaaggtctcactcggttgcccaggctggagtgcagtggcatgattatggctcactgtgatctcaaactcctgggctcaa

SEQ ID NO: 178372 - DNA, 434 bp, Homo sapiens
cgggcaccttggctggtctgtctttccaattatcggattcagcttcagcaagagtcctaaggtaagaggtacctgtctgcgcgtggcaaagtcctttgcacaaccatccagtgcaggtgccagccttctagactctggcagagctacagagaagaacttcatgtaacttccagccgcatcaattgtgataaacagattggtctgctaactttggtatctccatgtctagcacaatccctgccacatggcaggtattctataagtatctcatgaaaggatgaatgaagtagttatgagatagaaaggataaaacacagccgggtgcagcggctcacacctgtaatctcagcaatttgggaggctgaggcaggaggattgcttgcagccaggagttaagagaccagcctgggcaacattgagagactcagtttcta

SEQ ID NO: 178373 - DNA, 443 bp, Homo sapiens
actatcatcgccactttaaaaatctaaatccgacagtctccatttactctatttgtaaataaaactttttactcaaaagttcctactcaggcagaaataggaggaaatacaattacagtttgtttgctacctttggaagtaccaatctaacttacaaaaaaatcaagaaggcaagtttcagccaggtacagttgctcatacctataatcccagaactttgggatgccaaggtaggcagatcacctgaggccaggagttcgtgcacagcctggccaacatggtgaaacgccatctctactaaaaatacaaaaattagccaggcatggtgatgtgcgcctgtagtcctagctacttgggaggctgatgcatgagaattgttttgagcccagcaggcagaggctgccgtaaactgagatcacttgattgcactccagcccaggcaa

SEQ ID NO: 178374 - DNA, 163 bp, Homo sapiens
acacgttcttcacttggcaagcccattccagcgcctagttctgattccacagtcacctttttgaggtctcctgcaccccaatgcctcccaaaatttaaccaagtggctcctctccctgggtctgcagcctgtactggaaggcatttctgaccattctgaagtc

SEQ ID NO: 178375 - DNA, 534 bp, Homo sapiens
tacaatgcataaatagcataggataaaaacataaatagtacagagatgaattatagattcaagagttggaaaaaaaacagagacctagtaaaaatgctgacatacaggaaataggtaaatagaggcagtagagtatagtatagtagtaataaggaacatgtaataaacatatctcattactgtatcaggacgaggctcataatgtaagccaaatggaatataggtataaggctatttgggtctggagtccacagagtctgcatttcaggtatcagtttctgcagttaactaagtgtagaccttcggccagttacttaatctactactaaagcctttactgtcatctacaaaatgaagatattaatagtactgcttataagcatataaatgtagagacttaaatacaataaattgtggttcatgcctgtcattccagctacttgggaggctgaggcaggagaatcacttgaacctggggggcggaggttgcagtgagccgagatcgcaccattgcactccagcctgggtaacaag

SEQ ID NO: 178376 - DNA, 408 bp, Homo sapiens
ccatgattacggttttagctgttgctaagccctgttctagaagatgagcaagacaagcgtctactgtcttggagcttacattctagtgtaagaaggaagaaataaaatctcagtataacagttactgataaaaggagtaaaaaaaacagagaatcataaaggtagagtataggaatagactggaatgttcttttgttttacttatttattttttagagatagattgtccagactatgttgcctaagctggtcttgaacgtctgggcttaagcaatcctccagcctcagcctccccagtagctgggactacagctgcccaggttagagtcttcctttggatagggttgcaggcttcaggatctaggagaatttaaccacgacaacaacaaaatagtaataataatgata

SEQ ID NO: 178377 - DNA, 438 bp, Homo sapiens
ggcagtgacaacctgactccacagtcatagaaacagcacagagctaggcaattgtgcagatggagacagggaggcaggaagcacattcactgtgtacagtatagcatcccactctgggcccatggttctacccgtgaacatggatgtgctctttgatcagatctactcttctttctgtgtgcttcagccatggacattcatggcaaaggaattattctctttgctaaaacagagatgcccagctataccctatgagagggggtaatgggtcagccatatacatcatgctgccactaatgaggaaagaatctccctctcaggaataattctcttgcatccagaccccagagaaggcaaatacttcatcctctcactcccatttcagaaatcatactttctaacatactgtctgaggaggtactttatgaggctcccaaa

SEQ ID NO: 178378 - DNA, 693 bp, Homo sapiens
tattctatttcccctccctctctcccgccccgtatctcttgtcacccttctcccaccctcgctcgcgtagccatggacggagccagtcggcggccacgtcagtcccattccatctcctcgtcgtccttcggagccggagccgtccgggcccggaggcggggggagcccaggagcctgccccgccctggggacgacagagctgcgagctcctcctgtgcggagggattgagctctctttgctctgatgagccatcttcagaaattatgacttcttcctttctttcatcttctgaaatacataacactggccttacaatactacatggagaaaaaagccatgtgttagggagccagcctattttagccaaagaaggaaaagaccacttggatcttctagatatgaaaaagatggaaaagcctcaggggaccagcaacaacgtatcagactcttcagtttctcttgcagcaggagttcattgtgaccgtccttctattccagccagtttcccagagcatcctgcttttctctcaaagaaaattggtcaagtggaagagcaaatagataaagagaccaagaacccaaatggggtatcaagtagggaggctaaaactgcattggatgctgatgacagattcactttgctgacagcccagaaaccacctactgagtactctaaggtagaaggcatttat

SEQ ID NO: 178379 - DNA, 701 bp, Homo sapiens
ttactatttgctttcttctctttgggccccacactgactatatcatgagttactgtttctgcagcttttttaaattattttgcattttacattcatcttaaaaaaatcctgtgtgtgtatatatatatttatgtaatttaaaaaataaaaagcatgctgcttggcttggctagctaatgtgtaattgtacctggtaaacaatttttttctttgaaattctgatcatagagggattgagctctctttgctctgatgagccatcttcagaaattatgacttcttcctttctttcatcttctgaaatacataacactggccttacaatactacatggagaaaaaagccatgtgttagggagccagcctattttagccaaagaaggaaaagaccacttggatcttctagatatgaaaaagatggaaaagcctcaggggaccagcaacaacgtatcagactcttcagtttctcttgcagcaggagttcattgtgaccgtccttctattccagccagtttcccagagcatcctgcttttctctcaaagaaaattggtcaagtggaagagcaaatagataaagagaccaagaacccaaatggggtatcaagtagggaggctaaaactgcattggatgctgatgacagattcactttgctgacagcccagaaaccacctactgagtactctaaggtagaaggcatttat

SEQ ID NO: 178380 - DNA, 690 bp, Homo sapiens
ttcctgtcacattcctcgggcatacatgtatcaagttcttactgagtacgggataggggtctggcctatactaagctaggcaggcagaagaggaatagtccatcttggggaacttgcactcagggggggaatgaagcacactcagagaataaagtaagacattaagacttccttggagggcagtggcagcatgagggtaaagagagtggtaagaacaactagaattccaagacgggacaatcaacaaacatccagtgcttctgccctaatctcaggtggaaaatgaactagtctggtcatatccctctccacctcccctcaggcctcatgtaataccaagtccttcatatcaccatgttccaattatcctgtaccctgcattggtgcccccaaccatgctttctcaacctctccagactttgaccttccttctactccttgttctgactagtagtcttgcctttgaagacccagtgccaatttcacctcctctatcaagctgtccaacccccggtcaagctactgttagtccctcccaacagtgggccttgtaggaatattgagcaatacctcttagctcttgtcactcactttggcacaccgtctctaccacaaaacagggagttccttgggcacgggagccatgttctttgccactgatgaattacctatcggggggaatctctgaat

SEQ ID NO: 178381 - DNA, 571 bp, Homo sapiens
accatgtctgttacattcactattgcagcttcagtactcagcaagggcttggaatacagcagaactcatggtagagctttcttctctcacccatgtctttggcatcactggggaacagagatgtaagcaccataaaatctatggcctaggactttgtggaatgggggcgtatatgacttaacacaagggtcccagcccaagggtcccaacccttttggcatttgaatttggatcattttcatcaactgctcagagaaggttgcagaagagaccagatagcatttgtcaaatcctactgctatgtctctggctttgtccagacacatctggaaaaggatatctcccacccaaacatctggacaagccgacctggtaagaggtctataatagctcctgggagggaggacccagcaagctaggtccagggcttgtaaggccagatcttgagatctatggggcagcttgtttacaaagcctcactggttcactggggacaaaccccaagagccaagacacactaagaaacacggcctttgttccccccagcttgataaagcgtctttccgggtat

SEQ ID NO: 178382 - DNA, 596 bp, Homo sapiens
tcacagtttgcaattatctggtgacttgtttgtgagcctccctaccagacaggagttgccacaagggcaggcccatgtctatctcctggcacatagtaacagcttaataaatacttgttgaatggacagatctgactgtataaaaattactaagttctacataaagagacacaagtagcaaagttaagagataaataatggtctggggaaaatattaggttggactacataaaattcccatgttgggcggtaaaaaaaaggttgagtattaacaatttatatgattcaacctaatatttttaacacatagcagatgaaggataaatttatctaatatacaaaaagctcttacaaaacaagacaggtcaataatccattagaaaaaataggtaaatgattaaaccagcagaccacaaaagaaaatgataatacagatgagaaaagatacataatatcactgaccagaaagtggaaacaaaaactgaaacacaaaccatggtttatctgctagacaggtgaaatacactagacttcatccatacacaggttttgctaaggaggtgaggaaaagtgcatccacacatttcatggctgga

SEQ ID NO: 178383 - DNA, 324 bp, Homo sapiens
ccctgaagaactgaatttcaaatactagtagcttgttagagaaggaagatgaaaaatgtcatgtttactccacatttcccaactggaaacttcactgttgtgcttttccagatgactaggaatgctcccgccctttccaatcaatagatactttcccctttgagtcagagccttagcaccatgttaccaaactcttcaacttagtaataaaattcatggctctggggttgaaagcccagctctgtcacttagatggtgtatgaccttgggtaaaaaaaaaaaagtgttgaaaggataagatgataaaatatgtgaagcactaag

SEQ ID NO: 178384 - DNA, 462 bp, Homo sapiens
atggctaccatcaaaacacaacagaaaattacaagtgtctgcaaggaagtggagaagccggagcccttgtgcactgctgacgggaatgtgaatggtgcagtcgctgtaggaaatggtcggtgagtcctcagatggcatggtgatcccacaggcagttcacacgagcaggaggtgggacactcaaacatccatccacagatgaatggagacacagaatgttccacaaaatggaatattactcagccttaaaaaggaaggaagttctgagacatgctacaacacaaaggaaccaggaggacatcatgctgcgtgaacgaagctggtcccaagaggacaaatgccgtatggttccacgtgcacaaggtccctggagtactcaaatccacagaggcagaaagtagagtgggaggtgctggggctgggggagtgagtgtttaatgggttcagagtttcagtttggga

SEQ ID NO: 178385 - DNA, 331 bp, Homo sapiens
tttattgggcactaactgtatgccaggccatgggggtgccggagagaacgacacgaagaccctcacccctcaaagttcccagggggaggaggggctgcttcacttgggaagcgtggggatggaattctcagccccccgatgactccgaggccggccacctgcctggtttctggccggacaccggacttcccctggaagttgctcgagactgcgcgcccccagcaaaaaatcaggtcggttctccgagcccagtctagcgcttcccgacccgcaaaccaaggcccagtgaccgtccccgctgcgcagccgcctgcgtcgccagccaaccacg

SEQ ID NO: 178386 - DNA, 356 bp, Homo sapiens
tgttccgtgtgtgtccctgtgaaatctgcgatgacacaaattaaagacaccaccatggatgttctgtaatactggaaagagggtaccctagggagaaggagaggcagaacactgcagggcagagggtccagggaatgggaggagagacacggtaggtggaggggtaaacaaggcaccgggtgggggtgccgcggtgaaggacacctggcactagggaagacaaggcacctcaggggagcagggcatcctcacgcctgagcttcagtatgtccagtttggaaaggggtgtccccatcaaaactggcagctgggggctggccgctcagcgtcgttcagcccaggagcggaacagctcc

SEQ ID NO: 178387 - DNA, 642 bp, Homo sapiens
ctagaggatccccctcgaatcgacgctttctctctcccttcaaataaacttggtgttctcaatgtatacatctaactatttgggaaagaagctatgtgatttcttttaaagctttttatatataaatagagacagggtctcactatttgcccaggctagtctttaacctctggcctcaagtgatcctcccacctgggcctcccaaagtgctgggattgtaggcgtgagccaccacgcccagccaaacactgcctgtttaattccttttggtcatgccaaaatgctctctgagatgacttagcagtctgcacttggtctgagatgagaggtgacctatttttctcctccctcatttctgatcctattcaatagcattttttttctttatttcttggtagagatggagcctggccaacatggtgaaaccccgtctctactaagaatacaaaaattggccgggtatggtggcgcatgcctgtggtcccagctacttgggaggctgaggcagaagaattctttgaatcctggaggcggaggttgcagggagccgagatcgcgccactgcactccagcccggcagcccgggtgactgagtgagactccgtgaaaaataaacaaacaaacaaaaacggggataattct

SEQ ID NO: 178388 - DNA, 747 bp, Homo sapiens
aaacgatgtctacagcacttgagggttcattttaaaacccagaaacttacttgggctccctgagccttcatttccttatggcgacaatctcaaaggctggaaggctaaatgagattatgcatatggcacttcatgtaggtcctggctcttaggactcgctaaacaaatgttagccatcaaacctgccactgcctgatgttcctaacggccccgcgtgttaggcaaggggtatcattgttcccatggtgcacttgggaatgcgaaggggagccactcatccaagggcgcaaagaacagattagaactcagctcgcaggtatcccaggccagtggcccttccacacgactggctggcagatgcagctgtagaaccagcccttcccttcccagcgattccctctccttggtgcaagccctgctcttcccacggatgcttccctagacccatgtggcatttcagatgtcttgcttatggtttaattaatagtcctttgatttcattctcagagaatgaaattggcagtgcctgggaggccacccacatctgccaactgctctgatttccgttctaagagctttgcgtcagaaagagaggtccggggaccagcaaggaaaggtgggggtaatcccagggcagccccagggcctcaggacaaaccttttccacccttagaagatgtttacacagagtagcacaaagcatagagtaccaaacaaaaccctcaccccttcctccggccctggaaa

SEQ ID NO: 178389 - DNA, 311 bp, Homo sapiens
tcaagaaaataaaacccagccatgattctagtcccaggcccattggttctagaaatgaaacagatggctgggtgtggtggctcatgcctgtaatcctggcactttgggaggccgaggcgggccgatcacaaggtcaggagtttgagaccaccatggccaatatggtgaaaccccatctctactaaaaatacaaaaatcagctgggcgtggtggcggatgcctgtagtcccagctactcgggaggctgaggcaggagaatcgcttaaatccgggaggcagaggttgggcaacagagtgagactctgtctaaa

SEQ ID NO: 178390 - DNA, 263 bp, Homo sapiens
agtcctagctgctcgggaggctgagatgagagaatcacatgagcccaggaagtcaagactgcagtgagccatgattgcaccactgcattccagcctgatcaacgagagtgagaccttgtcccctgtctcagtaaatgaatgaatgaatgaatgtttcttcagctggccccattgctgtggatttaaagaaataccttttcttcctggttttatttaacctttgagatccatccaataatctctaataccatcaattagcactt

SEQ ID NO: 178391 - DNA, 127 bp, Homo sapiens
gggttacaaagtgagactgtctaaaaaatttaaaataaccagaacttctgatttatcatggcaatgtgtcactcagtccccaatcctgctacttaaaagttatttttattttttaagtggcctgatc

SEQ ID NO: 178392 - DNA, 429 bp, Homo sapiens
ccctggcaacctccatggtcgtatttgtgcttctttttcctgataagcacagctataatttattcttccaactggtctcaatcctcaactatacaatatagaatacacggtatctcaaggcatagaatggctatcataatataccactacatttatcaaggcatctaaatttttaagatatttttgccattcaacttggtaaattcaaattaaattggtcacaagtgtgttttttctccagaaattggagattgaaaaatatagccagtacaaacacaaagcaaagctaaataaaagcccagcaccattaccacatggtatgttttcaaaatccaacagtgttccagaacgctaaacacttaagttggaagtagcactttaccatgaaaaggaaccagctgtaggtccctctttcacaacatattgttc

SEQ ID NO: 178393 - DNA, 259 bp, Homo sapiens
accgcaacgtctgcctcccgggtgcaagcgattctcttgcctcagcctcccgagtagctgggattacaggcgtgagccaccgcacctggccgaggcagcactttcatttatttccttttttattttttttttgaggcagtcttgctctgttgcccaggctggagtgcagtggtgcgatcgcggccccctacagcattgacttcctgggcttaatcaatcctcttacctcaaccttgcaagtagctgtgactacacgatg

SEQ ID NO: 178394 - DNA, 776 bp, Homo sapiens
cggcagatggggcgctgtagaggacgttcttaggcagtagaggactgcgcggccggcgaaagcctagaagacttgggaattttgcctaccttgtgttcctcctttgtctctcggtatcttcgttccagggccagaggcaggattggttttattttgcagacagaaatcacacctcaagtggacagcgctcaaaacacgttagaagcagtatagtacaacgataatactaaacaccgatatggcacttgctcgttgccgtctgcattctttttttttttttatagggacgagatctcgctatgttgcccaggctggtctcgaactcctggctcaagcgatcctctcgcctcggcctcccaaggtgctgggattacaggcatgagccaccgctccgggccccgtctgtgttctaaacacttgacatgcattagctcatcttatactcgaaacaaaccccatttcgaggtgggctctattattatactcatcctacagatgaggaaactgaggcacagagatgttaagtggattgccctagctcacataactgaatacatggtggaggtggaactggtatttgaatttagggctaccaggtctgctgtgctgtattaatagcagacgctgtgaaatcaggcagcactgacggttacccacccgtgtgatcttggtagcataaacccttggtgcctcagtttctttgtctgtaagatgggaacagtaataggacaccttctaaaaaataggacacccacctgcctcatgtaattaaatga

SEQ ID NO: 178395 - DNA, 648 bp, Homo sapiens
ggtaatcatagaacattgcagaatactggggtttaaagtgttaatagtggttgtctctaggggatgggataggagactgtcatttcccatgttatgtacttctgtatttaattttagtttctacaatgagtatatattgctctattaaaacagttgtaaacacttgtttcttggctagtgacattgatgcaaaaaatattctcgttttgcaaatcaacacaaattaatactttacaatttttcaaaagtaacttagtaaattactataaacaatttaagtgtttaaaaccctctattgacagatttgtgtattcatggacgttggatatatggatttttttttgccattggaagactgatttgcttcattagcctttattcttttctgtagttgatctggctggtgacagtgaaagttagctgggctgttacagatcattctgcatgctcagatttaccttcatctccaaggtttggattatcagataactagacagtaaggccctgactgctgctgcctagtacccctgtctaaaggtttagtcctaaaaggaagtgagagtggaaaaaattgttgcattcttaggaaaatatttccttctaacccagacatcttttgtttttccccagatggttctgttatatccc

SEQ ID NO: 178396 - DNA, 333 bp, Homo sapiens
ctgcccacagcaagggaaggtgaactctgtggctcactaagcagtgatctcaaataagtccttgcctcgttttccctcattgggaaacgtggaaggtaacagaactggcacactgggttttgtcaggctcaagggagaggaagcaggtaaaattagtgcttagcatggagcctggggctgagttgatgctggggaaacagacgccgtcatcatcattacggttattactttatgaataccagcattattatttatctctgaatctcttagggctcagcacacagtcctcagcattcagcctcatttgtggagcataaaagttccatttggcaa

SEQ ID NO: 178397 - DNA, 451 bp, Homo sapiens
tgctgggattataggcgtgagccaccacgcctggcctcactggagtcttaaagggatcataaaccccatagaatgttatgtcactgatgtggtatccactgatgtatcctccaacaaattacaattgaaaaccaaaccaaaacaaaaagaagcccttcacttttaaattaaccatatttttattatcttaagtgctgttatttattaaaagtaaagaagtagaactttatgttaaaagaacattttcatatatgtaatacctaggttatgaatttttaaatgcgtatataactaagttaatattgaacctaatcttatcttttcgatgatccaaaggcagttatggttatttcagtacctgaaggtcatggtaagcattaatcatcgtgatactgtggctgtggtagaaggtttaatagcactgtaatgcaacgggatttcctgtgtccac

SEQ ID NO: 178398 - DNA, 486 bp, Homo sapiens
ctgatcacagtgaccttctaaagggtttagccgagagagtaatccctgttcatatgaagtacccccgctgcgaaagcttaacttaaaccacattccacaaatcacacacaccccccaggaaaaacctccatcataaagagatgattgcactttttgtttttcaaatagagctcaagcccctgtaaattgtatcagggattctccataggataatgagatttgggaataggattaataccagagcatgtatccccaaagtttcaaagaattattattttctaaatcctgtttttcattgtgttagaaagtgaagttaaagggacagcaaattatttgttggcttgttttttagttaaaacagtatggagcaagaatttcatctttggtcagcttattttaaaaaaggattctctacccaactaatgtactcttgaattctagaatgtgattgctatttggtctgggcaaaaaagtaaaataaaataa

SEQ ID NO: 178399 - DNA, 490 bp, Homo sapiens
tctgcccagtttttgcaggaagattgcaatttttttcccgtttttcaatgtcacctttgagtgaaggtccattttcagcttgcaactacagaagataactaatcaataaaccaagcccaagcattcctcttccttcagtggatcatacaggtcctccaacaaccacagggaggggggatgtaggtgccactgtgcagacatggcggttggagtaattgctcttgcagtttgcttatgtcctctggtctggcttggaactgctcctgtacatatcatttccatcttccaatgggctgctgccgatcctactagcttatgacttagtgcttcccacaggacctagttaagatgagcagttctggatacagcatcactgggtctcaaagttccgtgtctaccagggcccagtagcacagcagaggctgtttttcaaaaagcatatgatcctctcctgtggttagaaccaccttccttcagggccccagggacc

SEQ ID NO: 178400 - DNA, 469 bp, Homo sapiens
gaggtggtttgtgcctataattccagctactctacagctacttgggaggctgaggcaggagagtcacttgaacccgggagacggaggttgcagtgagccgagactgagccatcacactccagcctgggcaacagagcgagactctgtctccaaaaaaaaaaaaagaaaaaaaaaaagaagctccaagaatccgtcactacacctaaacaaccactgagctggtaggaattgtctaaagtaactactgtgggactctagagtctaccaaacatttacagcatccaaaagagaacggcatgattcacaataacccaaaggtgggaacaacccaagcatccatcaacagatgaattatacaaacaacggaatgttattcagccattaaaagggatgaaattcagagacatgctacaacatggatgaatcttgagataattatactaagtgaaataaaacagacactaaagga

SEQ ID NO: 178401 - DNA, 685 bp, Homo sapiens
tgaggatccccaggccttttcccctcaaagatgtaagaccacatcttacacaggtgctgaaaatgttaagtccatttaccttgggctttcatctgaagatctttattacaggtaagtgccactgaaaaccatactgaaatcacatttcctgttttgattatttatttgaggcatagccacccaattcacaattatgggagtattttgttcctcccgaaacacaattaccgttttaaataaataagttttaaataaagtggaaataacacacccaaaaggctctcataatgtattttgaatgctttatctataaaattcagcccaaagagtttaatggaaacatgcgatttttcattttatgtataacaaatatcattactgttattttggtaatgtcttcatatttgaaggaataaaaaaaggaattggctttataagtaaattatttaatctaggatagataaaagtgggatagaaagagaactaaaaaggaaacctaagagaaaacccatattgatctgtgggcactctctggggagagattcaattcgttttaatttaggataacaaatattttaagtcaaatggtcacctatcaagtgataaatatgcctaactttagtactttactaaagacactgagaataaatacatagtggcaatcattaccatttgaggggaaaag

SEQ ID NO: 178402 - DNA, 497 bp, Homo sapiens
tttaggactaagacaatctactggccagatgagatgagatgagacaaacccttccaccattttgcctttgaaaaaaattcaatgactatctcaatgttttgccattggtttaaattccagaattcttatgaaaaataaagcaagaggcttctcagaaatttctctactctgagaggtctttcttctgtgcatttcttgggttgacactgaatctgtgccagaatttcatcaccacctagcactgcaatgtactctaccttctgaagcagtttcagggtcgtgacggggtcaaaggcaatgaccccatgagtaccagactctgggagtttgactggctaaaaccagtcacagggacctgggccatcctcttactgtaggggaagcttacctaagttaagcctcagtccttgaaactgtcagacctggctctgagatagcaacatttacacaaagaaaggaaagtttgaaggctgagcatgagcactcctctcctggta

SEQ ID NO: 178403 - DNA, 487 bp, Homo sapiens
ggcttcatccacctagatttcaaagtatgttgcaaatagcctggagccccaggcagagacttgtcacagaagcagagccactgcagagagccccaactatggcaatactgcacaaaaatgtggggttggggttagtgccagagctgccacagagagtcctcactggggtaatgcctagtggagccctgggagcaggactggcactgagactccaggatcgtggagctactagcatgcaacctcagcctgggagagcagcaggcaggagactccaacctatgaagcatgggctgggtctaggaaagccataggagtggggctgccgaagacctgtgtgcccaggatgcagaaaatggagtcaaagattattctctaaattgagggcttaaagtgttttttcccattgggttttggacttaattggagtctgttactcttctctttttgcctatttttcccttttggtccaggactgtcaatcctatgc

SEQ ID NO: 178404 - DNA, 369 bp, Homo sapiens
acattaatcgctgggtgaaagactacaggatattcacatagtctcacagtatcatttcacagattacttagtaacagcaaacagaaaagatacctttacaatggagaaatctggcatatggcacttaaatcaagtgccagaactcaacactgatagtaaaggtacaaacatggatgtgatacaaaacactattattatattatagtattacaattttctataggtttgaagggttttccaaaaagttggaaggaaaagtataaatacagtattattagagattatgaaacacaaaagaaaggctaaaaggaagattattacacatcagggagggaagaattaaagtagctgtcttgggatctattcact

SEQ ID NO: 178405 - DNA, 215 bp, Homo sapiens
tcagtgagtccctcatcctccaacacaagcctgctccaccttccctcattccaccctccacaaaggcctggggcgggggaggacgtttctgtccatgaagttgggggcacccacacacacaacctcgtccgattgtgattctagccagcatttaagggtggatacaggagatcaaagtatttgaatactcgcttcactttctatttgtgtctggt

SEQ ID NO: 178406 - DNA, 402 bp, Homo sapiens
ttcaacaccccaaaccattttttctgttttcatttctttagtccaacttctgttttcaaagcgtaggctttagctatgtttgaaaagggttaatattagccttgcctatctcacaaggcctctgaaaagatcaaattatatttgaggcatgctttagaagtgttttttcaaactctggattctaactcattagtgggtcataaaaacaatttaataggttatgatcagtactttaaacacggaacaaatcgggatacaaaaaaaaatggagtgcacactgcaataggaattgctatggttaactcctttttcagtttcatatatgcctgtgtgtccatgcaaagatatgtgtatagtcagtcacaatataaaatgtaattttctgtgattaaaaaatacagc

SEQ ID NO: 178407 - DNA, 258 bp, Homo sapiens
ccacagtggggaggttctgcctctatgctcagtctactaattcaaatgctaatttctctcagaaaaatcctcacaaacatacccagaaataatgtttaatcagatatctgggcatcccctggctcagtcaagttgacccaaaattagctgtcacacacaataagaacctataccaatagccagactatgttgagtccctgccattcacctagcaacatgcaaagtgctttaaggcagtgcttctcacactttaatttg

SEQ ID NO: 178408 - DNA, 334 bp, Homo sapiens
agggggggtggaggggcggggctggggggcaaggggagagaagagtcccggaggaagagggcgaaggaagagagcgacgctccctaaactgacccctctccagggcggacttggaagggatgttgctataatggggagcggataggcaggaagtcttgagggtatctgtgggtgtcctccttgctccaaattttccagccatgcctttcacatcagaaggaacaaacgcgggagggggattctctagtggtcataaaaaggaatgccacgccactccgatgtcaaagggcaggggttcaggaaatgcgggggatgtgggcaccacggggttaat

SEQ ID NO: 178409 - DNA, 653 bp, Homo sapiens
gaggagttctaatgaacataacaggcatgatttgggcatgcttaagactgtagaaaggcagccagaagaatggagagatgaccaagcagctagttagtagagggagcaccatcccctggaagagaggttggctgtgtccagaagaggggctcctccttgcgatggggtgtcttttagtcacctgaaaccccaagtctgcttttcctccagtctccttactccagcaagtggcactaccattccccctattcctttatccaggcagtcatcctgctgattctgtctcattaatggtcctcaaatcaattcattgctttccaccctcaatgccatgatccacagtcgtttttcccatggtcttcagcagcagctctaactgtcctctttgcatcttctcttgttgcccatcaatcttccagagagctgtttccaatatgcaaatcgaatcatgtcactccttgttttgaaaaccattcaacacttccaactgtgtcgacatggctaactaggccttcaggatctatgtcacacaccgtcttcctgccccttcttctccagccttgcctctcaccattccccagtgcccttcaccatttcccagtgcctctcaccattccccagtgcccttcaccattccccagtgcccctcacca

SEQ ID NO: 178410 - DNA, 319 bp, Homo sapiens
cattaagaagcccagtcaatgaaaatgttccattcttggtcctgtcctgggctaggccctcagattggccggctccactcaaccacctctacagtgccagttcagactagttgtacaaaggaagcttcccacaagtttggtttgtagcggatccctcagcttggttactgttataaagatggcatgtctgggaccaacctgtgaaggtttcaattaacaactcgagatatgacttctttggatgacgttgttcttaatttacccattcatctaaccaaagccctgctatgccctccactttcatggtgcaagccgtctg

SEQ ID NO: 178411 - DNA, 535 bp, Homo sapiens
tcagctcggtacctgcttattacccagtgtgggtaagttggcctgagcaccgagggggataacaaggacattcaatgaggtaaggaacatacacagatgaacagatttacaggggaaaaggctacattcagttttggacacgttgagttggatgtacttgtgacacacgcatagttgagtatgtggtatctggagctaaagcgaggggtctcaactggagatatacactgtgcagtcataagatggttgaagtcagatgtagatgagatcgccaggggagcaagtaaaatgggaagaagactatgatatagatctggggtttgatctattaacagccaacattaaggggctgctagaggagaaggagctgatgaaggagtctgagaaggaaaacccacaggagtagaaaaaaaaaggaaccagtggtggcaaagtcaggaagaaagggaaaaaattcatttttgaggagaaggaagtgataaaaactatcaaatgctatagtaaagtcgagtaaggcaggcattagaagtatcca

SEQ ID NO: 178412 - DNA, 330 bp, Homo sapiens
tcaagcgattctcctgcctcagccttgagaggagctgggattacaggcatgcaccaccacacctggctaatttttgtgtttttagtagagatggggtttcaccatgttggccaagccagtcacaaactcctgacgtcatgatccgctcgccttggcctcccaaagtgttgggatgacaggtgtgagccactggcctggcccttaaaatgctaccttttactatcaaagttttagtcctgttatgtcacgcttgctcagatttttctgttggttttctacctcgcttagagctttagcttttacagtggctttataaggtttttcttcatg

SEQ ID NO: 178413 - DNA, 322 bp, Homo sapiens
gttctgacttctgccacaggttcctaatgtgagaggctagacccagatcatggaggtgcttcagtgtgatggctgtgatttccgagccccgtcttatgaagatctcaaggcacacattcaggatgtccacacggcatttctgcagccaactgatgttgctgaggacaatgtgaatgagctacgatgtgggtccgtgaatgccagtaatcagacagaggtggagttttcttctataaaggatgaatttgccattgcagaagatttatcaggtcaaaatgcaacttcattggggaccggaggttactatggccacagtccagga

SEQ ID NO: 178414 - DNA, 533 bp, Homo sapiens
tgtgctgtcacagccagcattgctggatgctctgaagttcaccagggaactttccaccactctgcactgcattcatgcacctgctggtggcaggaaaaataacctccagtatgctactggcctcactttaatttcatagtatcaaatgggtcctcgctgtttcctgccatcacttcacgtttcctggccaaattaatctcatgtcccacatgatcatttcatgactcctgtctttacacctccaaaacttcctctctgtcttctctctcagccaatcaccttgcttcctatttcactgggggaaagaaatgaaaggagtaatcacagcaaacttccaccacagaaatcaacatgctccctgtccattcttatctagaaaaacctttcctcttgtttgctagatcctatgctttctagcattttgctctagaaaattttcccttctcctgcataataaaaatttcccacaacagtgagacattaacatcagcataacagtgcactttaatgtttatcatttaaaataaaaacaa

SEQ ID NO: 178415 - DNA, 326 bp, Homo sapiens
agcaggaacatggagagggccagctttgactgtggccagagccatgcttgagctcttcttttggagggatgggcttgggttgcagagggtcttacagggagagtgtgcttatcacactgctcctggatggactgatgaattgaacacttcctgagcacctgttttgtggctagccctctgctgagggtgcacacattccctcagccacaaagccagtatttagtgagcacctactgcatgccatgtggtccaccaggccttgggtagatggtggtgtaccagaggcaggggtcttcaccctgggggagctcccaggctggcaggga

SEQ ID NO: 178416 - DNA, 201 bp, Homo sapiens
gtggtagtatggctgccctttcacccaaaatacgaacagattttatctctagcatgtcctcatgtacctcttctggccatgggcagtatgtgtgggcttaagaaatgaggtctggagtcacatggacctgggtccaaattcctgtaccaacacttgttagccttgtgacgttgggtaagtcacgtatcctctctcagtttc

SEQ ID NO: 178417 - DNA, 424 bp, Homo sapiens
taattgggttatttaactttgcttcttgttgagttgtaggagtcttcatacattctgaatgttaactcttttcacatatatgatttgcaaatatttttcccgttttataggctgccttctcactctgttgattgtgtccctgtacccacaaaaatgtttacatttgatgtgctcccattggtctatgttttcttttgttgcctaggcttttggtatcatacccaagaaatcactgctaaatccagtatcttgaagctttccctctatgttttcttctaggagttttagttttcgtgattatgtttaagtctttaagccattttgagttattttttgtatacagtataagagttgtggtacttaaaaaaaaatagctatgctgcattccactgaataaatgtacaatcacttatgtgaccctttc

SEQ ID NO: 178418 - DNA, 456 bp, Homo sapiens
taattgggttatttaactttgcttcttgttgagttgtaggagtcttcatacattctgaatgttaactcttttcacatatatgatttgcaaatatttttcccgttttataggctgccttctcactctgttgattgtgtccctgtacccacaaaaatgtttacatttgatgtgctcccattggtctatgttttcttttgttgcctaggcttttggtatcatacccaagaaatcactgctaaatagagaagtaaattctgttacttgtgacaatatggatgaatttggggggcattatggtaagtgaaataagccaagcacagaaagacaaatactgcaagatctcatttaaatgtggaatctaaaaaagtcaaacttctagaagtagttgttactagagactgggggaaagagaatggggagatgatggtcatatggtacaaattccagttagcatga

SEQ ID NO: 178419 - DNA, 148 bp, Homo sapiens
ctgtgatggggaaacacaatcgccgagtgagcgggacagaccatcagaattctgcacttgcttccgtcccatcctttaaaatagcctttcagtacccttggttaatagtgtttttttgagacaggatctcacttcgttgcccaggctg

SEQ ID NO: 178420 - DNA, 342 bp, Homo sapiens
acctctggagtgggtggggggcggggcagccccactcaaaccaggagactgacttgaggaggtggcttcctagggaagaatggcatgccactttcacaaaagtgtccatttgccccttaacatctctgctttcctcttcatagcaacagtctatttgcccttaatcttccttgtctggtatccactctgtcctcccttgctggggtaattctttctacagtacatttctaatcaagtcactcctctgctcattaaccttctatggctcccttctgccccattggattacactcatgctgtctgcttggctttctagtcggtttgtccccacccatatctcct

SEQ ID NO: 178421 - DNA, 413 bp, Homo sapiens
ccatctcccagcaggccattcacctttagtcaaagctctccactaataattgtctcatgcagcgttcacacgccattgcctcatctcttaaccccagtttcttctagataagaaataattcctcctgcccatctccccagtcatccatcttcagtggggctcataaaacaaagccgttcccattttccattaacctctatgtcctgaaacttagagcccaatatactttctcttattcctcagaaaggggcatctatttgccatcattttcaggaggtcttacattattcagaaaggcaggcatcacccctggtgacctagccacctactttaccttttatttctctcctatttaccattgcagttgataatttgtagaactcagtaattcacaactgtcagcatctttatta

SEQ ID NO: 178422 - DNA, 331 bp, Homo sapiens
attacaggcatgagccactgtgcccggcctaaaaaaatattttaaatgagaaataacacaagtaatagtcattctttgttaggcagaagcatatgctgttatgctggccattttcattcacacttgccaggaaacactcacattttgtttctgtatatggaggcagccaagagtattatgttaatgtttaggaagagaatttcctcgtgattttattgctgatttctgaaataattcagtgtaactaattttgactgtatttgcacatctctccaattccaaaagctggcataattttctgtttggttaggaagtaggaattttatgagga

SEQ ID NO: 178423 - DNA, 534 bp, Homo sapiens
ttaattgattattcatactttctcagtttgcttcaaactgctgaatatttaattaaagagaaactttcttgggcacacaattgaatcactgaaaacacagtgctgcagtgttttgctgttttactagttataaaattggccacagaccttgaaactaaatatcaaacattcctgtactgaaccaactgccgttagtaagctgttcttatattgaacctttgttcctggaaatttttgcattagaaatccttcctggccggccgcggtggctcatgtctgtaatcccagcactttgggaggctgaagctggcggatcatgaggtaaggagattgagaccatcctggctaacatggtgaaaccccttctctactaaaaatacaaaaaattagctgggtgtggtggcacacaactgtagtcccagctactcaggaggctgaggcaggagaatcacttgaacttaggaggtggaggttgcagtgagctgagatagcaccactgcactccagcctgggtgacagagggagactacttct

SEQ ID NO: 178424 - DNA, 527 bp, Homo sapiens
acaagagccagatcacacccaaactactcagggggcagctatgctggcccgaggagctaggctcagaatctcacttctccccgcagttttttgctcctgtccagtttataggtaaggcatctgtgccacattctttaaaatccacttttctgtgaaggttttggagcccctagagatttttccacaggggaatgacgactgctgttgtgacttagaaggcgaagcagattatattttccaaaaatgaccataacaagcagtcccatcccacatgctcctcttgcagcgtgactgtgacactcctcccacttgtggtggggcgggggggggctgtgtcccctccgccttggaaccggaggagcttttgtaactttttatcatcagagcccagcacaaatgatgccctatgacttgtgagcccacaagagacaacgcggcttctccctgcctgctaaacacacaggcctggagcccactcaactgccccgaggccaccctgtgcagaagacttcctgagactccatgga

SEQ ID NO: 178425 - DNA, 349 bp, Homo sapiens
cagaggacccgaaaactgaatagaggcaggatcagtggaggacatcatagaggctgtggagtctgaaataatcaaatcttctaaatagcaaagccagtaacaaattaacatagtaccataggcagggttatttttgtacagctgcaaaaacttattcaaatcattcatattatgttgcaaagattaaaagggaaatagctatttaaaaaaaaaaaaaaacagtaaatatccagtgagaaatgtcaactgggattttcttcctaacccaaaaatgatggaaatgttcttccggcctcatagtgtcagtttccgggatacggagcctcgaatttcgtaactcagtggccaa

SEQ ID NO: 178426 - DNA, 429 bp, Homo sapiens
  misc_feature (367)..(367): n is a, c, g, or t
  misc_feature (395)..(395): n is a, c, g, or t
ctggatttctacattatgaaaaagcatgtcagctttctgtagttttgtgtatcattgtccttggaacttgttgatgagtacagattgttgtgtcctagtctctggcagagaacctatgccccctcgcgtttccatgttttggggaggactgagcacctacccattttttcctttgcaaagaaggacatggctctttgacttacttattgcatgataattataaaggaaggaataaggaaatcaattcttgaggccaagttgctttgccatttatttataggactgcgtggttaaacccttgctatcttttgtcctcatagtcaaagcttgggatgaaatggtcctcattggcaaatggttttcattntgctttgttcagatttattcctttggtntcacatatataatgtggtggagtacagaatttct

SEQ ID NO: 178427 - DNA, 244 bp, Homo sapiens
tatatggtgcaaatatgttttggctttagtagatctatctaaatagtctgtctaagtggttgaactagttaaccttctcaccaacaatttatagtagtatagttattctacagaatcctccccatttgatgtgttctcaagaccactcccaggtttagtgattttctaggaagactcataagacttagcccataatcatgctcgtggctataatttattacaagaagatcagcaaagagaaaag

SEQ ID NO: 178428 - DNA, 281 bp, Homo sapiens
caaaaacttcactctagctaagctatcttgttgcctactccttgtctgtaactgagccatggcatggggctgcaaaaaaaacgcacaaccacgctgttggtctcaccttatatttatggccacaaacctaaagtgggtttcacattgtccaacaatctttctctaagcccctagttatgtcctccttcttcttttccaaaatgactattttatatttcttcattttagccccatatgcactcccgtcccttcaccatcatcattctcagtggttgactttg

SEQ ID NO: 178429 - DNA, 137 bp, Homo sapiens
gaatcagtttagtggtgccactgggtttaagatgagtgagcagagaacaataagctgactgggaaatcgatgctgggtggtcagctagacccgctcacccactgagtagcacttccacaaagcaggctgtgactgtg

SEQ ID NO: 178430 - DNA, 187 bp, Homo sapiens
aaaaacaaataaagctcttttgcttctttgagccttagttttatcatctgagaaatggagatagtctctgtgttggcaacttcactggatattgtgaggatcaaattaaatcacgtgtatggtggcagtttgtaaatatcaagtgtcctgaatcacagagtattattttcttaaattgactaactag

SEQ ID NO: 178431 - DNA, 811 bp, Homo sapiens
tcaggagggtctctcggcagaacacgtggatgcccacccaccactgagcctcatggaggtggtaacatttggcgatgtggctgtgcacttctctcgggaggagtggcagtgtctggaccctggccagagggccctctacagggaagtgatgctggagaaccacagcagtgtggctggactgcaggattcctggttttcaagcctgagctgatctctcggctggagcagggagaagagccatgggtcctcgacctgcagggagcagaggggacagaggcaccaaggacctccaagacagattctacgattaggactgaaaatgagcaggcctgtgaggacatggacatcctaaaatcagaatcctatgggacagtggtcagaatctccccacaggactttcctcagaatcctggctttggagacgtttctgattctgaggtctggttagacagtcatctgggcagtcccgggctgaaagtgacaggctttaccttccaaaataactgtttgaatgaggagactgtggttcccaagaccttcaccaaggacgcaccccagggatgtaaggagctgggaagcagcggcctggattgtcagcctcttgaaagtcagggagagagtgcggaagggatgtcccagagatgcgaggagtgtggcaaaggcatcagagccacttcagatatcgctctgcattgggaaattaatacacagaaaattagcagatgtcaagaatgccaaaaaaagttatctgactgcttgcaggggaaacatacaaataactgccatggagagaagccgtacgaatgtgcag

SEQ ID NO: 178432 - DNA, 672 bp, Homo sapiens
agcggggacgcgggtggccaaggcccgtttcctggcggcgatcgcgcgtttgcgagcctcgtggtggtcctcagggagggcaggattcctggttttcaagcctgagctgatctctcggctggagcagggagaagagccatgggtcctcgacctgcagggagcagaggggacagaggcaccaaggacctccaagacagtgctgctgggttagggtctccctgactgaactggtctcggcaagtgacgtccattgtgggggctcgaatccaggttgaagggtcactggagcaacggagaatgtggaactaagctggaggacacccaagtactcttaaagccatccctgtggcgcggtggctcatgcctgtaatcccagcactttgggaggccgagacggacggatcacgaggtcaggagatcgagaccatcctggctaacacggtgaaatctcatctctactaaaaatacaaaaaattagctgggcatggtggcgggcacctgtagtcccagctactcaggaggctgaggcaggagaaaggcatcaacccgggaggcggagcttgcagtgatctgagattgcgccactgcactccagcctgggcaactgagcgtgactatgtctcgggaaaaaaaaaaaagtttgtgcatgtaaacacttgtactaagaatatc

SEQ ID NO: 178433 - DNA, 477 bp, Homo sapiens
aagccaaaccctaaagcgactcacatacacacacacactcacacacacacatacacgcctgctcacacacatatatgcacacatgtcaggcttttgttgtgttaaaaccaacataattactatcctttgtaaaagatttaaaaatggagaacaaaggaagtctaccctcagaagagaggaaaggtaaaaacaatggtgagggaaaagtggctatatcagaggctctaagaactctgctgtggacggcggtgagcccctctgtctttcaaattaggtcccagaagccatgccaggcattcagccgctcctaagtaggtggccagattgtcaacttctctggtagaattatggttcccgcgtattcaccacctccttccctataaggaattgtccaaccccccgtcccaatcctcatgattcacagtgctttcctgaaggagaaatggactcgcctacagccctggtttcaggctcggc

SEQ ID NO: 178434 - DNA, 461 bp, Homo sapiens
gaagagatgtgagcaggacttccaggtgagacagggagtgaaactcctcaggaatgaagaggagggcaaggattgggaaatatagagatggtttggggttgttgtatagaagatgaatgatcagtgtagcagggagtgagatgaatgagagaatcagaaatataagatgagaggagtggggactaataaggacagagaggatctcaagaaaaggctcaaaggtgaatttgagaaaagggaacttggtagcagggctctgacccatggctggccagcttgcttcctttcttccatcagttctcctacttgccaaacaaaaagtactgcagacctactatgtgcattattatggcattctttcttccttttcactccttattatcttgcccacattgctgcaggatgagatggcaaatagtgggaattaaaaaacaacgtatggcaagaatgcgtgaggtgga

SEQ ID NO: 178435 - DNA, 201 bp, Homo sapiens
ggtggggctggagacctagcatcctggcttcagagggaacagtgcagtgaggccctgttaataagtaacagtctgtctgtaaattcgggataagagtagtcagtgtcatcatggggataaaatgagctaggctagtccagagctgcacgtacaacaataggcgtttaataaatacaagctgtcaatgctcagcctctgttg

SEQ ID NO: 178436 - DNA, 139 bp, Homo sapiens
aattgggtgcaaggagttcagtcatatgtttgggatttttcggatgataggtgttgagcttgaacgctttcttaattggtggctgcttttaggcctactatgggtattaaattttttactctctttacaaggttttttc

SEQ ID NO: 178437 - DNA, 309 bp, Homo sapiens
ggcattctttagggtctataaagtgcttaaaggaatttaaggagaggatcatgaatttttttttacaactatgaatagtgtaggatggcttgggagtgactatattgaatagaactatttaaaagaactattcaagtaaatagatgtgtagaaattgaactcccttgttcactgtttaagacaagtgaattctatagtggttgccataaaaggaagttctaggtatttatagtagatgcctcttgtaattatggctttcttaaaactataatcctagcagaggacatcagatattgtgtagaaattgaa

SEQ ID NO: 178438 - DNA, 105 bp, Homo sapiens
caaagaaaacaaaaggcacagagaccccatagaaacagataactcaggttattctagacaaggctgagatttccattaaagacactcagtggtaatttcgttggt

SEQ ID NO: 178439 - DNA, 255 bp, Homo sapiens
ctacatatagaactcgagctggtaccctcgataagggcaactctcatggaacctttgctcactctcaggtgaagggatcttgcttggaggcccagacgttctggattttctctttagaaactgtggcttgaagcatcctcttcaggaaacaatatttactccttttgtatctccaaaacccctcctcaccccttttgcaacccaaacccaagtgtcttctgtgtcctatttttcttcttttgaggcagagtcttg

SEQ ID NO: 178440 - DNA, 233 bp, Homo sapiens
cccacttcggcctcccaaagtgctgggattacaggcatgagccaccatgctgggccgaaaaggatagtctttttaacaaacagttgagatagtcacctgttgcattcgtttcctagggctgcatagcaaaataccacaaactggttggcttacaacatcatttagtttcctacagttctggagactggaagtctaggcagcagggccttctgacctctctcattggtttatag

SEQ ID NO: 178441 - DNA, 206 bp, Homo sapiens
ctagaggttcccaaacgcagagaggagagcttaactccatttacatgcagttattaattatatgtgagccttttttctgtcatattaacggttttctggttgctttatatattctttgttcctttctcttattgtttgttatagtggtttgctgtctttttatggtagtaccatttgagtcctttctcttccttatttgtgtgttg

SEQ ID NO: 178442 - DNA, 389 bp, Homo sapiens
ctgctaaatcaactcactttaccatcatataacgtaggcaccagccccacaggattagtgggtttttctccctgtgtgcagagataagagattgtagggccgggcgtggtggctcacgcctgtaatcccagcactttgggaggccgaggcgggcggatcacgaggtcaggagatcgagaccatcccggctaaaacggtgaaaccccgtctctactaaaaatacaaaaaattagccgggcgtagtggcgggcgcctgtagtcccagctacttgggaggctgaggcaggagaatggcgtgaacccgggaggcggagcttgcagtgagccgagatcgcgccactgcactccagcctgggcaacagagcgagactccgtctcaaaaaaaaaaa

SEQ ID NO: 178443 - DNA, 287 bp, Homo sapiens
atagagggagacagggccattagggaagggcgatgcggtcgagaagaaggtaaagggcagacccctgaacgtaccagagggaggggtgggaaggaagacacagaacagttcagaggtactgaaaaactgagagaaaggagtgcatggaaagaggggagaaaataaactataaaaggaagtggtccaggcttgaggtttccactcctgcacatgaggaggttgaaagtcaccactccatcctaacaagcaggaagctgaacaagctgaaaatcaagcccgcttagatt

SEQ ID NO: 178444 - DNA, 149 bp, Homo sapiens
tgccatgtttaatattgttactttctaagaacaaatataatttttgtgagaacattatattactctgaaacagagaacagtactctctgtccttttagtccctcaatttttgataaggtaaaataagattatcttatatgactagtgta

SEQ ID NO: 178445 - DNA, 226 bp, Homo sapiens
tctactttggatatctgtgacattcattgacagtatttttagttgctagcgtctacttctggctcttcagtttatggctccagtcctcaaacattaggctataaatgaaaagcaataatcattgcaaaagtttttgcaaccctttgggagaagggactttatattaaaggctatgctgttcttgaggtttattaaatggatactttaattccctgccgaacccact

SEQ ID NO: 178446 - DNA, 494 bp, Homo sapiens
ccataatacagttgtttttctaagaatgaggtaataactgtccctttagttgatacacacttgattcagaaaattgtaaaattaaaaaacacatataattgcatttaactgtggttatgtgctaacttgcttcccatgcccaaatggctgtgctgccaattcatggcatagcaaagaagtctagtgcctgttgctgcattagagagtctagtgaaggtgacttctgccattcccatgtgaagtagagtaaaaagtcacccaaaaatctgggctagaatcagcctccagggtatgaagaggctagttgcagtagcaataacctgctttattgaacgacctgatagtgtgctaaatgccatctacgcattaagtgctttagtcatccccaaatgctatgaagcaggtattattattaatgcagtttttcatatgattaattggaagcatgaagtggaaatgaacttgcctaaagttacaaggccaagaagtggaga

SEQ ID NO: 178447 - DNA, 471 bp, Homo sapiens
ttcttactattgacgtccctcattcctataattatcacagaaaatagaaggcaaactattctgtttttataatgaagaagaaagtgaaattccatttattagattgaaagccaatactcaaacataaaggagagaacctggttctgacggtaaagttggacaaaaacaaaaggcaacattgtctggagtagaactaaccacttgaacatgtgttacatactggaagtcttaaagaaaaaacaaacttcactcataatcctagagggaagcagtgtgggtaaagaaaaggatgtgaatttaaaaaaaaaaatctctgtaattattagattctacggattggtttttcaaatacttatcaagtaattcagttaagcaaacatgtattgatgacatcattaagaagtattagagtcagatacaataggaatataaacataccccttgacttcataaagcttacactaaaaaaca

SEQ ID NO: 178448 - DNA, 491 bp, Homo sapiens
gacagtgcacattcttaagatagacatcattttcttcccaaactgaacattttcctttcttgctaaatatgtgtgtgtgggggggatataggcactatatatttccaactgaaattgtaatctcagcttctgagtttgccatcagtttttattatctccttattttagtttagaactccacatatacaaatgggtatttatcctttttcctcctgtattcttcttcttggaaaatgacatgatggctccaacaagtcatccaagccctaattctagtaggtggtcatctctgtctcttctctttcatgttccttataactagtctgttactaagtcctgccaattctacctcagaatactccctttcagtccccctactgctgctctgttgagcattgaggctctgcacttacatcaggccccatctgcatctctatgtccagtgttactcccctccagatcatctgccaggttgccactaaaatgactta

SEQ ID NO: 178449 - DNA, 132 bp, Homo sapiens
ccttcaaaaaacagaaaagaatggaacacttcctaacgttctatgaggccaacatcaccctgacaccaaagccagaaaaagatacgataaaattcaggctgggcatggtggctcacacctgtaatcctagca

SEQ ID NO: 178450 - DNA, 500 bp, Homo sapiens
ccaacgtccacatgctcccactatcccatctcccctagtctgctctccctcctcctaccagggaggagccatggatgccaactctccacatgggcacccacccacttcctgctgccttcccaagaatgtggctccagcaagggtcacctcttctgattcatcatgtcattcatcctctggagaattacttcaccaacactgcaaaaatggtgtggtttctcccacctcaacacctcaggatcccaaatatcccttcatcactgtggcaaatcccatgacggagctctacttgcctttctcttctctcaatccttgtgaatgctcccttccaggcttttcctgcaccaccatgtgggaacagctctcaagatcgtcgatgaattccacgctgccagagccatgagacgagtcttggtccttatctcaggtgacctcacggcagcagcactggcagaggtccccgctccatcctccgtgacaacactttcctaaggcctcaa

SEQ ID NO: 178451 - DNA, 591 bp, Homo sapiens
cttaccggcatgtgctgtaggccagcggcggtgttactttccagcctggggatgactttatggcgtgatgtctaatctccagtgggcaagtggtgaaggtactctagcatccatccagtggccagtcggccgagggcctgtctgctcatggggaagtgtcctctgatggcagcccagtgtcttgctaaccagcagaccactgcagaaggcaacgctggcctcctagaggtgtggcttgtttgcatctctatgtttgtgaccaagtcgtttccttccttggtctcagaatctgcttggcacttactaatagcatttgttcaacatgcatgatcccggtatgtgaagtacagatatgacatttataagccagacactgcgtttgactaatgttggcaaagtcacactaagagcctcccagtgttcagatggcggaagggaaggcagataggagtccagtccccaggactctgaggccccaccttgtgccttggtagaagtgaagacagatcgtctggggaagttggaagaagtagccgagacatttctcctggctcagagcagagggggatttacgctggcctacagcacatg

SEQ ID NO: 178452 - DNA, 1131 bp, Homo sapiens
tctgcagttctgctaagccaatattctctagaatgagcacaaaacaaatcgaataacagctaaacaaatcgaataacagctaaacgaatcgaataacagcttttgtacatcaacatcaagaaggaatacgcctgagagagatcagagtatatagatgaatatgaacaagaatggaacattcacttgtcaacgcactttctaaatctagatcagcagagatgggagtgattttctggaaagagatgtgatcatggattaaacaccagctcattggaaactcattggatgagatcagaaaacgttcatgaaaaatcatattcaggaaataaggaagaggaatataaatgctctagagttaacatgtaaaatatatacgtactgaggtttgtaaactgtcctttttaaatcaaactgaaaacaaaaagctttaacctttcaacagaatttttaaaaaggcagttagttctaaattattcctatctcaatagccaagaggctgatcaagcgtcatttattgaggaagcatcttagaaaatgcctctgaatgttttcataggagccgtgacctttggttcttcatctctaccattcatttacttcactgtgtaattagttacaaccactcagttattaagagacgtaacgcttcaaactttttaccaagtctgtgttctgtttaatctgtccatacaagttattactgagaaagtgtttatgccatatactattactccatcaagctgtatattacaggaagtacatctttacatcataggttcccaagcaacatagatttccctatctttcaggaaacagcatcaaggaactctgaaaaatatagaaaaagttcattttcaccttggaagctcacgtgtaatattataggctactatcaaataaacactttttttctaattctccctagtatatgcataggaatttaatatactttataaataagtatctaaaatgtctcctacttttttcctatttctttgccatacatgttatcagaaatccatgtcttctatttcccttactgatgggcactcatttttattttttaaaaaatcattccattaaacatatttctaaataatagtaagtggtactaacaaaataaataataat

SEQ ID NO: 178453 - DNA, 566 bp, Homo sapiens
ttcaaggaagggctgccttttcccgtttcacacagatgtgccttatgggctagcacaggccctgataaagccagactggggggacagatgatgaaatattagagcagaaatccaaaggggatgatggaacttatcttgtccccaaataggcatcctttgacccctaattaaaatgcctgtgccaagcatggggaaataagaacaagacatgtcacagccccagaaagcttacacagggcagggggagagaggcatgtgactggagacaaagcacaatagtaccattgctttaagcatggcaaccatatttatttgagtgtcaaatcaggacatagtgtacattgtatgagcacacatacagggctcacaaaaaggggtttttgactttaggagttttctggtcaacctgagcatgagtctggaggagttatagcagagttttgtacagagcatggatgcatcgaggggaaattttgctgggagagtcaggaaaagttctcagaggagatattgaatggtggatgccagtttgccgagtgatgatagcgaagggtgtctaggcagcg

SEQ ID NO: 178454 - DNA, 745 bp, Homo sapiens
gctgctggcctgttactgcagatgtcgtgtggaatacagtcagcatctactggttatgcatcttccacattcatcgcattggaaaccaggttatcacaaaaggaaagatgggtgtgcttccaagcaccgtgttacttatgttttcctctaaattcaggattaggcaaaatgttgggagaaaaaaagtctgaagacattaagtggcttataggataaatcacatagatttaaaaggagtggtttccctagaagacataagttttcttaccctgaaggaatctgtaaatatgagatatggtgcacataccagcaccatttaggatatccagtaagtgttaaaggcgaaattccacagagaaaaaataacaacaaaaagcatatccatttgttcatcaaacatctgtttacctgctaggggtcaacattgttctagacaccatgaatacaacagtataacaagagtggcaaaccccatgcctttgtagagctcataatctagtacagaatactgatataaattatagattgagtatccctaaaccaggaatctgaatctgaatctgaaatgctccaaagtccaaaactctttgagcacctacacgacaccaaaggaaagacccaccggagcacttcaaatttttggatcaggaatgttcaaccatgtaatacaaatactccaaaaattttaaaaatatccaaaatctgaaacacttctggtcccaagcattctggaataaagaatact

SEQ ID NO: 178455 - DNA, 242 bp, Homo sapiens
tcattttaatagctgctaacttatagggtatcgatccgattacgtgctcattgtcattgctgtcccctctgtcctaccgtgatccgtaaattctgtcgctagttgaagtgctacaatatgggtatttcctcaacttagacttgtacagataggtcatagtaagacgcatactggcttctctccatatctacccaaaaggttgttttagtgtgttctttcattgtattcctgcgaacctatcc

SEQ ID NO: 178456 - DNA, 427 bp, Homo sapiens
gggaaattccctggccactggggtaatgtttcagagaggaatggaaccactttcgctgcatcccatgcctttgacaaggcagatctcacacccacagacttctgctggcagaaagctgcaagggccggctgggtcccacagtgcaagactgccacacactgcaagacttcccccgcaagacagaaaccgcagctcttaggccacaccccttctagtttggcccacgaagcaggggcacctggctcctgtgtccatgccagaagcatgctttatgcttaagattaggttgcaaatctcgcttgggagcttctttcagcctgtggccatctcctgagttagctagcagattttcacgtgggcgtctgtgagttggattaggagtgtcttccttctgcccctcctggcgcctgggcgggcatgcaaagca

SEQ ID NO: 178457 - DNA, 592 bp, Homo sapiens
ggaaatgccttcagccacaatttcacagttgtttagcaacagagagtccacactggggaaaggccttatgggtgtagagaatatggggaattctttagacaggcctccactctcaatatgcatcgagttcacactaaagaaaagtctgtgcagcaaattaaaccctttcaacagcaagtgagatttactcagcatcagcaaatccacattggagaaaggccttatgagtgcatctcctaagagatgtgagttggagaccctgcctttccatctggagcagtggttaaatttgacagctactactctgatctctttcaacaccaaagagttcacaccagagaaaaaccttatgagtacagcaaatgtgagaaattatccaaagccccagcctcagtaaacatcagagagttcactctgatgaaagttttcatgagtgtagtgactatggaaaaaggtcagggctgggcatgatggctcacacctgtaatcccagcagttagggtggccaaggcagtaggatcgcttgaggttggaagtttgagaccagcctggacaacacaatgagatcctcaatctcttcaaaaaatgaaaa

SEQ ID NO: 178458 - DNA, 224 bp, Homo sapiens
tgctgacaaacagagccatgtatctaattgttaacttcccacagcaacctgtacagccctccagaatgaagaagtttagttagcttgttataaggttaaaaaaaaatccaagttctcatatcaggtttcattaggatgaccaatcatacattcttaagactaaagacacttggacctggtcctcttcctggtagaccaactttgagctgtttaaaaaaaaaaaa

SEQ ID NO: 178459 - DNA, 185 bp, Homo sapiens
actatgttttcattgcaccatcttgtcacatgccttgtctttatgtaaagacatagatatgtaaatgtagtatccccaaattgtagttaagggagcaggctcagcactggtaagtagcttgctcatcatctcatggtgaagaagtagctgggctgaaacttgaacccaagtggttagactcctgg

SEQ ID NO: 178460 - DNA, 971 bp, Homo sapiens
cgtggcttagggcaagttattctctgtggttgagcctctctccattgtccctttcagttccaaaatggatgattccacttaaaaaaacaaaatgtaaactcactttttttttttttttttttgagatggagtttcactcttgtcacccaggctggagtgcaatgcgtgatctcagctcactgcatcctccacctcctgggttcaagcgattctcctgcctcatcctcccaagtaactaggattacaggtgtgtgccaccacgcctggctagttttttgtatttttagtagaaatggggtttcaccatgttagcctgggcaacatagtgagatcccagtctcaaaaaaaaatttttttctacctaatttccctaaagaaaacagcctggacagctgtccagaaggccaggaaacagtggatactacctttttgttctgtttttttttttttttacaggtctttgcaaacttgctgttgtgtatgtaaccttttctcagcattcctctggttcaaagctgtgaattaccattttggcactgggaggcggtgttgtgtagaaggagcctggtctttcctgcaggttctcctccattcctgcctagctatgggactttgcctgagatgcttcattttctacttgttccagaagagtattgtgagccaccgcgcccggcctcttgtagatttaattggaggaactgtctaataggcccctcaaactcaacatgtccaagattgaattccaagtctcccctcatccctctaccacctcaagcctgctcctctgagtcctcagcctctcaggagtgctcaggccagaacccttggcaccctgcttgcctcctgcttgcctcctgtctttcatagccgacatccagtcagccaattctatgagctccaccttcagatacagtcagaatctgactacttctcactaaccctaccactacacctctgatacaaagccacca

SEQ ID NO: 178461 - DNA, 590 bp, Homo sapiens
tcccgagtgcgcgacggaatgagactgttgcaaaacagataaaaaaagataatttacggccaggcagtggttcatgcctgtaatctcagcactttgggaggccaaggtgggcagatcacgatgtcaggagttcgagaccattctggccaacatggtgaaaccctgtctctactaaagatacaaaaattagccaggggtagcggtgtgtgcctgtcatcccagctacttgggatgctgcagcaggagaatcacttgaaccagggagttggaggttgtgagccaccgcgcccggcctcttgtagatttaattggaggaactgtctaataggcccctcaaactcaacatgtccaagattgaattccaagtctcccctcatccctctaccacctcaagcctgctcctctgagtcctcagcctctcaggagtgctcaggccagaacccttggcaccctgcttgcctcctgcttgcctcctgtctttcatagccgacatccagtcagccaattctatgagctccaccttcagatacagtcagaatctgactacttctcactaaccctaccactacacctctgatacaaagccacca

SEQ ID NO: 178462 - DNA, 447 bp, Homo sapiens
atctctaggggaggtcccatcagcagctcccatgatcacatttgtaaaatgccaagatgccattcaaagtcccaggaagcaactaggcagccagccattctcttcccatctcagctctgttggaagttgctgacctacagctcaccagtaaatgtgtaccaagcagaaatcaattaaaatcagccacacttgctgctgcagtctcctctgtccccatcccatggcagggctgagggctaaggaggcagacagaggagctgttgcaaggacagtgggaggggggccactggcacagtacctcttgctgctccatggcaacggtagctgctagacagcagagcagcaacaacacactgcagcaagagaggaaagtctgactcctctcgccaggcaaagcaccaggccattcacaaggccagaagacaggaagaccccggccctaaacag

SEQ ID NO: 178463 - DNA, 369 bp, Homo sapiens
atgtggggtctcaagactggacagattcttaattagctgacttgagactcccaatgtaggagttttgggagactcctttggaacccaaattcctttcccccaataatgctattaatacagaaatctggctttggagtgacattgcttcctggggaaggatcgagattaattgcacttttcatgccctgtactttctgcattacctgtaataataatgtacatagattaggtagggaggatattaaacagaaggatttatgaacatttgaatattaagttggttatctgtggctaccttaaatgcaaggttgtcaaaaataattacagtatactagcaaatactggctaccagagacaatataaataccc

SEQ ID NO: 178464 - DNA, 436 bp, Homo sapiens
tctgtcatattatgtacattttaatttttatgtccatcatctgctgttgcattttaaatgacaaagaccttaaatctggcaaccccacatcaaatgtcccttctgtccctgtctcagggagagaaggtgcttcttggatgcactttactcctgtaatcaggagggccatggccagcagctctctggcctgccctggtgtgataatgctatcagctggttgtgggagtggctgccccagcaaggcctgctccttctccttttcgaagagtgctggggcagagaggggaggagaggagaggttatggttagctgtgtcgggtgtttggaagcattggcatgctgggtagacttgaattggagcttggtataatctaggtcctgtgtgattggaaagatgtgtttactgcatcagtatttattgaacaaatctaatgtg

SEQ ID NO: 178465 - DNA, 385 bp, Homo sapiens
tacttgatcttccactgctttatatacaccctaccctacacacagtctaactgtattattcattgttcccaaatagagcctgtccttctctgcctctatgcatgttgatcactacacttggaagaaaatccccaatcccttagtatgtattttgacatattttataaatcccactcatccttcatgcccttaaaaaaaaatcttttactgattttcataattttcactactaatctgctgtgtcatttctttcctattttaattaaaactttttaagcgtgaaagaatatatacacagatcttaaatacacatactccaatgtgatgaagttattgatagtttgtcttctccctattttccaaattttctacaacccctgtatta

SEQ ID NO: 178466 - DNA, 503 bp, Homo sapiens
ctatggcaattaagttggatgctgttgctacaaatgaatgagtcaattaacagggctattaatttgggatggtaaaggcaatgggatgaagggttggaggggagagtccaacaaatctataatgatgctatacttagactgcttgataaattcagattctgctgaaagtctgaaaatggaagacagtgcatttcaggtgtggctatttgggaacagtgatttagaagtccaattagcagacccaggtgcaaagaaaggcctttggtctcgcgtcacaaaatgggagaataaatagatatttacattagttaatgtaaaatgtataagccacggatacatctttctttgtttcaattccgtgctttaactagcttttacaataggaaatggctactcttgtaattctgtcttagtccatttaggcccctataatagaatacccagactggctggctcatgaacaaacatttatttgccaagttctggaagcttgaaagtccaag

SEQ ID NO: 178467 - DNA, 452 bp, Homo sapiens
gtatcaggagagaaaatgtgtttgagattagcacgttatcagaaaaatgtttgcacttatcttattctttgaataagttgcaagctatttctcttctttcacaaaggcaaaatagtaagccaaacctgtaatcagaaaaatattgatatgttagatagagaaagttatttttgtgtgtttgtttcagttgttgaatcaactggtatgtatcgagtacctactgcatgtagggggattgtagagaactttcagtgtcaagttagagattttaaactttatcctagaagtagaacgagaaattaaggcactgagttagaaaggagctagaccatgatttctcccatatctcttgtgcaaatggcactagccaagccagaagcccctatgctgttcctccatgtgcccctgcccagccattcagcagccttggtgctgagtctgcctgggatatc

SEQ ID NO: 178468 - DNA, 404 bp, Homo sapiens
agacgaccaatagacatccttggtccctcctttaccgcgctggggatggtgagaggtgttttgcttgtgacttggtggctgtatatccagttctcagagctggtttcaggcctggatgactcctcttaatttctcacctaacatgaattacttttgaccacatgtcaacatatttagactgaagttatggagaaaggttaaagtatgatcgctagagatggcaaacgttataattatgattaacaacagctaatatagtagcatttaccattcactatattgtgtcacttaaatatactggccgtgcacgcctttagtgccagctattcaggagtctaagttccagaccagcctcagcaatatagcaagacccctttgaggtcccccctttcccctctccccat

SEQ ID NO: 178469 - DNA, 176 bp, Homo sapiens
acacttttttcatctttgaatcacctgtttgctgcccggcttatatttatacttgctgtttttaaacatcatgaatatacgatctctgatatgatatgatttataaaatttgggcagcaatggctgccttttaggagaaggacaggcatctgggggacaagcaggggtggcaggga

SEQ ID NO: 178470 - DNA, 543 bp, Homo sapiens
tggtcagcaaggccagcgttcgggaagaaagccagacatagagcagaggacaaagtggattctgacagacatttctgaatctgtctctgagtgtgaaaagatcatgaaagtcatcaaagtgtattcatcatgcctcactctgctttccaaaatcttgttccatttttgtcccgctcctaacccaaaccatgtagagaaaagatttctgggaaacactgttactaccgtaaccaaattgactcagtaaaatctgtcacagaaccacatcaaatattgaaaatttaaaattgacaacagtgtgaaatttgtttttaaatcatttttattataaaatatgcataagatgtaccacgtaaagcaatttcaagtgtacagttcagtgacattaagtacattcacattgttatgaaacctgtcaccaccatccacatgtagaacttttttcatcttcccaaactgaaacttctctaaccattaaacagtaactccccattccctctccccttttagcccctgccaaccaccactatcctttctcttatg

SEQ ID NO: 178471 - DNA, 585 bp, Homo sapiens
ggcggtggctcacgcctgtaatcctagcactttaggaggccaaggcagatagatcacttgaggtcaggagttcgagacaagcctggccaacatggtgaaacccccatctctactgaaaacacaaaaattagccaggcatgagctgctggccctggccaagaacatacattctgattggggcaggatgaacataagagaacaaaaatcttctctaatctaaatcttacactaattcaccattaatggaagtccatagtcgacccctaaagttggtgaataaagacatgacaatacaaacatatatttagaaacatgaagtaaatgctcaagagatgcaagtgggctgcttcttctctagaaagacagaagatgatcggccgggggcggtggctcacgcctgtaatcctagcactttaggaggccaaggcagatagatcacttgaggtcaggagttcgagacaagcctggccaacatggtgaaacccccatctctactgaaaacacaaaaattagccaggtgtggtggcaggcgcctgtaatcccagctaccaggaaagctgaggcacaagaatcacttgaatccgg

SEQ ID NO: 178472 - DNA, 501 bp, Homo sapiens
gctagtctcaaactcctgggctcaggggatcctctcatctcggcctcccaggcatgagctgctggccctggccaagaacatacattctgattggggcaggatgaacataagagaacaaaaatcttctctaatctaaatcttacactaattcaccattaatggaagtccatagtcgacccctaaagttggtgaataaagacatgacaatacaaacatatatttagaaacatgaagtaaatgctcaagagatgcaagtgggctgcttcttctctagaaagacagaagatgatcggccgggggcggtggctcacgcctgtaatcctagcactttaggaggccaaggcagatagatcacttgaggtcaggagttcgagacaagcctggccaacatggtgaaacccccatctctactgaaaacacaaaaattagccaggtgtggtggcaggcgcctgtaatcccagctaccaggaaagctgaggcacaagaatcacttgaatccgg

SEQ ID NO: 178473 - DNA, 624 bp, Homo sapiens
ggatgcccaatcagatccttattcttagggaattcacttgcaagcattatatctcaatatattgtttgagttctagcccttctttcctggggttttgaaggtgacataccccacatcacaagcaaagatttaagaaactggtcaccaaatttgagaccaaagtcttcagtgctctcataaagcactgaagtttcacaattttcttcctactttgaaagtttaagtctggagaaaggagaaggagaaagagggtgcaagagggtgactgggaggagagaggaacacttggaaggattagatttctccaactgagaagggaatgaaagatcacaaggaatagacagtaaagtgaaggagactgcagccaagctgcccttgagttgtaagtccctcactgaccttggtttgaggtcaaatcaaggttcaacaatcttggacactgttgggcctccagaacttgggggctcacacttcttgcatgtgattaggggcactctatgagagaactaaaccaagcaactgggaatttccttaagagttgggcaataatagaaccattgtcattgttacagaggccttataaatcagcattgttgtaggatggcagaaggagcaatatggagg

SEQ ID NO: 178474 - DNA, 296 bp, Homo sapiens
cctctttcttttgctgctgttactgttctagcccaggtcttattacctcttatctggcccattgcctcctaactagctgacctatctctagtcttcgaattttatttatcctctactctgaggctaggtgagtgatcttaagttgagttttcatcatcacacttccctgatgaaaaagacgtcggtggcttcctcttgcccactgcataaaaatgtcaaatgtgctgggtgccgtggctcacacctgtaatcccagcactttgggaggccaaggtgggaggatcacttaaggccag

SEQ ID NO: 178475 - DNA, 112 bp, Homo sapiens
atgttagcatgcaataaagagtaagattagacccctgagaatttctgatgtatctactgaaataaaaaaattcctattgaaattttttaaagtaaatttgtaaatgattaaa

SEQ ID NO: 178476 - DNA, 981 bp, Homo sapiens
  misc_feature (6)..(6): n is a, c, g, or t
tctagnaggatcccccaacgctgctcacagagtagtgacggaattgtagcatcactatcatctagaaacttgctagaaatgcaagtgctgaggccctacctctggcctcttgaatcaaacactgagggtggtgttcagcaagcttttttattctgtctcaaaaaaagaaaaaaaagtcatgtttgtgggttatctgtgcctagggtctcttttttgccctcatattcttattaaaattcctgcattttgggtttggattctgctgtgaactgtaggtgcttgttgtgtctgtgtctctcttgaccaaaacactatatgtttgtctttgttggtccaatgaaagagcttaacagttttatgtgttacatattttgtagtaaaatgtgtgttgtcttgtgagaatgtaagctccacgagggcataaactttgttttatacattattgaatcaccagtgtcttacacagtaatatttattgaatgagtaaatgaaagaacccaggtgtattgattattggagaactgttacttgcatcagccaggtgtttactgttttgtttgccctggtaaagaacgtcacttaaaaatcacataggggccaggcacggtggcgcatgcctgtaattccagcactttgggaggcagaggccagcggatcatctgagctcagactcacatagggcttgataccagggaggaacttggagttatctttttcacctttgtctactgtatttaaaattactactatcagacttgggccaggaaaaaaatattgctctgctctttcataattttggaactttttttctagaaatcaatcttgtaggaattgattgggactcatcctaagttctgaagacatggaaaattgtttgaggtgacacaaaatgatggaagtttttattactgatccagaagctctaatgtaccttttgctaatcaactggattgattggatgctttacaaaggtttaacatt

SEQ ID NO: 178477 - DNA, 297 bp, Homo sapiens
gcttcaaagtatgtgtgaagattttttgtataattacaaaatactgattaattaaataagtactatgaattttatagagttgttattttgtgaaagatgtgataatggatagattccatgttttagaagattgctattacctgtgcctaaggatcccaagtgcttagcactacttctaaaaaaaaattctggtatgcccaatcacagtgcttagaaaaacataaactctaaagggttatctttttacctgaacttgtaaagttgcatcaaatgagaggatagccttcagtgaatcag

SEQ ID NO: 178478 - DNA, 317 bp, Homo sapiens
taagattcaggcttgcattttcaccggatttctgctggaactgcctccaggctttgggcttcgctgtaagctcctgtgtttgtgtgcactgcagcccagtcgcctaaacagcagacatacattttctcccattctggaggctggaaatctgagctcgaggtgccagggttgctttctcctgaggcccctcgtcttggcttgcagatggccgccctctccctgtgtcttcgagtggtctttcctctgtttatctgggtcctgctctcctacttgcataaggacaccagtcgcatcggattagggcccaccgtaaatat

SEQ ID NO: 178479 - DNA, 313 bp, Homo sapiens
atgtcccctctcgttaaaggaataaacaaaatactaaaaccattggaactttctggtgatagtcagattttttgagaacgttgtgataaatttataggatagctttggatgtttaagtctcagccaatgcattggtcatttttaatggttttcttaaatttgtgcagtgtccatctgaccatttgaaaatgtacagcctgatgtactttgaaatttttctgcatttgggatatatagatagattagattagatagatagtcctgtccttcgcagcaacatagatagagctggaggccatttttctaagcaaaa

SEQ ID NO: 178480 - DNA, 498 bp, Homo sapiens
catccctcggtcctctcgtctgtgctgtgggagtggggagcggcaggtctttcatgctccttctgctagtggaattcctgctttctagcatcccttcatttcatcactgggtgcttgtttgctcaggattatgcctcatcttcgtaagtcagacatgatcctggcgcttcagacactcagctttgcaactccctcaaaatgggagccacaggcatgtggggggttgagctttatcctgcccagcccctcgctcagtgggggtgaacagagtgagaggcaggacttgaaagtatttgcccagaatcatacagcaagatagcatcatgtgcaagaggcagccatgtgtactccgagtccacactgccattcttgttggcctttgcaggccggcctcctgaaaaacttgtctctgctcacttcttcagtctcttctccttctgtcttcccttcaacctactctaatcagaagatagagacagaagtaagcagtgaactagg

SEQ ID NO: 178481 - DNA, 475 bp, Homo sapiens
taaaatgtactataagccaatgcttcttaacatgcatttgaatcatctgggaatcttactaaaatgcagaccttgattcagtggctctagggtagagccttagattacaaattccaacaagctcccagcagatgctactgccaaaagtatacggccctcactgtgagtggcaaagccaccaccttttagcagggcatgcagtgggagtggaaacagtcacgcaatcatatctaccctgttctactgcaagtgagacgatgaactcctgtcttgggtctaattttccatggtagcactttaccccagttccacccctgttcattcactcaatacacaggaaatttacatatgtaattcaaaacaaagagactcccttctactgcaaaacctaaaacagtaaaaagaaacagcattcgagagttgattatgttcacactacagctactgaagcatttttataatcactgtgtcattc

SEQ ID NO: 178482 - DNA, 484 bp, Homo sapiens
gtgaaattatgaaaaataatgaatacaagataaatgtgtccccagtgtcagtcggatgtgtaccttctctgttattttccagtttctaaactgttagcaaattaggaaacatttccatctccgtcagtggaggattcactctgcttccaaagtaaacacattcgtgaagaagtgcgtctatagcgagaggctctttaacatagaacagaggcatttaaatcgctttcaatttggctaatatcctgaggaatcttaaagctatatctttactaaagagcatcaaatacttccaaagcaattgggattttccctctcatttctggaggcagataaatacccttgaacgaagcagcgctcggttacttcattacttctcatatgtttgctgtgagatattagtaaaccacagccatgaaaacagacattccttccacttctgcccaagaaggaaagttcataatttagagatttctgcacatcttga

SEQ ID NO: 178483 - DNA, 541 bp, Homo sapiens
tatgtgtcaggcactgggctagaagctgagaagagaggggaatgtgagacacaatccctccagtcaaagagcccttaggccatgaaggcaggcactacaaagacagaatgagatgcaatatggcaggataacatttgtatacagaaatctccatttctatgaggcaggaactttccccagcttcacgaagatttggcaggggttcagagaggttaaggtcacccaggatcatactaagagtgcctaactatagagccttgggttgccaaagggtccacagcagctcccaggagaagggaggtacatttgtgaggggcctgatatcaggaccctggggcaccaagtgggtcaggcttcccggggagaggcaaggtggctggaggatagcatggtgtggtgaggaaaggagggcaatggcaggcaggcactggtccacagatggtaagtggcagggccacaagctgcaccactgcagacagttggtagaggccagcccaggctctgaggccaatctctgttcaacgctacaaggcaagacttc

SEQ ID NO: 178484 - DNA, 496 bp, Homo sapiens
gtcttcattttcccccaccccaatcgccaccttctattttctgtcacagaacctatgagttctaggccagacctttgaccacaaaactgactgttgtttccctctggccatacggagatcattgctcagggaaaactttggctcaaatggtgaatttaaggtttctaaaggcactagatagacatatgattataaaagcaagagcttctgtacagtctggcctggaggatattgagaagcttttctctctggcctagtgtatttataagaactggatgtacttgatctcgggacctcaccaggcttggaaagtaagccaaccgaaggtaagtagaaatggaagatgtacacctggagccctctaaagggaagcaggctagggaaatgactgatgtctggaaatggcatgaaagtggcataatatgcagggctacctgggcagccagccgtctttatgttcatctggaacagcagtccctgtgtgatttggtcaaag

SEQ ID NO: 178485 - DNA, 601 bp, Homo sapiens
ttaaaaacaaataggataggtataaaaactttctcagctcaacagttttcactaacgcctaaaatacgagcaatcctactctaagaccctattttctttctaaagacaatcctatgaaccgtatcttgctgggttaacacactcctgatagtagccagtgcccctacaacattaaaaaatggtcatagagatttccaaagaggtcacggggatcaaggtgaaccaaatattacagaagaaaggagttaagggtctgagattcaagcttagctgaaccatttgtatgttctccttggatttcagtttcttctgtaaaatgggacaccgccacctgcctcggaagatacttctgatgctcaggagagacatgaatacaaagtgctttagagggcaaggtttaacatttatataggtgtgggccttactgccaccttagcccagctgcctcttcaatagcccagggtaatacctcatgaggagcttgtaaacaaagtcctgaggccggatgtgccagcattaagagagacttaagaatggcaactacagtcataatgaataccctctgaatatttatgtcatacctgtcaggaggggccatgtt

SEQ ID NO: 178486 - DNA, 253 bp, Homo sapiens
acacgttcatgtgtgcacttgtatgtgtacctgtgacatagctgtttagaatggttggaccttcagatggattggccacagacctttctgtcatgacacagccttgccagtcattctttcagcttcctagctcccctggcagtggtggagaagatcccaagttgttatcaactgaacaagtgaaggaaagttggttattttaaggcacatgaattattttaggatttctggttgtccctggctaagtttttga

SEQ ID NO: 178487 - DNA, 349 bp, Homo sapiens
  misc_feature (57)..(57): n is a, c, g, or t
aaaatagatagatagataaatagattgttttacttgcatgcctgcagttgactctancagtaccccaaagaaaagttgaaaaacctccgagctcaactaagaatcagtttctagaataaacagaagtataaataattatacctctttactttaaaaatattacagacattataagtattttaataacaaaaaatcaaatactttatatatgctttgtaatctgtcctttacaaaatcatttaacctttatgacaggagctactatggtgctcattccacagatgaggtgctgaggtttagtgaactgaatagcttgttcacagacagctggagacagagactcagtttg

SEQ ID NO: 178488 - DNA, 235 bp, Homo sapiens
ggcttttccttacacaccaaacatttctcacagagaccaactgggtgtcctcttattcaattcaatcctgacactgtctacctgcagatagtgtccaatcccacagattgacggctcgatcccatgagaccagccccacttcaggcactaattccaagtccaggcgacgcatacttctgactgcctggctaaaaactacatccacggccggtcatggtggttcacgcctgtaatc

SEQ ID NO: 178489 - DNA, 402 bp, Homo sapiens
tatatagtgaggagtggattcacgtgtggtttgtatgttgtattttaatatgaattactatgatggttttggcaaaggaagtgtggaggatcctgacaaatatttggtgatttataccagctaatatttaactatggaaattaaggatcagtggttcaaaacatcttgttcaacctcagctccttagcacgatctttactgcatgctggaatgggctgctttattgtggccaaatatagcggccacagtacatatctgcatgtatctagagattccatccaaacaggtcctgttcttgcctgagctgctaatgctagaacgttaggtttcagatcagcctaaccttgatctaaggttgccccggtattttgtttagttattgtaacgtcaactgccgtagta

SEQ ID NO: 178490 - DNA, 196 bp, Homo sapiens
tttccctagacatgcacaagccaaccccactgtcactgcagatacaggctggcctggaaccaggcaccttttgtccatagtccttcacacagttggtaatcacatctatttggagttcacttaaggtcttgtcttccaggactagatcacagtgtccaagaagaaagggatatgtttattttgttcccattatagc

SEQ ID NO: 178491 - DNA, 350 bp, Homo sapiens
ggagtgctaagtcaatttcagttttcaaaggtgtgtaagtctttaagaaattactcttgttgtaacccaaactcatgaaatgcatgcctcttaaagcacccagtcttttttgttgttttttttgagatggagttgctctctcacccaagctgttgtgcagtggtgcgatctcggctcactgcaacctctgcctcccaggttcaagagattctcatgcctcagcttctggagtagctggaattacaggtgcccgccaccacgcccagctaattttttgtatttttaagtggagacggggttcactgttttggccaggatggtctcgatctcctgacctcatgatccgctcg

SEQ ID NO: 178492 - DNA, 324 bp, Homo sapiens
tttaaacccttgttagatggcatcaattagacttctcaatgtttcttcatgttttctatttttatctaatttttgtgaattttgtaattctccatgttagttagaattatttagaaatggcttctttcaagtagagatgatttgtgtaagtttagtactctagaggatgaaattatacaaacattaaaagttgagtaaaacattactagaaaatatttgggatgagagacaatacttgctgaagtctctttagtgccttttacggcagacatgacagccaatcctgatccagactttgctcacgctctgtagaaaagagaaagt

SEQ ID NO: 178493 - DNA, 470 bp, Homo sapiens
ttaccccagggccttagtcggctcccaagtctctgcctttcacctgagaaagaatttccaaactgcctgatgagggagaaaaccatatccatggtcccagcggtctggaggatcccaagaatctggatgggaagccagaagatatgccagaaaagacccacaaatggtaccctgggatacaaaaggaagactcctttaacgccagccaagagatgtgtgtgttactgtaagaagccagtgtcatgagctgaagctctaacttgcctgtgatccattagtctcacctggtgcttgccgctgcccctgttccggccggacatggccctctgtgtctgtgcctgccaatcagcctcttgcccatgcctggctgtgcccttcacagctgcctctgccagggcactggctgcgggctgggccaggtcaggctgcttcccagctgggctccccacagccacagtcaactcccattt

SEQ ID NO: 178494 - DNA, 349 bp, Homo sapiens
agagtgcagtggtatgatcacggttcatggcagcctcgacctcctgggctcaattgatccttagcctcctgattagctgggactacacgtgtatgccaccacccatagctaatcttttttttatatacttgccaggcagtagagggaacaaatactttagctttgagccatggctctccaccctaatggaacaataaaacgattaagggatgctaaaaaaatacagatgccaggcctctctcaggccaattcagaatctcaaagagggcagtgtagacatttaaagctgcccaggtgtttgtaatttgcagccaatgtggagaaaaccactgaactgggctggccacgg

SEQ ID NO: 178495 - DNA, 182 bp, Homo sapiens
ctagctaatgagaccaaacaggaatgatgagagaagtacgcagggcagaaagaatgccatatccaaaaccaggagaaaagaagtgcaaggagggacaggttagtaatgccatgtaaatcaatgataccaactcccagaaagtctgataaatcattttttaaatttggcaacgtgattgcttt

SEQ ID NO: 178496 - DNA, 287 bp, Homo sapiens
gcttaaaataaaatatgtacatctactaggaaattagtaccaacacatgaatctgtctgatgggcagatattaggaatgaagtcactccagatctgagaaattaaagttgtaaaggactgcaagttctgtgtttttgttgttgttgttgttgttgttgttgtttgttttttcatttttgttttttgggtttttttgagacagagtctcattctgtcacccaggctgtagtgcagtggcacgatctcaactcactgcaacctccgtctcccaggttcaagcgattctc

SEQ ID NO: 178497 - DNA, 390 bp, Homo sapiens
cgtctaactgctctcctgctgtctcctttcctagtcgcggtcctcgatcttgcctgggctgccagatcacccgatctccgggctttactccgttttgtaggccctttagtgatgtgtttaactttatgttcctctcgagagtctcattaggtatttttggcatttcattttttaaagacctagcaagttgagtctcagagtctcctctttaaaaacaaaacaaaaaatacggggtagaaagttgaaagagctattgagtggggtaaaacgacgctcagaacaaaggtcctagttgtgttagaaaaaaaggcaagaggcctgtatatgaggcctgtgtgtgtcgcatttacaccccgggggggttgaggaatggaattagcagaggtttag

SEQ ID NO: 178498 - DNA, 378 bp, Homo sapiens
tgtgtgtgtgtatttaaatttaaaatacaatataactttggcctcaactactttattttcaaagttatttaggattgctgattctcacctgtctcgaatcttttatgctattaagacatccagacttgaatgatatgattgcaagttacttctgggaacagctttaggagtaggcagaacagactgcagatgataaagtccaccttgtcttttttttttttttttttctttttttgagacggagtcttgctctgtcgcccaggctcactgcaagctccgcctcccaggttcacgccattctcctgcctcagcctcccgagtagctgggactgcaggcgcccgccaccacgcccggctaattttttgtatttttagtag

SEQ ID NO: 178499 - DNA, 499 bp, Homo sapiens
acatgaaggagcaagttatataaatatccaaggagaaaacattgttgatggaacaagaatagattatgtttggcatatttgaggaatagccaggaagtcagtgtggctggagtggagtattagaggtagattgtaatgtatagaagaggtcagagagggggtctagggattaagtcattagtgccttatggatgttggtagaaagcctttgaattttattttgagtacctaatgagaatcttttagaggatttttagttaataaatgacatgatctgagtgaatggtttgctgggctataagactggaagcaagcagaacatttaggaggctgttgtgtgagtccagagtagatgagaagtggtcagatttgggatatattttgaaggtagaaccaataggatttgctgatggaaaatgtgaggcatgagagaaagaaagaaatcaaggatggtttcaaggtttttgctataacagttacagtaggtggtcctatataa

SEQ ID NO: 178500 - DNA, 310 bp, Homo sapiens
atcacctgcgtacatccccctccttcttccctgaactggcatcctgctgaggtgtcctcgtatccctcagcctcatccacctgcatttcatccccctccttcatccctgaactggcaacccactgaggtgtcctcttccctcagcctcatccaactgcgtttcatccccctccttcttccctgaacgggcatacccactgaggtgtcctcttccttcagccttcatcttaccggggcttggtgggggcacaaagccatcttgaagttcagctcttctcattcctaactaccccactactgttgtctcatc

SEQ ID NO: 178501 - DNA, 494 bp, Homo sapiens
accagggagggtggctaaaaataccttggtcaggggcctagagattgcacttaggagactgctttccagaggcagcccggggagagccgacagcagtgtgggcgccagggcccccaccagctacaaaggtcagccagcccccagctgccttcaggtgggtgtttctgccagttctcctttagtgttcaggctcaaatgaaaggccactttcagcaagttttcctgacattgtcggagactggagccaaggccctgtctgttttactttctgaaagagccagtctgagagatggatgggttggcgactgaacaccacaaacaacagcagtgggctttaacctgatggtggaggctccggcacaggtggggaaggccagtggctcagaaggcctgacaaggacaggaccaaagctccaacagctcagagctggactccttcccatcccagatctgagctctttggttctccttcacagaggtgattatggttcata

SEQ ID NO: 178502 - DNA, 883 bp, Homo sapiens
cacaccactgcactctagcctgagcgacagaacaagatcccatctctgaaaaaatggatgagtgaattaaatttcaaaatagagatttaatggaaaaatgagaattgttgtgtacatgatttatgaagtggcttacataatataattttggacatgaaagccctgaaaaatagcttcttattttaaggatgaacagactgggatttatttctgaaattctataattctcagtcagttgtaaggctttcattatataatagacttttttttttaaccaacggaagttggacctcttcaaaatgtgagatccaaaaaggttttggatattgtttgaataactctcttctccaaaggagactgtttttgaaaaatgattctttctgacatgttaaaattgaatatttttgacacgccaaatgcaccaaagtattatatgtcatgtttattgccgagagtagctatatagcttgtgggagacagttaacgtgaagctttcttgcatctggaagtatggggagagagaaggcttcttcacaccccctttcatgttatattctacagggaaagaatttctatcatgtagacactaggtgactcccttgtggataatttcatttaacaatgatttctgggtgttgctctatgccaggcactgttctaggagctgatgcgaaggctcagctgatgggctacagacctgaaggcctgtgctcctcagtggcactctgtaggtagatacagagccaccatctactgggtgcttctcctgagtgtgacagtgtaggctgggacacgatgctacccttcaaggagcttgaagctaaggttctgtgcacagataaaattagaataaatgcagagatgctataacaagatgtcttag

SEQ ID NO: 178503 - DNA, 213 bp, Homo sapiens
cctagagaaggagacctgagacccactcatgttaactgaggagctgcagactcctgaagaaagggaattccattgcggtctttgtggaatcgtgtgactttgtcccctcccacagaggcatgctgctttgaagcacacaggacagacgttctctgttatcttaactgcattttctaagctatgccgagaacatgtgctaacgttaggtgataa

SEQ ID NO: 178504 - DNA, 323 bp, Homo sapiens
gcgggctcggcgcgccccgcactctgagcggtcggctggcgccgccggccctgggcagtgagaggcttagcacccgggccagcagctgcggagggtgcactgggtcctccaacagtgatggcccgccggcgccgcgctcgaattttcgctgggcctcagccacctccccgccccccgccccccaaccgcgggctcccgcgcgccaccccgaggggacgggcgccacctcctgctacgcggcatccggtcccgtcaaccgcccaacggctgaggagtgcggcagcgcgccagagactggcgggcagctccgcccgcggccggga

SEQ ID NO: 178505 - DNA, 724 bp, Homo sapiens
gaaagggagaaggcaagcagtgaaagaggatgaattcaaaacagcaaaggtctatttccaaccaatacagaataaaagcactggcaaagccccccatcccaaattattggaggtcaccctcaaagttctgggaaacctgcaacatccttcctgtgtggatgggcaaactacacatggtgcctgtagctaagacatgcaatataaacttgtcaaaacagctctctgacatgatactctaccactctttaccacacagagcagaacaaaagtagaacagaaggaggggactcaggaacattgcttaaccctaactcagacaaaattggaggcaaaagctttactaatcaccccacagattaatcactggcttaagggtattttagctttctgttaaaacacagaatacaccccaacaacttttgttaaatctaaacaaggtgagatagactcgtggaacatgaataaaagccctttcagccttagagactggtgtacttatccaaatatttaccaagtgtgccaagcactttgggaactataaggaaactaggacacagtgcttgccctcaagcagcatataatccagcagaaggctgaagacagaaatcctaggctcacacggatacaggagcaggtcccaagagcagagaaaagagtgcaagccagccaagggctcaaggaagctttcagctgggccttgactaactcctgggaagataggtac

SEQ ID NO: 178506 - DNA, 228 bp, Homo sapiens
ggaaagggaaaatcaacaaagaaacacaaaatatagcactggtttttagaataatgctgtaggactcatttcaattcaggtatcaccaaatagaccatgtggctcaattctaatatagattttcagtccctcattgctggtgagaccaggctgtatatgatttctcccctgtgttcagatggagacatggaagaaaatgtgatatattagttatctgtaacaatatta

SEQ ID NO: 178507 - DNA, 249 bp, Homo sapiens
gattggttgagtctgcagtgagcaaagatcgtaccatatcacttcagaatgggcaacagagcaagacccttcccaccctcacccaccccctccccccaacaaaaaaaagcccacagtgaacatctcattcagtggtgaaagaccgaaagctttccccctaacatcaggaacatggcaaagatgcccattcttgccactgctatttcaacatagtattaagagtcctggccagagccaatttaggcaaga

SEQ ID NO: 178508 - DNA, 294 bp, Homo sapiens
ctctgagcatcccaagtcttaccatgagttgctaaaagagaaccagacccatgtttatccctttgaaagaaacctgaaccaagccattcctctggactgttcttccatccactggaccaataactcatagtttgaaggatttttacttaatggaagtgagaaaacagccagatcaaaagaatttccaggagccaagacagaaaacatgcagagcattagacagcctaaatggagctggctagatatgactccagttgtgaccaagccatagtgccccctaagctgggtgaagag

SEQ ID NO: 178509 - DNA, 145 bp, Homo sapiens
atcatttgagcccaggagtttgatgtaatagtgggctatgatagcaccactgcattccagcctaggcgacaagaacaagaaccccatcttgctacaaaaaagaaaactgtacagcagaaaaccctagagtatctcaactcccagg

SEQ ID NO: 178510 - DNA, 569 bp, Homo sapiens
taagtcagactccaacaaagaactggagcacttttgtttctaagtgaccatcaggcacctaatattattttcccttcagtaaaatataagtgataatccttgtcctaccccactaatgatgtaaaaataatataaccatacagtaagaaatcaaacatgctttgaaaaattgcagcatagggctaaacaagagccactgcataaagcaaagaagttttgaagaagaaagggatcttgaaggttgttatttccagttttttcattttatgaagaaagaacctgaaacaggaggtagacatttgcccagactggatcacctactgagaagtagagtttggtctcctgaccctttgtccaatgctttttctaccaaactacattattaggattattcctgttgcttttgttattagtgatgttaagaagcacaagactatttttagataaagagatagactgacctagcaaagcagccatactccttctgggtaagaaccgctggtctgcactgcagaaactttgttcttaataaccctggtgtcctaagaagtctatcaagagatgaagag

SEQ ID NO: 178511 - DNA, 381 bp, Homo sapiens
catgatctgtgatggaatttaggaaagttgatattagttggttggattagcacaatcaacagactatgccctgtatgccaaatgcagtctaaggcaagtttttgtaagtaaagttttattggaacacagtcatactcattcacttgaatattgtctgtggctgctttagtactataatggcaagagttgtgtagttgagacggagactgtgtggcctgcaaagcctaaatatttgccatctggccttttacagaaaaagtttgccaacccctggattagaggagtggaggcagaaatcctgttcattgttgttctggttagggtataaacccatgccttcctgtcaaatgaaatgaaggccagaattgcgatagccaccct

SEQ ID NO: 178512 - DNA, 683 bp, Homo sapiens
cttctaacatgttacatggatattgtattttaattaaaataactacacttttcaaaaggggaaaaaaaaaacctacttgagccacaacagttgtattccagtcagggtcaagatattccctggggttcatagttaatttaatccaccaccaccccgagtcttgacccaaaaagcagcagcctcagccaaaactcagacctactctttggtaacctgagaaagcttccaagatgcccattcattcactctaaacaggggaccctctcaaaccacaggggtgagctgcagcctgggcctcatgcactgctgtgtcctctcccaagtgtgctcaagcacatagctcacctgggctctttgtcctggtgaggttagcagtcacaaacacaagccctcccagccacaggacttccaaccaaggaaggaaggaggctataaagctagaagcaacaaactaagcaaaagggagtcatggataaggcatgctcccctgaacccagtcaaatcaacagcactcccagctccttcttcagtgaaatgtttcagaatgctccattctgttcccaaaacaagtcagccttcctgaaccagagaacgcttgtaaaatttgatctagactctgcttctgtgctgctgatgcctttagcggcctcagactccacccagatctgcccactctgtctcca

SEQ ID NO: 178513 - DNA, 266 bp, Homo sapiens
ctgtccccttggatggattaatccactcatggatgaatgggttaatgggttatcactggagtgggttagtcagcacaagcagggtctgttataaaagctagtttggctcatgctccagccctctctctgtgcgatgccctgcacctcctcagcactctgcagggtccccaccagcaagaagaatttgaccttggatttctcggcctcctgaatggtaagaaagaaatttcttttctttataaattacccggtgttaggtattcagc

SEQ ID NO: 178514 - DNA, 479 bp, Homo sapiens
ctgaaatgtggctaactacagcttgctgagattagcccagctccgagctctagctcctgcaggccaaggccactgcttctgccctgtgaaggtccctcagagacaggaagacccgggctactcttttccagctgtgcccctggggcagaatttcctgtcctttcccatcctggtcgcttctgctgcccgttccccaggcagtcaccatctctcacacagcgggagtcagcaactaaacagggtcccgtggggtctgtccagcttggccatcagtccttctggctggacacaactccatcattaacacagacactcctgagcttcggctgaactcctttttggggtctgcggacctcctgagtccccccctctcccagcccctcccaagtcccaagagacagggtcttattgacatgcaagtgtcatcaggtatagtaacactcatctcttgagcaccctaaaaggtgcatggggccgag

SEQ ID NO: 178515 - DNA, 665 bp, Homo sapiens
tgcagtggctcacgcctgtaatcccagcagtttgggaggctgaggtgggaagatcagttgaggtcaggaattcaagaccaggctggccaaaatgatgaaactccatctctactaaaaaaaacaaaatgtagccaggttggtggcacatgcttgtgatcccagctacttgggaggctgaggtgggaagattgcttgaaaccgggagccggaggttgcactgagctgagatcgtgccactacactccaacctgagtgacagagtgagactccatctcaaaaataataataataataataaaatagggaaatagtattcattattttcaaatgcatatgaaatgcttaaaaaaaactaagcatttttaaaaatcctactagattacccccaaagtaggaaatatccatgccatttccccactcagaatgcaataaaattaaatagtaaaaacaaaacagtagcactgccaacatgaaaaacattttattaaagtgggactgtgaaaacagtgttttaagtaactcttgaactacacaagaatgcaaaataacatttaaaacaatacacaaataaatgatagtgatagctgtatataagaaaatctaagggcatgcagccaaagctgtaaccaatgaaaaataatggccttaaattgcaagatgtaaaa

SEQ ID NO: 178516 - DNA, 767 bp, Homo sapiens
aacataaaaatgttctggaggacttaaatgggaagtttctaaaaacaaaataaaacttatagcctatatagtgacaagacaaagaaaagaccacctttaggctccaaaaggcctgaaaatgtggaaagataagtttatgggaagagtaaatctgtccctctatcctcgatgcttttgtctctgagctgacaaggaacattaagaggcctatctttagatgggaaaggcagccaagaggacagtaagaccttgtctttgtaaattgctgtcctactatcaggtaggcagagtgagtggaagaatatcctcctacatattttttgagacggagtctcgctgtgtctgtctcccaggctggagtgcagtggcgccatctcggctcactgcaagcttcgcctcccgggttcacgccattctcctgcctcagcctcccgagtagctgggatcacaggtgcccccaaccacgccctaaaaaattagccattttttgtgtttttaggagatcttcctactttttaacctcctccagctctgcactctttaggattttgataaagctccgatgagtggaggaacaccagggttcttgccttgcttagaattaggtaagacaacacggacacatgtggacagattttaaggagtagggagtttaacagggaagaaagaagggggaagaaaaaaagaagcagctcccttgtagagagagagaggtaggaggatccaaagctgagagaggaaaccccgctttcaggtaatgttagcca

SEQ ID NO: 178517 - DNA, 741 bp, Homo sapiens
ttcctggaggaggagggaactctcaagagcacatttttcaagaccaggcagagggaggaggctgcgtagggtggaaatggtgctctaggcaggccacagctggagtaaagccatgaagatcagaaccagctgagttattcagagaaccaccgtggtttgggtattgccggagagcccagcacaaagaagagtggagggaggctggctgcggaggcaggtggggaccagaccatggccgcttgggagtttggaccagacactgctgtacaagccagcccacagggaggactgggcagacctaggcaacaagctgctctcctcctctctgggtgaccccagacaggactcctcacttgtgagattttaccaggcaaccaaaattggatgcttagagcaggaagaagagtctacagagggactcacgggcattttggctttgaatggccgaagcctagctccccaggctcaggcacaatggtgaatgtatttgctcatgcaactggggaatcaagggacactcatgttcaggaatggttggatccagaggctcaagccttcctttcaggcttctttctctccagctctctgctctctgatgagtctctctccacagggccccagccaccgaaggctcaaaaaaaaaaaaaaaaacaaaacaaaaccctgcttggggagttgtgagaatctgaagcctgatactgcacagaaaacctatgaagccactgggtctggcctggaatg

SEQ ID NO: 178518 - DNA, 345 bp, Homo sapiens
tatcttatatctttgacttgcaaaagcctatatttttagaatcagtttttttagacattagtctgatacagaaaccaaggttctctgcagcagaccattctgaggttgtggggatattgttggaaagaaatatgattaggatttattatacattcttacctttatttgttttttgtcagagaagcagtcacccctgattgttgctttaggccatcaattgatgtgcactgcaaggggtaaattgttctacacattagtaagctgggtaagcaaattgttgtgcaaacctaatttgtttcctagagaaagtgactgacatacaattttgaaaatggaaatattcat

SEQ ID NO: 178519 - DNA, 304 bp, Homo sapiens
ctgtcatgctaatttttaagtttttgtgaatctgtctctctgttgccactacagtggatgttctcatgatcttttcatctataatatgataaaagccttatctgttcttttttcctctggatctctacctacttctccatccttcgcattgctaccagaaaactttaacataaatgccatcattctcctctgattaaaatggtttgattctctgtcactaagagaaaaaatttcagtatccataatatgacattcaaggtccttcgcccaggatatcttttcagcctaatctcctacttcgtcc

SEQ ID NO: 178520 - DNA, 583 bp, Homo sapiens
gaattcctatttgccagcattagtaaccaattctaggtagattaaatagaatggaatttactgaaagagtaacagtatctatatacaaagttatttgggaaagttaaaaatcaggctcagaaatcagacaggagccaaaggaggctggcagcagatgaatcagccaaggaccactgaaggaatagtctgattagaatgctgccagaacttggtgaagaactgttataggaagagcctaaatagaaactaaggacagtgccaccaccagacattctcttctcctgaattactgacatcatcactgtctcagtagatagcttgatggtttctgcatctttgcatcactccttctggattcaatgtgggaatcccactggacaaacttcagttatgtgctgatgtccttgctgtctagaagaggaagatatgccttttttcagttcctataacaggaaaagtgttgagatgccaaataccaaagcacacaaaccccagacacacaaacacatccaggacaccatacttgggtttgtttctggactcactgttttattggtttgtttgtttattttgctgtcattat

SEQ ID NO: 178521 - DNA, 184 bp, Homo sapiens
ttcatcccacactcattcaaaacattcaaaactaaaccatctactggacacctccaatcttgtcactacgttattgttacccagaagtcatgtttggagtcatttctgtttgtgtttcatcatttttacttaatcaacatattgaccattgtgtcaagcactgatatagacagtgatgaatatg

SEQ ID NO: 178522 - DNA, 201 bp, Homo sapiens
atggagtgggaaggagaatcccacaactgcgctgggtttcatgtcactgaaccagcctgcgtacttaatgggattctctaacccagccgtggggttactggtagcacctctctggtttcagcgaaggggcttcggtttatgaatttccttggagttaagaccctgggaatgagtgcaatcttaaagtccatcccagagaag

SEQ ID NO: 178523 - DNA, 162 bp, Homo sapiens
acttgtgaagtgttccatatttttaaacaaagcattttacttaaaaaataatacaggtgattcttgttccacacaaaaatcgaacagatgcacatctacctctcattttactaagtacaactaaaaactctggaaattgtctataaaataaacataagcaaa

SEQ ID NO: 178524 - DNA, 463 bp, Homo sapiens
ccactacactccagcctgggggacagagcgagactccatctcaaaaaaacacacaaaaaaatcagaacaaggtgttacggggcgtgtggccagctggcaggtgggctgcagacccttccagtgttccctgtgccctggcctgctccttagccattccttcccttctgtggccactgtgtatcaagattggaaagtccttactctgacccttgcagaagaaaaggcatcggaagagaattcacagtggtgaatctggaatgtggagtaggctttgtccctggttatgacgttcagattcatcaaaagcacttttcatgagaagatatgcatcttgggagaggggctctgaaaacaagattccagggaatctaccttaaaaaaaatattttactggtaagccagtgagttccgtcagcctgtcagactgtgggtgggtgactgaaaccggaagtgcatcataaaa

SEQ ID NO: 178525 - DNA, 793 bp, Homo sapiens
gcttcagcgagccgcaggaggcacaggcctgtcctgggtccccgcaggtctgcgcgtctgttgttcccagcgctcttggaggcctgcaaaggaagagcaacctgtccagactccccgcaggacaggaaaaagagaaatctcgacatggaaaaaccctacaataaaaatgaaggaaacctggaaaacgagggaaagccagaagatgaagtagagcctgatgatgaaggaaagtcagacgaggaagaaaagccagacgcggaggggaagacagaatgcgagggaaagcgaaaggctgagggagagccaggtgatgagggacaactggaagataagggaagccaggaaaagcagggcaagtccgaaggtgagggcaagccacaaggcgagggcaagccagcctcccaggcaaagccagagggccagccgcgggccgccgaaaagcgcccggctggagattatgtgccccggaaagcaaaaagaaaaacagacagggggacggacgattcccccaaggactctcaggaggacttacaggaaaggcatctgagcagtgaggagatgatgagagaatgtggagatgtgtcaagggctcaggaggagctaaggaaaaaacagaaaatgggtggttttcattggatgcaaagagatgtacaggatccattcgccccaaggggacaacggggtgtcaggggagtgacgtcccttgaggcctagtaaccacgtgaatgggattgactttggtggagagccaatgttttcacaggcggggataaagaaggtgtttctggcacca

SEQ ID NO: 178526 - DNA, 1684 bp, Homo sapiens
gcttcagcgagccgcaggaggcacaggcctgtcctgggtccccgcaggtctgcgcgtctgttgttcccagcgctcttggaggcctgcaaaggaagagcaacctgtccagactccccgcaggacaggaaaaagagaaatctcgacatggaaaaaccctacaataaaaatgaaggaaacctggaaaacgagggaaagccagaagatgaagtagagcctgatgatgaaggaaagtcagacgaggaagaaaagccagacgcggaggggaagacagaatgcgagggaaagcgaaaggctgagggagagccaggtgatgagggacaactggaagataagggaagccaggaaaagcagggcaagtccgaaggtgagggcaagccacaaggcgagggcaagccagcctcccaggcaaagccagagggccagccgcgggccgccgaaaagcgcccggctggagattatgtgccccggaaagcaaaaagaaaaacagacagggggacggacgattcccccaaggactctcaggaggacttacaggaaaggcatctgagcagtgaggagatgatgagagaatgtggagatgtgtcaagggctcaggaggagctaaggaaaaaacagaaaatgggtggttttcattggatgcaaagagatgtacaggatccattcgccccaaggggacaacggggtgtcaggggagtgaggggtggaggtaggggccaaagaggcttacacgatatcccatacctttaatgcctttggccttccattctgacttctctgatgagattattgtcaaccctgctttccctggtagatatttgccaggcccaatgctttaaccttaagctgatatttttgctttagatgtcaatctcgttaccagcagccttttgacccaactacagcgctctatattttagtagaggattttcacccatgtgcatggaaaagatgttcatgacacattgtaaaaaataaataaataaagaacagtttgcagaacctcgtatacggttatcagccaatatttataaaaatgtaaatgtttgtataatgcatttctgcgcaaagaaaaccctgaaagcatgtacactaaaaagcaggcaatggttattcctgaagggtagccaagaataggtctcacctgtattcaaaaatgagtcctaccacctcttgtatgtacctccatgatattcctctgctgctgtgcacatccctatgtcttccctaggtcgagccaggtcagtgggcactgttgctaggtcctctatcatgttcctgggtcttctaacatgagtgctgggtctgcatactcagacccatactaaaatataatactaaatatttgtcatactgaaaaataaataaaagctgaatacaatacatactaagaaattgaactgtttggtgcgcttacaaaggcaataaagacactcagaattcctgttatcagaacataagatgacaggtaaaattcatattatctctgggactaaaagctaaaggaatcaacctggaaattctaacagatctattgctgtaagagtcaatcttgtcatttgtaaaataagggtaatacttgcctcacaggactgcctggtggatcagatgagatactaagtatgtgagctgtgttgtgacctggtccccactaggcactcaggggaggaatggctcctaaactatt

SEQ ID NO: 178527 - DNA, 161 bp, Homo sapiens
cacacaggaggaatccttccactctgtgacagtccatctgcttcccctccagatgtgtttttcaggaaagcaggcactttgcgttgaccatcgaagaaaactccggccttctccccgcttcgccggccctctctcccctcctgccctggcccagctcggga

SEQ ID NO: 178528 - DNA, 414 bp, Homo sapiens
tggggagatgggggaaaataaccaaccacactgacagcaagttggcaaagtgcttacgtctccaagcactggtccatgtaatttgcaggtactaagtcatttatcctttacaagcttataaaacaggtactattattacttatatttaaggaggaaattggcgcaaagaaaagatcagccattttcccaatgccacacagctaccaaaggcagaggcaggaattgagcccaggcagctggatgctagcatacatggttctgccaaaagagacaattgaaaaaacaaaggatatgacttaacacaaaccaaaaccatagtaagtacagattccacttaggtaaaatcctgggtgtgcacacatgcccaaaggcagtaagagggaaacaaaagtattggagaggcctactggtctg

SEQ ID NO: 178529 - DNA, 191 bp, Homo sapiens
gccacattgtggggggcagagacaccctgggagacagagagctcccaccctcacaccacccccctgggaataccctggctggtggggagctcacacaggggaagagggacatgactccttagcagccaaagtggagtcgtaagagcagagcccgtaagtcagaaaccctgggtttaggccctggttcttgc

SEQ ID NO: 178530 - DNA, 387 bp, Homo sapiens
atggccggtgaagagtattgagagctcagcacgtgaaatgctaagaatgctaaaagcagcatgatctagtgcagtgattgtcaagtattttgtagacttttttttttccagatggaaacactgttcaaattaaatttcctgcagaaacatggtgtatataaaaacacaagcttctctgattaatgagaacagagctctttgccctcagcaccccacatcaccatggcagctactgaggcacctcaaaggaacctctacaaccctgcaaagtatagattgaaaaaggacacggattagtggcatggtcagtgggtgagccatcagaacactgggctggaatcccagccctgcccctcatataagaaatatcctctcttcaccggccat

SEQ ID NO: 178531 - DNA, 266 bp, Homo sapiens
acatgaagcaattaacagtacgacactatagtgacccagaagttctttgcaaagcctatggcacactgtaggcacttaatttattggaggagtggatggagaaggaagggacaaagagaaagtgatgcatgaattgaatagttagccatcttgactggattgatcagcgaaggctttgtgatgaggtggtacttacgttggttcctgaagttctgaaaacagtagtcttgtagatggcctcttccaatttaatagaatgaagacaa

SEQ ID NO: 178532 - DNA, 567 bp, Homo sapiens
gtagccactaaaccatgtgtgactgttgagtgcttgaaatatggctggtgggactgagaaactgaaattttaattttgtttaattttagttaatttaaatagccacatggagctaataccctatcagacagctcagttttagaataaatacagcacattaacaggtaaatacacatgttaagaacaggaagatatgttgcaaaaatgaaaatatgtattcacacatatttaatatcaaaacatttgcatctacaggtatgtattttgatatattaggttggtgtaaaagaaattgcagttttcaccactgaacataatggcaaaagtatataagtctgtataagcacaggaaaataatgggaaggatgtgcaccaaaaacaataattatctcaggatggcggtaaaagggggaaaatgaaatagagatagataatgggacctttaattttatttatgttgatacttatataaataaatgtgtatgtgtatatatgtatataataatgtgttgcagggaagaagattgaaactaattgctaatataacttcacagcaaatctcagcct

SEQ ID NO: 178533 - DNA, 497 bp, Homo sapiens
agagagagagagagagagagagagagagagaatgcatgtggcacaggatgaggtagaataggagaggggagttacaaagcaaactgagaaggaatggccagccagggaggaaggagaagtaagagagtgagcacaaggtcactgaactcaggcacaaagtaagtcctaccgagaggtagtcataggaggacagaaggatctattggaattgccaagatggatgttgcccatgaccatgataagagaagttcagattggaaactccagatccgaatggtttgaagagggaatgtgaagtgctacagtggagacaatttggcacctgttttcagaagtgttgctgtcaccagattctgatgaaaaattgctcttggatctttacctgctctgctgaaatgcccaacaaggtgctggttgggtttggaggtcgtgtcttcctgggagccagcccttctgggtatgaatgttgcatctgtgtagggagttgctaacttgta

SEQ ID NO: 178534 - DNA, 439 bp, Homo sapiens
caggtcttactactttcgcataatagtttagctttaaagcaaactgaaagctgctttcttctcagtctcaattagagctctcttctctacccatcccctaccctgcgaactctaggtgcctggggccctgcagacattcagcagtgtctcctcaactcaaggagactgttggactcagccaggtttccttccctgccctgcagcctggaaatgctctccaagcagcaagctggggcagacatagggcccatctctcaaagatcactgtcatttgttacctgaagtcctatgttttaagaacctacttttttatattcttggcctattattttcagtgtttctgatgggagggtatatcagacccctgttagttcttcttgggtagaattataagttgattttatttatttttagcgaattatttttccttgtctcaata

SEQ ID NO: 178535 - DNA, 554 bp, Homo sapiens
cgcatgtatcccccactcagcgcatgagtcactgacacacaaggtgacatactccttccctatcaagttgtcaaggacttttagaaaacagccatgctcagagctagagaggaggtgggaagtgggccttgctggtaagaatagaaaatggtacaacttttggagaccaacttggaaataaatatgaaaagcctgaatttgttgcattttctttgtttcagcaatatccattgttaggtctacctggcaggtagacctaacgtgaaaggaaagtagtccaggctgtccctgaaactgagtctgcggacactgtggaaagctttgaacaattgtgttttcgtcacaggagtctttgtaatgcttgtacagttgatgtcgatgctcactgcttctgctttttctcttctttttattttaaatactgaaggttctggtaacctgtggtgtatttttattttcctgtcgactgtttttgttttgtttttttcctttttcctccccttgaccctattcatgtctctacctggttaggtctaactgggaccagctcgatt

SEQ ID NO: 178536 - DNA, 265 bp, Homo sapiens
attcagaaatcttattgaggactgtagatgaggcctgtagcttgagagttgctctcttgagaggttctgtcagcacagtttcagctcactgcgtatatacaggtggtggaggttcaggacatgcaaaatcacatcaaacttgtccagaattacactaaagcagagtcatatcaaggtttgggcataagagtacacctggatataggttacagaagcataatcactaagactgtcagatattgtcttatgtgcagaaaaaggcaag

SEQ ID NO: 178537 - DNA, 399 bp, Homo sapiens
gtactgcctgtgcagcgtgcccagcccatttcctcaggagtgggctgagctggttttgtttttgactttgctcaagggctgaaccctaatggtagtaccttccttttcttcctgttcttctcctttgcccattgtgtggaattagctccgttaaagaaacaaattgcccatgtgtttgctgctgaggtcttttctggaggtgcattttcttactgctgctgtatgtgattcttaactgttgggagatgatagaattcagtggtgtagcaatgacttttactcctctggttttgatgctaatgtctaattttctttcttttctttctttcttcctgtcttttttttttttttcttttttgagacggagtctctgtccgtcacccaggctggagtgcagtg

SEQ ID NO: 178538 - DNA, 208 bp, Homo sapiens
aactcaggagagggcaaaagatgttggccctggaaggtaagagctgccaggatctctgagcgtttccctactcaggaatatggagcatcaactcccatccttcctgaaaaatactttattaaaagaaactgtgagcaaacagtaatacaaactatctgcaataaattatttttattgtaatcggtttcctagtgtatttgcttaaaca

SEQ ID NO: 178539 - DNA, 839 bp, Homo sapiens
ccaggtaactaaccttcctgagcaggtagtacaaggccttagttttctcctccatgccataccaatgcctacaacatttcttgcttgcatcattcatttgacacctagcacaacatggttccattttgttctggatatgttctgattcccaaactagactttcaaggagtgaggctggtggcagggctggtgcagagtgggagggtggtgagaatttaacttccgcaggcatagtttcacttggcatagagaattcttttttagccaaatccttaaggatcatcttgttttggtaaaccttatttttgttgttaggtctacctggccaggtagacctaacgatatgggattttcctccaagtattccttcagtaggaagaatggaaaatggaatttctgtaaaaaagtaaaattaggagaattcctattatgtcctgatggaattttgattttggaaagagaaagcaacctaaaataatttttggtctcattcttctttcttcctcacctctgcttttgtgcagttggttagggctggagggaggatggcactggggatttgcagattcttagcactctgggtcatctgctgccctggcagtgagcgactcttttagtccagagtgcgtcctttgaggttaggtctacctggccaggtagacctaactattagtggcaggttagttgtttgtagggctcatggtgggggtaaaaggagggcaatttctagatcaaataataagaaggtaatagctactaagaagaattttatggagaaagggacgcgggcgggggatatagggtcgaagccgcactcgtaagggggttagtctacctgg

SEQ ID NO: 178540 - DNA, 698 bp, Homo sapiens
tctctcccttttttccctcccgccccggcatctgttctcgcccgaagaagctggtccttagcctgcgctgcggagcaacctttcggtggccagctggagcctgggcaccgttcttcaaataatggcttttaattctcagacgagaacgtttaggattacaaaagaaaccggttctcttcacatccttatccttgtcatgtagcattccgcttgaaattggaagccgttcaatgtcagagagaaaccatatttatgaaatgaaagaggcttctcagatgactgcaaaccagccttccttactggttttatcactggtaatgttataaagacagttgtccagtttcatgaatcttgtaggtttttgtttgtttatttgtttgcttttgatgttgttgttgttgctgttgttttccaaattcagtattgtagaaaaatatgctgccccagaagagatgattggacactctccagcgtggtgttggactttgtcatctcttgcacagccatctccagaccttagtgtttacctcacgttagttttttatattctgcaaagacaaaaccaaaataatccaaatttgacacaaatacctgggatacatcttatttgagatgtttaacaaatgtctggatcatcttttcttacattggattataacgcaggaaacactgtgaagtaagtaaagttggaattccca

SEQ ID NO: 178541 - DNA, 339 bp, Homo sapiens
  misc_feature (281)..(281): n is a, c, g, or t
tttattatatttacatatatattaactctcttaacacgagtatattaatttcgagcttgacacaactctcatagactttactgacatgaagtgccaacgaggggatctaagcttcattttcaatggggatgcggcgccctctgaatcttttgtagtattagacaatgaacaaaaagtttatcagcgaatacatcatgaggaatcagagatggaaacagaagaagaggtggatattttaatgagcagtgatatttactctgcaactttatcaacaaaatcantttcttttcacgcgtgcccagacaggatggctttttccgggaagataaaacagaaagg

SEQ ID NO: 178542 - DNA, 199 bp, Homo sapiens
tttaaaaatacagtgcctttactttcccgaattctgccttccgatgcatgtaaaatatacaaacaaggtatcaatatcaggcttgacacaactctcatagactttactgacatgaagtgccaacgaggggatctaagcttcaataaaagagatgcgcccgtctgcgttcttgcatacacagtaccacaacaataacgcc

SEQ ID NO: 178543 - DNA, 424 bp, Homo sapiens
cgctaggatggagggggcagtgacgttgaacaggtacctgaatggccaaggaggggtcaagtgtagaattcagtttcaccaataaatgatgatcgtggttgtgaatgaagggaacaatttgcggggggaaatgatcaaatgatcaataaactgagaaattaaattttaagcagaatttggtgaagaaattattgagacctactctacatgagaacccatgttagatgctttggaggattaaaaaagaagaggccagcactttgggaggctgaagtgggagaatcacttgaggccaggagttccagaccagcctgggcaatgtagtgagagcctatctctacagaaaaaaagagagagagagagaaagcatgagaaagtcatttctgctagtgagagagacatggtataaacatttcaaaattat

SEQ ID NO: 178544 - DNA, 356 bp, Homo sapiens
cacccaaatgtattagcacgcactcctctttggagaacaccactcaagcacttgctttctgtactttactggggagaacaaaagctttcaaagaacatctttagtttataatctacacttacctatttcctgcccaaggacaaaaatacaaagggagaacaaacaaggtttattttccctttatcctcttgaaagaaccgatcgatacttttattagctcaatgggacattttaagtttaataatttgaccactaacacaatgattacttaaataaatccccattcttagtattcaggattctgatctcatttgaattatatcagtgtagtaaatgccaaactctaaacaacagta

SEQ ID NO: 178545 - DNA, 254 bp, Homo sapiens
gggggacccaactccatgctatcagaataaaggccatccttccccgtatttttctcaagttatacaagtgccgttattcttcaagcaacaaagaattccactagccttttgctaaggataaaacatttccaaaatataagttgtttaaactgcaggtatagaataatttcttcaactgtcttctttttcccaaatgaataatgctacctagatgaaaacaatttttttcttcaccttttattccaaatttcttt

SEQ ID NO: 178546 - DNA, 318 bp, Homo sapiens
gaaatgaacttattgatgtgaaaagatgtttatgatatcaagtgaagaaaaaccagttctaaggtaatatttaaggaattatcctattttttgaaaaaaaccaaaatacactagagaggagtgagtggaagtccatacactaatgtgttagggaggctgggcgcggtggcttacgcctgtaatcccaacactttgggaggccgaggtgggcgaatcacctgagatcaggagtttgagaccagcctggccaacagggtgaaactccgtctctactaaatatacaaaaattaactgggcgtggtggtgggcgcctgtaat

SEQ ID NO: 178547 - DNA, 449 bp, Homo sapiens
tcatgtggctacatctaactgtgttgggggctggagagagtggtccttgtttcaaggctgctgtgcgttggctaaaaatgcacagaaaattagagcaggttttgaggagagctgacagtttttgccacatctacaaaattttggatggggtgggggtgatctaggttgtttattctgtttctaagccactgtagcttctctcactgaattatgcctaccatttgaggagcaaaagggagttttcccatatatcattatgttaggtttgttatggttaacaggactttgttttattcagttaaattgcattgtgtagttgctaactagtgtggaaaatagcaataagcgagagattggtccgttctgctgtctaggaggggacattgactaaggaaaaaagataagtgtaggtgtagcatggtggcttatgcctgtaaacccagcatttt

SEQ ID NO: 178548 - DNA, 317 bp, Homo sapiens
ctcatgaaatctggtcatttaaaagtgtgtagcacacttttccagaatgtcatataaatggaatcatatagtgtataaccctttgagttggcttttttcactcaatatgcctttgaaattcaaccaggttgttgtatgtatcaatagttcttcctttttactgcttagtaatccactgaaagaatgcaccctaatttgtttatgtagaaagtacgacagaaatcagggagagggaggagcttggcatagcaaccctttaaagttgtttatgaactcctaggcccatgctgcaaattttgatatattttcatttttgt

SEQ ID NO: 178549 - DNA, 332 bp, Homo sapiens
aaggatggactgtgtggggagaagatgctcaacagatcaccttcagggactctgacctgctggcaaaggcaggcaagcagcaaggagctgggcttgcacggcattgtgggaataaaaagcctttccaggatggccttcctactagccgcaagggctgagctgcagagaggaagcagcggggccaggatttttttcttgaaagcactttggtgtgttttctagcttgtgaaacagcattcacctgggaccccacagttagaagggaattaccatttaagtgccacataattattcctgcatgcatgcactcactgtctcactcagtaatcttt

SEQ ID NO: 178550 - DNA, 439 bp, Homo sapiens
ggctgagtacgtcccatctctccaggagtttatctgtgtgtacggagctgttttccaagtgaggggcagtgtggcaggtagctgagggtcctggtctggggccagagctagggcaagacttggccctgccattaagagcaggcgtattgcactgtttctcaaactgtgcctctcagcccatcagtgctttgggttgtgaaatcagtacagtgggttgtgaaaccagtacagtgggttgaaccagcatttttaaaccaatgaaaaaatgtcagcatgcatcatacacgggaaagataagtgagggaactttcggtttgttgtctgtctgtgtgcctgtatatatatgtaattgccgggcccatggtgtcttacacctgttgtgggtttgaaaactgctggctttggccgggcgccgtgtctcaagcctgtaatcccagca

SEQ ID NO: 178551 - DNA, 673 bp, Homo sapiens
gggatgaactttgctatccacttgtaatattactaaaaatcatagtgctagaatgtatgctaagcattagtttatgaaattcctgaggttgggtgtggtggctcacgccttacagtcccaacactttgggaggcggaggcgggcagatcacctgaggtcaggagtttgagaccagccttattaacatggcgaaaccctgtctgtactaaaaatacgaaaaaaaaaaattagccgggtgtggtgatgctcgcctgtaatcccagctacttgggaggttgagacaggagaattgctcaaacccaggaggcggaggttgcagtgagccaagattgtgccactggactccagcctgggcaacagagcaagactctgtcaaagaaaaaaaaagaggctgggcgcagtggctcatgcctgtagtcccagcacttgtgggaggctgaggcgggcagatcacctgaagtcgggagtttgagaccagcgtgaccaacatggagaaaccccatctctactaaaaatacaaaaattagccaggcgtggtggcaaatgcctgtaatctcagctacatgggaggctgaggcaggagattcacttgaacccgggaggcagaggctgcagtgagccaagatcgtgccattgcactccatcttgggcaacaagagcaaaactccatctc

SEQ ID NO: 178552 - DNA, 367 bp, Homo sapiens
tctctgtattttcattccactaaatagctgtgcttattagatacttacatatgaatatggccaagtactaagggactttgaaaggtacttttaattagaagtaatatttgctttaccaactaattttagactaactatatatattttgtaagctataaccagtcaatgtgtgaatgctttatatattcaaacagcaggttatacccacttccttacctacacagaagctgttgctctttttgccagagagcaaccaaattttcctgagcagtggtagctacctgatggctactgcaaggaacttctcatctactttccttcctacttgctttcttcttctaatagtagtcatgcaccctcttaaatt

SEQ ID NO: 178553 - DNA, 320 bp, Homo sapiens
catatctgtctgcctgtctatgaatcatctatcaacctatcttactaaatatttcaattatttctccaggttgactaaggtacatactgtgtactaaagtacatacataacatgatgtatcatggaatataggtgcaagttaacaatttttttttcatattgcttagtttaagatctccatagaatattatcatggtcaatatgttgagcagtcctcatcaaattaaatgattagcaaattctctgagttgattctgtatacacataaacacacagacgcacacatacactcacttgagcatacacgtgcatgtgtgtca

SEQ ID NO: 178554 - DNA, 273 bp, Homo sapiens
cattgtagtcaagaagagaaaaattaatgctcctatttccacccatggcatcatgttaccactgctggctgagtgttgattcttttaaataggtagtggaagtcttccaaaggtttacagaagtaggtcatggtgccctctctttgtgcctgtgactcataagaaacaggtttaatcctcgatagttgtactcaagtagttattccctgacatttaagtggtggcagtatttaacaatacccagtagggacctttcagttaggttgtaactga

SEQ ID NO: 178555 - DNA, 623 bp, Homo sapiens
aatctgtgggagttgtaatttttaatagaaaaaatcaggagctcagtttttttgagatctagttgttcataggggtctggagtttagtaaagagaaaaactgtgctagagataaatatttgggagttgtcaccatatggatatttaaagcctgagattagatgcattcgccaagggcatgattgtcaataaaaagaaggctaaagaatgagccctggttgggcaatcaggagaaggaaataaagggtattcagttaggaaaagaggaagtcaaattgtccctgtttgcagatgacatgattgtatatctggaagaccccatcgtctcagcccaaaatctccttaagctgataagcaacttcagcaaagtctcaggatacaaaatcaatgtgcaaaaatcacaggcattcttatacaccagtaacagacaaacagccaaatcatgagtgaactcccattcacaattgcttcaaagggaataaaatacctaggaatccaacttacaagggacgtgaaggacctcttcaaggagaactacaaaccactactcaatgaaataaaagagcatacaaacaaatggaagaacattccatgctcatgggtaggaagaatcaatatcgtgaa

SEQ ID NO: 178556 - DNA, 812 bp, Homo sapiens
tgatctcctggcctcaggcaatccgcccgcctcagcctcccaaagtgctgggatcacaggcgtgagccaccgcacccagcctggattacatgatttctaaagtactttggaaacctgaaatttcattttaacagtttaatgactggaacattttttagtttattatttgctttggtgctgtctccagatcatttaaaccaatccctatttgagactgttgttggcatccagtgatgatttttagtgactgataacctttaagtaacagcagtaagaatgaaggcccagtaagaggtaataaaggagtgatgagggaatgaagaaagaaatccattagcaagcatacagaataatagtgtcatatagaaaatgaagatcctgcatacactgaattttgatactagatcaaaatgaggtccttttcactgcatttatgtcaatgctactccacttctgtagttgttttggtgtattgcttttatttacatggaggttaagtgttagaagcagttaagagacactgccacactgaatgagagttgagcgtgtccccctgggagattgagaattcagtggtctctttctcctcactccatgtggcttctttgttgccttcctccttctataaattacatagtcataatggggcaactttccactaatgattgccttactacttgagttgattcccagactccctcaccttccttattctggtcttcacatgtctttgctaactgtaaagtaaatggtttagacttagtctgtagcctgctcaataatgagagaaaagctgcctccctggaagtttt

SEQ ID NO: 178557 - DNA, 372 bp, Homo sapiens
aataaagcctacacaatatggggcacatattgtaactgaatctttttcatcacaaaatgctgacagtggagagagggaaggcagctggtagggaaaaacggatatagagcattcaattttgaaagaggggaacatgtagctgcaaaatcatgctgttattcatggtaacaagtaaaaatttcagccagcattttgcagagggtgttagagagaggaaaagtctctgtggaaatctgctgattaagatgcactttgtagaagtccatcatcagacactgaattgaattgaattggttgtgaatgacaaacagccttccaaagaggtaagaatggtatggcattaaagaggataaaaagaacttagacaacagc

SEQ ID NO: 178558 - DNA, 284 bp, Homo sapiens
atgctaagatcaaaaaacaaatccaaagtgaatcctgtcagtggcttcacaaaatagaggaaaggaaggaaaggttggaggaggcacagaggaggcacctttccaggtgtctgcccagtccgcacccttgcactgatacctgtacctcaacctattcacaaagagggctcagagagggccctggcagtcatgcttgtatcctatggccaggggcagattcttaggccccaccagatgctccccactagaaattgggaatctgcattgaggaacttaatttggtg

SEQ ID NO: 178559 - DNA, 160 bp, Homo sapiens
ctttaaagtgaacttatttattcattcaaccttattcggtgaaagggaccaggaaaatggagtggtaactagagagggagacagagtcaggggagttttgggatggtgacattaaagtgatgcacactcatggccaatctagagtgaggaatatacagga

SEQ ID NO: 178560 - DNA, 305 bp, Homo sapiens
tggctctgcattcaggttcttctcacatccctctctttttgagctttgaaaaaaaatctaggccttgattttttaaaatttttatctatctatctttctaatctattatctatctttctaatctattatctatctttcaatcatctatctctgtctacctaatatatcatctgtctatctatctatgtatctatctatctatcatctatctacatttgtgctacagcaagtcccagctatgatggaggcaaatatgggtatgtgtggtgggtggagtcaggtgtcacacattccttgatattccc

SEQ ID NO: 178561 - DNA, 340 bp, Homo sapiens
taaaaagaaagaagctgaacaatctaaggtattacccactttatgtgccaaatactggtcatctcaagcctcaagttaacttcagcatatctatggaataattctagataggtgagtctcattgacagtaaaaataaattacagagatgtaaacacatttaaagacaaggtaggagaacttgaaacaagatgtcagggacaatcatcatttctacacgctgtaagattgcaacaaaaagcaggtgtgcttacactgttcccactgcatcctgcatggcttgttgatctgtgtttatcagccagtctcctgcatcagactgtaagctcctgggctcctgca

SEQ ID NO: 178562 - DNA, 251 bp, Homo sapiens
ggagggaagctaagtcagctgctacacatccttcaggcatccatatggataggtaagcaaggatgactacatatgaagaaagctggggaaaaaagataaatacggaaaaaatgaaaccgatcccagagaagacagagatcataactcatggagctaaagcagaagagaattttagggggaaaaacatctgagtgtggtcaaagatattagaaaacacaaaatacatatataaaacaaaaacatccatatag

SEQ ID NO: 178563 - DNA, 267 bp, Homo sapiens
ttcgctgcgaccagtggggtatgtgaatatgataaggcgtagggtgatcgatcagggctgaaaggggaacctttctgtgacggctacttgctatttcaggaccattgacagtggcagagacagaggggtacccactgagtatctactatgcttcagccaccaccataggtatttgacacatattttaaatgtgctataatttcacaagaacacatcatctttatagatgaaaaaactgaggctcaaagaagctaagtcacttgtcca

SEQ ID NO: 178564 - DNA, 314 bp, Homo sapiens
cgtatcctcgatgccaagcgtacatgtttaataaatagttgcctaatgattaaactttactgaaaagcttattgaagatttagggcagtgacatggagttgtactatacagtcccaataatgtcacagattttccatgtgaaatttcctggttgttgttgaaattgttagttactctatttgccatgtttagtgttcttggccctcaggttttaaaagttctaatgtatcttaaaaacatgttaggaaaatttgacaatacatgaaacatttattatgctttgaataggtgcagtttattatgtgtaaattata

SEQ ID NO: 178565 - DNA, 326 bp, Homo sapiens
actttgtaagtgctcagtattttctgtatgtttacttgaaagaactaacacactatacatttgtgctaaccttgttagaccacaggcaatggtgggagcagacagttattgcaaatcaaaaaatttcatttagcacatatatatgaatgcccacagtgtgctttgatattatcctttgtacatagtagagaggaagtgcatctgagtagagactttggaactgaggatttaagaagccagcctttgcacaaagtctcattgagtaacagtgttttgggtagtaggtgtgcagaaaccatgagatgggaaacataacatcttgaaca

SEQ ID NO: 178566 - DNA, 595 bp, Homo sapiens
ccgagtagctgggattataggccagcgccaccatgcccggctaatttttgtatttttagtagagacagggtttcaccatgttggccaggctggtcctgacctcaagtgatccgcccaccttggcctcccaaagtgctgggattacaggtgtgagccatggcaaccagctgagtttttgattttgaaacttcctgtaagttgtacttatttttctttgggctttgtaatttggttatgatttttcattcttctttctgctaatcctctcacttccaccatgggagtgtttaaatacctgggaagctgttgaacctaggaaaccacattttacttgccagatgtgaggtttcatttctggttttgacagagatttgactcttcagcatttatttctcttttagcctatgagcttctcttagagaagatgaactgggagggtggaatgcagcaggattgcctggattccaatcccaactggacccttacttttcctgtgattttgggcaagtttctttctctttctttctttctctctctctttttctttctctctctctccttccttccttccttccttcctttctttctttctttt

SEQ ID NO: 178567 - DNA, 678 bp, Homo sapiens
ggaaatcagcaatacctcttactgaaaccatctttgaaaattataactgaggaaattatgacatgaaagaaatcagacctaactgactacatcttgcttctaatctttaagccgtccttgtttattcctgggtgtaggccgagctaactttgagaaggaattcagttcgtggtttgagtctgaaacaaaattgataatagcgctttcctgaaaggacccccttctgccaggggaccagtctgcctttgcaggactaacaaattagctacaagattagaaattacagtttagggtcatgcagactctggctccaagagtctgaacctccccatgttgctcctggggataccatcactatggtaaaacctaagatcagtacttgagatatttttcagaccctagactggatggatcagctgacaccccccagactcataatctggctcagccagttctgccatcccacccaggaacagaagatggcaagaaaaactcatttcaactccctgattcgctccagcctgaccatcagcactccccactgcccaagcgcttaccctccaaattatctctaaaaactctgatccccgatccaacgctcagggagactgatttgagtaataaaactccggtctcccacacagccagctctgggtgaattactctttctccattgca

SEQ ID NO: 178568 - DNA, 277 bp, Homo sapiens
aatggcttcatttttctcttaccacgcctatcatggtggctttcaaactcactaccctgtgccccacctatcacacctgtcctttgtccctttctcacatggatgtctacaaaatgcagcagtaaagtgttccataatccacacttcagtctacataaatgtttaattcccctgccccttttgttttcgtcaggccccctgaagccgcagctgagatggctgactccctgaactcttcttatgttcttgactgttcgcatagcctttcctgggatta

SEQ ID NO: 178569 - DNA, 199 bp, Homo sapiens
attaaccttcttggattggtgggtttataatttttatcaaactaaagatatttagtcattatttcttcagatattttatttgttctgcactgctccaaaaccatcctggacttttaactgcacatttattcatctacttgatattatcctactggttactgaagttatttttcaacttttttttctctgtgtgcttcat

SEQ ID NO: 178570 - DNA, 742 bp, Homo sapiens
tcttgtatatacatgcttctcaaaatatctatagttttgtcggtatttctttctcctactagattgtgatcttttatcggcaaagaccacctctcgtttatctctataccccccattgtgcccagcacatcagagattttatgtttggctgctgaatgagaaacaaatgggatactgttcttctaagcacaatcatcttatattagcattcatttttggaactcttctctaattcctgtcatttttgtatcacatcagaagaagagctatattccctccaccgcctctcctcgcctattaatcaccataccttcccacctcttacgggaataccgaactaatggtccttgtctcaatgacctgcctatcctttgtcccttcatgggaatcttctcacagatcaagttactatgatctacaaggccagttcccatagcctcgttccacttacacacgatcttaaccatttctgtccagtgggagtcacccactcacctcctaaaacctctatgcatgccccatacccctagtcataatactcttatacaaatgtttaacactttgcagttgaagacccaatgtcatacatcttttcatttgatacttagagtcactgtgtgaggtacaaacttcagatattaccagcttgcatgttactaataaggaatcagaagctcatgtagagggggaactgaaagaatccaagtatatgtggctaaaattggccacgtcgacacctgaa

SEQ ID NO: 178571 - DNA, 655 bp, Homo sapiens
gggatcccctcgaatcgacggtttctcattgtgcccagcacatcagagattttatgtttggctgctgaatgagaaacaaatgggatactgttcttctaagcacaatcatcttatattagcattcatttttggaactcttctctaattcctgtcatttttgtatcacatcagaagaagagctatattccctccaccgcctctcctcgcctattaatcaccataccttcccacctcttacgggaataccgaactaatggtccttgtctcaatgacctgcctatcctttgtcccttcatgggaatcttctcacagatcaagttactatgatctacaaggccagttcccatagcctcgttccacttacacacgatcttaaccatttctgtccagtgggagtcacccactcacctcctaaaacctctatgcatgccccatacccctagtcataatactcttatacaaatgtttaacactttgcagttgaagacccaatgtcatacatcttttcatttgatacttagagtcactgtgtgaggtacaaacttcagatattaccagcttgcatgttactaataaggaatcagaagctcatgtagagggggaactgaaagaatccaagtatatgtggctaaaattggccacgtcgacacctgaa

SEQ ID NO: 178572 - DNA, 325 bp, Homo sapiens
actaagaaaatacaagaaacaccagcacaaacaaaaaataactaaagaaaaaatatcacaaatggatgtaaaaggtacaaaaattatttaacaggaatcagtaaagaaggaacaaaggaacaataaaaggcatgagacagtaaaatgacagacataaatctacctacattaataattacattaagatgcaaattgaccaaatgctccaataaaaagacagaaattttcagactggatgaagaagcaagaagcaggatctagctgtgcacttttttcggggagtgggggacggagtctcactctgtgggccaggctggagtgcagt

SEQ ID NO: 178573 - DNA, 443 bp, Homo sapiens
tacctgctactattattattgttattgggcattggattagatgacctttgaaatcacattcatccttaagagtctacgttaccttgaagatgtatcttgttctcagaaaagtcctttcccacgattaccaagctatcttatacaaaatgattcatttttttattcatagactacaccagaactgctcaactgggctccactacacaccagtcatagcatgaaacgtttattaggtgttctcacaaacagcggtccatgaccaagtaagtctgagtaacaccgcgtaatgtatcttccctcttgaagggtcataggcaaataagcaccaaggctctgaataataattctgcagtaaagaaaggcatttcactttggccattttttgtcaaggatcctctttttatccccaaaggacactgattagcactacacagaactaatgt

SEQ ID NO: 178574 - DNA, 388 bp, Homo sapiens
ttaaaaatgaactcaaatgttcccattttttttcagatgggctaaaataggaataaacttgcagcttagctacttcccaacagttcctcagaaacctctggtctttgcctaggatttgcctaggatgtcccttggattcctcagtggcctttcagtcgtcattccaacctttgctatctctcaatccacaaagggtgacctgggaaaggacattaaaaattcacacccatctacttccagcagatctggtgtcttgaacctgaattagtcatctccaggttaactgatttcaggtctgaaaagtcctggactatggaagagaacagaatccacttaactcaacatctgccctttccaaaggtggctacacggcctatcctgatgcctt

SEQ ID NO: 178575 - DNA, 120 bp, Homo sapiens
gattatcttcctaattccctgttcctctgtctatggagtttgtctttatcattactggcattttatgattgaagaggcagaacaaaacaccctgtagtcaggatggatgaacttgctagt

SEQ ID NO: 178576 - DNA, 465 bp, Homo sapiens
agttatcacaactgttatgtgaaataggtgacatttttactgttttgtggttaaggaattagaggcatagaggaattaaataaccagcttttcatagctggagttggaactcagtattttatatcattaaatatacacaaacgtgtgaatgttattgttgtgtgtgctgggtattttctgtttgcctctgcggaactcttctacctttttccatcctgctgtgctccagaagactgacttatacaggctgagtcaatgggctctgacttgtgacttcattgctgtggcctctgaatccaaataaatgactaagagtggaatagagtcagaagtctactacataccccatttaagactttacagcttacatatgtaccatcctcaagaaaatatcaagccaaaattgctgttatatttactgttttctactctaagcatttaaaaacacaaagtttaataaaaaat

SEQ ID NO: 178577 - DNA, 490 bp, Homo sapiens
atcaagaggatccccgtgatattaaacaaagtaacgttattgattattaaatggcaggctagaccagagttggtagatcaggttgtcagaacaagaaatgatttgtggtttttgagagtttctggaggtgactgtcatgtgctgtattatctggggctaatatttcaaggtctttcagggcagctggctgtactgtaccgatttagtgtttattcagcaaagagatacgaaagtatgaatttctcacagctcttcttttgattttctgtttttaacagttaaggggagtttggtttggctgaagcacgtgggacacttcttttttttgagtgtatgaaaatacttttacttcctctcgagttttctaaatttgctttttactgtttcatttcctccatctttttgcttagtttccttgtttaattttttcgattccctaccgtattattgtggtgagaattaactcttattttcagggttaatcgctgcc

SEQ ID NO: 178578 - DNA, 942 bp, Homo sapiens
cattgtccctgccccgggagcatcgccctcggggagtagacccggtccttctcctcccttcccgggggccgagccagctgggatcgctgccctgggctcaacaacggtgacttctgtccctaacgctgtgccgagcgctgtgctgtggggggcggcagtcccaggctttcccggtgctcccgctgtttgcgagtccttctcctgtaagtgcatggcggcaagaaatggctagagggacatgaaagccagccggatttgctcagtgagttcagaacgccctttgagggaattcggaggtggtgctgtctcaaaaccagggctcctaggaactggactgctgctgccagttcttgacatttagaaattaggaattggcggaaaaggattatggagacgccttgcgccaatttaaaaagtctcaccttaggtttggaaacaaatgcttctttatcttcctttgctacggttgaagtgcttaacaagtaacgttattgattattaaatggcaggctagaccagagttggtagatcaggttgtcagaacaagaaatgatttgtggtttttgagagtttctggaggtgactgtcatgtgctgtattatctggggctaatatttcaaggtctttcagggcagctggctgtactgtaccgatttagtgtttattcagcaaagagatacgaaagtatgaatttctcacagctcttcttttgattttctgtttttaacagttaaggggagtttggtttggctgaagcacgtgggacacttcttttttttgagtgtatgaaaatacttttacttcctctcgagttttctaaatttgctttttactgtttcatttcctccatctttttgcttagtttccttgtttaattttttcgattccctaccgtattattgtggtgagaattaactcttattttcagggttaatcgctgcc

SEQ ID NO: 178579 - DNA, 676 bp, Homo sapiens
ccagctgtgtggccttgggcaagttatttaacctctctgatcctccacattctcatctataaaatgcagacaataatagaatcctccctcagggggctgttattaatatgtatgtcaaagaataacccaaagacgtttcactaattattagctctctgtttatttctgtacaaggaacatgtatctatagactgatttcaacaagagttatataagagagaggggaaagaaaaactgcagacaggcaggcacaggaaatcttgtttgcacatttttgggtaaactgatttgctggtgtcttgctttggccaactctgtatataaagatgagtgtttcagctttcagattccacgggcaaccttgacagcattgctgtggtgccatgtgcgggagtgcctgtcatgtctgctggcacctaccaccgggcacctccccacccctagcttggttagatcaggtctgctccattccctcattggaaccctctgcagggttcactgagataaagtgtccattgcttacagcagctgctcgcacacagtaagcgcttaataattattcgctcttagtgttccctccatttgttcaaccagaacttgttgagcagttcctctgccccaggcacagaggtgccgaggtgaggcaaacacagtccctggcctccaggaactctca

SEQ ID NO: 178580 - DNA, 269 bp, Homo sapiens
cagagccctgcactcagaagatacccaggaagtgtttgaaaagatgaatgaaaaaatagatcaaacagatgaaagtcagttgaactctgaaagttttgacagaaagacttattgagtgtgtgtgtgtcgagtctcaccttctgcttatgacaagggcaatgtaagaggtctgagacgtgttcacaagaaatcagcagccctttggagatgacagggcggtgcttgggagtaaagggaatgaaaaaaggatttgggattttggtgaggcc

SEQ ID NO: 178581 - DNA, 182 bp, Homo sapiens
cttacagggttaagattgtatttacagcagttgaacttgaagtttgggagataaattggtgctttggacctgagaagtgagggttctggaaactgatggaatgagactgagtgagggctaggattttagggcacaggtgggagagtctgtggagtgaaggatactggagcacaagggctcag

SEQ ID NO: 178582 - DNA, 596 bp, Homo sapiens
tatttaggatcccagaataccacacatctacttttatacatgcttaccttctctgattagaaaaaccttactttgtctacccccatctctacttctttagtcttcaggactcagtgcctatacctaccacccaccctaactcccaataatgctgagttatatcatctcatagattctagtcacaattaccacagtacttaccaaaatgtactataaacacctgcttgctatgtatttatcccacagactgtaagcttcttaagcataaagattgtttccttactcctattttttgtccctagtatacgcaaaaaatgtctgccatggagtaagtgtttaatcaatgtttgaaaaaaatgaatgaaaggatgaagcaggttgtacattgagagacccatggagaagctgttcaatttttactatctataacaaagacaaacatcaaaattaataatctgataaaactgaaataccaaaattaatctttactttgtaatcagtaaaaataagtaaatcgatatactaatgtaattcttaatttttgtagttcattcttcaaaatattttattcaagcaagtgggatccagcaaaaaaa

SEQ ID NO: 178583 - DNA, 365 bp, Homo sapiens
aaataattgtgcacaatatatttaacaatacagcatagactcaaaagtgtcataaaacaaaatagtactttcccttcaaaatcatttaggaattatgctttctaaaaaatgtacgggaaagtagaactgctgaaatatgttgacaaaattaactttgaagaagcgcaagaaaaggaaataaagatgtaattataaccacagatcctagagatctcaaaaaaaagtgaacacattatccatgctcccatttgcagaaaatatgtattagagagaattgttcagagactttcggacatacacagcgtcttcaaaccgtatcaaaggaaaccccaaggtgcaataacagggccttaagatccaatggg

SEQ ID NO: 178584 - DNA, 162 bp, Homo sapiens
atcagccggtactgaaaatgactagaggcagggaggcaatagtgaggaacccatgatggagagaggtaggagggggtcttgccagagcaggagctgcaaggtcagaagtacttggaactaagtgctactcacccatgtgcaaataggaaagggtgcccctgc

SEQ ID NO: 178585 - DNA, 795 bp, Homo sapiens
taccaggagtctacacagacaaaggtcttcttcaggaaggttacattctaggggggaaggaaggacagtaagttggcaaaaaaacaaaaacaaaaacatgtaactcaagatagtgataaatcctaagaagataaagcaagacagtggtacatatggattaggcgatgctgggtatttcagggtaggcccctaagatctaagacggtcacaaatgctttgttactctccccacggaaagatggagtgtatttccccctctcctgaatctgggctggccctgtgactactgaaccaaaatcctttggttgaagtggggctatgatggttctaggcctagccttcaagagggtcgcctgcttctacttcactttggaacatgtgatggttaagtgtcaacttgactggactaaggaaaacctagagaactgcaaagcattccttctgatgtgtctgaaggggtttccagggaagactggtttgtgagtcagttgactgagtgtggaagatccaccctctgtaggggccagcaccattcagtcagctggggaccctaatacaacaaaaaaagagaaaaggaatttcttttctctcctggagcagggacacccttcttctcctgtcactggacatcagaactccaggctctccaggctttggaatcccagacttaaaccagcagcccctaggttctcaggccttcagcctcagactgaaaattacaccataggcttccctggttttaaggctttcacacctggactgagccaggctactggccttccaggatctccagcc

SEQ ID NO: 178586 - DNA, 677 bp, Homo sapiens
taatttatttttttgtagagatggggtctcccatgttgcccaagctggtcttgaactgggctcaagagatcctcccacctcagcctcccaaaatgctgggattataggtgtaagcccacaagcccagctgatgaacatcttttaatatgaatttcttctttggaaatgtgaccatctttctgctgggttatctttctcttactgatttataacatggatacaaagcctttggcttttttgagacagggtcttgctctgtcacccaggctggagtgcagtggcatgatcatggctcatgcagctttgacctcctaagatcaagcaatgaagcctttgtaattgcaaatattatttcgtctcctgactaaattttatgtttttttgtcatggcaaattattattttttaatagacaaatctatcttctcctttaaatcttcttcgttttgtgacccatgaaggcaggccctaaccatctcaagatttatacatctttatattcaagacttttacaaatttttgttttctagctgcagacaaaagccacctgcaacattttttgttatgctttgaagtaggggtctaactttcctttcaaaaacaccctttactaatcagtcttttatttattgatccaggagaatttggtctacaataaaggtggcatattgattaata

SEQ ID NO: 178587 - DNA, 235 bp, Homo sapiens
tcagatatggcactgctgaccaccgccccacgatgcgacatcaggggtcagatattaggctggcgctgtgcagataaacaagtgtatatgttggtgcgccaggaagacaaaacacgcgcctggagaggccaggagagcgggactggagggttgtgggacgcgcgggaccctcgggccgccttccgccgccgcccggtgtcaccagaacccagcctgtttaccagcggccccgccc

SEQ ID NO: 178588 - DNA, 166 bp, Homo sapiens
ttgagctggttcatgattgacagaataggcatgatcatggtggtggggatttgactgagtggggggttgtgccactcacagaagaaagaacaatttaggaagaaaaatgatgaattaagttttggatgagatgagtttgtttatcagccatgaagtttagggcaca

SEQ ID NO: 178589 - DNA, 308 bp, Homo sapiens
cctcaggcccccaggtggagtgctcgggtggtggcagcagtggtagttataagcaggcaaagcctgtcttcagggtgtgtgcaagtgctctgcagccctgcagggggtggacagagttgctgtcagtagcagcaggtgcaggtaggtggctctcaggctctggggagcataagcttcggttcctaatggtgacagctgtggcagtagccacagcagcagtgggaagagccagtcctcagggtacatgcaattgcactacagctctgccgctagttgggatggtggttgctgtcagtggcaatagcttt

SEQ ID NO: 178590 - DNA, 380 bp, Homo sapiens
ccagagcacaccgcacctccgcttaaagccctccactctgcacactgtaattggaatacatcagtcttcagctgtggtcctgctgcacacgcctcttccctcactacctctggagcactccacctttattcatacccctgggcctttgcacaagctgtccctttgacctggactgtgctcaccccatatcttgtgtggctggctttgccacacaagacatcgacccagatgtcatctcagagaggtttctccaggcaccggccagcatggcacctcgtccctgcagtccctctctggcgacccttttgttggactttctccacagcatggagatagaccatggtatgtgtgtgtggttcatctccccaggagctaagcag

SEQ ID NO: 178591 - DNA, 542 bp, Homo sapiens
atacttaggaatgaatttaaccaataagacggaagatgtgtacacttgaaaaccataaaacattgatgaaagaaatttagatatgaacaaatgaaaagatatcctatgtttatggatcagaagaattaatattgttaaaatgttcacactacccaaagcaaatatatagatttaacacaatcctcatcaaagttctggtggcattcttcacagaacagaaaaaaacaatcctggccaggtgttgtggttcatgcctgtaatcccagcactttgggaggccgaggcaggtggatcacgaggtcaggacttggagaccagcctggccaatatagtgaaaccctgtctctactaaaactacaaaaattagccggatatagcggcatgtgcctgtagtcccagctactcgggaggctgaggcaggagaattgcttgaatccgggaagcagaggttgcagtgagccaaggttgtgccactgcactccaacttgggcaacagagtgagacttcatctcaagaaaaaaacaaacaaacaaaaaaaaaaa

SEQ ID NO: 178592 - DNA, 456 bp, Homo sapiens
tgctttctgagttctcagagatagacaccctctagtcctttgctcatcccatccctgtggctgccttgggtacaacctacaccacctaaaagtattaaccttaaaaggagaaaaacagttagtattaggaataggaggatttgcttttccaggtgcaaattataggtacagcatcttactcttattaactgaaatgaaaggcactgcggatgaacagaactgttttaccagtgagtaaaaggactccctttcatagagtgtttaaagtgtccgaataaggtaaagcttcactaccatttcttaaccaactgtctcagatttttcccattcactccattgtgcttcttatacattactttctatgaagtacacttttatcctctggtttctttcattctaagcttaagttgctactacagagaacaatctaggaaaatctccctcttggaaaatgtc

SEQ ID NO: 178593 - DNA, 535 bp, Homo sapiens
gtgtttgtgtgtgtgagtgatgctgagctagtcttagagtaaatgcagacactggatggtagcgagttcagtgcagtttttatggagggacagcttgctgcctgctgatgaagccggacaagactgggtagtgaagtcaaaggcccacacctaactctgaggctcttgggggcaactgtgttgtgcagagaaggtaggagggcagaggaagaggaggagcggcccctgggagaatgccttctacccagctgcagcttctcaagggtgtgtttgcgtctgacctaaggtgttggagctctttgtttctggctgtgttcaggctttcccccgcttgcctttaggggaagctgatgactgctttagcgtaaagagagggccaggaggtcaacttccctacagtcccgtgcctgcttctgggttggggctggggagagtgctgcccactgaactctctaaatgttaaaagatacaaagaggaagcacagagtgaaaagggagaccccagaggacagcagaacatcccgaagcatatccc

SEQ ID NO: 178594 - DNA, 361 bp, Homo sapiens
ccaagtggggtagctgacattcagtcccagtattaagcagctgtgcccacccagacaggcaacaccgtaaggcttagatgggggttctgcccagaatagttttaacatggaggaacacaggaaaactcaggctttctgctggcagcttgctcccaggacaaagaagggtggagttgagcagagcctatagagttattcttcccaaatttacccacaaaatcaaccactcccctctcacaggagtagagtgaggaaaggggtagagaggtctggagtttcactcactgtgctccctgcatataaaggagacatcagaagtgtggaagaagtgtcccccactaacagtttatgacctccaaat

SEQ ID NO: 178595 - DNA, 196 bp, Homo sapiens
gcgggggagattctgagcccctcttccttggacacaagtcacctcaaacaatgtgtgaagtgctctggcccaccacatacttcttctctggcctcaccatggccttcaggggcactgtgcaccaagtcccacatggctgctgctgaattcagaaccctcgtcccatctagcatcctctaccctgcgaacctcctca

SEQ ID NO: 178596 - DNA, 499 bp, Homo sapiens
acacgttgacacttcaggtcaaagaggtcacttcagaatgtaagtctatgcacggtgtcaaaaaatgacaaaaaatgtcgcctgaacttaacaacattttacaggatgtgattaaaattatcaaccacattaaagtacatgcccttagctcattctatttgcacagatctgtgaggaaatggacgcagagcatacatgtcttctcttacacacagaagtgagatgactttctaaaggtagatcactgtgccagagtttttgagatatgaaagcagctccagtgatttcttttagaaaaacagtcagtcactactggcagcacatttcagtgacgcagaatgggtcacaaactgcttacttgtgtgacatattcaacctgctcaatctgtcacttcaagggagaacaacaactgtgttcaaatcaccagataaagtggctgcattcgaagccaaactggaataatgagggcgatgagtcaacactgggatttagcagaga

SEQ ID NO: 178597 - DNA, 471 bp, Homo sapiens
atgtgacacttcagcatttaaacttcatgctgtcgaaataccaacgtgagaggtcagaggaaaagaagataaagagtgcaggcactcaggcagttgacatgggtaaaactaaatatttgggcctcactagaatctttctattggtttactatctcttcagagaatagtgtaaatgaggaagatatgcctgagtcctggggtctattttaacctaccacttatagcttgctttattgacatttcagatcacccaagccagtgaacacattcatgatgatcctgaagctgatcgtgggggaaaatgttttataaaactaggggcatcctttgggtggatgaaaccgatgaaatcaggatgaaacaagcagattaataagggttgagcataggccataagaaatattaaaaaacatataaaactgtcatcaatgataaaatattctccgctactaacaagttactgaaatatat

SEQ ID NO: 178598 - DNA, 232 bp, Homo sapiens
aaaagaatcaatgatatgaatggctattatataaagagtgctttcaatataccaggcaccattctaaataatttctgtaagttaatccatccacccttctcaatgagacagtgtttttttattatcactattttgcagatgagaaaaccaaagcccaaagaagtcaaaaaaatttaccaaaagccatgccacaagtcagtagcagagccaggatgtgaactcagacagtttg

SEQ ID NO: 178599 - DNA, 178 bp, Homo sapiens
agaagccagaggccaaatctattctgtgatatccctcagtgggccctcaaatatctcaaaaatagtaagccctccgtgtttggtgaatggaattccagaaaaattttaggtagaaatcgcaaacttgtggttctactccttttccaaggtaggtgcccactactgcacctttgtaaag

SEQ ID NO: 178600 - DNA, 192 bp, Homo sapiens
tgtttgtttttagatatagcatcttgctttgttgctcaagctgggcttgaaactcttggcctcaagtgatcctcctgctgtggcctcccaaagtgctaggattacaggcatgagtcacagcacccagcctcattttgctgtttcttaagtgtatagtatgtttctctaaaacctatggtttttctttctttt

SEQ ID NO: 178601 - DNA, 294 bp, Homo sapiens
ctacatcatcgagtgaaatattcccaccagagtgtttatatttaaaagtcattgcactgaatggaattgacatctgtttacattacattgccattactcatttccatgtacaatgtttgccttcatgctgcagtatcattttaggacatgttacaaggaaggattagaggagcagtacaatttgcaaggggattttctttttctttgtgcttgttcttattttttaatttttacttttattaaagtaatacatgcacataatttcaaaatcaaagagtagtaaaaggcttataa

SEQ ID NO: 178602 - DNA, 387 bp, Homo sapiens
agaatcgcttgaacccaggaggcggaagttgcagtgagctgaggtcacgccactgcactccagcctgggtgacagggtgagactctgtctcaaaacaaaacaaaactctagagagatcccttgccctttgtctcttgaggacacagcaagaagtctgtgagctagaaagcagccctcaccagatactgaatatgccttgctcttggacttcccatcctacagaatggtaagcaatcaatttctgtcatttataagctatctcatttatggtattttgttatagcaacccgaatggactaagacattccctttcattcactcagagaaaagctggtcctgtgaggctctacatgatctgcccaatccactccactttctccttacctt

SEQ ID NO: 178603 - DNA, 698 bp, Homo sapiens
tatattaagtataggtattaatgataagttcgtctagtttggaaaacttttaaatgggcagagatgaacataatcagatggcaaggatgtggtagtagctgtttgaataacaataatgatgaggatagctaacattgataagcattatttcatgtcaccctctccgtgacagacagagcctgagaggagtcgccattgcccccacacagccagcctttcagcagccttcttggcagcagctatgtcagaccaacagtaccttcctaattttagcctcacaaaattcatttatgtttcatatataccttattcacatagcatgaaggtaatttcatacgatgttttttgttttgttttgtgacagggtttctttccatcacccgggctggagtgcagtatttcatacttcctgtatttgtggcaggaagctttatgctttatcatcagagtgatctttgaagggaaggacttactcagcatttaaataacacaagctagattacagagcaaccctttaaaccatttaagaaaaaaatgatttcctttttaaaaaatggtaattgctgtatgattgtcaaatttttcctcttgaaagtattttttaagtaaaaatgagcctgcatactacacccatgtatgaccatcatataacaagacagggtaaatgcaggtcacgcatccctaatctgaaatccaaa

SEQ ID NO: 178604 - DNA, 281 bp, Homo sapiens
tccatgccatggggctcacactgccctagggatactgtcagggatgttgaactccatgagactgtctgttcacctgactcccaggcagacagtaaggcgatcaggcttttccttaagttgagctgaaagctgaaatctgcctccttgaaacctacctccagctgttttaattttgccagcagagtatgtccagctcttcaccagtaacagcaagcacaaatgactaatttaagaaaagcagtacagcagctggacgtgttccatcttctttgatgctcacc

SEQ ID NO: 178605 - DNA, 552 bp, Homo sapiens
aaaaagtggaaagaatccagctgaccattgagtgggaatggatccacaagatgtggtccctccatgcaagatgatgagaatcagaacaaggctcaacagggctctgctaaacgccaccctggggatggacctcaaagctgtcatgcttcagcctcagggtccaccaagactggatcaaggaaacgtggtgcatatgtgcaacggaatactactcagccataaaaaaggagagcatgtcttttgcagcaacagggatggaactggagaccattatcttacatgaaaggacttggaaactgaaactcaaatcctgaatgttctcacttataagtggaagctaaataatgtgtgtgcaggaatgcagagcgtggaatgatggacacaggagactcagaagggtggtggggggtgagaaattacttaatagatacaaagtacatcattcaggtgacggtcacacgaaaagcccacactttacctctatgcaacattcccatgtaataaaactgcatttgtacccactgaatttatacccaaaaaagctgattatgc

SEQ ID NO: 178606 - DNA, 370 bp, Homo sapiens
cacccaaggatgccattaaagaggatgaacgagtgcagaatgagaaaagatatttgcagcacctatgacctggtgttaccaagaacccccacgaatcggcgagaaagaagataactctgtagaaaagagggaaaacacttgaacagtcactccacaaaagatgaaatccaatggtaagtgaacatatgagactggctcagcctcattcatagaaaagaaaaggagaccatggtgacctcccaccatgtagctgctccatttgcagaagcgtcggccggggtgtggccctgggcagcatccacacacagcacatcccacggctcagaaatcccactcctgggtgtggacttgacacaaatgtggacttgtg

SEQ ID NO: 178607 - DNA, 1351 bp, Homo sapiens
atccaaatgcattagtcttagatgaacacacctggaatctcacttttatgagaatttcatagactatactcttgaattccagttgtacatttttgcttgcaaacacaggcatttcagagtataatgagaggaggctggtgctcataaagaagactgactttacagtaaaccacctcccaggagaactgaagatggggcttgagctgaggtggggtctcttctccactatcccgagcagcacctgggccccaggtcttcacctagacagtcaaggacctcagcctaaacagcatccagctcttagaagtcctgtgaaattgggccaggcactgtgggtcacgcctgtaatcccagcatttagaaggaggctgcggcaggtggatcacttgaggccaggagttcgagaccagcctggccaacatggcgaaaccccgtctctactaaaaatacaaaaattagctgggtgtgatggtgcatgcccgtaatcccagctattgaggagactgaggcaggagaattgcttgaacccgggaggtggaggtagcagtgagccaagatggcgccactgcactccagcctgggcgacagagcgagaccccatctcaaaaaaagaaaagaaaaaagaaaagaaaaaaaaagatttcttgtaaaattgaaaacaaaattcagactttggctacttgaatcttgtttaatgtaataggaaagctgataatttaaaggtaacaagttgtggaatgtcttctttaagattagcatgcagtctcattgtacctgttacctgttctttttttttttatattgaatgtgttcaaagctcatcccacctgtatgcagagtgtgttagaaactgtgctggatgtggttgttctctttctagaaggtagggctcccatgacagccatataggttctcttggttgcataagtaaacataaataaaccagtaaacaaaatgcctgctttctgtgtgaatacgttgtcatttgatgtcatggtgttaagtatgaaggtgctataaagaaaaggggaggccaggtgcggtggctcacccctgtaatcccagcactttgggaggccaaggtgggtggatcacgaggtcaggagatcgagaccatcctggctaatacggtgaaaccccttctctactaaaaatagaaagaaaaaaaatttagccaggcgcagtggtgggcgcctgtagtcccagctactcgggaggctgaggcaggagaatggcgtgaacccgggaggcggagcttgcagtgagccgcgatagcgccactgcagtccggcctgggccaaagagtgagactctgtctcaaaaaaaaaaaaaaaaaaaagaaaaggggaga

SEQ ID NO: 178608 - DNA, 1129 bp, Homo sapiens
catcattgaggtaggagttgaggccatgggaacaggtgccatcaccaagggggacatcgtagaggaaaaaagagagaagataaagaatgggcaacaggtgaactcgtgagattataaattgtaagggcaagaactctatggttttttatttacactctatttctagtacccctagcacagggcctgattcatagaatgtgcttaataaatacctgtggaacaaatgaatcaacccagtaagaaactgcatgtgtagatgccttcttgctgcactcaaccaagtcctacaagcaagagatttattcagaactggttggaatgcaaacataaatagaaaaaagaaaataaaggtttgttaacagaagttctgtctcctttgcctgtgggtggccatctaaattgactgagagtcctataatttggaatattgcacggctgaaaaagctaagagcttttgtactccaaataacaacagcttcagtggtagcaagattggtgtctcctgggcttgtctggcaccttctgttaagagttctctctagcctacagagatgagtcaattggtgcaggtcacattatgagtcatgtctgaattgcctcaaggcagtggctgttaagctaagggatagggagaagggcagagcacacagacagcaggtaagagaccaaaatcttgagttgaaagactatatggagacaagatctgtggttaggttataaagacataaacttaaccagaagaaattaggcctcgtgcccactgaatttttaaaggaactgtattgctgaagaaaccacaagcctggttgcaacagcctgagcacattctagcctgtgagaaaatccatggctccctgataggcaatgaacctggaaatagccaagggccacaatatataaggaagattttcccagagtgcaaaataaaggttttacaacatggaatagggagtcctctctatacctgttcggcagcatgtagataagtggtgtgagccagtggctgttgtgtgttttgcttctcccctttcaacatgagagttttcattgcagttttcccgctcctttttatatcactatataatgagtatgttgggggcagtatcttgcctttaagctttaagagaga

SEQ ID NO: 178609 - DNA, 477 bp, Homo sapiens
tgcagccaggcagtcagtcctttcttgaagggggaccctcaggtccccacatctccacatctaccacatcaaccacctgaatctgccattccaacattagtaggctttaaattgtaaccgtgacaggctgtagaaagaaatcttttcctttttcacctggagtgatggcctttcaataaatgaaaaagtgattgttttcagaaacaatgaaaatgtaaaggaagctctaagagtggattctgtgcaatcatgagaatggctcacgaatttgaaactgcaaaatccacagaagtaagttaatactgcaaagctccacttatggaactcgagccactgtttttgaaagataaaacaaagccttacatgtgtagagcacttcagttttcaaagtgctttctcatgtcatttgagttccataataagcctgtgaacggggcagggcaggttttataagcatttcacagatgaggaagtcag

SEQ ID NO: 178610 - DNA, 512 bp, Homo sapiens
tgtgaacccgggaggcggagctgcagtgagcagagattgtgccactgcactctggcctgggtgacacaacgagactctgagatcgtgccagaacaccacacctaggtatatcattttgaaatgacagaaaaacaaatataaagaaaaaagtcctgaaagaagccaaaggggaataccttaccaattgatatggtttggatctgtgtccccacccaaatctcatgttcagttgtaatcaccagtgttggaggtagggcttggtgggaggtgattggatcatgggggtggatttttcatgaatggtttagtaccatcctcttgctactctcttcaccatagtgaattctcacaagatctagctgtttaaaagtatgtggcacttccctccttgctctcttgtgcctccctttatcacgtgaactgcctgctcctactttgccttccccatgagtaaaagctcccctgagacctccccagaagcagatgcagccctgcttcccttgcagcctgca

SEQ ID NO: 178611 - DNA, 645 bp, Homo sapiens
gttggtttactttggtttcttttaagattgtgtgaatcttttgccttgtactaaagattttgtggaggccgggtgctggggctcacatccagtaatcccaacactttgggccaccaaggcaagaggatcacttgaagccaggagtttgagactagcctgtgcaacgtaacaaaaccctgtctctaaaaaaatttctgtggagaagaacaactgagttgttaaccagttttgtgagctcttgtgtttacagggcttataatggaaaaaaaataatgaaaaatgaaataaataaaaattatagcaattggtctgtttcataccaccttaggaaggtgtttttaagaaacaggatatatagccaggtgctttggcacatgcctgtaatcccagctacttgggaagctgaggtgggaggatcacttgagcctgggagttcaaggctcaagatttcaccactgtacttcagcctgggcaacagtgcaagactctgtctccaaaaaaaaaaaatatatatatatgtatatgtatgtgtatgtataatatatatgtaaacattttggctgaaaatgcaatgaataacataaaatttaccatcttaaatcatttttaaatgtatagttagttaagtagattcacattgctgtg

SEQ ID NO: 178612 - DNA, 126 bp, Homo sapiens
ggatgggtgggtggatgaatggatggatgggtggaggggggtatgagtgggtggatgaatggacagatgaatggacaaatggatgggtgggttggtgggtggacaggtggatgagtggatggatgg

SEQ ID NO: 178613 - DNA, 394 bp, Homo sapiens
cccttttctataatctttctgttacaaccattgctatcgggtctttagtacctgacacttgaaacttttgcttaacatctgccttaacatggattgctgcctccattcttcctgatatcacactctgaggttaatcttcataaaatacaaataacaaagatcccaactggtttgatataatgactctggtaatttagcagccttactgaacctgctaccagaatactacttctcatggcttcacattggctaccaacacttgaccccgaggaatacaactttaagcatctgttgaagaaagtaagacaaatagggctgggacgacaagcttattatctaaacccgcatagggtggcattcaaagactttccaaacttacccttctagacttttc

SEQ ID NO: 178614 - DNA, 667 bp, Homo sapiens
cctaggacagtagctgtgtacctggcctaggttcctcagtccagatggtagcaagtctgaagacagggagagacttcttccagaagatgaaattcatagaaacctgaggcaaattggtatactcaaaggagctttgtcagactggagagtctggggtgaattgggataaatatatagtagataagtatgtagaaaactaaagaaatgagaaacaaattattaattgcaagggaaacaaaatgttatgcaggaaaagaaaagtaattattgtttactgcttggttcagctctgaataccctatgtagttataatgacataagcctcaaatattgatctaaccaaagttaggattgtgttgagacatcgggggtgggaagtgtggaggatgccaggaccaggaaacagctatatctcaaatttcctcaactggcagtcactgaataaagaaagcttttgggaaaaggaaatattggagagggagctgggactagtttttcataacaagccttgtagatctagttaatttaaaaaaatgtgcatgggtaacatttatttttacctttatcagatatttttctagatcaaaatttttacaattgttttagcttctcattgaaatgttgtcttactaggttaaagtttcacgtgtgtaattggatttgaaaa

SEQ ID NO: 178615 - DNA, 217 bp, Homo sapiens
caaatgaatacataccgtttctactacatgaaatttcttctcaggcaattcagcatttccagatcgcctcatccttgattttcctctgaacttcgagtctgtgaatgactgtcctcttcccatttgctccctgccagatctctgcagcacctagccatgcctgtggcacacttctgtccttcacgctgtcttctctggtctttcttgggtggtacag

SEQ ID NO: 178616 - DNA, 240 bp, Homo sapiens
gatcaggttttgctgctgtttctccaacactaacaagagtgcctggcacacggcagatgctcaataaatattggtggcattatcgtcaggaaagagacagcagcagctaaaggaagtgacagcaacaccctgttgggcagatggacagaacaggagtcgatgggagtcagaactaccctctgagagtagctcacctgtggatcctggaagcaaaggcgaggcattttcatgcaactttgc

SEQ ID NO: 178617 - DNA, 302 bp, Homo sapiens
  misc_feature (26)..(26): n is a, c, g, or t
  misc_feature (28)..(28): n is a, c, g, or t
atcccctgaaaattgatatatatttntnatatgaattgtctctatgccctctccattacaaaaatagaaaagcaaaaggcaactaataatgaaattcaggagaaaaaaactaagaatggaaatgatgtatagttgcaagtagggaaggacaaaataaaccttagtaatttattgttacattttgtaatataactttccttgtctataaatcagggcccttgtctcagtgaagttttgaagcttaaaacatgtaaatagttaagcaaaatgtgtgatacatataaagtgctcaataaatggga

SEQ ID NO: 178618 - DNA, 395 bp, Homo sapiens
tgtcagagcttgcttaagtaacaaagaattgctacaaaacaagtaaaacaggcacaaaaaaatttaagaatctgtaatgatcactcattaatttcaagatcccacacagttaatttcaatccaacacttgtctctatttaaggtatatgagaaataaaaatccaaagcattagcctgatgatcagccagttaaaaatacacatttgaatacgccgaagatatttataaagccaacagagatactattaatacgttgaaattcgctggccagtgctggattctaccctaaatcttctactactattcaagagaagccaagtagtcaaggcttctcgtatcacttgcttttaagaatttaagaagtcactcaaattggcatacacaacccaacctca

SEQ ID NO: 178619 - DNA, 306 bp, Homo sapiens
gtttaattctagatctggtgctttagatctgtccttgagtagaggtggtttgaagctgttttataaaaggtggagatggttgaaaacagagttactaggataattgctgtcaactggacatttgcttcccacgggtttcacgctgccgtgggtctctgcctgagttatctcattgactcaggcagccttgggaggtgtctgtcattgtcccacatatgacagatttgaacatctaggcaagtagagagaagtcacttaattgcccaagttcacaaagctagcgattgccagcactcacttggaaat

SEQ ID NO: 178620 - DNA, 371 bp, Homo sapiens
gccctcacagaggagaagaatctgcagtgtgcagattcttagagtggggactggcccctcataagtgcttagtagacttggggctcagttacctctcagaccttcactgtcttccatctctcctcaagaaagactcacagaaggagtgactccgtgactgtgtgcctcggagtgcctcactctgaaacccagagctggatgcagaaagtggtccccattctacagctggaacagctgaggctcagagcatgaagcaccctcatctgatgttccatagctagaaggaagccggctgggatgcggcccctgctaggatgcggccctggctgggatgcggccctggctggctgatctctggagtttgtgctctt

SEQ ID NO: 178621 - DNA, 125 bp, Homo sapiens
ggttatcaggtgctattaagaggcccattaccataatttattttttacatgagtgtgactttacccatgtggttttctcctaagtgctacacacctgctattttgtttcgttttctaaaagatta

SEQ ID NO: 178622 - DNA, 1711 bp, Homo sapiens
aatgtgaatggtagagatggaaagagcaggcaaagataagaacctggtggagaatgtagaagtagaattgagagagagctagaaggagcaatgttaggattgacattgtcactccggtttctctgagaccacgtttgacattgttgtattcacataataaccatctgtttacctaagctactttgagtgaattctattcctgtaaccaaaaaaagtcttcatgagaacaccccattttacaatataatcctgtgtgcataactatgacttgagatctatttctacactgaaatctgcaatatgagattgttctaaggaaagcctctaaataaccaaaaagactagacaaccttcagtattagggtttaataaaaatagttagcattctgatatgggaaatgtattccagatggaatgttattaaggcttatcagtctagagtaaacatggatgtgtacaccaaattcttcagtatcagaaccagatggcactcaaaaaggtttaatttcattcaaataagcaatgccactttaccaactagaaaggggataaatgaaactcattacctcagtgtatggcttaggactcagataaatgcatgtgagagagatccttaataggtgattgagataaattagggaaatttaagaaatcttcttatacctttaagggagactagtgagaaagattttgctgtctaacaaaacattttcttgatgttagtattcgattccacaataagcggtatcttttattctagtgttctctgtgggtagtaggtatgaatttgccctgtgactctcaggtgtcttgttacattcttcttatgaatcagattattttctcaagagtctggagatcttatgtcatcctgaaaatgtagggaacggtctctttagcttatcagagttagaattgaaatgcatattttccaaattcatatggaccatatcaagttgggagcctgtttagtgcccaatctgaccttggaacactttgccccactatgtgactttaaataagcttcttaacttctcagggtcttggtgctaaggtcagtctttctgaattcatcaaaggttttcaaagatcctctcgccttttgagattctgcatggtagtaaaacccacttcctcactatggaacccacccgtctttctgtgtcagacaattttcttctgcttatggttggggccactcctcacctttaactaatgaattccttttctgctttgtgatgagctagtcttttctgcccagattgcactgaaagatagaagctgctgcttcgttgtaaggagagctcaacctgttcacaaagatatctacctccctacaaattttttttagaacaaatattgcttgaatacatttaaggcaaaaataaaccaataaaaatcagccttagatttgatagctgggttggaattgaacctttaggttttcttaccaaacaggatttatctctgcttcattaatacatagcattaatttggcatttttattctccactttaaatagaacacgggaagacaaaataattttctttcagcaacaagaaagtaaagcagtagcaggaaatctagaaaaaaaaatccttctaaataggaattaatattttgcatcctttttttgtatttttttcctcaattagagtcctagccaataaacattcaagtcaaccaaaagtattatttctgaatggaaaag

SEQ ID NO: 178623 - DNA, 253 bp, Homo sapiens
cactactgccacaggtgcaggcagccaggaagggaaaatatgcaggtgcttggttaagagtgaggagtcctaagcatgttaatcaaggtttctcgaatgccatgaatattatggcacttcatggtttaaaaacaaaaaaacaaacaaacaaaaaaacgggaagcagacgaacctaataggggctttgtgctgttacattcccaagaactagccaggagtacctagagccaccctgtctgcgattaggcttggt

SEQ ID NO: 178624 - DNA, 338 bp, Homo sapiens
tgctaatagtgagtatccaaatgtcaaagtaagtagaaacaagtgtcataaataaatgttaaaataacagccaaagatatgtatcctgaacaatggacaacagatcgcagaaggagttctcaaattaatcaatgacagctgcccccaatgtggtagccataagaactactgacacaatgacaatttgtattctctttcctttccccctgtggctgcagataccagacactcctgggactgtctttctcatcttctcttctccagtaagggtgaggcaaaaatgaaaaatgcaaaaagagttattactatctcatttgaagaggtgattaatggaagtg

SEQ ID NO: 178625 - DNA, 583 bp, Homo sapiens
cgggaggatggcttgataccaggtcaagatgcaatgagtcacaccactgcactccagcctgggtgacagagcaagaccctgtctcaacagtgtaatctaaactctctgaaataaagtttattgcttaattgggcaaaaacaaggaaacagttattataaacagtgttaacttgaaaaccaaaaaatcagcaggttctgccatcagcctctaagaggctgaatgagccttatgatactttatttttgaattagacttatttagcaacatagtcatagactgtgcttgtcaaccacagcaggagtggataatgcctctataattttactgcatgggagaatagaaactacatcctatagggctgggttgagcatgtgtacttccttgttttttaatgcagaggcagagataaattgaagatgttccttttactttttcatcttggttgtgaagtagaaattgcttccatttatgaaaatatgaaatgttaggaataagtgtctcattttgggcaacgtccaatttccttatctttcatggtatggatcatttaacatactgtatttctttctaccaccagtgcca

SEQ ID NO: 178626 - DNA, 541 bp, Homo sapiens
cggttcttgatagatgggtgatgttttagtttatcctgcatttttttttcctttttaagttagaggaatctgaatctattcaaatgttttattttagcaggcatgtgccctgtttaggtttaatttgaatgtcctgtcctacttttgtaggccatgttttcgcaggcagtcttgctatcagagctgaggggatgctgttttgatcacttagtttatctgatgttgctgggcctccaactggtgctgactggtacttcctgagatggcgaaggtttttctgtactctgagatgccgtgtatctctatgtaaggggaggagactctggaccacaggaatgaagagaacatcttaggtcaggcagctcaatcatatgcgataacctgggtcaaccagccagtagcctcatgaagtatgggagggaattctccagtgtcagcattcaaagacatcatgagtttttacttctcattttcttttaagtgaaataatcgcatggaaattaaagaataaatatatgaaatatatgaaacttatatgaaa

SEQ ID NO: 178627 - DNA, 321 bp, Homo sapiens
ctccacccgacggggtggcttgaggtatccgcaggagtggccgggtggcgggaggaaccgttacgggaactgaagttgcggattaagcctgatcaagatgacaacctcccaaaagcaccgagacttcgtggcagagcccatgggggagaagccagtggggagcctggctgggattggtgaagtcctgggcaagaagctggaggaaaggggctttgacaaggcctacgttgtccttggccagtttctggtgctaaagaaagatgaagacctctaccgggaatggctgaaagacacttgtggcgccagcgccaagcagtcccg

SEQ ID NO: 178628 - DNA, 308 bp, Homo sapiens
tcgaagatcttgaatgcctctctcagctaaggattcagtccaaactccttagcaaggtccttcacaaccaggttcctaacatggtcttcctagtctcatctctggccatgctttcacacacattctatgctccagccacattcagttattaatacattccctgaaaacgtgtctttacctgaaaggcccttctctccatttcactggcaaattcctgtatcttttaggacacatctcaaatgtcaccccttcgcaacaccttccctgattctttgagcagacacacccatctccgtgtccttatagcg

SEQ ID NO: 178629 - DNA, 274 bp, Homo sapiens
cataaatattcttacatttctgcatagcctgggctttcatacacacatgcatgtatatatatacatatgtatcttatttgtgtattttgcctgttattatatattgtcattctttcattctctttacattacacttttactactattagcattaccagtcccgatttcttctgccttgtatctgcttgccaattctttgcctatgtctttaactttgatcatgattgtatatgtgtttttggtaaagaacacggatttgaggtatgtcttatag

SEQ ID NO: 178630 - DNA, 271 bp, Homo sapiens
atgtcactgaatactcacgagtcactcactgtttccagtataaagccatggcattcaactcatggcctgaataataagcgaggaggaaaagagctaccccaatttttctttttgtttcaaatgttttctaatttacctaatatcccattctcatataatagggctgttgaaaggcttctctttggcttcactgttttcctctacttgaactttacaaaggagataaatgcttcagacatgaccttgattacaccgtgactcgtggaaatgt

SEQ ID NO: 178631 - DNA, 516 bp, Homo sapiens
aggtatggctattccactatgagcaggagcagtaattactggcttgcaccacaaaacaaaagcatccctagcccattttctaccacagaaaacacctattttacttattgccgtactactaattatagaaaccaccagcctcttcattcaaccaatagccttagctgtgtgactaacagccagtattacagctggccctctgcttgttcatttaattggaggcgccacacagtattaacatcaatcaacctacccacagcctcagtcagatttacatcttgattatattaaccatttttgaattcgtcatagctttaatccaagcatatgtttttacactactagtgagcctctatctacaagacaatacttaatgacccagcaaacccatgcgtaccatctagtaaatcctagcccttggccattaacaggggctctcttagcactaataacatccactacccagacttagtggttggatggcaagcatgtggtctttggcaaggtgaaagaagg

SEQ ID NO: 178632 - DNA, 403 bp, Homo sapiens
gctggggggggaggagcaagtgtggaggtgctgggggggaggagcaagtgtggaggtgctcgggggagcagtgtggagatgttggggagttccgagcaggtgtggaggtgcttgcggggaggagcatgcctgggggtgttgagtgggaatgtgtaggggccgtctgtggaactgagaggcattgattgaggtacagtgggtgagggtcccagaggaagaagaaacactcagctgcagaagtcaggaaatgctcttgctcttgaacagtggaacacagctgagtgggagtgatctgtgtctgaaagattctcctgttgtatggaaaatggagcaggcaggggagaaagattgagaaatggagagggacggtggcttggactgaggggacagagttgaggtggct

SEQ ID NO: 178633 - DNA, 546 bp, Homo sapiens
gtcgcccaggctgcagtgcagtggtgagagctctgctcactgcaacttccacctcccgggttcaagcgattctcctgcctccgcctctcaagtagctgggattacaggcacgtgccaccatgcctggctcatttttgtatttttagtagtgatggggtttcgccatgttggccaggctggtcttgaactcctgacctcacgtgatccgcccaccttggcctcccacagtgttaggattacaggcgtgagccatggcacccggctctactaccatctctgcttggacatcaaatgggcaactcaagcttggtatgtccaaaactaaatactcaaactcccaccacctgctcctcctgtggtcctctcaggccggaaacctggggttacaccggaatactctcacatccaacatccacaccatagacaattcctttggcctccactttcaagttataaccagtctgcaaccacattttaccacccaagtccaagccaccatcacctcttccgctttcacaatagcctcctaactggttttcccacttc

SEQ ID NO: 178634 - DNA, 439 bp, Homo sapiens
aaggacccagcacctcaatacaaacttaaatgaccacttacatttagttcccaggttgcaccaagtatgaaatgtcaccagctaaaaatctctaattaaagtcattttcccaaagtccctccttccttttgcctgccttcaaaatccaaagcttggcagaaatatttgattgttcagagcctgtgcctctaacggcagatttcatgaaaaaagcaattctctccaccctcggtattcaaaatcactaagagaccatttcctcagcagcattctgcctctactctgttaacacagctcagggaggagagggttctcattccccggtgactcagccccagcaaggcccaagtcacacaccacatggcttctgaacccactctgagcaggcaaacatcaaaacaaaaaaccaacaggtgtaacagcacaagtccattcagaa

SEQ ID NO: 178635 - DNA, 539 bp, Homo sapiens
taaatccccaggaaggtctcagtgctgcaaaagctccatgaccattctgcttctaaactgacggagcaaacatatatttccagtggtaatgctaggaaatactttgctaaggatgttactttggtccttcagccagtggtcagagaacagaatgaccatactgcaaccacccatggtgaactgactggcacacctacaaaaatcttatttttggggtccccatagtacccagtggattgccttgcacattgtaggtgctcagtatgtgtttgctaaagacatgaccctggataaatcacttcacctcaattagtctgtttcccaaatctgaaaataaaagcagtgaaatggacaaggtgacagttaaggccttgaatcagaagagcctctgacaatgtgacaaatagcttagccattcctccaagactgagataaaatgtcactcttggttcaggagctgtggcagtaggagaacatcaggcaactagtcctagacttatcatcatccccatggaaggagtgtgattgtaagtctctct

SEQ ID NO: 178636 - DNA, 746 bp, Homo sapiens
aaaagactgagaagctcaccataatcctgaaagagtatccagttcacaccataattttaacaagcctggggcacctggactaaagacacactccagtttacttacttccccccaaccatcccgcttctatattcccagacttgctctgagtagcaaaaggataaatggaagtgaaggcccggagcggtggatcacctgagatcaggagttcgagaccagcctggccaacgtggtgaaaccctgtctctaataaaaatacaaaaaaacagtcgggcatggtggcgcatgcctgtaatcccagcaactcaggaggctgaggcaggagaatcacctgaacctgggagacggaggttgcagtgagctgagaccacaccattccattccagcctgggcaacaagagccaaactccatctcaaaaaaaaagaaaaagaaaaagaaaaaatagaagtgaaaccaaatcaaggcaacttggttctctagcggaaactttttgaagatgaggttaaattccactcttgtgaatgtcttcatgagaaactcctcaggagggaagcactgtttttactgaccagatgtctgggtgaaaaggagacctgtccagtcagcattctgcatccctcttctgatcatcccctcacactggtgagcacctccaagggacaggtacttgctttcagacctgtccaggtctctttccaaacctctgctgtcctcattgaagaaccagactcaatgctagccccct

SEQ ID NO: 178637 - DNA, 721 bp, Homo sapiens
gatgtatgacctattcgtcgtataagtaagtccttgaagaagtggctgattctagatctagggcaagaaaagtacaaggtaagctcaaagacatcttgtgtcagaaaccgtgaaaagaaaatagggaccaccttggagtggtttccatcggcaaaatttggggtgatttaagctttaaaaatacattagggattataccactttgaatataacaattcgtgagtccatagtggtactcagagagagaaaggtgcagtggatgtgaaagctggaagaatgtcagctaacagatgtagaaaaattggtacaatcgaaaaacgtaataattcattcaagaagaatcatcatcaactaacacgtgaaatgttgaggatgaggattttcacaaggcctcatatcatcccaattaactggattctggattttaaaaaactataaaggagccgggcgcggtggcttacgcctgtaatcccagcactttcggaggcagaggcggacggatcacgaggtcaggagatcgagaccatcctggctaacacggtgaaaccccgtctctactaaaaatacaaaaaattagccaggcgtggtggtgggcgcctgtagtctcagctactcaggaggctgaggcaggagaatggcgtgaacccgggaggcggagcttgcagtgagccgagatcgccccactgcactctagcctgggtgacagagccagactctgtct

SEQ ID NO: 178638 - DNA, 375 bp, Homo sapiens
ctgcaggacccccaacgctgctcacaggagaagatcatagggaaggaatcagttgagaattcaaaattctgcccatagaaaacagaagagattattctctcagttaggaaatgcgtaagatgttaccagtcagcatgttggttataacagtggttggttataattggacttgtctgaaagactagctcatcaaatgaaggggatttagctgacctgatccattcagtcttgtctagtcgttgaccatttcaacatcagagattgtcagtcaaaaactattgtttggttttgttctatctgcaatcaattaatcttatacttgtcctttcaaactttgaaatttcatcccgatttggagtttgtgagatcatgttg

SEQ ID NO: 178639 - DNA, 620 bp, Homo sapiens
tcccgcctcccatttacacacacttctaaagcccaccaaacccctaagatatttagcccgaagcagatccaaaggcacacatcttactgaccagatgaaaccatgcctcagagatacatttatctctggctgccaccacctccaaccaccattccctatgtcttttccttcagcatagctgatactcaagcagatgactgacaaaggagcccaatctaaagggctgctgaaggaaggtttggagggccttttggctaagatcacatgtatgttatccccatataaatggccaagtacatctgttggtcaccgacaatgtgtcaggcataacacagcacaaagatactctctcccctctttaggcctcacacttttaaaagacaagagaaacagtccagatcattcttttcagtactatttgtttccagctgaagatgagagagatcttttaacacagcccttcatcctgatctctgggaaggagacaattggatggccctggccattctgctttctctggttcccatagcaaggccctgcagaacttctagaacacaattatgaggaaagaagctctcagcattccaaagcagaaggaacaactgtcttgaatatgtcga

SEQ ID NO: 178640 - DNA, 254 bp, Homo sapiens
ctgccactcttgtctgtagggaggtgggtacagatctgacttgagtttaggtcagagccaggatgtcctctgggttcatggtggtcctaaataaggaaaggcagagtgggggcagggaacctcctgcactcaggcccctccatgcacctgcctccccgtgacccaggaggatggtgaagtacctgccagttcttggaggacagttaattctaatggcctactgagaatctttgtttcctgtatttgtggcctga

SEQ ID NO: 178641 - DNA, 511 bp, Homo sapiens
aactcagaaattcagctgcttacaaaaattactgcaacggagcacttttttttgtatttatgaattcatttgtctgtctcacactagtttgtgacccttggaggatagagactgcatcttttttgtttgtttgtttttttgtttgagacagggtctctctctctgtagcccaggcttgagcccaggaatttgagatcagcctgggaaacatagtgagacttcctctccaaaaaaattatacttttagatggatctacaaactgagtcataaagaaaattgatgtaaggtaaaaatcctgacagcatatacagtattaatcttgatatcctcagatggtgggagtcactgaagaaggtaggttaatgcaactctccagctcttgggccaggagggagaaggaaatataggcttacattccaaggaaaagggcaaggctgtctggtggcatatatactaaaagatcattgagaggcaacacttgctaggtagcccagttgaaattataacatg

SEQ ID NO: 178642 - DNA, 192 bp, Homo sapiens
ttttaagactattttgattatttagggtctcttaagattctataagaattttaggacagatatctctatttctacaaaaaatgtcattgggattttgataaggattgcactttgaatgtataagattgctttggggtactactgacatcttaacaatatctaatctcccaatacatgaaaatgtgatgtctt

SEQ ID NO: 178643 - DNA, 180 bp, Homo sapiens
tcgtctgcctaggctggaaactgggaaggattcatcaagcttgtgaatttatcttctctacttagggttacacccaacagtgtgctggtaacaactggccctccagaaaaaaagaagggtgggggattttagcatctgccaatttctgtgatgtaaatactctgacttcagatttcactc

SEQ ID NO: 178644 - DNA, 164 bp, Homo sapiens
acattctcacagttaatataggcttaacttggaaatattaagcttttaggatttagtatgtagtagttctctgctggcactaagtctttccccttcgctcctttccaacaggtattgcccaagctctcataagccgttcttttctttctattatgattattatt

SEQ ID NO: 178645 - DNA, 258 bp, Homo sapiens
cggaggaattccctgggactcatcatcgccttggactataagagagaagcaaagggggagctgtactgggatgacggtgtatctaaagatgctgtgactgaaaagaagtatattctatatgatttctctgttacctctaaccatctacaagcaaagattataaataataattatatggacactgacaacctcatgttcacagatatcacaatcttgggaatggacaaacagccagctaattttatcgtcctactgaat

SEQ ID NO: 178646 - DNA, 286 bp, Homo sapiens
tgtatatgtctaaatttcatctcttcacttcacatcatgaaatcttcctgagctcaagcaatccacctgcctcagcctcccaaagtacgtggattacaggcatgagccactgcacctagccagcatcatctttaaatgatgaaattgtggaaacattcccattaaaatcaggaacaatgcagggatgtacactgtcaaaatagttattattaataactagagaaagacatcagaaagcaggaaacaaaattgctgttatttatagacgttatgatatatctttaaa

SEQ ID NO: 178647 - DNA, 773 bp, Homo sapiens
gactagacacatcagaggaaaactgctgaacaccagagctagagagaagctctttagtggccagagaaaaaaagtcaatttgccttcaaaggggcaacagttgaactgacggctaacctaaaaatggcaacagtggaagccagaagacagttgaatggggtgtcttcagtatgtggaggaaaaaaacttttcaacctagacttgtataccctgtaaaaattgcttttaagaacaagggtaaagatattttttagactagcaaaactcagaaagtgtgtcaccagtagaaccttaatgaaggaaattctggaaggtgatcccaggtggagatgtgtcaggaatgaatagcaaaaaaagtggtaaatgtttagtcttgttaaaagtaaaacttcagccaaagtaagggagtttaattgtacaatgaatgattcgtgaatcaggcagcccccagaatcacagcagagagtgctgaggcgggcagatcacaaggtcaaaaggtcaggaccatcctggccaacatgttgaaaccccatctctactaaaaatacaaaaatttgctgggcatggtggcgcacgcctgtagtcccagctacttgggaggctgagacaggagaattgcttgaaccagaggtggaggttgcagtgagccaagattgcaccactgcactccagcactgtctcaaaaaataataataataaagaaataaagaaaaggtggaacatgttttacagatgagctttgtgaaggtgacatgactagcagcttcaggact

SEQ ID NO: 178648 - DNA, 266 bp, Homo sapiens
agttgctgggaaggcactgaaggctgcactaaatggggagactgtctagaggcactcacttgtcaatcacaggggcctgaagttacaggagatattaatcaggctgcattctcctggaaaatcaattttcctcaaaagacagtatcttcaaaacgagaacaattgataataatttatataccctacattaatcatactggatgcttaattataaattttctcagaggagaactttgtctttttaccatttttatcctcagcatcta

SEQ ID NO: 178649 - DNA, 200 bp, Homo sapiens
gactgtgcccaccgtttggggaagggagaacactgtgactgtcgtgtgcgtacacgtctgtctcctccacctcagattccaagcatctcaaaggcagagatcgcctcttggtcacttctgtccccttcccttacacaccgtaggtaccttatacatgggatcgtgccattgcactccagcctgggcaacaagaaaaggag

SEQ ID NO: 178650 - DNA, 430 bp, Homo sapiens
aactcatggtcacagctgaattttactatatgtacaaagaagagctggtaccatttctataaaaactattccaaaaaaactggggaggaaggactcctccccagctcattctacgaagccaccatcattctgatacaaaaacttggcagagacacaacaaaaaagaaaacatcaggccaatatccttgatgaacatcaatgcaaaaatcctcagcaaaataatttcaaactgaatccagcagcacatcaaaaagctaatccaccatgatcaaatagacttcattcctggaatgcaaggttggttcaacaaacaagtcaactgatgtaatctaccaataaagtacaaaactgacataatcatccattacagatccagaaaaagcatttgaaaaaaaacttcagccttttatgattaaaaaaaaactcaaca

SEQ ID NO: 178651 - DNA, 356 bp, Homo sapiens
cttccagtgattacactgggacactcagcctctgccactccagaattccatcattccattaaaatgagagagtctattttgaaagtagcacctaatatcacatccaaggcaatcagaatacagccttcccagatttcttcaaggacactgatgttcccttcaccaatgcatttctcaatatttccatgaggaaagcatttgtgggtcacacatgataaacccactgcaacattcctatctccctaaggctttgggatattttcatgcaagactgaagtcactatggccattacagactcttcaagaagagggaatttaatctccttagagaaagaagaagaggttggttccacaat

SEQ ID NO: 178652 - DNA, 347 bp, Homo sapiens
gagtagtgagggttggctctgctaaggtgggggaacaggcaagggcaagagctgccaacatctgcccctgcagacctgcaatttccctgatacgtggcctccctgtggaagcaagggacatccatcctgaggacagatggctaaacaaggaggagtgggcttaggggcctggggtatggtgtggaagttcactctagaatcctcctcgttgattcagctgataccccagttaactgcaactccgaagagtggaatcccagaggtcacaggtctttggggacagaaggacttcagggggccttgagtccaggtgcagctgatgcctcagtcctctcatcctgggcgat

SEQ ID NO: 178653 - DNA, 292 bp, Homo sapiens
tctcaccaagtgttctagagaagtcttggggagacctcaaccttctcctcagaccttgtacagctaatcagccaacagatttctctactctatcaatatgctcgcactgctttctcctctctgggcccaggaccacaggcttataggtgagtccctaactaaaagtgacagccaacttaaaggaatccctgcctccatccattccaaaaccaccctgaaggtggtatagaaaaaaaaaaaggttggaggccaggcacggtggctcacgcctgtaatcccagcactttgggag

SEQ ID NO: 178654 - DNA, 682 bp, Homo sapiens
cagtatgcacagcaccagatttctaatcagaaaccatgaaggccagaaggaaatggcacaacattttttttaaaaactgtcaacccagaatcctatatccatcaaaaactatatttcaggaatgaaggggtagtcaagacattatcagatgaagcaaagctaagaggatttttagccaacagctctgctataaaacaatggctaagaaaattctctaaacagaaaggaaatgatagaaggattcttagaacatcaggaaggaaagaagaatatgaggctgtttcctattctgttgccaaaacaaaagcagaggatgagaattttgaaaaaggaaaacagtctgagtctcaagaagcctatgagaaggaagagaggaatgacttggtcatgcccatgacagaaaagtggcttagggatgtaatgagagaatacaatatgtagatgatacactagaattcttgtcctttgaattagtattgggttggcgcaaacatgattgtatttttgccattgaaagtaaggcaaaaactgcgattgcttttgcactaacctaatagaataaaatcatttgagctagaacagaaatgctaggccacccagcttcctcccttttttatatcaagctacatttgcacagcttctcttagatagttttatttactttatgccatgtagtttcctg

SEQ ID NO: 178655 - DNA, 255 bp, Homo sapiens
cagagctgtaactaaaaatcataaaataacatggcagcagcagttgtcagtaaacagaactcaccagctcgaaagaatgtgagattcgaggaatttttttttctttaatttggctatgtggtgtataagagacacatccaaaacataatggtgtcgaaaggttgaaagttaggagttggaaacaagacactaggtaaacattaaccataagaaagctgctctagctatagtcctagtgctacagcgacagtgatg

SEQ ID NO: 178656 - DNA, 115 bp, Homo sapiens
ataacgggtggtgtcctggaccttagaccgtggacgaggcaggagggaaggacattccaagagagaatgtctgcctttcttgaaggatattgaagatgctgcctcagccccgggg

SEQ ID NO: 178657 - DNA, 511 bp, Homo sapiens
tggagccccaaagtcagtgcacaccctgctcctgagcctcctgctcctttcctatatatggcttcatttgtagcacggttgttgcaccgaggcttgtgcatgccaggcaaggccaagctggctcaaagagcaaccagtcacctctgcaagggtgtgccaggaacaggtgggccaatcaccaacctcacatgctgccagtcacagtacatcagttcttctgccctagagttagggccccagtgccatctgcttttcctcaggactctgctccatcagccatcaggtggcagctactcatgctgttggaacctggccatctgggcttccttgagtgggtgaggttgctggcttgtccacctgcttaaaggtactatggggatagaacacaaataataataatgcatttttcaaacaaattaattccttgattttcaaacaaattgaagacaaaggaaactcatgattcaaatgaatacatatggctcattttattcaatatttatgcttacag

SEQ ID NO: 178658 - DNA, 482 bp, Homo sapiens
tatggaagaggtagattcaaacatgcctataataaacattcaaaatgaataatttggggcttttttgctacctccataagcattttgcaagaaatatgatttccaacagtcattggaatttttctgcgtgaaactgtaatactgtatttgggatcattctttgattcttaaattatattcataaattcataaattgagattttaaactctaaaaaaggagttttcttccaaacttttcaaattagggcactctatcaacgagggagagaaggcccagtgaagaggtattggtagctatttgacaaacctgacatatccccttagagcataatttcagcaaagatttgggaaaaaaaagcaaacttaaacattaacaagttcaggcagggcgtggtggctcatgcctgtaatcccagcactttgggaggccgaggcaagtggatcacttgaggtcaggagttcatgaccaggctggtcaacat

SEQ ID NO: 178659 - DNA, 718 bp, Homo sapiens
tgtggacccccaggccttttcccctcaaataatttgaagcaagacaggcatatatctaatgtggaatgaacatccaaagtttttgagggtattaggctttcctaatacctaataccaagagccaaaaagtttcagggaaatttcttatttagaaatattatttataggtcggttgtggtagctcacactggtaatcctagcattaacagtgaatttgtaaaataaaatttttaaataatttgggaggctgaggcaggagaatcgcttgaacccgggaggcagaagttgctgtgagccgagatggcaccactgcactccagcctgggtgacagtgtcagactccatctcagaaaaagaaaaattgaaagattggcagtaacctaaatgaccactaatatagggccaactggttaaataaattatggtacatacttgcaatacaatattaggtaaccattattaaaaagaacgaggcagttcttttcaactggagaaagtccatgtaaatcacggaattatagaatgctcagacctgaagtgatcttaaagattagctagttcaaccttctacaggaaacaaggaaaatgatttacctaagatcatacagtcagggatgaggccataatccaagtattctggtatctattccaatgctgcttctacaaggggatgccttctctcccatattattctttgagatactgaggactgcaaggc

SEQ ID NO: 178660 - DNA, 459 bp, Homo sapiens
tgcttcttccccagaccctccagactctccatctcacctgaggacaagccagggtcctcacggtggccacaggccctccaagcttggccctgagccctcctgccctcgtgccatgtccactcccacgctgtggaccagccacactcctgatttgggcccactgcccaccctccctgcctgatgtccagtctgcttcgtcctcagacaccgttaccacttcctggttgattgctgtccttagcgctttctcttactcagttcatctgtcccgacccccatgaggacccagcatttcttttgttgttgaagcatccagggcccagcatggtgctggtaggcagcagccctctcaggttttatgttgagtcggaagaatgaaggaatgaacgagtggcctgtgtgacccctggccgtggaggaggggactcgggcctagcagagctctgtgccaggcggccg

SEQ ID NO: 178661 - DNA, 1046 bp, Homo sapiens
aatttttgtattgttagtagagaccggggtttcaccatcttggacaggctggtcttgaactcctgaccttgtgatccaccagcctcggcctcccaaagtgctgggattacagccgtgagccactgtgcccggcctcctttttatttttatacccatctgtagcagttgatgtggccacatttgcatttgttttatccagtctgtttacagctttgcaggcagtgaagtgggatgttggtcaccattgagcccctacagtaactttgttatacttcctagccgtggctgttaagctctgacaggtttggccttagtcctaggtgctaaaggttgacttggttacaggattgaagctagatttggagtttgcagattgaactctgtgctgagggaatgcctgttgggaccagtgggtgtgtgtgtctctagaagagatctataaggttaccaccttaagtatcttggccaagccgtataaaattggcagtagtcatccatttttacctacagacatgatagttctctatggttcagcctaatatctacaaaggagttggtttaagggcaattcaaagtttgtcctgaagctgggagaatctccttgtgtgtctctaggttgcaggttagatgggagagcgagcacagcagaggagctgtgcaggaagagacatgcaatggaggctcctctctctcacagaaatacattttctgtgatagtagagcgaaaccctttcactctgatccattcagaaacttttcatacctggactttattaaagggactgtcacttccccattatccctctttgggagaatgcaaggtatgctcctttgcagtagttgttactgttagcagagttgacattgtggacacatccagtgcagacatggattgggaatgtgggagcccctgcttagaaggtgctctcaacctagctggggtgataagccctcctcctgtgggcaggggagtgtggttctaggagcaggtttccctgtgatgacagtgtggcctgtgcaggccgtggagagccatgacaggagtg

SEQ ID NO: 178662 - DNA, 787 bp, Homo sapiens
agaggatctccccgaacatgccgtggctgttaagctctgacaggtttggccttagtcctaggtgctaaaggttgacttggttacaggattgaagctagatttggagtttgcagattgaactctgtgctgagggaatgcctgttgggaccagtgggtgtgtgtgtctctagaagagatctataaggttaccaccttaagtatcttggccaagccgtataaaattggcagtagtcatccatttttacctacagacatgatagttctctatggttcagcctaatatctacaaaggagttggtttaagggcaattcaaagtttgtcctgaagctgggagaatctccttgtgtgtctctaggttgcaggttagatgggagagcgagcacagcagaggagctgtgcaggaagagacatgcaatggaggctcctctctctcacagaaatacattttctgtgatagtagagcgaaaccctttcactctgatccattcagaaacttttcatacctggactttattaaagggactgtcacttccccattatccctctttgggagaatgcaaggtatgctcctttgcagtagttgttactgttagcagagttgacattgtggacacatccagtgcagacatggattgggaatgtgggagcccctgcttagaaggtgctctcaacctagctggggtgataagccctcctcctgtgggcaggggagtgtggttctaggagcaggtttccctgtgatgacagtgtggcctgtgcaggccgtggagagccatgacaggagtg

SEQ ID NO: 178663 - DNA, 405 bp, Homo sapiens
ctcatcttaaactacatatgacaatgacacatacttatcagttagcaatcattttctaaaatgagggaaaacaaggtgttttgtataagaaatattattgcacttgtaaatcaggccagaaactagttcacttgaaaatgcaggaaaccttatttcctcatttcacaattccaggtgtgcactatttacaatgcccaggccaatcactatttcaggaaaacatggcctacagccattaaactctctagtaagcatctagaagtttggcccttgatttacttgcacaaagaagatctgtccatataataggtgttaatctgttgaacaccttgtagcttcctcaataattgagaattcttctcaattaggagagttaaacatcaattcaaactcgaaaaggagagc

SEQ ID NO: 178664 - DNA, 890 bp, Homo sapiens
aagaattatggagaaaaggccaggtgcagtggctcatgcctgtaatcccagcactttgggaggccgaggtgggtggatcacctgaggtcaggagtttgagaacagcctggccaacatggtgaaaccctgtgtctgctaaaaataaaaaaattagctgggcatggtgatgagtgcctgtagtccaagctactcaagaggctgaggtgggagaatcgcttgaacccgggaggcagaggtggctgtgagccgaggcattccagcctgggcaacagagtgaggctgtgtctccaaaaaaaaattgtggctgcaggtgttaggtgttagttggtctgggggtgacagatgagcagatgagcagagactgaaaggagtgaagggaggtgctgaatgccaggcactggcatgctgggtcatggggacagcacgtgcaaaggacctgtggcaggagcccaggagctgtcaggagacagagcaaggaacagggacttggtgagagacacttccccacgtccagggtgaatccaggaccctcgggcagctcatctgtcagatggagactctgtggaaggacaggggatggccttcgggcttattaagatcctaatggggccgggcacggtggctcacacctgtaatcccagcacttcgggaggccaaggcgggtgggtcacatgaggttgggaattcgagatcagcgggaccaacatggtgaaaccccgtctctactaaaaatacaaaattaactgggcgtggtggcacatacctgtaatgccagctacttgggaaggctgaggcaggagaattgcttgaacccgggaggtggaggttgcggtgagctgagatcgtgccattgcgctccagcctgggcaacaagagcaagactctgtctc

SEQ ID NO: 178665 - DNA, 506 bp, Homo sapiens
ataaccagaaactggaagtctgatggttgttttcagtcttgaacaacattgattctgcggtgaccagtttagagttcatgcaatagaccttcctcccccttgtaaaatcatcactatttcagctaatacttagagtgacctcctggtgactcatcctcagccccctttgccggttcttcttttccccgacattttcattctggagggcttgggattcagtcctttggcctttttcctagctgtgtctgccccctcggggatctcatccaatacccttcccacagcctacccagaccccagtgctgaactccagactcacggattcagcggagcgcagaatgtcagatgtgtgagggccgcctccgatgcagcgcgttccagatggagctgcggcctcccccagacccgcccacccccacccccagattctgttgagggcaaatcatgcttcctcgcagctcacaccctgttggttctccctcccacgttcatctggaatgcggccg

SEQ ID NO: 178666 - DNA, 242 bp, Homo sapiens
tcagtgctcaggtgtgctgcttcccttgggcaaaaatgaaccaaaactttcttccatgaggaagaaagcggagtctcgagaggaaagtccaggcagatctcggctccaccactgaccctctgtctgactcagcttccatagttgtaaaacaaaagggttttatgacatccacctaaggggagcaatgggaagcaggggttgtcccaggttcaggtctgagcttctgttccatgcactggcta

SEQ ID NO: 178667 - DNA, 221 bp, Homo sapiens
gggaaatacttaaggatttaaaattccgatgaaggggatccaagtgaatggaagattctgctgagaatattgagatattgatatgtattttgtgttcactctacttttctgtttccttttctgagaagagagccaggtcttggcaatttcttcaaaggatggttgactgtgcctttcagaatcttgtttttcatgaagtctgagttccttgagaggataat

SEQ ID NO: 178668 - DNA, 473 bp, Homo sapiens
catataagcggtcaaatcagatattgaagaagagtgtatatctaaaagcaaaaggtcctggaccctaaactgtacttctctccaaatccatgaagcccctcgtcgttccatttcagaacaggacagttagttcccctcgcacagtctgccacacgcaacacggcctggcacactgagagggtgtccatgtacacctgttaaataaacagacgccaatgtgccagaatgctcaggattaaatactgctgtttaaagttcaatgaaaccatttttacttactcgagatgcttggccccacccctttcctgaatgaaagtaataaaaaatgctacctttcagtatgttgtgtgtttaacagaagattccagagggcagtctggactaccagctattaaggatataggcataccttgtcaaattgcgcttagcagatattgtgattattttagactgaaggttcacggcaatcctgc

SEQ ID NO: 178669 - DNA, 292 bp, Homo sapiens
caccaaatgggaagagagattcccaacccagtctgtagacttgacttgtagcttggctttcaggctttaaactctttggattgaagatggggtttcacaggggaccccacctccatctgcctagacattggcctgcctcctgccgctatcaattcttcgccaagtgttgggattgtagcagtgaaccactgctcccagtactaaatatcaacttttagtgaagatgacttcttcccatagaactctcaaaaagaatctttttgaatctcttattatcagatttcagccagga

SEQ ID NO: 178670 - DNA, 141 bp, Homo sapiens
ttctgaggggtcatttttttcactagtaagcaaaatttttaatatttcaagggagttccaacatatgcaaaaagtatataacacaaagctggttgagaaatagacactggttctcaacagtgggcaagtgactctctggca

SEQ ID NO: 178671 - DNA, 414 bp, Homo sapiens
ctcttcctaaactctgtgctttacttcactcagagaacacaaaagcattgtagccatttgcctaagcagcctagaaaaggctgcctgcttctagcatgctctgcaattcacattgtacgactttttaatctatccttacagcaaccctctgaggcagggactgctgctctccccatttacaggtagggaaatgtaacctctttggttcaataacttccccaagcccgtattggagccacattcagatcatgctgactacaaggcctacgctcttcattcctaagctctgctgcccgcttgcatatataatgtgctataatgtcaaacagaaatagtgtttttagttaattgatgtttggagtcacttgtgtttcattagtggagaaaacagagtttgtacttttgttaacattc

SEQ ID NO: 178672 - DNA, 491 bp, Homo sapiens
tcttctgtctcaagctgctacactcaccagtaagattaaaacgtgactggcccctaagaaaggcagatggcaaagtacgaagctttccaggagagaacacaagtatagctgggtcattcaatgcaaaagatgaccctatggccaggggcggtggctcacgcctgtaaatcccagcactctgggaggcagaggcgggcagacgacgaggtcaggagatcgagaccatcctggctaacacggtgaaaccccgtctccactaaaaatacaaaaagttagctgggtgtggtggtgagctcctgtagtcccacttactcgggaggctgaggcaggagaatggcttgaacccagtaggtggaggttgcagtgagccaagatcacgccactgcacactccggcctgggagacagcgtgagactccgtctcaaaaaaaaaaaattaccctaataactgccttgccttgaagaagtgatgaatttaatgaaatctctttg

SEQ ID NO: 178673 - DNA, 396 bp, Homo sapiens
acccaggtagattatcatcatatacaatggaactcagacggaaatggcacaacatttttcaaatgttgaaagaaaagaactgtccacctaaaattccatgtccagtgaaaatatccttcaggaatggaggggaaatcaagatattttcaaaggaagaaaaactggcataatttgtcaccagtagatataacctaatagaatggataaaggaagttccctaaacaggaagaaaatataaaaacaataaatcttagaacatcaaaaagaaagaagaagggaaagtataaaaatatgggtaaatacaccagattttcctcttaagtcttctaaattacgtttgacggttgaaacaaaaagcctatctctgtgggaagtggttctcaatgtatgtagaag

SEQ ID NO: 178674 - DNA, 601 bp, Homo sapiens
acattctggtggtctgaaaaagtgctgatactcaaatgacacagtgagaaggtcagagattccagccctacacatgacaaagttaaccgtacttcctcatataaaacagaagcctaacagtctcccaaatagcctcataacaaaaagcaggagggagagaattattaccatatatgatcatttgaaaaaaaaataaggaactatataaaataggaatgatgcacattaactcctaatttaatactatcaccaatagctgttgaccactttaaaatcatttaaccaactcaaaaatacaaatgtttctttatttcttttgttttagaggcaaggtcttgctctgtcacccaggctggagagcagtggttccaagtagctgggaccacaggtgccaccacgcccagctaactttcttattttttaatgttttatagagatggggtctccttgttttgctaaagtttgtctcagactcttggcattaagcaaccttaccagctcagcctcccaaattgctgggactacaggcatgagccacggtgcccagctacaaatgtgtttccagtgactaaatagtcatagagtaaaatactcaatatcc

SEQ ID NO: 178675 - DNA, 334 bp, Homo sapiens
ttgcacctttataagaaggtattcttttcaccttcccaagtgtataaatattgtgttgattttttttttaagtgaacactgctaaatgctaagcatttggtggaaaaccaccacattccagaatcaggcagccaagcccatccccattcccccctccccatccctctccccccttcactgccaccgtccacttggcagctgtggttttcccatgaggagcccaggtatccatgtgtctctcaacatgtgtctttctagtaggagcctgtacagcaatagtgaaatggctcacactctcacacatgcacacacagccagaataaattgtataatc

SEQ ID NO: 178676 - DNA, 511 bp, Homo sapiens
aggagataaggcccagagatccaggaggattgttcagggttaccccacagagcaacacccagacttccaggcaattcataacctcctgacctctggactgagtagatgacagcctaaagtatttaggccaaaacactccatcaggatgaccctcaggtcaggttataaggcacttctttggtgaagggtccccaaagcccaacgcaaaggaattctagagaggttaatcccgtagcctggagtagtggtttccaagacgatcattgggttcagtgatttgctagaatgatgcatagaactcagcaaagttattatcctcacagtttattacagtgaaagaacatagagcataaaacagcaacagcaaaaggtgcacagagcagagaccaggagagaccagatacaaacttccagctgtcctctcccagtggagtcgtgcagacagtgcccaatcttccaagcaatgatgtatgacaaaaaaaaatgaagtactgccaaccaagaaagctca

SEQ ID NO: 178677 - DNA, 336 bp, Homo sapiens
tggagccctctctctgtatcattaagccactcaaagagtactctgaaaacaagcaagcaagcaagcaagcaagcaagcagaattcctagaatgtaaggtgtatgaacctatctccctgccttctgcactgatgattatctcaaccagtttaggtagctgagagaatcatcaatcagccattaaagatggagcatataattgaccagcgtttgccagattgactttcaaggagtgggagccttatttattttcaggtctctgtgatcaaagaggttgggaaatgttacagagtcaaatgcacattagtgtattaaagactcaagatggtctatcgca

SEQ ID NO: 178678 - DNA, 388 bp, Homo sapiens
gaagaaaagattagtgtatttgaagacagcaacagaaggaatttaaaataaaacatagagaaaaaaatatatatgtatatatagttcaatgaaaagagcatcaggctaggtgaagtggctcacacctgtaatcccagtactttgggaggctgaggcagaaggatcacttaaacccaggactttgagactaccctgggcagcatagcaagtccctgtctctacaacaaaattaaaacgatagccaggagtggtgatacacacctgtgcttccagctactctggaggctgaggtgagaggatagcttaagcctgggaggttgaggctgcagtgagcagtgattgcgccactgcactccagccaagctgacagggcgagactccagctcaa

SEQ ID NO: 178679 - DNA, 288 bp, Homo sapiens
tgacctgtccctggagaaagtagatgaggactgcctctggcaacagcagaagaaaaaagataccaggcagtgaatgggtggaaagaatttttttgaaggactggaatttcctctggtgtggcctacaactagaatagggtgtggcaccagggcaagtgaagaggattctcatgtgaaaaaaaagaggaacattccatttctatttaattctcacaattgaatctggaaggcagcttaagacaccataattttaagcaaaacttccccgaggtaggtaaaatgtgaagt

SEQ ID NO: 178680 - DNA, 321 bp, Homo sapiens
tgctcactaaaccatgatggttattatcactatgcagactttcatcccaactctgtgactgctgatagctggctcagtggtggccctattagcctagaaccctgggatcacattattgcagtgtggttcatctgtactgtaatttacgtgaaatagaccatatgtggatactaacagtatcacattactgacattttactactatggttaatggttaagtaccattttttcccctcttaagagtaaacctttaagaatataagccatttccacagcaggaggcaaaatagtttggataagagtccttaagtaggataacag

SEQ ID NO: 178681 - DNA, 974 bp, Homo sapiens
ggcacccttgttgaaaatcaaagtgacaaaaaataagatttatttatttatttatggactctcaattctattccattgatctatctgtccatcctcatgacagtatcacaatgttttgattactgtcgctctgtaatcagttttgaaatgaggaatagagctctccaactctgttctttttccagattgtttcaccattctaggttgctcaaatttccataggaattttgggataagcctagaatttagtcggaatttttacaagaggtgtgttgaatctgtaaatccatttggggagtactgccaccttaacaagtcttccaatccatgaagatgggatatcttttatttagtcttttaaaatttctttctagagtattttgcagttttcagagaattttctactttggtaaatttatccctaaatattttattccttttaatgatattgtaaatggaattattttcttattaatgcaattatattatttcttactagtatatggaaatacaattgattctgtacattgatcttatattctgccaccttgctgaactgttatcaatatttttaaactcttgaagtgattcccatttgcaaccaagtctaagcaccactagttcagtaccacccatgccctccattctaatcagggaagatacttttatgcccctcatcactcttttctacccaacctctccatagagaatacaagcattcagctagttccaaaagaaacagcaaaggaagcttaagggggaaattatatatgcaaaatttaaaactctgattgagagcctttaaatactttagcccaaaatagtgccgttacattttctggaaaagattactaagatccaccttgtaagtttgaggacagtcattcaatatgggagattaaatctggactccaatcaaaagtacctccagttcccaccaaccaagagtgatcaaacacgtctatctttatctc

SEQ ID NO: 178682 - DNA, 801 bp, Homo sapiens
aattatccagcccaaaatgtcaataatgccaggctgagaaacactgggctagatatttcaacatttttgagctttggtatctttttcatcaatggaattagtatatacttcagagaggcatttaagaaggctaaagttttgaaaacatcagcacaaactgggcacagtggtgagtgcctgtagttccagccacttgggaggctaaggcagaagggtcacttgagcccagtagtttaagagtttaaggccagcctgggcaacctagtgagaccgtgtatttaaaaaaaaaccaaaaacacgtaactttaaagaactaacaaaatctcagacttttcttaaatagcaagtttagcgagatacaatttccatatcataaaattcaccctcttaaagtatataattcaggtgtttttagcctattcccagagttgtgcagtcatccccactatctaattttagaaagttttcatcaccccaagagaaacctcttacccattagcagtcaatccccattcctccctccccctagccaccactaatcttgttgtttctatggatttgcctattgtggatatttcatacaaatggaatcatccaaaacatggcccttttgccatgtggcttctttcactgagtttaatgtttgcaagatttttccatgttgtagattgtatcaatacttcattgctttttatggctgagtaatatttcattgtattgatgtgctgcattttgtttatccgttcattagtttttggagacatttgggttgtttacaccttttggctgttataaataatg

SEQ ID NO: 178683 - DNA, 557 bp, Homo sapiens
ggagtctaatggtagctttatgattcccttgtatattatttagaatttgcctatggataaaggagagttcatctttggaataatgcccaagttataagaaatagtagagggaagtttttatactcatttctatgtcatttgagtgccatttatccttgaactggttttatttaacagtggacttaaggtgtttatcggcctcagaattttttcatactcgataattttaagtcacttgttgactgccatgcaatcctgcagattttttttttccctgataagcaagtggttttattggagagcataagcttgtcagtcttacaaactccactgccagatagggtttctgcagtactgagaagggaaggtaattcagtgggagatttcacttatattaatgctcccaaactatataaggctttatttactcctggcatattttaactttgaaatcaggtgaagttattataggtttctgttgcatattctggcctcatttcttctttttgtcaacccacagaatcttcactatacaattaccgaaagtaataattttc

SEQ ID NO: 178684 - DNA, 368 bp, Homo sapiens
gctctgacccaccagcagaagcacaaaagagaaccagggactggctttggttcgattgcgagtgtcccagttagttctgtccatgaagtctgtcaatgactgggcctaacaatgtgtgcctctgcccggtgtcagccttgggggcctggaggagactttatcttaaggaaaaagtgcttgcttcagcacatggccagtggggcctggctgtgacagcaggcagctctgctgtggcagctcagctgtctgagagcacttccccttgggttccccgcagagcaggagagaaggtgtctaggcctatgggcttggtgaccaaactgcatggtttctggtagtgtgcctggaactcctgctgtgcaagattt

SEQ ID NO: 178685 - DNA, 704 bp, Homo sapiens
tcaaatgtagactttgtgaaacttagtaaaatctagaggtcataatttaactgtaaggtacaccatccatgcatatgaacatgagtgcctggtaattacaggccaacaagttatactgggtaccacttacgtgcctaataccccacagataaagatttgttgtatttgagcctactgacaaattcagaaaccaaggccacaatcgtgtacacaactagagatctacaatctaagaactgaagcatatctttccccaaggtaaagaaaatataatctactgcttgttcatgcagaaatacagacatacgtatcataggctcattgcccaattctacattctagctaaattgctctaaaaacatatgccaatctaagagttactcaaaggcacatttcgccaacttgaaatgcaattctgacccatgctccttgtaattttattttgccactggacgccaaggatgcatctccgagtaaaaaaattacttaattcacattgtgggatgaaaattcaaatgtcaaactgaaacgccagccagccacctgggtaaaagtgtatacatttcatattgactacccaaattttcagacccgtcaagaggcaaatcagaagcacacagaaaaacagcttcaacctaataaacgtgcttgattggttaagaggaggcctgccaggcattttcccttgcaataaatcttacttc

SEQ ID NO: 178686 - DNA, 180 bp, Homo sapiens
caggtcagtttctcctctgcccaagccttcttccttcattcctccacagatgctgatcctgagattcctttccagtaaacttcctccatgcaatcttcatctcaggagtctgtttcctggggaaactaacctgcaactgatacaaatgcctattctgtgagataaaacactaaaagtaca

SEQ ID NO: 178687 - DNA, 295 bp, Homo sapiens
aagatctatcacaccacagtgatcatagttaataatacatcgcatctttcaaaatgactaaaagtagattttacatattctgaccacaaaaaaaagtaggtgaggtgatataggttagagttaaggttatgtgaatatgttaattagcttgttaatatgttaattagcttgattgttaatgtgtttattagcttgattattaatatgttaattgacttgattgttaatatagtatctagcttgatttaatcaccgcacaatgtgtacttggattaaaacatcacgtacctcatat

SEQ ID NO: 178688 - DNA, 105 bp, Homo sapiens
gtcctcagccccagagccttgtcctcaacctcatcttcacttccattctcagcgccgagtcccggatctggctatgtgagtgcttggcaggtgcgtgtccagcgt

SEQ ID NO: 178689 - DNA, 1046 bp, Homo sapiens
agctgaaatgctaccatatcataggcagctaaaatctgtttatccatttgggaaggtggcttttcaggtagttatttggctgctcacctggaagaactcacagttcatttttagagattggtttttaaactttggtgttaggacccttttatattttaaaatttgttgagaacccgaaaatgctttgtttatgtagttataattaccagtatttactgtattataaatgaaaaattagaaattaaaaaaattacatattaaaaaatgataaactcattacatgttaacatacataaaagctttaagaaaataaactatttttcaatgcaaaaaagaaattggtgaggagagtggcattgttttacctttccacacatctttttaatgtttggaaaattacaccttaaactcaagagaatgagggtaaaacatcaaataatgtcttagtagtatttggtgacttaaatagttttgacctattgaaccctcaagagtccctggaccatactttgtgaattactgttttaattgatggactaataaatgctatcagattcctattttgtcaagatgctgtagtcacactttaaattatgaggctcattatcataatcattctgatccaaacaagttttctcccttacccttagactctcacacctacctaccctctcctaaatacatactatttatattttgaaaatttttactgctcttttaactgcgatgtttagagagtccttacattctggcctgatctctaaatctgctgtaatgctatttctgtgtctatgctggaaaaaaaaaatcattgatagtagtatttctgtgtttattgtggaaaaaaaagtgaatgattacctagttcaagatattctctaactgaatgttgtgggtgttactagtgaattttgctttcttgtctgataaatgttcaaagaaacccttttgaagattcatgattagacagctgctatggcatagcactttaaaccatgcctcctgtaccctaccgcttctctagtgtttcattgtggttataccag

SEQ ID NO: 178690 - DNA, 206 bp, Homo sapiens
ctcccgatctcaggtgatccacctgtcttggcctcccaaagtgctgggattacaggcgtgagccactgcacccggtgacaagagttgtatatttacccacatatcaaccattgctgatactcttcattctttagtgtagacccaaattttcaaataatactctttctttctgattttatttcttgcattgcagttctgttggcagt

SEQ ID NO: 178691 - DNA, 270 bp, Homo sapiens
gatgtggcaaggcagatccctgcttcagagctgcctgggaggactgagctgccagaaccagttcagccccaccacagcccaactcaaattgaaatccactttattattagaattttggtggaaggagaaagcaaatctgagagcaagccaagatgttaaagtggattagctggagacagtccaaggcaaacaaggctcaagtgagtacacttgcagttctgccaggggaaggggtacaagaagggagatggcatggttggagggagggga

SEQ ID NO: 178692 - DNA, 569 bp, Homo sapiens
ctttgggtgatggtcccttcttttgaaattgaggaggcagccttggtgatccctgaatggccttgtcttaaagaagattacacatacgcaactgaatagctctgtggtccttgaaatctgaaagccttccctcattgggttcaaactggcagttttcctgttggggtgactgattgagttcttagtttacacctatgctaatctctttatcaaatggtcacttggccacatcctaattattcacatcctattattgcagtctgtgcaatttagatagactgagaattttccaaatcttttagtactgctttcttcttgcttaataattctgtctttaagtcatttctcttttcccacattttactacgagcagtcaggaggaaccaagctgcaacttcaacattttacttagatattgttttagctaaatatgcaatttcattgcttgcaagttctactttccacaaaacactagaacatgaacacaattcagcctagttgtctgccactttataacaaggattgctttttctctactgtccaacaacaagttcctcatttctgccaga

SEQ ID NO: 178693 - DNA, 432 bp, Homo sapiens
aaatacatagaagtcctctaactggaaaccataaaatattgctgaaagaaattaaataatatctaaataaataaatagtctgggcacagtggctcacgcctgtaatcccaacaccttaggaggctgaggtgggcagatctcttgagcccaggagttcaagaccagcctgggcaacatggtgaaaccggcgctactaaaatccaaaacgattagccaggcatctggcgatgggatgccggtaatcccagcaacctggggaggctgaggcagcgagaaatggctagacacctgggaggcaaaggatggcagcatgagcggagactcgacaccacggcacatccaggccggggactgacagcgtgagcacacatgtactcaaaacaacaaacaccaaaaggccacgacaccgcaaaaaaaacaccaacgaaggcc

SEQ ID NO: 178694 - DNA, 337 bp, Homo sapiens
acctactcaatgttattttctttgtgaaacctttctgaagctcctggtgtttccccctatttccataataatatctttctgtacttaatatgcttaattatgcatatttatgtcaggttaccataccaacctataaaatttggttagaaaggcaatgcattctactcacctttataagcatacacacagaaataaaacatacaaggctcttagcacatgctgttgaatgagaaataagcctaaactaatgttatggtagacaactaacacattagaaagtacataggctttggagtccaacagacttagattcaaattctagacatgccagttttca

SEQ ID NO: 178695 - DNA, 478 bp, Homo sapiens
tgcagaatgagtctttacctggttttaatatttgcttcctcttttgcaaggcagccttatgcttttcagagctcatttctactacataatttatgatagcatttagttgtgctttaccttgttggcttaatcttatacatgtaatttgcatgcaactttaaaggtgattgtaatgtaaaaagaatttggagagaaatataccctgggctagacaatgcaaacaacaggcatttttaagtggcagctggcactctaaatgttaaaataaaagccaggaaggaaagaatggaaaaaaaagaaaaagtgaggaaagagaaagaaggaagaaaagagagagagaggaagacacaaaggagaagagggagaggaaaacacggaaagagatactctaacggatggaagaagatgagaagactgagaagttgactgactatgagaaagggaaggaaaatgtctctggtcagaaacacaaatgaca

SEQ ID NO: 178696 - DNA, 307 bp, Homo sapiens
agaaggtttcaggaaactgtctggactctggaagtttacagtatgattaaaaatggcttcagcacggcaatggaaactctcccttctcttcccttggagtgtagttgtgctctgttattccggagagctgtcgaaaggtgacctggttgtgtggaaatttccactgaaatcactgtgctttatttggagcatctttggtggatgttgctccgagaacaaagcctccggttgccctgtcccaaaaatggatccgggccatgaatgaataaggcctcagttaggatagcagattgagttaccctccctt

SEQ ID NO: 178697 - DNA, 631 bp, Homo sapiens
agttgttttgaaatatattttcttataggtttgcatataaccacctgtacagaagggagaagaaagaaacaggaaaaacaatgtaaatttccactttatttggaagaatgggctgacaaaaaagtttcatggactatatttttgaattcaggagtcatttgggattgacttttgtctttaaatgaaatctttaagctttaaaaatattttaaaggtaacattgtgttctgagattcataagaaatatgtgatggaaaggaattcttgtttgtggaacaaggaatagcagtgattgtacaaccgggtgcatgctggcttcttaaagaccttgcactgagaaagtaaaataagggttttcctgagaatcgtgagttgtgttgagtgtgtatgttcttttaaaataaaatcgttctttagccacagatttggccactggacgcttttgtcattacatacttttattttcctcttgtaacatttttggacttttgaattctctaatatgcaaaatagaggtctttgagacaaccgtttagaagtaggttgatcattaggatgatgcaatacattttgaagttagaagaatctacaagaaggaagttgtggctgtgtccactcaggtgcatttttg

SEQ ID NO: 178698 - DNA, 277 bp, Homo sapiens
gggccctggtgggaggcggcggggttgagagcgtctgcgggtccccacccctgccacgcagacgccccagagcgcaggtgcgccctggtgggacctgagtctgcactaggaaggtacaaagctgaaaaagcgatcacctgtgggaggttaattgcaggtcactttttgttttgtttttactttgtacttttctgtgcattccacgtattcctccttgatctgggtgactttcgaaatgatggagaataaacatttttgagatataagctacacaccg

SEQ ID NO: 178699 - DNA, 659 bp, Homo sapiens
cagacagaacacttcatcaaagaaataagtgtttcttttccaagttaaattgatatatattataaccctcactcgtactcaggcttctactccttggcccagctccaaaagaaagaagagtgtttacttataaataattctctagtccaacctatggaccgcttaggccaattctttaaaacagaattctcctaatagccaaaacaggtaaatatccaagtgttttttttcttttagaaactactttaagattgtgttaacagcagttatcaatttgtgaaaggaaaaattatcatcttttttatataaatgttttatgtatgtacttggttggatggggaatatccctgagggtatagtcaacacagaaaagcacaataaataatgatatttcgctagaaaataaaagccatatttagtgtttattcaggtcacacatatattttgagttccactgtgagcctgtctctgctaggcttgaaatatggtaataaacaacagatagtctttgtctaaaggcaacctggaatctgcctccaagatcataacatttttgttgcttttcatgcttttgaattgttgagtaaaaatggaagctttaagccagtagggcatcacgactatatatattttttatttcaaattataatacttcttta

SEQ ID NO: 178700 - DNA, 794 bp, Homo sapiens
tattttagcaacatcattaaggttcaatactgaactggggttctgcttgatctaaattcttgtcttccagcttaagttttgggcagttagagttagaagatgctatttgtagtgtagtaactaacagcaagaatttgagatttttgagatataggtttaaagtaaagtatgtatggaagactgcctctgatagtctctaaggcttgttaagacctgtggagaaaattcacatacatatatgtgggtactatggttatggaatactaagtgttctagttaaaaagttaaagtaccctagttaaaaaggtgtttttaaagtttgaaatattatgcaactggggcagtaatgcagggtggtaaagtgatagtaaaataaaatatttatatagatgattgttgatttgtagtagaggaactttaaattagtagatgaggaccttatatgtttgaggttaaataaacaatgatttggggcataagggaaataaatattatgtataaaagggaaaagatacttttagaactatcagatgctaaaagagaatctatcaaatttagagcattgccaaagataagttttggtagaaaagtttgggaatcattaatttagttttttaaaaaattattattatactttaagttctggggtacctgtgcagaacatgcaggtttgttacataggtatacacgtgccatggtggtttgctgtacccatcaacctgtcatctacattaggtatttctcctaatgctatccctcccgcagccccccacaccccgacaggccccagtgta

SEQ ID NO: 178701 - DNA, 188 bp, Homo sapiens
tcgactctacacgatccctttatttatcgatcgttatgaacggagtgataaacccaatcaaaagcagacacagacccaactatatcaattgtaacattagatgtgaatggagtgaacaacccaatcaaaagcagacacagacccaactatatcaatcgtaacattagatgtgaatggagtgaacaacc

SEQ ID NO: 178702 - DNA, 226 bp, Homo sapiens
agtcctactcaaccccttcatatgatgatatctaatccttctagcctgccctcgccctcaaggcaagtaatgttatcccagttagacaaatgaggaatcagatgctcagcaaagtcaagtcactgtccatgccctccttccatcagggagtcgctgagctgggatgtaagcccaggtctgtctgtccctaaagcctgtcactcctccatcagcccctggaagatca

SEQ ID NO: 178703 - DNA, 275 bp, Homo sapiens
caaaaccttagcactattctaaaaactgacagtctgaagaataaagtttgaattttgaaaaaggggggaatcccttagtagtgcatatgcctgacagagtccatttactacattcattgattgactatggaacagcatttagtttggctacaactgagtttactcactggggagaatatttagcctggttttgagaaaacagtttagtttctgataccatgccaagccctttgtccctctcactgcacagtgatggtggggagagtggataggtc

SEQ ID NO: 178704 - DNA, 283 bp, Homo sapiens
acttttctggtgtcccttagcatttcataaacaaaacagtggcccatcttcaggactgttatgaggcaaaattaaatagtaatctagattgagtttcttggagaaataattacatgactagaaaactgttatgttacttaagtggcaattttaagtaataaattccatggcaattgcagttttgttctccttgcctgctgcaacagctttaaagttatcttctagaagctcctctcagtttctgagacaacacaattctttttttcctatctaggcttttttt

SEQ ID NO: 178705 - DNA, 487 bp, Homo sapiens
acacccccatcctgggttgatgtgttcacactcagctgagtcaaacaggatgtggctggggaggcggttgtcaccgagccatctaaatctcggtgatggctggtgctggatgcacagggacgtggtcctggctctgggggacaggtagggggatgtccatggggatgtacaagaacattctcctccaggggcagacacagtttagcccctaaattgtgccagagactgtgccgggagccaggcccagggacacaacctgcgggctctgctttctggagctcaccgagccgtgagcaggatggctgggacacaaggagtgtccagggagcttccccagcagtggaagtacaatttcatcaggccaggaaggggagagaaaggcaggccacgtggaggcagcagcgttcagagctgccaggaacctggcgctctggggggacggtggctttctccatggaataggatgtacacgttggagccggggcat

SEQ ID NO: 178706 - DNA, 523 bp, Homo sapiens
ggctgtggggagttgattcggaagtgaagggccctgggcgacccggcgagtagaggcaacaccaacactcctccttagcgaggggtctccccgccgcggtggctgcccggccccaaggacaggagggatttgtgcactgactcctgaccccgtcctccagcgctgctctgaagggagagtctgtgcagtggcacctgcgcgaagctggccaaagcctgcccagacggctcacctgtgcgggatggaacaaaagaatttcgctcttgttgcccactgttgtccaggctggaatgcaatggcacgatctcggctcaccacaacctccgcctcctgggttcaagtgattctcctgcctcagcctcctgagtagctgggattacaggtcggcttgaggtttgcgagtcccagctcccactgcccctgccacctgcctttcccttctcaggacatacacaggactgggagaaaatagactaagtatttgatattacaacaacacaaaacaaaaaaacaaaggcggcgc

SEQ ID NO: 178707 - DNA, 515 bp, Homo sapiens
ggctgtggggagttgattcggaagtgaagggccctgggcgacccggcgagtagaggcaacaccaacactcctccttagcgaggggtctccccgccgcggtggctgcccggccccaaggacaggagggatttgtgcactgactcctgaccccgtcctccagcgctgctctgaagggagagtctgtgcagtggcacctgcgcgaagctggccaaagcctgcccagacggctcacctgtgcgggatggaacaaaagtttgtttcgacgccggaccgcgtaagagacgatgatgttgggcacggaaggtggagagggattcgtggtgaaggtccggggcttgccctggtcttgctcggccgatgaagtgcagaggtttttttctgactgcaaaattcaaaatggggctcaaggtattcgtttcatctacaccagagaaggcagaccaagtggcgaggcttttgttgaacttgaatcagaagatgaagtcaaattggccctgaaaaaagacagagaaact

SEQ ID NO: 178708 - DNA, 249 bp, Homo sapiens
gcagtgggaaaatcgcaaggaagccggcgctgctctgaagggagagtctgtgcagtggcacctgcgcgaagctggccaaagcctgcccagacggctcacctgtgcgggatggaacaaaaggtgagccagggggcctgataaaatgacctcagtagccgcctgtgggaggggaccctgaggaaagcaccatagtgactaccaagcctggatggttttactgcttactttgttattttattttattttatt

SEQ ID NO: 178709 - DNA, 361 bp, Homo sapiens
tggatttttagtacaagatgggggtttcaccatattggccaggctggtctcgaactcctggcctcaagtgatctgcctgcctcaggctcccaaagtgctgggattacaggcatgagccaccgtacccggccaatgatttctttattgagaaggagattggcatctagagaagttaagtgacttaatctcctctcagggtaagtcagcattggagccaggttctcatggtttctcagtgtgtacttcatatcctagattagtggttctcagagcatgctttggggatccccaaaggttcctgagaccttttcaggggtctgtgaggtcaaaactaattttatagtaatacttaagacattat

SEQ ID NO: 178710 - DNA, 261 bp, Homo sapiens
gcttaatgtcttttattttagttcagagtccagttctaaagactggattacaaatcatttcattccttaatctcttgcaccaagtcttagatgaaagataaaaaaaatatatataccagtgggatggccagtgatcgaatttaactacttaagatatacacaggaatagtttctcaaagaatagtcattattctagtttagaatttccttgagcagttgttgccttcaaaatggcatatcttgaaagatctctatgaggag

SEQ ID NO: 178711 - DNA, 346 bp, Homo sapiens
ccaggctggtctcaaactcttaggctcgagtgaactgcccgcctcagcctcccgaagtgctgggattacaggcgtgagccactgcattccctaggcatctagacacagcagtatccacgtgggggctgaggtttctctgaccatggctccctgtttgctgagttccaagtctgttgcccactgtgggagccgctgtgggaccaggggcaggtgacgtgaggatcatcggaacggatgaatgatgcgtgtggaacaaccagcactttgatccttcgcaggggggctcctgagggaccgccctccatattgtagggaaaaaggctcattcttcagtcatgctctagtg

SEQ ID NO: 178712 - DNA, 606 bp, Homo sapiens
tcaattacagttgacccttaaataacatggaggttagggtcattgacccctgtacagttggaaatccatgtataacttttttttttttgagacagagtctcactctatcaccaaggctggagtgcagtggcgcaatctcagctcactgcaacctccacatgctggattcaagctattcttgtgcctcagccacccaagtagctgggattacaggcatgtgccaccacgcccggctaatttttgtatttttagtagagatggggtttcatcatgttggctaggctggtctcgaacccctggactcaagtgatctgcccgcctcagcttcccaaagtgctggggttacaggtgtgagccactgcgcctggccccatgtataacttttgactcccccaaaacttaattactaatagcctactattgactagaagacttaacaataatataaacaattaacacatattttgtatgctatatgtattacatactatattattacaagaaagcaatctagagaaaagataatgttattaggaaaatcataaggaaaagaaaatagtattttctactcattaaatggaagcgggtcctcataaaggccttcac

SEQ ID NO: 178713 - DNA, 333 bp, Homo sapiens
tttccgtccttgactcctctcactgctaacagagacagaactcatttacttactcttctgactgtacctttgctttcacgagggctctttcctggaatgatatgtccatacaactattgttgttgttcttacttttagctcttttcttagcccacttgtacccaggtttgatcacaccccctactctcctgccctggaagtaactactattctggttatagtctcttaatatctatatctatatatatgcatccacagataatgtgtagtattgtcttgaaaaaaatatacataaatggtatactttgtctccctctgcgattattttcactg

SEQ ID NO: 178714 - DNA, 639 bp, Homo sapiens
aatgttggactcctaggttaagtggagacagtaactatcacattacagattaaggtttagaaacctgatcacttctgtggctgatcatttcctttaaactttcagttccgcaaatgccagcgagcaaatggtgctttgagtcacagctgcaaaaaccatgcatctaggcctttccagggctgcatagtggaaagtgaagttaacatgtgaactgggtttttaagatccttctgaaaaacgtgaattaacgttaaagtgtcaaagattaactcatttctgataactgtatgtatgaaagtggaaaaaccattcggagcaagattcagaggaaaccatttgacctatataaaatgtaaattctgtgttgttatattttaattatctgccattctttaatgcaactttagttctctgtattctcttttaaaggagattttttttcattcaggatcagagaaagctgtattttctcaaatgttgatgtgtttagaaattcctggcctctgtgcccagttgcaagccatccaaaatgacattgttcattttatttacgtttttgcaaataattgccctgtgtcatgaaccttcccatgtctgctcatcagagataaggagaagatcctcttgagccctcccata

SEQ ID NO: 178715 - DNA, 296 bp, Homo sapiens
tctttgtaggtttctacacatactccaactcattcaccaatccttgaaaagattatgtaaccaatctcaatgccctgacccaggccaagcccatttctacatgtgcagtgttctctggatctgatatttaaagccccttatcctgatactacacaccttttgtcttctggaatgcacctctcttctcatcctttttcaaggcactagaaaagcagaccatttctgcagcacctcaaaccagggtgagaaagctccactctaatctcatcattttagctacatagatacatcggctc

SEQ ID NO: 178716 - DNA, 412 bp, Homo sapiens
tggctagggtatcagtctcagttgcagaaaacaaacatttctaactagtttaagcagaaagaaatttgacatcagattgcaagtggcttacaaaaaaatatttgggaggagtagaagagcaaatcccaagccaaattctcaggacattttcctgagtcatgaaatcacacattgtgataagtgacatgggaattatagaacaggacctaaagagaaacaggagacaagaaaagacccaagagctccacatcatatgtgttagtttctcatggttgctgtaatgaagtacaacagactgggcagtttaaaaaaacagaaatttggccaggtgcggtggcttacgcctgtaatcccaccactttgggaggcagaggcaaacaaatcatgaggtcaggagatcgacgccatcctg

SEQ ID NO: 178717 - DNA, 266 bp, Homo sapiens
tgatgatagctgggagcaggaagataaggagttatttacgcaggagggctgtgtgttctggaccatggagaaaggcagagttacatagtttgtcggccttcttcttctttttttttttttttttttttttggggggggggcattaaggtttatttgttttgcccagcttacctttttgttcttagcttaaggggatcttcccacttaaccttcccaaggggttaggtttccggccttgacccattgaggccggtgtgccttacaat

SEQ ID NO: 178718 - DNA, 449 bp, Homo sapiens
gctcctagggaagctgaggtgagaggatcgcttgagcccaggagacggaggctgcagtgagccgtgatcatgccactgcactccaacctgggcaacagagtgagaacaaaaaatccagggcaacagagaacaaaataaaaatgtggtacgtatacaccatggaatatgcggctataaaaaataacaaaatcatgtcctttgcagcaacatggatgcagttggatgccattatactagaagagaatttaattccggaacagaattaacatctaaacctatatgaagttcttacttgtaagtgggagctaaacattggtacacagggacataaaggtgggaacaatagatactgatagacagtagagagaaagaagagggaaaaggctgaaaaactacctgttggatactatggtcactacctgggtgacggaatcatttgtacgccacat

SEQ ID NO: 178719 - DNA, 377 bp, Homo sapiens
cactaaatggcaagactaaaacagctgtaacacaaacagtactgaaacacacccacccgtttgccattttgtgggtgacgaaaaggagagaagtcctgcagcctatgtctgggaacccagacctcagggctctttaagccaggactgtgacatgctgtaacaacctctttgaggctctgcagtttctgggatctccaagatttcgggcgccactgcattccccttgtccagatgttggtgcccacagcagaagtcacctgcagtacatctggtacagctgcagccttgcatggagttggcacctgtgccagcacctggagctgcctgtccatcacagctggcatgcctggctgtgcacagtggccaggccccacgct

SEQ ID NO: 178720 - DNA, 108 bp, Homo sapiens
ctcccttctacctcttcatagacttcagttatacatatattaagccttttaaagtttcctcactcatagatcctttttattttcttcattttttactgttttgtttta

SEQ ID NO: 178721 - DNA, 263 bp, Homo sapiens
cctgctcccccacataagatgtctggctctccattcaccttatcatgattttaagtttcctgagacctccctagaagtcgagcatgcttcctgtatagcctgcagaactatgagccaattgagcctctttttttttttatgaattacctagtctcaggcatttcttttctttttttttttttttttttttttggaaacagagtctggctctatggcccaggttgaagtgcgggaaacaagacgggggactcctcaagagtcgc

SEQ ID NO: 178722 - DNA, 241 bp, Homo sapiens
ctctggccgttcctcaaaaaatacacaaattgaatcaccatgtgatccagcagttccacttctggatatatacccaaaagaagtgaccgccgggcctccaacagttacttcgcatgctaacatccataacagcattattcacaacagccacaaggatggatgccacccaagtctcctctggccgatacctggcgaaacacagtgtggtacatacataccaatgggaatcttatccacgtct

SEQ ID NO: 178723 - DNA, 436 bp, Homo sapiens
gtgtatgcacgtacaggcatgtaaacattagaacatgtggacagagatcacttcatttccacctgaattacatgcatatttttgtgggcacaggaagaagtctggaaagatatgcaaatatatctgacaatatgagttacctgggaaggcaggtaatccaattcatgccatgtcatatgttaccagttatatgagcaggtagtgctttatagtaaaatgtatttcttaaacatctgtcacatatgttgaaagtgaatggtgaccatgaaaattgcatcccaaggggcatggctcacataaccgtctttcccctaagagcttagatagtaatcacaccacaaagaaaagaaggggtgatgttggtgaaatagtggagcaatgacctccagaaattctctcctctgtaaaggcaatcagaaaactggttaaaaaaaaa

SEQ ID NO: 178724 - DNA, 815 bp, Homo sapiens
acagatgagatttctgctatgtgtccattcaaattttccatttttcctgcatgatttgttaattgtctattcctaggaatttgtactttcatctaaatcatcttttgtggcataaagttgtttatggtacctacctcaattcctgtaaaatcagcagtcatgtcccctctttcattaccacccccgcccgccccaaaaaaaaagtaagagggagagatggagtcttgctgtgttgcccaggctgcccttgaactcctgggcttgagagatcctcccaccttaacctcaagagtagctgggactgcaggcacgtgccactgcaccctacttgtgtatgttttggttcatttcgtttgggtttatattaccattgttattcaatgttatgtgtagtcagggtgataatagattagcaacaacagtgctattaacaggtattatgtcttgtttctctgctatgtttccaagaacaaatcttaactcattgagtctgttcaaaattcacagttctgtagagttcaccgaggagaaaacagagacctaaagaggcagtgtgacttgcccaagatcaggtagtcctgggttcaaacccaggttttgcagaaaactaattccatgccttttgccataggtaaatgagcaagggaaaaaacaatttgcaaaacaaatttgtaaacaaacatctttaaaatgtatctttctagtaatcaaagaaagaaataagccagattaaaaaagaaacattcagttgagaaaacttaaatatgatactgaggaggatgagaaaagaaatttctttaagtctcatgtatggg

SEQ ID NO: 178725 - DNA, 415 bp, Homo sapiens
taacaaaatttacctactaacaacattctggcactaaatgactctacagtgaagcccctgccatgaagagctgctctcctatgggcaacccatcaggatgcactgatctgaattggcacgtgagtaaaaggtacagcctgaaaccatcaaattagcacccgttctccaggctcctggacccaagacatattagggtaagtgcaacaaaatttagatggaggtgaagtgactcttaaaaagcgtgaaatacggacgcagtggctcacgcctgtaatcccagcactttgggagcccaagatgggtggatcacgaggtcaggagttcaagaccagcctggccaagatggtgaaaccccgtctctactagaaatacaaaaaaattagctgggcatggtggcgggcgcctgtaatcccag

SEQ ID NO: 178726 - DNA, 695 bp, Homo sapiens
gatatactttgttttaattcatttttgctattgggagtagatgaaataattcattaatttttaaaacatacgttagataaaggctgataattatactattgtagggattttacttgtgattaattataatgtgatgtaatatagtcaaagatctttgacaaaattgtcattatataaattaattggagtttttagtgttcaagaatatttcgtggaaaattttaagtcatttttatctcaaaatcatgaggctaatgttaaatggttaggttgcttttttttttttcattttcaggatcatgaaaactaagaaagttttatagtggatgggtttaaagtgtagaatattttgagcaaattgataggaatcaactagaaaacctgttacaggtgttttccaaaatgaagtttgcatcattagtactttaactgtagaatttttttgttggtgcatttaccttctttatactgggtgaacaatagaaacaaatattcagctgtttaatgacatttcactatatggtctcaagtatttaatcagttaatagaaatatgtatatagctttatgtaacttcagtagtattaaaaccaagttttgattgtgacctaatggccaaatttaaattagaattttaaaagagctcttagagacttcaggtaagcattagattgtctctgaatcataatactgatt

SEQ ID NO: 178727 - DNA, 458 bp, Homo sapiens
aagtgatactcacagttttactgcaaaggaatgaccactttgtaatcaactgcagactttctccttgatctcagtatttaatattgttggtaacttctcctctaaaatattttatcatgtagctgtcatgataatattacacttgactctggccactcttgttttccttgcttccttttattaactcatcattcctgactgctcttttctttccatatattctctcaaaagtttagcaaatttcttggctttccttattgcaaatatattatgagaaatactcaccccaagtttccaaaatccctcctatcctccttacgctatgaaaatcacttaagcaacatcttaatttatgagaccaaagacatttaattcaaaatcgttcaatttccttccacctaaaacttttttctgtttttatccacttttttcccataaagaaatgtcctatttcatta

SEQ ID NO: 178728 - DNA, 411 bp, Homo sapiens
gggaaaacaaatttctattaactgcctacctaaagggagaactagaataatatttcaattacaaaagcaatccttttatatgctgtattttaaatgttctaaagaaatcaatggttttggcttggcatctatcttgtctatacccagatgtctatcggtgtgcactatagcccacagttcatccacagtatcttcctctaaagaaaaccatagcaaaggaaaacctggaagaaatagaagtcaaatctaaaacctagctgggtagattgtggtttgcaaacaccacagtaaagggacacttttaacaccctttcgccacttcacaaagtttcagaaacatcacaggtaaaaaccctctgcgaacgtcttctcatcagaccccgccaggagaaggaaattcgcttctctttc

SEQ ID NO: 178729 - DNA, 354 bp, Homo sapiens
tctggaccacatgatctgctaagctccttcccacaccaactccatcatcctgagaaatcaagatctcaggccaccacgtcttagcagcactgatattcaaagtgagcaaaacactcttctcaagtaggcagtgttactgttcgcatccttggaggtgtccacgtgcttcacagagcattattcaaaatggaacagggtttcaaatcagaaaacacttttcctatctagcctttttattgacatatggtatgcatacagaaaaatatacaaatcataagctctagatgttaaattttaatgaagagggtgcatacatgttactgacgccctaatcaagaaacagaacattactag

SEQ ID NO: 178730 - DNA, 269 bp, Homo sapiens
atgatctatttctatgctttaaaaaccaaaacagaataaaaaaacaaaaacatagaaaactccttgatggatttcccagttggggaagtgagaatttcccacttcaattcaacttcaatgcaaattcttcaggcattcaaaactccatcattgtggcttctacctgcagcctcattttctattattcttattcttttttcaaatctctcatcttttgctcatactcttcagcaatcctcagaactcctttgacctcaaggttctggttc

SEQ ID NO: 178731 - DNA, 323 bp, Homo sapiens
actaagacagcccacagagtttagcagtgaccccaaggaaaggaaagaactgcaagttgcctgagattaatgttgctcaggatccatttattccctattcctggtgtttctttgtagagagtgctccattaaagtaacacttttgtcctgtctctgcttcttccttaggcagcgatttacctaattggtgagtttaggattaaaaaaaggaatacatcctagaacatttcttaaatatattcccttttctctgtttcatgcaaacatggcttatttatttttcaagtctttctcatttcttacctggatgctttcaacacagg

SEQ ID NO: 178732 - DNA, 510 bp, Homo sapiens
tatctcctaggaatttgatgggtcacttgacatcatgaattttacacttttgagtcctgggttttgttgtactatttcaaatagtgttaagttttgttaggcagactggatgatctttttgaggataacttacagctttttcttgggaggaaccagtctgcagcagcctttactatagggctaggatgatcccactactaaggcatgagcattcttaggtctctacagaatgccttgtgtgttcaataaggttgttttcacattgtcttgtgggaactcaagctgttagtgagttcagggtgtttttctgcctgtaacacattggtaattgtttttttacccagaaattgttctttctctagtatcatgaagtatgaccatatgcatgttcagattagttttagctaaaaactgaaaccttatacatatttatgcagtttgttctctgtttaactctcctttctgatgttctgccccacagttcctctatggccacccataacttccatc

SEQ ID NO: 178733 - DNA, 511 bp, Homo sapiens
tcaagtaagatttcagttgggttttctgaggatctctgaaaacctctataatctacatggaaaaataaaggtccacaaataactaaataaacgttgagaaagaggagaaaagtagaagtaggggagggagtgtcccaaccaaatccatggatgtactacaaagccactgtcatagaaacaatttcgagcaagaacatttaaatggacaagtagaacagaacagagggcaagcgtcagaaacagactcatctacttataagaatgtaatacataataaagttggtagcataaatcaagaaaagatgaacattggagtttaaaaactgacataatagactgacataattaagtatctactcaatatcattagactaaaaaatagactcaggatggaaaataaagctgttaagataatatagaagaattaatgtgtggcaaaattgttacacatttctgttcagattactaggagacaatgttttcaatatctaaaacttacagataactaaca

SEQ ID NO: 178734 - DNA, 105 bp, Homo sapiens
actgagaaggatttctgaggctgtatcttgtttttgaagaagaatgctgtgattgatgaatgataccaattaacagcatgggaacagggccatacaagtcacgtg

SEQ ID NO: 178735 - DNA, 426 bp, Homo sapiens
gcctcatggtaacctcaaactgaagaacatacaatggataaaaaaacatagaaagacattatgtcatatcaccagagaaaatcaccttcactagaggaatacaggaatgaaacaaggaagagtagaccacaaaacaatcagagaacaaataacaaaatggcaggaataagtccttacttatcaataataacattgaatgtaaataggctaaattctccaatcaaaagacatagagtagctgaatggatgaataaacaagacccattgatctgttgctacaagaaacacacttcatctataaaaacacacatggactgaaaataaaggaatggaaaaagatgttccatgctaatggaaaccaaaaaagagcaggatttgccatacttacatcagtcaaaatagatttcaagataagaaccagaagaa

SEQ ID NO: 178736 - DNA, 152 bp, Homo sapiens
tgggagggggactgcctgctccacacacccactgtccatttgtgccccttgaagggcccggctgtagcctagcagagtatacatgaataggcatgattggggagggacagccagagcttgcaaaatgagctcccatggcctgggcatggtgg

SEQ ID NO: 178737 - DNA, 312 bp, Homo sapiens
ccaattctttgtactttgtattagcactggtatgtgcttccacgcactggtcatagtatcttacagcagccctgcgagccctataccaggtgccgatctcgagattcgtaagtcaatggtcagtagtctattccctgtttttaaatttttttcccgaaactatacactcctcagtgatcaaggaccaggcctttgacttcttttgtttttgtatgttgcctatttgtgcgttcccttggcatgcagaatgggatgttcactgctggactcctccacagataaggcttcctacctgctattaaagcccaagaa

SEQ ID NO: 178738 - DNA, 343 bp, Homo sapiens
ataaataaaaataaaaacttataaattcatggtgtctgattggaaaacaatttggttctatgtactaagctataaaaccacttctactttacttttttgtgtttttttaaaattttttaaaaaccaatttcttaatactttacattttattattaatatttatacttctaagtatttttcctaaggaaaaagtacttcccacagaagaaaaaaattaagtagatgagtatgttcattgcactgtaatttattatgccaaaaatggaagatactgggagaaaaattatggagcatcaactgggtaaactataatacaaacaaacgttaagcgtgaagggataga

SEQ ID NO: 178739 - DNA, 295 bp, Homo sapiens
aaagccatactacacttagacttaaatcccagtcatctattttaaatgcacttcaaagtttataatcagaaaactctaatttcaaaggaagcatttgtgtttgtttctattatataagaaagatacgattttttaaaattaaaattaaatggttatatacattgccctgtggctttcatttataaagccatgacttgttacgtatttgttgtgaactacacttcaaataatttgttgccatcaatagttaaaatagtaaaatttgcaaatgttttacttttttgtttttgtttgg

SEQ ID NO: 178740 - DNA, 217 bp, Homo sapiens
atcccaggccaagccaccatggtttggctctaatcttcctctcttgaaaatggaatcatcaaaaaagataacacctgatctcccagttttctgggaggagccgggcctgacttgtcacctgatgccaaattgcaaaacctacctaatataataggtggtcttcactgagccacctacaagagtgagatctctttctgtttttcccatctcttttgca

SEQ ID NO: 178741 - DNA, 815 bp, Homo sapiens
gtctccggagccgaggtccgctcggattgtcttcttagtgcttggatggtgtgagtgaaaacccagaggaatacatttggtggctgagctagtacaatgccatcaccggattccatgaccttcgaggatatcattgtagacttcactcaagaagagtgggccctgctggacacatcccagagaaagctgtttcaagatgtgatgttggagaacatcagtcatctggtctctatggcaaacagctctgcaaatcagttgtgctttcccaatggagcaagtagagaaactttcaacacaaagaataagcttactgcaaggtagagaagtcggcattaaacatcaagagataccattcattcaacatatctatcagaagggcacgtccaccatcagcacaatgagatctcatactcaagaggatccttttctatgcaatgacttaggagaagatttcactcaacatatagcatgactcaaaatgtgattacctacatgagaacgaaacacttttgttaagcaaaaagttgggggaaaatcttcagctgactggttatcctttaaatcaaccacaaggaaattcacaccaaatgtaaatcataatgggaagtcatctatttgattatgccttttatccaaaaaattctgccttagaacaccacaggtggactctacactagagagattacatgggaatgtcgtggggggtgggaaaacttttggaaaaattttattttaggcgaattgggaatggtttcacggggagaaacaaaggagtacaagtggggaaggttacaatggcggttggaaatgaggat

SEQ ID NO: 178742 - DNA, 350 bp, Homo sapiens
cctagtagctgggattacaggcgcccaccaccatgcccggctatattctaagagatatctgtagatggtttatagaaatgcatttgactttggtaaactgatgaattactggaataaaaagattgtccaacaaactcttattccagtaatccctctttaaattttttaaggacaaacatatcatctgaaaatcatgatattttgtttcttttcatgacgtagatatattttatcttgtcttaactgtgctggccggactctccattacaaagttgaagagcagtggtgatacagagggcatccctgacttgttctgatgttaaaaggaaagcttttattgagtgataggg

SEQ ID NO: 178743 - DNA, 534 bp, Homo sapiens
ggtgagacagctgtgatgttgggatggtttgtagcctccttgtaatgaagacagttgtccctggcctattttaaaaatagttcaatctcctactcttatgctgcatacttagtctctgcccttatctttctgttccttttcttttcttccttacttccgtattctttcttccttcgggttttctagagtctaccaggcaacttaggtgacaagaagtatgccgggtcatgctgaatccattcattgagtattcaggcaaatattttagtagcagccttttcctcaattggtttgtgatcttataataaactgagcccactttgagttaattaaaatgaaaataaaagcatactgataagctgggaaaaatccctgtagggagagggaggcatctaaaccagaggttataacaaaaaggagggggctgccctgtgcgtgtcaggatgttcggcatcactggtgtccacccactagatgccagtggaaccagggtatttacatattttaacacaataaaacaacttgttgatgttg

SEQ ID NO: 178744 - DNA, 207 bp, Homo sapiens
tctgtttggttctgttggtcaatatgtctatttttataccactaccatgcagttttaattattatagctttgtaatatagcaagaagtcaggtagtgcgatgccaccagctttattctttttgctcaagattgccttggctggtcagagtttttctgtggttccaaatacgttttagaaccacagaaaaactctgaccagccaagaa

SEQ ID NO: 178745 - DNA, 436 bp, Homo sapiens
agaaaggacatgcaggtaggaatcttcatcagctttgtctactgatgtgtctccagtgttggaacagttccaggcacacagatgcttgatacatatttgttgaatgaatgaaaaaaaaaatctatcaagaggtgacagtcactacagagtcattttatttacagaacatgttatgtaatgtgtgactccattaacattaatgaaaataaagtgagccccataatgtcacgagcaaagaagacaattttcagaaaagcagtgtaaaatgttgaaacttgcaggaaatgagcaaagaccgggaggtcagtgctctttctactgcagcaataagagtgtaaacaagtttgactgtcagcaccataggaaagctaaaataaaaaatgaaaagacgtttgacagatttgttgttgttgttgttgagaaagagcctcactct

SEQ ID NO: 178746 - DNA, 133 bp, Homo sapiens
ttcatttcacaagaattactgaaaacacaggtggcatcatttatgtaataattctgtagatttttctgtcttaagcttaataatggtcctgtggatattcagatttcaagagtagtttttttttgggggggtg

SEQ ID NO: 178747 - DNA, 492 bp, Homo sapiens
aagaggcagaaaaaaggcgataaggaatgcaaatttatttcagtaacatttgtcataaaatactaagttttttcttctttgaaggattagtatatttgtgcttttactctgctaacctcttaaaagcaggcaggttgttttttttgtttgtttgtttactaagaattactaggcatgacttcaccaatgatcagttagcctccgttattataattttttaacctaaatgatttgacagtgataaatagctgatgtggcaagtctgcaaaaagctttatattgttattgccttttatcacttgtgctctaaataattgttctcatctgtcgactcttagatgcagttttgtgaggattaggatgtatggaacagaaaatcccgcctagtgattttttaaaattctctatttcttttccttcttttcttcctagttttcttcctcttctctccagtgtgtttacttatgaaagttgtactcatgatttaagatc

SEQ ID NO: 178748 - DNA, 462 bp, Homo sapiens
aaagcaggaaggcaggcaggcagatgtaaacagtaacaacactatcatcaataataattttaaaaaacaatgtaaaattgtttcacaattctttttcttaggagatatctacgtactgtatcatttgaaatcattcctctctgtgagtatgccactaatttgagacttaggttcattcatgtcatttcgctttcaaatttcagagattgctttgtttcatgattattttttatagtcgtgttaaacatttatatgcttttgaattcaaaacaaaaacaaaatagattcagacatatctagctgtgaatcctgtcccccaccacctggtttccaccctcctccataaataatcgtttcctgcaattgcttttagcataagcaaatttgtattcagattcctagttaaatagtagcatggtggacacattttttttcaccatgactttttcttacttagcagta

SEQ ID NO: 178749 - DNA, 202 bp, Homo sapiens
aactgcaagtgttgggcccaaaagtgtttctggtttactcttgaaaagaccactgaatatgcttctatacatactgaaccaggcaaatttatgcagtgtgttcaacatcatctccttatcagtacagcacagattccgattctttctactgcacccccaaggaattcatggcattattggtgcaattaataaagagaaaatg

SEQ ID NO: 178750 - DNA, 1534 bp, Homo sapiens
  misc_feature (3)..(5): n is a, c, g, or t
  misc_feature (7)..(7): n is a, c, g, or t
ggnnngnagttaatggaattttatcagcctttcccatttgtgtagtctgggcaggttaggatttccggggtggcttgaaggtggggccggaggcttgggagggacctatggatatctgcagggagggcgtgaccaaggctgcctggatgacggcgggggatggtggaatatatctccccctgccctctccacctgcatgtcccaggtccagccctgcccaagttctatcatttccccacagcgaaggggcagaactcaggcacctcgacactcaggtccagcgctgtgaggacatcctgcagcagctgcaggccgtggtaccccagatagacatggaaggggatcgcaacatctggatcgtgaagccaggagccaagtcccgcggacgaggcatcatgtgcatggaccacctggaggagatgctgaagctggtgaacggcaaccccgtggtgatgaaggacggcaagtgggtggtgcagaagtatattgagcggcccctcctcatctttggcaccaagtttgacctcagacagtggttcctggtaactgactggaacccacttaccgtgtggttctaccgcgacagctatatccgcttttccacgcagcccttctccctgaagaacctggacaagtgagcccctctgctcgcctcccacgagctccctgcctagttggggagctggcaagcaaacaggcgattacagtgcaggggactcgcgcagcagcgctaggctccacacacagactgcaggcaggcaggccctcatcctgccagctgtccttgcatccaacagattttttttaacagacagggggcggtctcactctgttacctaggctggagtgcagtggcatggtcacggctcactgtagccttgacttcctgtgctcaagcaatccttcctcctcagcctcccaagtgtctgagaccacaggcatgtaccacagctgatttttaagttttttaatgtagacatggggtctcactatgttgcccaggttggtctcaaactcctgggctcaagcgatcatcccaccttggcttcccaaagtgctgggattacactatgcctggcccctccaacagatttgaccgagtgtgtaccttgtgccatgcactgttctgggcacttggggtatagcagtgaacaaaacaagatcccagctctcaagggcttacattctagcagggagaaacaggcaagcaagaacacaagtgaaattatctaacaggttaaaagattatttgggccaggcgcagtggctcatgcctgtaatccaagcactttgggaggccgaggtgggtggatcacctgaggtcaggagttcgagaccagcctgaccaatatagcgaaaccccgtctctactaaaaatataaaaattagccgggcgtgttggcgggcgccagtagtcccagctactcgggaggccgtgacaggagaattgcttgaacctgggaggtggaggttgcagtgaactgagatcgtgccattgcactccagcctgggtgacagatcaaggatctgtctc

SEQ ID NO: 178751 - DNA, 293 bp, Homo sapiens
cagccggacccaacgctgctcacaaagtttgtgggctctgtccagcttgtcaaattttgagttgtgaattctctgaaaaagataccactgaattgatttgttattgatacaggccataccctttaatttgtggctaaaatggttgaagatggtaataatgatatgtagcaagtacttctaaactatccatattattccatttaatctcagcaacctcagggtaggttcttgtgttcaaggttaaataatttgggcagagtgtcctgcaaggatgatgtgtgtgagagcgttgg

SEQ ID NO: 178752 - DNA, 754 bp, Homo sapiens
atctccttctattttggtaccctgttagtaactgcaagagaccctcattcccccctacctccccacaccttgtttttagtgtattctaagcattttgcataaactattaatttcccaccactggtttttttgtttgttttgttttttaaggaatttgaccctcagagaagctgaggtttggtgaaaatctcactgcctgtaaatggttgaggccaggattaaccctggtctgactaactacaaagtccatggacttaaccactaatatactgccattctccagagagaatggaaacaacagctcgaactaaaacgagcccttgctagaggcaggagtgtttcatcttggcacaggggcagtactcacttaaatttccaactccctccaactccccactacccttgttgggataatgtatgcaaaagatctattttccatagagcccatggggagctggatgtgctagaatggatattattttaatctttagaacgagaatctttccatatccatatgcccaccattgctgtcctaatttcttaaacttcctggaattgtgtcacacgttgtttatcagtaaaatttcttcttccagagaatttgttaggtatgtggtttggaatgataggatatcatcaacttgcagggacaggcttgtaggaggtagttcagatattcttgtctttccctctagactatgagcagcttgggtgtaggtactgtcttatctctgtatctttttagcacctgtct

SEQ ID NO: 178753 - DNA, 387 bp, Homo sapiens
atctccttctattttggtaccctgttagtaactgcaagagaccctcattcccccctacctccccacaccttgtttttagtgtattctaagcattttgcataaactattaatttcccaccactggtttttttgtttgttttgttttttaaggaatttgaccctcagagaagctgaggtttggtgaaaatctcactgcctgtaaatggttgaggccaggattaaccctggtctgactaactacaaagtccatggacttaaccactaatatactgccattctccagagagaatggaaacaacagctcgaactaaaacgagcccttgctagaggcaggagtgtttcatcttggcacaggggcagaagcaggaagccctgcttctgcccggt

SEQ ID NO: 178754 - DNA, 581 bp, Homo sapiens
agagaactcaagggctgtgaaaagagcaggacctcaccagctgcacggcggtggtgactggctccatcttgctgtccctcccaatcacacaacatctccccttgaaggctctgcacaggcccggactcccacctttcaagatgtctggatcagtgcaggaccttctccttggccacatcgctctccttggactggttcaagtgattctcccacctcagcctcccaagtaggattgcagtgttgactcacctgtggagtggtctgagcctgaatgcccggggctgtggccaccgagtgaacgggctgtgctaaggggaattgccaccttgggaaacctgtgtagttgcggcttttctgattaagtatcaataaaagtctgaccttgtgaaaaaagcaaacgtgagtggccctgcttatgtttcaccttgcgttgctcagtgatagttctgcaaagtcgcaggaaacctggaatcatctaattatcgtgagtgttggtgagtaacacccataggcactggctcccggggaaatacagagtcaggttcctccgagccgctggccacagcatttttgttaagcag

SEQ ID NO: 178755 - DNA, 455 bp, Homo sapiens
atacaattcacttactgaagcacaggccaaaattccaaaaaatccaactttctgtactagtttttgaactgccagtttggcccgggaggcaaagtcctgtaaaaaggcaaatttagaaacattaatgagaagtaggaaaagaaggaaagatggttctttctagagtttattaaagatctcccaatctgatgacactgattaataagatgaatgatgaaaaaaattacagtaggttgttcactgaaacacaagtaaaataatgatagactattacatccttaaagttaagctcttaccacattttaagaataaaccaaaacactgtaaatttaaatttagtattctctctggatattctagggattaacaaaatactgtaaactaaccatgaaccaatttattattttggaaacactggcctacaacatctaccttttcctttcttctataatttg

SEQ ID NO: 178756 - DNA, 3156 bp, Homo sapiens
  misc_feature (558)..(558): n is a, c, g, or t
  misc_feature (612)..(612): n is a, c, g, or t
  misc_feature (1078)..(1078): n is a, c, g, or t
  misc_feature (2208)..(2208): n is a, c, g, or t
cacagctcagctgataatattctatcgctgttcactccttctcccaaagcagtagaaactacttggttggcagacgctctgctactaaatttagcaagtgtgtggaaagggagaaaaatattgttttgcccttattaaagcatggtgcagttttctgcccaggtgctgtagtctacctagaaacaaacaaccaaactgtttacaatggaattactatacaacaaattttcagcagtttttcatattattcttgaaagaagtatgtggggcaattcattgcttcatgtctaaaatgagagttcctgcaggtagagcaataaacacttgcattttggtaaagggaggatgagaaaaagcaacttctcccatttttagtgattatggacttagatcccagttcagtactgtttgcttccggatgtgctaccttgcagctaaaagacttcggaccaaatgcatccttaaaaaaaagaaaaaaagaaagaaagaaaagtgaaaatactaaaccttgaggccagaatagacaagctaaactggtgtcagagaaattaggaaatnttgccagttaacattctgctgcctcatacagtgatgagattggagaccttatangaaaacataagtgaaggagtttgtaaaaaaaaaatgttttgagagataattgatatagtgctgggctagaggtggtgactgcatgttttgctctacttctaagagctacttcatttctctaatttcctttgctactttaagcaatcgtaatgactcccaggactattataaagtaccttttttttcctcaactgtccacttcaggcatttcacaacagctgctttttatgattatgagctggtagcaaaggacctttggtattctcttgcaccaccctctacctagataatgctttgcacaaactaggtgcttaataaatgttacattaaaaagaagaatagcttataaactcacagtggaatagattttgggtacagcttttaatttaaacggaaggcatttttatgcactcacaagaacctaaacattcaaagaagagtagaatgtacattcccctagttgtcngcattgtatttgcttctaaagggttctcttgcctctcattgtacttccaggcacttgtatacttcatgcttttgaccagtaggtgtattattatctctccagcttcactgtgatacttcccagtatcacagcagcttgggaataaaaaaggttttgtcttttgagtgattgtatagtaccacacatgctggaacagtgacagtctcttgactgttgtgcagatgttgacagtatagtttagtacagttttgttctccacccagctgcctttatgtgtgagggacgaggggagggaatggagtgagaagctctaaaatgatgaagatttctattgataacattttacttttattctgcttatagtacaataaattcaggaaggtggcagaatttttctgttttcaaataaataatgttgcctgataggcttacaaacagggattggggcatagctgacagtacataagttatagtacatttttgacaagtaatttcatcctgtaattaaagttagataatggtcactgccatgttaacattatcaagtgtctgtaagagcatgaaggctacactcacctttacttcatcaaggttcttccatgctggtgagttttcttatgacattgtctactaggcaaaacagatggatttttcctcattcaaatgtatgtgatatcaagaaaatagaaatcagaagttgtgtttgtgggatttttctgcctttctctaggtgtgatatagctctcacttcaaatatagaaagaaacccgagcctcagctaaaatgagatggacacttttcctgaaagagaagaaactgtgtctgggagcaagttgtttaattgtcaattaaccaaccagcaaacaaacataaattataactgaaagaaagcaattagatctttcataatgtgggcttttaggtcttaaggataccagatggttccatgacattctgttcttcctaaatggttatctattgcctcaagatagccaaatgacagtgttggaaaggcaactttgagaattaggataaataaggtatcagttgtcttaatggatgttaataacatccacatgacctgaaagggataagaaaatattttttcagatcattgtagtaaaaatgcnttattaactcatcatttagatctgcttggtattagattgagtgacattgtttttaaaagattgatggagaaaacaatacaatctgggaagtaggaccttatcatttttatttgagaaataatgggacttccaaattgcctgggcacacaaacacacacgtacatgagtgtacaaattagtggtcaattcaaaacaatgtatacagatgtgcattgctttctcactggaagattataggaaaatatttttacagtattcctccaattctaagaatgaaataaaaaagttcactgtaaactattataaatatttgatatagtgatgtcactctgaggctcaggaaaagaaccagggctttgaatgttcaactccaggcagttaactttcagaaaaaaataaaaaataaaaagatgctttgctcagaactcaagaggaagcaagaataaaaggaggcttgatttaaatgtgtgtgtgtgtgtgtgtgtgtgtgcgcgtgtgtattctccctttgtatgtgtatggtgattttcaggaagcccaagcataggactcagtttgacatgcttcctaaaatattatgtcaactctcaagttttacttgcatcagtattaagttggctcatgaggaaaaggaattatttgttttctgatttgaggcaggagtttgttttttgcccagacagtgagtgaacttgaagggcttagaaataaagggcctcccatagagaaaaggcaacctggacagaaatgcagggggttggcagtagagactagaggtcatttgatctctttaagccatgggagcatcctggagtctgatagttggctggattttgttttccatttaggatcacaaattagcttaaaattgtccacattggattcttgaatcctgagcttcttggcattgccttcaactggtgtggaaaattgagaaaggtttcctca

SEQ ID NO: 178757 - DNA, 1316 bp, Homo sapiens
tgtgtccccttaagcatgtctgttatgagcttccttgacttcacacctctcagatttgacaaacatgaggagaaacaaagcaaactctcttttctgtgggttaatttgtctctcattttgggtccttcgtatatcagagtgtgaatgatactttattgtcctcacttgtgcttcaattcgtggctgttttgcaggaggagctcctaaaaaaaatgcagtctttatgggaaaaagcttgtgaaaatctcagaaatctgaacatggaaaccacaagaaccagatgctggaaggattatgtgagtttaaggatagaagcaatcagagctgaatatcagaagatgcctgcatttctccatgaagaagagcaacatcacttggaaaggctgcgaaaggagggcgaggacatttttcagcaactcaatgaaagcaaagccagaatggaacattccagggagcttttaagaggaatgtatgaggatctgaagcaaatgtgccataaagcagatgtggagctactccaggcttttggagacatattacacaggtatgagtctctgctgctgcaagtgtctgagcctgtgaatccagagctcagtgcagggcccatcactggactgctggacagcctcagtggattcagagttgattttactctgcagcctgaaagagccaatagtcatatcttcctgtgtggagatttgagaagcatgaatgttggatgtgaccctcaagatgatcccgatatcactggaaaatctgaatgttttcttgtatggggggctcaggctttcacatctggcaaatattattgggaggttcatatgggggactcttggaattgggcttttggtgtctgtaacaattattggaaagagaagagacagaatgacaagatagatggagaggagggactctttcttcttggatgtgttaaggaggacactcactgcagtctctttaccacctccccacttgtggtgcaatatgttccaagacctaccagcacagtaggattattcctggattgtgaaggtagaaccgtgagctttgttgatgttgatcaaagttccctgatatacaccatccccaattgctccttctcacctcctctcaggcctatcttttgctgtagtcacttctgaccagagaaaagtcagaaatgtgcctgtatgctctgggaacctgtttatcccagaaagccctctttttcgcacctcatcaaacagaacaaataagttatatttaatgtctttagttgcattctaatgtcatcaaaactcatttatagtgtttctattaaatatggtgaaaacatt

SEQ ID NO: 178758 - DNA, 293 bp, Homo sapiens
ggaactttagaaagtaacttagttttatattaagaagtatacttttttcattaagtttgttttgaggtcaggtgctgtggctcagtcctgtagtcccccacccaacactttgggatgccgaggcaagagaatggcttgagccctgaggtttgagaccagcctgaacaatgtagagagaccccatctctataaaaaattaattaattaaataagccagacgtggtgattcacacctctggtcccagctacttgggaggctgcattctggcctaggtgacacagcaagaccctgt

SEQ ID NO: 178759 - DNA, 1054 bp, Homo sapiens
tcaccttgtggcagctggcatgtgatgccgtttctggggagacactagcaaagttgatctgacaagtaaagaggagagatgatggttgtaaggtgcttttgtttcaaacttctttcttgacctgtcaggttttgaaggcgcctcaatggctcttttttgtcatgtgaaaattgtagtcttaggtagttatgaagcagttatctcttctcaaattgtgaatgctgctgtttaattgattcacttagcatttgaaactgtcacgcattaataattgcgaaatcctgtagatactgcgtgagtgtgtcatgcttaaatgtgtagttatcagaaaattaatatccttaatgaaccggtgctttcaaactaacattgcatgaaatctcttttgccctttcatttgctgaagccacatccgccagtttgccgagaatcacctctcgacagtttgctttcttgatgcccgacaaatgccagctttgctgtgggtacatcgcgtgctcaatgacaataaatatagtaattatactggagttagtaattaacataattgtagtcaattacgacaaatacagtgcagagctaaataaatgagaggggagaaattagcaagctaattgatttatctttacttggctttctattacaactggcagggctgtttttcttggggtaggggaagtggaggggagaaaaattccccacaaggattgtttacaaataactgattttgttttgaagttgcttttgacttactacacttcatcccctaccctgcttctaaggggaaaaaaagaaaagagagactttaaatgccaagggaacattttgttaatttagctacatcaagctgaatgctgcagctaaggcgaggcaggatttagctttcgctacgtcttgaggagttataattttttcttctcagctattgctctggtaaaaaaaaaaaaacctttttttgggggggggtttttgggtgttttcaaggccccaatggggaagggggaagaaaagaaaggtccccggcctgaattccgaaataagggcaatggttttt

SEQ ID NO: 178760 - DNA, 593 bp, Homo sapiens
ggggtacaaagttgtgatccctttcctcacccatcataggggccatggctgacacctgtgtaacaaaagacaggttagcaagagaaaagcatagcaaatttatttaatcaaaattttatgtgacacaggaaccttgtgaactgaaggccccaaaacccagggaatatgatctgtttctattacaactggcagggctgtttttcttggggtaggggaagtggaggggagaaaaattccccacaaggattgtttacaaataactgattttgttttgaagttgcttttgacttactacacttcatcccctaccctgcttctaaggggaaaaaaagaaaagagagactttaaatgccaagggaacattttgttaatttagctacatcaagctgaatgctgcagctaaggcgaggcaggatttagctttcgctacgtcttgaggagttataattttttcttctcagctattgctctggtaaaaaaaaaaaaacctttttttgggggggggtttttgggtgttttcaaggccccaatggggaagggggaagaaaagaaaggtccccggcctgaattccgaaataagggcaatggttttt

SEQ ID NO: 178761 - DNA, 452 bp, Homo sapiens
ggtgatagtgaggagtcacatttctggttgtgaatggccagaaagtctaaagcaaactctactcgtgctagcggaggcatcagtgctagtttctaccattccagtaagaatttctttaattgcatttgttttttttcttgaagaattcaaggtaatattacccctttcagtatgtgttctggagaaacagagcagaaagcttaaaagaactagtgtgctggccttctggaagggtttaaatctcaaaatgaaacctgatcatgtcacatctctgcttaaagctcttccacgagtgtctaaagttcttagggttaaggcccacatgtttaatatgacctaaatgttctggtggtctagctttggcaaaattctccagtgtcacctcacaactaccccctgctctagcaaaatatcttaacatcattgttccctctttgtaaatactctccctg

SEQ ID NO: 178762 - DNA, 291 bp, Homo sapiens
aggaatgggatgacggttagaggctgattaaagggtgtgctctggaaggttcgggagtcaaattttttttattatcattattatactttaagttccagggtacatgtgcacaacgtgcaggtttgttacatatgtatacatgtgccatgttggtgtgttgcatccattaactcatcaagactggatggctcccgctggactatactggatatgtaggcacagagcctacactcagttacctgatcaatgggcaggtagttgtgtcattggcaccattaagccatccttttt

SEQ ID NO: 178763 - DNA, 427 bp, Homo sapiens
taaggatggggtctcaccgtattgcccaagctgttttcgatctcctgggctcaggcagtcacctgcctctgcttcccaaagtgccttttaccctctttgagctaaatatctaggtcttccttgttttctaatatatatatttaaggccaggcacggtggttcatgcctataatcccagcactttgggaggctgaggcaggcagatcacttgaggtcaggagttggagaccagcctggctaacatggtgaaaccccgtctctactaaaaatacaagaattagcctgacatggtggtccatgcctgtaatcccagctactcgggaggctgaagcaggagaatcacttgaacctgggaggcagaggttgcagtgagccgagataacgccattgcactccagccagggcaatggagtgagactcttgtctc

SEQ ID NO: 178764 - DNA, 607 bp, Homo sapiens
gatgatcccccgaacacgtcgtggcttgagtatcttcaggtcaggatgcatgagcaataaagggcaagtcaggaggagcacccagcaccctgcagcccagctgcacaaaggcagatgctccagttcacagacaactgcaggggaggcccagctcaggtggaggcgttgttttgtttttgctttattttccttctaatcagcatgcagtagctctgtgatgtaattagcaaagagagaggaaaaccatggagtggtgttgccagagctaacctggaaatagaatcatttataagaaaaatagctcaggagaaaaagtctcagagtgagagaagctggggaaacagatttcttgcacttcaggccagatcctggaagccttacattgcatacatattctctcctgtgagggctggtgctccaggaagggaggaagcaatggtagagcaactcttctagaacagtggcttttgctcaggaaggcaagcgatgggaaatcttgccatcttttcaggatgcagctgggaaaactctctagctgctcagtttaattagagcccccaccaagtctcataggagggggctctcgcttggctgccttgctagggta

SEQ ID NO: 178765 - DNA, 339 bp, Homo sapiens
ccaggctggtctcgaactcctgacctcaaatgatccacctacctcggcatcccaaagtgcaggaattacaatagtacctaacatactctattgaattgctggcttttctttctctttagcccatgtaatccagtgtcattcatctcctctgcttaacaaagagcttagttcatgaaagccgcccaataaatgttctttaaattaataaatgacttcatgtcttgctgttccaaaatatactccttaacctgcctgaatactttcacttccttggttaggtatattcctaagcagatcattttattctatttcattttattgtattttattttattttat

SEQ ID NO: 178766 - DNA, 762 bp, Homo sapiens
tacatatgcttgagtagttaacgggaggatactgttgtccacaatttactttgaaatgtattcaaaaacatagatggattaattgcatgaataaatacatgataaagcaagtttagtaaaatgttaatagttgagtctaaatggggagtatatggatggtcactataaaaattcttttgactgatgtatgtttgaaaaattccataataaagtattgggaagttgtacttacatgggaaaatttacatgaacactgatgactgtataaaacaataataatatgtggggcataaaaagaacagaaatttaaatatgcctgtgaagattttgaataagtgtttcatgaaataagaatggaaagaaaaaatatttcaacattaatacattttaaacaatgttatatggaatatgtatataactgaattactaaattaagtagacctgactgtcaagttagtcaaaagaaaaatgtctggattatggtttgagtacatttacatttgagaacaggtggaactgatatgcatcccatctattccctacaaaggctcagatattaacaaaatcatgttctggatttactaaaggattatttttgattggccaaactctctaggagagagaaataaacaatgacaagaattataaaaaagattcaattaatctaaggaagtaaatattgttatttaactacttaattacaaaaactaattatgtaactcatatttaccacaaatgtgacagaaaaataacgtgttgctg

SEQ ID NO: 178767 - DNA, 581 bp, Homo sapiens
tactaggggacagcaagtagctggcatcaaggggtcaattctggaaaagttaagtgcacattaggaaaacttattttattaatagtacaaaatctcatgaaatcacaatgtcaactgtgcctctaccattcaatgcattcatctgttttattgttaatctaaattatttcctgaacaggaaattctgtttaaaaatgaacaatggttactttttcaaaacatcaaatgagatcatctggatattaaaagatttcaaactcatccaaaaaatattagtctgacaatatgcagttaagaaaaacaaatataccctgacagtaaaatgattccacattcacttgaaccaattttccaataaacacaaacataaattcaaaatgtggaaaattccaaaggacaacctacaaagcagaatacaaataaataaatacaacattataattttaaaaagtaattattcaggtgatagagtcactatacacaagactccagtgcacataaagtgtctattttgttattattatattttttcttttttttttacgtttactttaatgtattttactaacatatataattcc

SEQ ID NO: 178768 - DNA, 562 bp, Homo sapiens
ggctgtgttcacttaatctctaatcccatatcataaaagtccgctagtcactcctgacctccaggaacccacctaaccagggtggacactataagaaaacatgtgttttaatggaatgagaacttttttgagttgaagacacgctagcctcaggaagcagtgagctcaccatccctggagtgtgagtcaagcactagtcttggatgaccccttgataggaacgttgtagacaagattcaaatatcaaatagtatttggactagtgatttcaaagtctattccagacccctgtgaaactgtatttccaaccttggcatttctggatttccactaaattaagccactttccttgctcattagcatcttgtagagctgtgtggctatttgagcgcttgaatgtggctagtccaaattgagatgtgctatatgagataaacaccacgtttccaagaattagtatgaagagaaaatgttaaatatttcattaataattttaatattgattacctattgaaataatattttgtcatattgggctaaataaaatatattattaaaatga

SEQ ID NO: 178769 - DNA, 575 bp, Homo sapiens
cctgtcgtggcttttgggaggaacaggaggtgagactaaagaggcaagttgggaccacttggagagattttcttcctttagcagagtgtttatttatttattttttcccaggcacctgtgtggcctgatctgccctctagtggccatttgcaatactaactgtagccaagaagggtctaaaaatgtacgggcttggtccaaagcagatctcaatctcagtcctgctattaataatattcgggtggctcacgcctgtaatcccagcactttgggaggccgaggcgggcggatcatgagatcagaagatcgagaccatcctggctaacacggtgaaaccccgtcactactaaaaatacaagaaattagctgggcgtggtgacgcagctaccccaggcggggcaatcacttgaggcaggagttcgagaccagcctgaccaagatggtgaaaccccgttactacaagaaacataaaaattagccgggcgtggtgacacacgcctgtagtcccagctactcgggaggctgaggcaggagaatggcgtgaacctgggacgcggagcttgcagtgagccaag

SEQ ID NO: 178770 - DNA, 349 bp, Homo sapiens
tgtgtcacagggctgccaggagggcatagggcccaaggattccccagggatgccagcccccctgtgggccctcaggactggtagccctgggccccctggcgctttgtagggaggtgctcagcagtgatggttgtgtgcctgtcacacccacccacctgtgcctccccccacctgccacgcccattgtcctacacccagcgcacactcctctccacgctgcgcacgtgaacccgcccgggtcacacacctgccctgccatggtgacaggactgtgtgggatctctgcctccctgcctgaagttcctgccattgggacctgtcacaggcacacaggacacagctggctcac

SEQ ID NO: 178771 - DNA, 784 bp, Homo sapiens
cacaaacaaaaacaacaaaacaaagagaactatacggctaggtacgaggctgggtgttgggctgtagagcgactatgggcgcacgccgggtatccgcgccgcagccaggctcggagcgcgcggctggaggggcgcgggcggcgcgcgctccagagatgccttcctgcgaggctccgtcagcgcggcccggggagatcgcccgcaggcagcggaggcgcggcgggccgggggacgaccagggagcccctaacaaagcagctttgggagggccggaggcctctgcctccctcggcgataggtccgcgaagctgcctgtcatctcgcataggtggaggtggccaatggcgtgcacagacggagctctagttggcgcgcgcgcgcggctcggcatcggtgggattggtcggaggttgtggagaacgcggaaacggagacgctggcggtacagcctcgagcgaaacctttccctacacgaggccggagcttcctcctctcctgaagagctctagacttccccatttacaacaaaggctgggatgtatgttccttacaccttgattccatacacacgtgttcgccccgggagctgggaaggtctgcgctcccggggtgatcttgttgaaaacaaaaagaattgcccacgctgtggaagataaacctaaaccggaaaattgaaagtcatccctgattcctccttcttcttaaccctctcccatccatttttgttaacctcccaaacccattcctcccatcctgtctcacctggacctcagtaaagggctcc

SEQ ID NO: 178772 - DNA, 1147 bp, Homo sapiens
cacaaacaaaaacaacaaaacaaagagaactatacggctaggtacgaggctgggtgttgggctgtagagcgactatgggcgcacgccgggtatccgcgccgcagccaggctcggagcgcgcggctggaggggcgcgggcggcgcgcgctccagagatgccttcctgcgaggctccgtcagcgcggcccggggagatcgcccgcaggcagcggaggcgcggcgggccgggggacgaccagggagcccctaacaaagcagctttgggagggccggaggcctctgcctccctcggcgataggtccgcgaagctgcctgtcatctcgcataggtggaggtggccaatggcgtgcacagacggagctctagttggcgcgcgcgcgcggctcggcatcggtgggattggtcggaggttgtggagaacgcggaaacggagacgctggcggtacagcctcgagcgaaacctttccctacacgaggccggagcttcctcctctcctgaagagctctagacttccccatttacaacaaaggctgggatgtatgttccttacaccttgattccatacacacgtgttcgccccgggagctgggaaggtctgcgctcccggggtgatcttgttgaaaacaaaaagaattgcccacgctgtggaagataaacctaaaccggaaaattgaaagtcacaaaccaaaaacaaaaaaaaaaacccggagcacatcaagtgcacgggtgcgcgaaacaagcgggacccagaaaaggcgcccagtgtgccaatacagatacgtgaccacagttcctggtccaaggtggacaacagacgggacacccaataggaagcgaataactacgaataaacccagggtacaccggcgttaggacgactgcgccgcaccaccaaaaaacaacagcaagcataacacagcaacaaataacatacagacagagcgaagacacgaaaccagagaagagacgaccgaggacggagagaaacaaacagacgacaaaagaaaagaggaagggaagcagagagccaacaagatgaaaacgcagacaatagggacagagaggagcgacgaaaaggaacgaaggagagcaacgaaagcgagcacaggaacagacaagtcgaacatacgaggggccctgagcgac

SEQ ID NO: 178773 - DNA, 611 bp, Homo sapiens
gtatctgagcatagcaactatcgcagtgttctggtacaggatctcttttaagagaccaaagaactgacaggttgctgcattctggatgttttattgtgattccattcccccctcaccacccgctgcactggtctgctgtatctatgaatcatgggatgtatagtgtatgtgccctaggaagagggagggggtggagggaacagataggtagcatggagtatattgctgctgaaagctattccaagatatttccaaggttgagcttctctgacccttgaggcatagcttaatactttgtcaggtcaaagtacaaatctcctggggagttggagtgccaagtgaatactgtggactcctcatagaattagggatagcttccttcttcctgctttggcttcttggcaaaactccaaaatctggtgccaagtacattgtatcctccaaggttaaagcccttagagaaaggtggtggggattactctcctgagccagaagttgctacagtattgtgtttaatgcttaggtgtggggtcatatcaaactcttgggctgaactttttctagtggcctctgatacctggctgggaagttgcacttgctagttgcttggc

SEQ ID NO: 178774 - DNA, 581 bp, Homo sapiens
aaatgttttcagtaaaggccagagaacaaatattttacattttgcagattgtacaagctttgtcacaactacgcagtgaactctgccattgtatcacaagagcagccatagataatatataaatgaatggatgtggctgtgttccaataaaactttatttataaaaacaggcagcaggccagtttggcaacctctgctttacaccaatatctgtagctctaacccattggtgttttgtttttagttatttagaatttttatcacaaacttttaaataataaaagtataggaagtataatatacctatagaaaagtgtataaatcataatcttacagcttgaattctcacaaaggaaattcacctgtgtaaccagttcccatgtcaaaaattatactcattttctcattttaattcagtcttttcttttcttttttttgagacagagtcttactctatcacccaggctgtagtgcatgaatgacctgatctctgttcactgcaaactccacctgcagggttcaagtgattctcgtgtctcaccctccagagcaggtgggattacaggcatgcaccaccatac

SEQ ID NO: 178775 - DNA, 335 bp, Homo sapiens
tcaaagacttcatggatccaacaagcatgacattaactaagggacagttttctttcagcggattggaatctaaaatggcttttttattgttattatttttcagagaattataatgtgtttcaacaaaggcagccatggctttgataatgtcctcatggatataaagaccatcttcagagatttcgggccagatttcaagaggaatcgcctggccgagccttttaacagcatccacatctacccattcgtgtgtaagtcatgagctcttatgaccagcagccaggtgagacacaaaagcagctgccagaaaactgtcagcagagtctgctctgtcc

SEQ ID NO: 178776 - DNA, 650 bp, Homo sapiens
gaaatccctcatagatccttcccaactcagacaccagttctatgcattcttttaagcaatttcaaaaggacaaaaaccttagaatttatatatcgtttttgtagaagatatacatgattttgtattttgtcctttttgatttactttcaaaaatatgctaaagtgaaaaccacgtcacaatttagattaaaattatttacatgtaaacaagacataaaacttattttttttgttttaattgcactgccaaagaagagaggatataaaacttctataagcgattatctttgtgaatattcaactattacgtaggtttacataatgatatgcattacttaaaacattgtttgggttttagcaaattaccatattatacttattgttatacttattgtctttaattatatatgaggaaaataattttttaaaaatcccaagtgccagtcagcagcaaaatagaagtcagagaaggaaacaaaaatcttctaaacaaggccgggcgcggtggctcatgcctgtaatcccagcactttgggaggctgaagcaggaggattgcttaaggccaagagttcaaatcagcctgagcaacctagtaagatcccctttctgcaaaaaatttaaaaatttagctgggcatggtagtgtgcac

SEQ ID NO: 178777 - DNA, 533 bp, Homo sapiens
taactactctcagtggatcatataagctttcagttgctactcatccttgggcactctgccctcatctctattagaactcctgttatagtactttacttcattgccacctctatagtctgggaactccagtatataaacagtgaagacaagagaccagtctgactcgctctattgtatctcctgtgctttgcaagacagatgtctggctcttattaagtcctccatagtggttaatgattgtacctattatagccctcccttcatctgcctctccatactataggaagcactcaaacacttgcagtcactcaatgaatgaagttccttaatggtaggaaatctttttgtatgccaagtttctatctaatgaaactgtcttaacccgcgaattgaaagtacttttaggtgatgatggatatgtctgtgcccatgatggtggtgatggtttcatgggtgtatacttatctccacactcatcattgtatacattaattatgtataactttttacatatcagttatacttcaataaaa

SEQ ID NO: 178778 - DNA, 240 bp, Homo sapiens
gccaggcccgccagccagccagccaggcagctaagccagccaagccagtcaagcccgacagccagccaagacaggcatgccagccaaaccagccaggcagccaagccagccaagccagccagccagccaagccaggcatgccagccaagccatccagccagctaagccagccggctagccaagccagccaagccacccggccggccaagccagccaagccggccaaaccagccaaccagc

SEQ ID NO: 178779 - DNA, 615 bp, Homo sapiens
ccagcagccccagcgtcgtgtccctcctccctgattctggtcccccgacgacctttcatctgacttctcagaggtctgctttctcatgatctgattcgtgtttctctaaagcgggactctcggaggtgctgcgcacatccctctcaggctccttccagccctgccgggacccagacctggggcaaggggcaaaacgccggctccatcttccctcccaagccggggtggctggtggggatgaggcggggtgggactcagcagccttcatcccgatcctgcaggtcagaccaccgtgggtctgattccccatctgggccctccccaggccctcgggaccacgacagaggccacagcagcaggttagtgaccccatcagcctccatcctgcacgtctaggaagggccgtgggattccgtcttctgtttgccgcagaggcttctacccatgtcagccgccaaagcagacagaatcgtgagtgtggaggctcggacctccagctccatcaccctgagctgggcagccccaagggcccagaccggcagacttccatctactgggtccaggggcatggccagcgggaacacaagcacgtcacactgctggctcgtggtggag

SEQ ID NO: 178780 - DNA, 547 bp, Homo sapiens
tcctttccccttttttggacagggacacactaaggttagctagaagcttgcatggtggggtgggggaaatgcctgcagctgcaaggaggtacccaggacaaggcatggaaactccccctattcttgttagcacatgcaaggtggaaggagaaaggcagtgtggagtcgcccaagctaagagcctgcctgcatgataaaagaatggggtaggggctgccagagattccactctatacagatgacacacctggtcctaaccaggttttcatgccctatgtagataagatacccgctccctactagctcgttgataaaaaccctccattttactgcagcacggcaacccgtctgggacctctctctgtgagagagagctgtccttttccttttgcctattacacttctctaacttcaccctttgtgtgtctgcattcttcatttctgtggccatgagacaaaaaacctcagctgatatcccagacaacaaggctgctttagagggaaaacggatagctaatattatcagttaattggctatgttaattga

SEQ ID NO: 178781 - DNA, 424 bp, Homo sapiens
tcttctcctaaccgctatcggaaacagaaaagtatgtatgagaaacagcccctgaaaaatcattaactaggaacagcatataaatcagttttttttcctgagaaaccactcatcttagaatttcagaactgcagagggaccttaagatactacctaaaatccaacccactcattttataaataaaggctcggaatggttaagtaattttaacacgcccaagatcatacagcaacttagtggcaacactcctgaatctcattccagtgtctagtcctaccataccaggcttcctaggaatggtttatttttctcttttttccacccttaataatcattaaattattttctgcataagcatttccaaatccctatattatctgtagttccatcagagaaaataatcagatgttctcaattatctag

SEQ ID NO: 178782 - DNA, 232 bp, Homo sapiens
aattgttctctgaagtagctgtatacttttttgtatttccatctgcagggcaggagagttctagttgctctgtatctctgtcagcttgctattgtctaggtttgttggtttgtttttgttttgcttttctaataggtaagtaatggtatctcgtgatttctacttgcatttcctactggataaataggtttatgtactcagttttttaaaagaaatattacatttaactcta

SEQ ID NO: 178783 - DNA, 588 bp, Homo sapiens
caatatggtgagaagcagaaagagactccttcaatagataccatttcaaagttatgctgcctctcagtccatagccctaggaacccaaacaaaaagacaaggggtcaacataaagggcattcaggggtccccagcgggcctccccagcatcctgggactctacttcctccaggggaaggtaaataaaatcagctgatcaaccaatcagctcactggaaagcaggaaacagaaggactctctaaaatcagcccagattgctacacaggaattgtccaaagtccaaaaagttgccactctttaaaggaggcagaggagaatacataaaaaccaagaaggaagaaacaataaaggtgaggtagagaaggactccaatgcaaccaaaaagaaggcttctagcctgagacctggctaccaggggcagaacccaggtcggaggcttctctggcattttctttcctgctgggtaggcaggagttctctccagaggaacacatagctttagcccctctttgaaaaatttgctccaagaaaaagaaaacacgtttaaccagagatacaggatagaaagggcggccagctcttaaaac

SEQ ID NO: 178784 - DNA, 573 bp, Homo sapiens
tattcagatttccttagtttttatctaatatacattttctggttcaggatctcatctaggattccacattacatttgattatcatgtctctttgggctcttcttggctgtgacaatttctcagactttccctctttttgatgaccttgacagctttgaagagtgctggtcaggtatgttgtagaatgtccctcagctgggattcatctgatgtagtgcattatttctcattctcatccttagccttcagtgtaagtataaattattcatcttttatagatgaaaacactgagatccagagaggttgaggaacttcctgaaagttacacagctagcaaatggcagaagctgtgattcaaactcagtgttgacatgacttcaagccacatacttactttgcctccctggtctcaatctgctaaatttctgacaatggaattgttctcatcaaggctatcagggtgatctctttatagttctttcatacactttaaagcaatttgatgacatgcttaattatattagaacaatttccacaatcagttgtttgctgaactggttatttgtataactt

SEQ ID NO: 178785 - DNA, 124 bp, Homo sapiens
ctatgaatgctttggtgttcttaattttcttaagatttattaatatttctgaagtaactactaaatgccaagcaatatattttctaatttaatctttcattgacttttactttcacttcaattg

SEQ ID NO: 178786 - DNA, 357 bp, Homo sapiens
aattagccgggcatgatggcgggtggctataatccagctagttgggaggttgaggcagaagaatcgcttgaacctgggaggcggaggtggtagtgagctgaaatcaggacactgcactccagcctgggagacacagcaagactttctcaaaacgaaaaacgcacacttcactccctttgccttcctgagctaaagaagagtagccaaaccgccccaaagagaaatctcatccaggttactctagccggaagatcaatggaggtaactaatgtaccaaccaagaaactaaggaaagataggtcaggcgcggtggctcatgcctgtaatcccagcacttcgggaggccgaggcgggcag

SEQ ID NO: 178787 - DNA, 351 bp, Homo sapiens
aagaacagacatgattattactcactggccagtctagacagaaaattacgtaaattcaaagaaagaagagtttcaactaactaacagttggcacaagtacacggttcgcatgttcaatgttccataaagtttatgaggtaaataatatactattagcttaaacccatcccagctgtcaagagcctgagtagaggttacgaagataagaaatgaaagtattctagactctaggggtacatttgtcaggcatgcatatatctaattgactaatgtgttccaaagtgaatcttcattcgagttctctatttctgctcatcctctgctcttgctcttctttgtcttcattcattc

SEQ ID NO: 178788 - DNA, 354 bp, Homo sapiens
tatgaacacagttttccaagagtgctttggcagtatgtttcctctctattttaatggtacactttcccaaattatcagagacgtgcatttaaaactactcatcaaaatcctgtatctgactataaaccatcttttgaagaggatgaaagcaacacaccattgtctgtggaggacaaaaagtcttacagcagccgcagtcaaagatgcaattgacaaggaaatccagttacctctgtggtacacagcaatttaacataacagttatgggtattattgttcacattcactaattcatgtcaaaattataggagtttcacataatttggaaacacatacagataacacatttataca

SEQ ID NO: 178789 - DNA, 431 bp, Homo sapiens
tgttcagccttattattagcagttattcatatacctcttggcaagtcttctttaagaaatgtctatctggtcctttgccttttgagacagcatctcactctgtcccccaggctagaatgtagcagcgtgatctcggctcactgcaaccttcccttcccaggctcaaaccatcctcccactcagcctcccaaagtgctgggattacaggcgtgagccacggtgcttggctagttctttcttttcttaaggctgcatttcattcagcaaagaggcactcactatgtagccggcactactctgggtttgtgggccataaagacagataagacacagtccctgtctttcgaggacttaggcttagcaggagacaggcacctgagccacagagacaatcaagagttgctcgctgtgctcagggagaactctgttcg

SEQ ID NO: 178790 - DNA, 1617 bp, Homo sapiens
  misc_feature (272)..(272): n is a, c, g, or t
  misc_feature (280)..(280): n is a, c, g, or t
  misc_feature (1012)..(1012): n is a, c, g, or t
  misc_feature (1373)..(1373): n is a, c, g, or t
  misc_feature (1386)..(1387): n is a, c, g, or t
  misc_feature (1390)..(1390): n is a, c, g, or t
ctgggtgtgaggttgttgaggattctgggttgcaggtaggcaccgtcttggtttctctgtctctgtctgacattccagacgctcccagggcctggctgggccagcttccctcatgggcttggttctcacagacccagtcacaaaaaccatgctgccagcacttagtacagcctcaggcctataccacctccgtccctcatcagtggggtgccctctgcctggtggttcctgccagcctcaggccaggggttcagagagcaagtctctctcanaggtgctntagccccagggacccagggcagagcacaactcagcctcccaggctgccagcaattcacttactatactgaacattctgtttcctcctccacgaccacagccatccctctccatgccctgtgtgctctgctgccacggtccccttgcccttgcctctggtctggttcaccaatggggacaccagctgaagactggaagggtggaaggagagagtggccagaactactcatccagcatctcctgggttgaggctggccatgtcctgactaagagccacagtccccactgtggtgggagggtggccctctcctgggctgcagcttgggagagctccagtaacagccctgctcccactccctagaggcaggaatggtggcttcctgctctctgtactgtcaccatcccttaagcagcatctgtaagtggccagctcattaagccctttcccctagtttgcagactacgtctcctgccaggatcggatcagtaaacctcaggactctcacagccctacagggcagctggagccatcccatttacagatgaagaaactgactcagaatcaaaaacaacaaatccggagccatcacattactcaacttcaaactatactataaggtcatagtcaccaaagcagcatggtactggtataaaaatagtcacatagaccaatggaacagaatagagaacccagaaataaagccaaatacttacagccaactgatctttgacnaaacaaacaaaaacataaagtggagaaaggaaaccctattcaataaatggtgctgggataattggcaagccacatgtagaatgaaactggatcctcatctctcaccttatacaaaaatcaactcaagatggctcaaatacttaaatctaagacctgaaaccataaagattccagaagataacatcggaaaaacccttctagacattggcttaggcaaagccttcatgaccaagaacccaaaagcaaatgcaacaaaaacaaagataaatagatgggacctaattaaactgaaaagcttctgcacagcaaaagaaataatcaggctgggcgcagtggctcacgcctgtaatcccaacatttngggaggctgaggnnggnggatcacgaggtcaggcgatcgagaccatcctggctaacatggtgaaaccctgtctctactgaaaaatacaacaaaaattagacaggcgtggtggtgtgcacctgtagtcccagctactcaggaggctggggcaggagaatggcatgaacccaggaggcagagcttgtagtgagcctagatcgcgccactgcactccagcctgggcgacagagcgagactccgtctc

SEQ ID NO: 178791 - DNA, 979 bp, Homo sapiens
ctgtccaaaaaaaagtgtgaagtcaaccttcattcttttcttaaacaacccatattcaatccttattggatccaccttgaaagtatactcaaaacgcaattatttttcaatgccttccccactacaaccctggtccaagtcatcatatctcatctgagttcttgcaatagctcccaagttggttttcttgcttccatacttcctcctataaactgctcttagcacagcagccaaagcagtgaaaataattaagctcatgccacttctctgtcgaagcctcctttggctatgcgttttgctcagggaaagctggatcccttacaatgttgtacaggccctacacaatctgatccctgttacttctgaggctttatctccaagtgcccttctcctcgctcactctactcagccacactgactttattcttccttgaacattctagggacacttttacttcagggctttttcattcgttgtttgcctggagacacgtcttccttagaaaatgtttggccacttccttacctccttcaaatctttgctcaaatatggcttatcagagggccttccttgaccatcctatttttaaatgcagtcttccccctggcccccaaacacaggtactctatatcccctttcctttctttttcctcatgacacttatagctgtatgacatactatatattttgctaatgtttattttccctatgtccccactaatttgtatattttgtgaggacagagattcttgtctctttgtttaatgctgcagcctcagttcttaaggctatgcctggtgtgtaataggctctcaataagtatttgttaaatgagtcaatacatttgtctttaaaacattccaaatatttctacatgattagtacttttacctaatgtgctatttactaaaaaggttattaggaatcattttcgtttgttttccaggttttcattgccattgtgatttggaacaaata

SEQ ID NO: 178792 - DNA, 492 bp, Homo sapiens
tggataacaagagtaaggacatgtgagcatgtgcatggctgtgttgttcaatactgctttatgttttatatacagtaaaatttttatatagaataagattccatggtaagatttcacttgaataagcaagtttctctgttaacatttttaaaaaatctttggctgtggactgtgggaagcactgaaaaaaacacaagtgaataagacagtgtctactttcaagttggtcattaattccactttgtttgtggtctataattgttataaatgttacctcagattcctacaataactttcccactatcactaaaccatgtcctttcatcctttaaaattacccttgagagcccccacatatacttctggtaacagtcacctgctccatattgtaatctgccttcaaggacttttatcctttctgccattcattcacaccataaactttttttaaaaaaatgtcttgccagaaatcatactggaagttttcatgca

SEQ ID NO: 178793 - DNA, 384 bp, Homo sapiens
gatacactacagtaagcatgttactctgttaccgttcgttcgaaatctacgtccgttgcttggaaaacccctggtgaaaaaaacacaagtgaataagacagtgtctactttcaagttggtcattaattccactttgtttgtggtctataattgttataaatgttacctcagattcctacaataactttcccactatcactaaaccatgtcctttcatcctttaaaattacccttgagagcccccacatatacttctggtaacagtcacctgctccatattgtaatctgccttcaaggacttttatcctttctgccattcattcacaccataaactttttttaaaaaaatgtcttgccagaaatcatactggaagttttcatgca

SEQ ID NO: 178794 - DNA, 198 bp, Homo sapiens
gggccctttgtaaatcagacactgccttacactgtcttctgaaacacctttatataaccaactatttcctgccacgcacagggaaatccattcggagccttcctccctctgcatgggggagctgctctcttcttttctacctattaaactttcctctccttaacccacccacgtgtatccgtgtccttaatcttcttg

SEQ ID NO: 178795 - DNA, 809 bp, Homo sapiens
tcagtgcgcaccattttcataatttatggtacttccaccccaagcatgcctcaaatttgtttaggaaaatattttcttctcataccttcatttgttctcatatcatcattgtaatatgggtggatgatcaaataagcaaggccggcaattggtctgagaaaagagctcatttggaaataacatcctgagctttgcaaccgcaagtgagaagtgtatctcagcacctggtagcaaatgcaggtgaggtccaccctggtagtacatacaggagagttcatagatggttggcaaagaggtacaaactaatggaaacacaacaacaagctctgtagctactttacatggagttgactcagcaaaggcccatctgacctaacaacaacaaccagattagaatagttaatctttattgaacagttgttaccaccagttctgggtgcttcacatatgctatttcatttaatcctcacgacaatcctatgaggtactaattatctttctgctattttgcagatgtggagactgaggcttacaaagattaaataagtgttcaaagtctcacaactattaggtggcagatgtagaactcatatccaggttcccaaaccccagagcccaagtttttgccccagaatcacaatgctatatggactgcaccataatgaaacagctgtgtcaactgtactctgtatgcccccctcatgtattcagttgccctgtaactctgtccccaaaggagaaagtttgcatgccctgactgtttcagcattggtcactcatactcacaaactgtcctgtaaaatggagct

SEQ ID NO: 178796 - DNA, 528 bp, Homo sapiens
gataagcacctagatcttgggtcttgttctctatagaagtgaagcacttgattcaagagcctttgagatcttcccctctttcctgaccaaagaaacaaccacagccatcaacattctggcattgggccaggcattctctcctctgctgggtgaagaagctgctctatttgctgactttcatttgactgtggtgtagagattccttgataataacaactgtacatcatatgactattttattctttctgtctctacctaactgcagatgggcacattaccactgtggattagatactttatggttggatgataaacgcttataagaacaacgtctgtgttaccagaatggccattatacatgatgctccaaacctcctctgtttggcttaacatagctttgtctcaattcctagccttaatgcaggctacttttcaaaagtagggttctaccacaaaacaactcttttttccccggcaatgattcttgtgcagttcactgaagtaggcttgatcctgtcttttcttccg

SEQ ID NO: 178797 - DNA, 398 bp, Homo sapiens
gtcaaattagccagggaaattgagggggattgtttattggttgtatttatattgtccccatttatccctaaggaagcaagtagagagtatccaagcttcctggctgtcaaaattttttttaaaatgaccaaaaaaatgcataattcttcaggggaataagattttcccttttggctctaaattcagagaacaacttaaaattcagagaacaacttaagatacggatccttttataagatggcctgttatatgataaacaccaagagtggatgatgtccttaatagataattttgtaaaagatacgaaaatcccttcattgggtgacttcctgtactgaatgaagttcaatgagaacagtgggtggtacattacagggtaatttagagaaggtattttg

SEQ ID NO: 178798 - DNA, 236 bp, Homo sapiens
  misc_feature (194)..(194): n is a, c, g, or t
gtaactgaggtgagacactgtggaaaaatacatggggcttaaaaaaaagattcaaaaatcaagctggttagttttgaggcttgccacctcttgcttcttttgatcaactgctctggtgggagagacagcattcaccaaagcatcaggagaataaaatatgaatactgcagataatatgtaactttaaacattgncgattccttctctgaacacaggcagctttctagaagtttccc

SEQ ID NO: 178799 - DNA, 668 bp, Homo sapiens
gatgctgtgatgctctagagatcccccactacagggatcaactgtaaccaatttcaggatcacagatcagattttcccaaaacatgaatctgctaattaagttacctgaaagtcaaactaacacgcaatttggatgtgacatttatccacctgaaagtagacctgttaagtatttcaattcacagtaacagcagctattccttatggacagcactattacacacttggaaaactgcagctgaaatacacggacgcaggaagagactcatctatgattcaagcatttccaggaaataacaaaaggattctcctggcaaaccaacagaatggcccaccaagacctgcttcagcctgggaatcaactcgtattcatttgctaaattaaactgataatgaaacaagtttaagatactcacatacagagacacaccacagcacacacagcctggcaccagttacattagtcgcttttttctgaattctgacacaaggaacgaggtttgatttcatggttttgcctatttgctcattattaaatctgcccacttattttccgcaagaaaaaaaaaaaattgggccaggcgcagtggctcacacctgtaatttcagcactttgggaggccaaggtgggtggaccatgaggtcaggagtttgagaccagcctgacc

SEQ ID NO: 178800 - DNA, 163 bp, Homo sapiens
ttacagaatttaacatgacttggaatgccaaggagaataaaagcagtgaaagccacaatggccaggggagatatcctggagggggcagaacttgcatggaggaatgattgcagctgattatctcgagggaaaaaaagatgggatgatgagggtgatgactgaa

SEQ ID NO: 178801 - DNA, 287 bp, Homo sapiens
gagaggggtcccccttggcatcgtggcagggcgacaggaacccacgttgattttgcctgcaggactggctaagcagggcgcgagaggcccacggctccctggcctgccttgcaaggaggcatggggacaatgactatgcaaacttgaccactctgctcccctcctcccctcagcagctactcctcgctcctctgagaagccagggctgctctctgctgatttttcggggctcccccgggctgcctgcttcccccagcttctcagaggcctgcctcaagccccttttt

SEQ ID NO: 178802 - DNA, 420 bp, Homo sapiens
tgatacacactggtttcttttgattttctcaaaatggaaatatattatattgctttggtgattttaaataaaacttatggtcattaaaatttttttctaacagtcatataagtgtttaagtataaggaaaatcatctcacagtgattctcccccttcccttttaccaactataccagtctcccccacaaccgaatttctgttaagtttggtatatattcttgaagacttttctgtatctataggttatttaaaattatgtgtgaatggtaaatcacacatgctgtgcttcaactgcttctatggggcagagactgcactaagtactgaggcatctcatttaattctctcaacaaccctaatgcagtaggtataattattatccactttttatttttattgggcttttttttttttagaca

SEQ ID NO: 178803 - DNA, 508 bp, Homo sapiens
atgagataccacaccaggcaagaaagtttctctttacaaaatattccagaaatgaataaataaataaggaataataaaattacactatcaccatttgaaactactaatgaattaatgaatgtaggcaatggtcagtgggcaataacatcacaaaagacaagacaatcaggcattatatgcatgtaaggggaaaaaaaagttaggacttacttttgtcaaaaggtaatgatttttttttttttaaattaccaggtgcagtggctcaagcctgtaatcccagcactttggaaggccaacatgggcggattgcctgagctcaggaatttgaggccagccagcgtaacatggtaaaaccccatctctaccaaaatacaaaaaaattagcagggtgtggtgatgcgcacctgtaatcccagctactcgggcagctgaggcaggagaatcgcttgaacccggaaggcagaggttgcagtgagccaagatcacaccactgcactcccgcctgggc

SEQ ID NO: 178804 - DNA, 158 bp, Homo sapiens
aactagaactatgttggaaaatccattctcaactccttgtatttactcactagcaaatattacctatcttctgtgctagaattcaaacccttaaaggctagaattgggtttcatccacaattctgtagtcctagcataattcattgcatatgtttccc

SEQ ID NO: 178805 - DNA, 522 bp, Homo sapiens
ctctttctgaaccttcaaggggaggatccttccttgcctctttcagcttccagcagccccgggcattcctgggcttgtggcagcatctctcacacctgtgcctccatcttcacagggccgccttctccctctgcgtctctttcacacagagttctcttccccttttacaaaaacagcagtcatattgtatcagggctcaccttcatgacctcatcttaacttgatgaaatctgcaaagatcttatttccaaataaagtcacattcgcaggtgcaaggagataggactcccacataccctttcatggggaaggaagacacaattcaacccctagcagccaggaaagagaaaaacagggacagaaaaataactctttgatcttggtcaaccaaaaaggggatcctgatgttctcagaggatgttcacccagaaagagcctgggaccccgacaggaacatctggagatgaggcgaaagcctagcagcaaaggtgatcgctcaagagggcaggagaatccactgga

SEQ ID NO: 178806 - DNA, 693 bp, Homo sapiens
gtttatcagtcagggttctccagagggacagaactaataggatatatgcatatatgatggggagtcttttagggagaactggctcacaccatcacaagacaaagtcccacaataagctgtctgcaagctggggaagagtagtggctcagtccaagtccaaaagcctcaaaagcagggaagctgacagtacagccttcagtctgtggctgaagacccaagagcccctggcaaaccagtggtgtaactccaagagtccaaaggctgaagaacctggattctgatgtccaaaggcaggaggagcggaaggaagcattcagcacaggagaaagaagaaagccagaagactcagcaagccagcttaacccaccttcttctacctgctttgttctagttgttttgattggatggtgcctacccacactgagggggagtcttcctctccagtccactgactcaaatgtcagtctcctctggcaacaccgtcacagccacacccagaataatactttaccagctatctaggcactcttcaatccaatcaagttgacatctaatattaaccatcacagtggtgaattgaattatatgaagacttgatttcagactctgccatatgatggaattttggctattggtttattggaagggattttatattatatcatgatataatatgataatatgttcttactg

SEQ ID NO: 178807 - DNA, 320 bp, Homo sapiens
ctaccacactgccaataaccctcaaattcgtatttccagtcctatcctttctcctgatctccagacctgattatcttctcagtggccagctggacaatcccaacagggtatccccctcagtatacaaacaaaatgcaggtatcacaccagatcatattcagttgtctcaactgagtatcatgccctggtgtctcgattttgggatctccctattgcctgcttcaactgtaacctcagagccataattagagttctgtctttgcttcaccaccctcatttctaattagtttacagattttttcttgcgtggggtaggaggt

SEQ ID NO: 178808 - DNA, 351 bp, Homo sapiens
cgtgcaggattagttgctgtcctttttttcccaggttgattatttctaccaacattgttatcataaagtagagtaaacactagtttttattcatttcttagcacaaagagtatgaaggacaaaggtgaataccaagtgcatgatagggtctaaactgtggggttctgatatgctgtcttctaccaaatgccagacaaaatattagagtgtggagcaccaattcaagggttaggatgcaccatacctggaaagaaagctagcaaaaatgccaggcaacctatccttttgacaagagggcatttgactccaatgctcagacccgtccagtgcagctttccactgggagaggac

SEQ ID NO: 178809 - DNA, 525 bp, Homo sapiens
agctcggcacccatagctacaccgtacaaagaataaattatattgccacagaatactcatataatttgtaggatatgcaacagctttcaagataggaacataatgttttcacaactaaaataaaaataataaacttggtttattagtacattaaacttttatctataaaaacactgttctattataattcaggcataagacaggatctcactctgctgcccacgctggagtgcaggggttattcatacacacaaatatagtgcactacagccttgaactcttgggctcaagtgatccccagcctctaaagtagctgggaccacaggtgtgccacactgtgcccagctctcaaatatataattttttaacggtaagaattttttttctagaaatgaaaattgaagcatgccaatgttcaattgtttataaactttgctattattccagcttacccaaaaggcaaaagagccactctgttagtccaaacttaccttagagcaaaattgtgtggagatagaaagtcaa

SEQ ID NO: 178810 - DNA, 261 bp, Homo sapiens
gtccctcatgtccctaacataccacactcagctcttggttcatactgcccatctgccaagattattccttctgctttctttatgaggcaagcccatccttgaaagcccagcttgctgcctcctttctgaagcccttcttaaatcagcgtcactgcctctctctctctgcagccgcaatatgttgtgcacagctctatgataaccattttcacatagtgctagcctctcttacatttctctcccttgatgaattacaaatgc

SEQ ID NO: 178811 - DNA, 324 bp, Homo sapiens
atgcagtgttccctcttacaagcttcccctctgtagcctacaatcaaaacttactagtcctggagcccagtcctttgaaaaactaatttgtgctgacctatgagtaattggtaacttaattttttgctaaacataattaatctgtctcattagaactttttctttgagacagggcctcactctgtcacccaggctagagtacagtggtgcaatcatggctcactgcagcctcaacctctgaagctcaagcaatcttcccgcctcagcctccagagtagctggagctaagggtgcacaccaccacgcctggctaattttgttttt

SEQ ID NO: 178812 - DNA, 277 bp, Homo sapiens
caggcacccatctcatggtacaagatagtatctccagctccagcggtcacatcttcattctagccagaggaaagatgaaaaggaaagaaaagggcatgctccctctttgtaaagatgctttccagaagctacatgttcatttctgcctacctaagttctgagtggtcagaacttagtcacatggccctatctagctgcaaaggaggcaggaaaatattattattaatgctaggcagttgtgtacccaattaaaaatgggacaccctattactaagta

SEQ ID NO: 178813 - DNA, 542 bp, Homo sapiens
aaaagaaggcaagaaagcaggaacacagttacaaaaagcaaaatgcacatggtacaaatagagaagaaacagccgaagagcagacccaaacctagtcacaccaatgattacgccacatgtaaatgaactaccctcaatctgggtgggcacaatctaatcagctgccagcacggccagaataaaagcagacagaaggatgtagagagactggactggcttggtctcccccggcctacatctttcttccacgctggatgcttcctgcccttgaacattggactccaagttcttcagctttgggactattggacattcaaccactgactgaaggctgaactgtcagcttccccacttttgaggttttgggacttggactggcttccctgctcctcggctgcagatggcctattgtggggcttcaccttgtgattgtgtgagtcaatattccttaataaactcctgtttatatatacatctatcctattagttctgtccttttggagaatcctaatacaaaagccaaatattggttcttttaaaaa

SEQ ID NO: 178814 - DNA, 450 bp, Homo sapiens
tgttctttctctcctcttgctcttcctctctctcagtttcatgaaaattcatttatctgtgacatttaaagactctgtctgagaggtgtctggagctgtggccggctgtgtacatcaatagtttcttagaatctggcactctgtcaatatttgggggcctcgataaccgcacttaaatgcagagcctgccagccatcatgctcttagtgaatgaatggatattagcatgtcaaatcctttcacaactggcaacacttggtagacaatatataggcatcttgcatttgccttctacacctttctgtttgcctgcctcatttatatgatgtcatgtttcccattacgtataaaaataggaatcttcaaaaagcagtattataaaaattgaagtaaatgacatcattgtgcattctaagtttggtgggttttatagtatacatggtgatggca

SEQ ID NO: 178815 - DNA, 243 bp, Homo sapiens
ccaagagaggggcaagagtgagggctggatgatggcagggaatacccaaaggtggcggcgctaaggctgagagagttgcccccattccttcctccgccatcttttatcttcctcatatttccctcctctgtgctacagcacagaggaggagcacagaggaggctaaacagaaggtcccatgttaactgaaggcaaattcactcaacctctctagtaagggacccatgggcctacagagtgttc

SEQ ID NO: 178816 - DNA, 172 bp, Homo sapiens
atggagagacaggcagtggagactgagaatggcaacacaatagtccaaacaagtgacagtgtgggtgtgacctaaacaaaggggggcatgcagtgccctctgtggttacagagcccgcggggcatgaggggaacggtgaaatgaatgtcgaagggtacaaagtctctgttag

SEQ ID NO: 178817 - DNA, 488 bp, Homo sapiens
atccattagtattcattatttcacttctttttgatttttactctcttcacaacctccctatctataccgtagtccaggggaagaatgtcagtgttttttatgtcagtccttggatgaattctctttagataatgtttctctttagataatgtttctcttttcaagaaacagtgctgaaaaggctatgccttttctttctctttctttgaggttttatctgagttatatcgcttgtgtagatataggataagttatttttatttttatccccaggaagcctttcagcccagtgtgctttcccatagttattgaaatgcacaaatcaccggtgcaactaatctgaataattagtaactgagtacaggtatactagttgtaaaattatctctgcatctttatgtaagaatattaattacatgaacttatttttaattttttcccttctgaacatgttttcttttatgtaggaaattctttctaaatgccaa

SEQ ID NO: 178818 - DNA, 397 bp, Homo sapiens
gcttgaacctgcgacgtggaggttgcagtgagctgagatcccaccactgcacaccagcctgggcgatggagctagactctgtctcaaaaaaagaatttaagtttttaaaaaaccttccaatagaagtagttgaaaaatgatagttgctacttttacttggcagttcttctaatccatgaatatggaccatctatttatttaaatcatctttaatttctattaataatgcgtttataactttcagtgtatgagtattgcacttttattacatttattactaaattttttatgcttttaaatgtttttgtgcatggaattattttcttaattttgttttcagattattcattatatgtaatcataatttttttattttactcttgtatcctgcagtttt

SEQ ID NO: 178819 - DNA, 189 bp, Homo sapiens
tctgtcctcactggtcccccttccctctgtgtgagcctctgtgtgtctacttataaagacatcagccatactggatttaaggctcactctactccagcgtgacctcatcttaaataattatgtctgcaaagacctcgttgccaaataaattcacattctgaggtttcaggtagatgtgaagtttggggg

SEQ ID NO: 178820 - DNA, 322 bp, Homo sapiens
ctcccgagtagctgggattacaggcacacgccaccatgcctgctaaattttgtatttttagtagagatggggtttctccatgttgcccaggctggtttcgaactcctgagctcaggcaatctgcccacctcagcctcccaaaatgttaggattacaggcatgagccaccaagcctggccctgtgcatccttctttgtgccctttgctgagttcttcttccccccgagggcaacctatgtgcacttcacaccttcctctttcatcctggaaacacatcctattttatgacttcactatcacctctattccatgactctcgaat

SEQ ID NO: 178821 - DNA, 780 bp, Homo sapiens
gcttgagcagcttgttggaaccggagggaggtttcagggactgcttatgaaccagataccaggttgggtcttgacagtctgcatcccaaacaagctcccctgaaacaagcccgttgtacactaaaattggagaacaacccgattagaagaatagactccacagaagaccaagggcatcatcaatcggtaaaattttccaaaagaggaaaaccaatgtaagtctttttccctgaaaaacttagttgtgtttgtaaagagctaagttgacattccaaagtccttggactggaatctccagtgtgtgccatgttcccagtgggcgtgatgaggtgtcctgaggagtatcaggctatggctttgctaccttgtcagtgacagaatttgcatcggctgcattctttgtattctataatttgtgtatggtttaccagtttgctagaatgttagaatcttttgtttttcaccactcagagtggacctaattttgtggtcggctgaaaaaaatttgcatctaggtatctatgtaaagtgtagaagaattgattcttagctgtggattatcttacccttactttagttgaagtgattgatacctgtggctttgaagaacatttgtgagatgatctttttctcgtactgtgctagatagagctttcatcattataccatacaattgtacttttctgagattctttgttggagggggtttagttcctaagagtcaaggattgtaatggagatctatatctcatatctaaaatgatgaatttatgaaaaagt

SEQ ID NO: 178822 - DNA, 855 bp, Homo sapiens
  misc_feature (4)..(4): n is a, c, g, or t
ccanggtagactacatatataggcatagagcttatgccaaattacctgaccagtaggcaggtagttgtgttattggcactattaaaccatgtttcttcctactgcccataaaaacaggcgaaattctaggcttccctgtctatgcttcccatgaaaagagaagcatagctataggaaattgaaaaaatgataagtaaccccctgggttaggtctacctggccaggtagacctaaccagaagaccaagggcatcatcaatcggtaaaattttccaaaagaggaaaaccaatgtaagtctttttccctgaaaaacttagttgtgtttgtaaagagctaagttgacattccaaagtccttggactggaatctccagtgtgtgccatgttcccagtgggcgtgatgaggtgtcctgaggagtatcaggctatggctttgctaccttgtcagtgacagaatttgcatcggctgcattctttgtattctataatttgtgtatggtttaccagtttgctagaatgttagaatcttttgtttttcaccactcagagtggacctaattttgtggtcggctgaaaaaaatttgcatctaggtatctatgtaaagtgtagaagaattgattcttagctgtggattatcttacccttactttagttgaagtgattgatacctgtggctttgaagaacatttgtgagatgatctttttctcgtactgtgctagatagagctttcatcattataccatacaattgtacttttctgagattctttgttggagggggtttagttcctaagagtcaaggattgtaatggagatctatatctcatatctaaaatgatgaatttatgaaaaagt

SEQ ID NO: 178823 - DNA, 344 bp, Homo sapiens
actatgccatatatttctgatgttagcaataatttttgacttactaatgacagttcttggcttacctagacatccttgagttccagggagtcacaatgcttggttgagtcccatgcacaagattccattggttttaacatttgtgtgtgttgccagatctgtcagttttgcttggccctggctttactcatcttcctgggccgatcatcccaagagacagtaaaaaagctttgtgtcccaaactgagaggagaccttaaggtttgcctgatattaaggcttgatgggataactatgccttgcagatatgactggatggaaagaaaggttatgaaagtacttagt

SEQ ID NO: 178824 - DNA, 680 bp, Homo sapiens
gctctcactccatacctccccacaagctgagggagccggctccggcctcagccagcccagaaaggggctcccacagtgcagcgggctgaagggctcctcaatagcgaccagagtgggcaccaaggccgaggaggcaccaaaagcgagtgagggctgcgagggctgcgagggctgccagcacattgtcgcctctcagtagggtctttgagagacaaggtatttcactgtaacagacatcagactaaaaggatcttgctatgattcccaggctgatcacaaactcctgacctcaagcaaccctttcacctcagcatcccaaagtgctgggattacaggatgatccactatgtctggcccataaataggagggaacaagtaaaaacatggcaatatggcaaaacaatgaaacatttgttaatgaattgaaaacagcaaaactggaagtttcctagacatccgtgttcttaaaggaaaccacgaatttctgaaggaaatgttgaagacacagggaagggcagaataaaagcaaagaatccttgagactgtcaacagagctctggcgggccttaaggaatgcacatctagcagactctcaagtccctaatgatattttggaagactttctggctactttgcaacaacctgagtatttttggtactattaaggggtcttaaacctc

SEQ ID NO: 178825 - DNA, 674 bp, Homo sapiens
gtggcatcctaggcccagccttatccctagcagttgtcccagtgctgctaggttgcttatcttgtttatctggaatcactgtggagtgaaattttccacatcatccagaattgccttatttaagaagtaaaacgttttaatttttagcctttttttggtggagttatttaatatgtatatcagaggatatactagatggtaacatttctttctgtgcttggctatctttgtggacttcaggggcttctaaaacagacaggactgtgttgcctttactaaatggtctgagacagctatggttttgaatttttagttttttttttttaacccacttcccctcctggtctcttccctctctgataattaccattcatatgtgagtgttagtgtgcctccttttagcattttcttcttctctttctgattcttcatttctgactgcctaggcaaggaaaccagataaccaaacttactagaacgttctttaaaacacaagtacaaactctgggacaggacccaagacactttcctgtgaagtgctgaaaaagacctcattgtattggcatttgatatcagtttgatgtagcttagagtgcttcctgattcttgctgagtttcaggtagttgagatagagagaagtgagtcatattcatattttcccccttagaataat

SEQ ID NO: 178826 - DNA, 640 bp, Homo sapiens
gaaatcactggctagtcagtcaaggggatcccagtgccaaaagtcacaacttgactggtggacctggttcaagcacttaagagctgttagattaaccagacatgaaaaaataagactgtcgtgagaggataaactggacacaaaacacagcagtgccaccaccttcaggaagtatctgcacaagaaggcacaccaaaagcattgcacaacccaacactgtggcatttccctcttaggcttttacctcagatttgagagatccaatattcaacataaaaatgagatccttaatttctaaagaactaagtactccaccttctggataaacctgtcttttatatgagtaagtgttaggtcccagaagctacaaaatactggcaaaaatggcaaaatcacaacaaagataatttagaattacaatggccattacatggagcatttcagataaacagcactgcactttaagaagtccatttaaaaataaggagtcctaattcaggccaacccaggggcatctattggtatgtagaagcttctaaaaagatttcaggccagcacagtggctcatacctgtaatctaaacactttgggaggccaaggcaggaggactgcttgaggccaggaattcgaggctgcagtg

SEQ ID NO: 178827 - DNA, 166 bp, Homo sapiens
atggaataaagtacagagcccagaaatagatccacacttacatggtcaaatgatttccaacaagggtgccaagatcattcaatggggaaaggacagtcttttcaacaaatggtgctggggaaactgcacatctacatgtaaaagaatgaagttggaccttagctaa

SEQ ID NO: 178828 - DNA, 469 bp, Homo sapiens
aagtaaccttcagataacctctgaattagacaaaattattctttttctcaataaaaacacatcttcttggcacattttatatacagaattacatattaactagaattcttgtccttagtaatgttaaattttagtgaaaacctaggaagcaagaaatcctgagttgcctatgagatactagcattttatagatgagaaacattctgcaatttttagaaacatgtttccccatatcataaccttttcttaattggaaattaccagacaaccaatgagcatccaaaatgactttaagattttaaattacacaaaaactttatctatagcacttatccatttatattttatttatttttagtagtttataagattctttatgcatcatttccttgttaaccattttataacctgtgaatatcaaatgttcacctaagtaagaactttaaattaactgcatgggtattttcac

SEQ ID NO: 178829 - DNA, 263 bp, Homo sapiens
cctacattcctaactaatcagccccccagtgggactttctccagccacacccagcaggctggattaggagtagacagagtttaagatcttagaggaacagagaacactgtgaggggcaagaagagaatagaagtgtaaagtttatagctgtggtcagagtagatcttgaaaagcattctggaagagaagcagttccttccgagtgatgacacagtcatgaaagcaggatgctacaacgccgtggaggtgaaagggatgtatgg

SEQ ID NO: 178830 - DNA, 438 bp, Homo sapiens
cgtctactctggaggttgaggcagaagaatcactcaaacccaggaggcggaggttgcagtgagctgagattgcgccactgcactccagcttgggcatcagaataagactcaaaacaaaacaaagagagtttgacagttccttaaaaagttacagatatggccaggcgtggtggctcacgcctgtaatcccaactctttgggaggccgaggcgggtggatcacaaggtcaggagttcaaaaccagcctggccagtatggtgaaaccctgtctctactaaaaatacaaaaattagccgggcatggtggcacacacctgtagtcccagctactcaggaggctgaggcaggagtatcgcttaaacctgggaggtagaggttgtggtgagctgagatcacgccactgcgctccagcctggggaacagagcaagactctgtctc

SEQ ID NO: 178831 - DNA, 524 bp, Homo sapiens
  misc_feature (37)..(37): n is a, c, g, or t
  misc_feature (78)..(78): n is a, c, g, or t
atctagaggatctgcccaggtagattgccaggtaccnagacccaattctgtcggagacaacgcaattaacaacttctngtgcatcttatcagacagctggcgcgcacacccgcagatacgcccaccctcaggcgtccttctacgcaaagatggatagcacccatcaacgctgttttttctttttttagacggagtctcgctctgtcgcccggcctcccggcataatttttaaaatgctcatcctatgccctcattccccagcttgcagctgggggcctcctggtgcttttctgggacttcgagtaagtcatttcccctctctaagcctcagtttccccacctgtaaagctgaagccacctcctccaaggctcccgcgaggctatctgcctatctgttgtgtgttcctttaatgtatgggagtgagattgcggtttttgaatctgggtcctgtgccaggaggaataagtggtgagatacctactgtttgtctcactcaggtcttccaccaacccctccagcctgt

SEQ ID NO: 178832 - DNA, 561 bp, Homo sapiens
gtcatcttctgaatccccaagctagttaaatgtttatctgccattacatttacaaaattaaaacactggccaggcgcagtggctcacgcctataatcccagcactttgggaggccgagacaggcggatcatgaggtcaggagatcgagaccagcctgactaacatggtgaaaccccgtctctactaaaaatacaaaaattagccaggtgtggtggcacgcgcctgtagtcccagctactcgggaggctgaggcaggagaatcacttgaacccgggagacggaggttgcagtgagccaagatcgcgctgctgcactccagcctggtgacagagtgagaccccgtctcaaaaaaaaaaaaaaaagatacagtgtagtaataaggagttagtggtctgatttcaccttaccagatcaggctcttatccactactccaattatactctccctcttttcaccctattctgaatgtgctgtgcatgtgcattaaattaacaaatatttattgagcacctgcaatatgccagataccttgcaaggtgttagagataggaaggcacagt

SEQ ID NO: 178833 - DNA, 1108 bp, Homo sapiens
aggcaagtcattgatatgagactgaggggtagaaagcaaaacaacagcagtgttcaaacaatcctaggcataaccagggccattgtccaaaggacagatgctttgggaacactaagagatgacaagtgacctcaagcagaagttaatgaaacaggaaccatttgcttcacttccccaagctcagcctataacagaaatcaactacgtttatcagtaaaggctaaatggccttgtgggccatgtggggtctctgttgtaactcctgcactctactattttaacatgaaagcagccacagttaacaaacaaaaggttggtcagatatgactcgtgaaccatagtttgccagcccttgatctagaagaatcgtcacactttagagcctaaagaatctagataaatcctatcattctcagatgggaaatctgggacccagtgagggccatgactcacccagggtcaaagaccaagtggatgtctccctacccttaacttctggtagcttcctcaatgttctttgatagatttaagaaatagatggttaagcaagtagaccccagaggctgtatctaagacctctttccccaatctttcatgtttggaggggccactctgaaggcgggatccaatgggacacagctgtcctgggatcaggaaagagaggttttctaagccatttctgcttcgccaggtgttccctcagagtcaggccatcttcctgtgttctggccctaccatgaacaaactgtggggcatggggcaagtcatttctctcttggcttcaacttagtgatctgcaataaggcgagactgaactaaaaagccccccaaatctcttctggctgtaacatcctgtgacttaatcaattcctggccatgaaacaagttaatgagtctgtccttcgttgctgaagagaaagcacctcagagttgtttgtctggtgtctccagaaggagacacattcttccttaagatttcccaagtcatctttgcaaggtggctgaggcttttcttaaagaagccattaattttatttagaagactggttcatactttgtcagaggggtgacgcttatttttgtttataagatactgaactatgcctcc

SEQ ID NO: 178834 - DNA, 238 bp, Homo sapiens
caaactcctctccttgcaccgttaagaccttaccccaatctggttcttgccggaatttcccaatatgtttctaacaaccaccgcccttgaccaccagctgtgctcccttcagacatactagccttatcccaagctcatttagactagaatattctttattcaggttcttacaccagccaccgatctaaaaacatcacccaccccaaccctaccttggaactctatcctatgactccat

SEQ ID NO: 178835 - DNA, 496 bp, Homo sapiens
ttaccaggagtaaacagagatggatctatttatggtttgctttgtctgttccccaccctaccgaaccaagcctttctccctgaatgtatgtgtgttcacaaagcagtgtggtacaaggttcgtcagaaacatgcagtgttgttctcgtagtttaactcccacttataagtgagaacatgcagtgtttggtttactgttcctgtgttagtttgctgagaatgatggtttccagcttcatccatgtctcagcaaagggcatgaactcatctttatttatggctgcataagtattccgtggtgtaatacatgccacattttctttatccattctatcattgatgggcatttgggtaggttccaagtcttagctattgtaaatcgtgcagcagtacacatacatgtgcatgtgtctttatagtagaatgatttataactcctttgggtatatacccagtaataggattgctgggtcaaatggaacttctgattctagatc

SEQ ID NO: 178836 - DNA, 183 bp, Homo sapiens
cggcacgaggggaaagaccaggccacagacaagggaggatctgggccgctcctgcctgtgtgtccacacgtgggcaagtggacatctcatgatgtctgtatttggagtccagtagtacactgaaaataatcccgtaaaagctttattttaaaacatcaatattttcaatagtgaaaaaaaaaa

SEQ ID NO: 178837 - DNA, 659 bp, Homo sapiens
tgatggctgtaacatgcagccacggtggggagccctgcttcaagccactgcatattatggatatacaaattgacaagtcagatagggtaggagctgattatttctgtaactcactgcttcttaaaagcttgccaggattttcttaaatatacaagcacctacgaatgcatttaagaattttcctttataaacagttacaagccaatgactgaagaatgttctagggctgagacaatttaaaccaaattgttaggacacactccctagtaaggacgaatgagaattagagaagtagcaagtcattccagaaatataaatgattaactgtggcctcatttattaaaagttgggtatatacacaaattcctctatgaaatagagggactcctctatgaaaattaacttacatccgttctgtgacaggtgttctactttgaaaatctttcaaagtagaaagagtagaagtagaagaggtgagagaagaatctagatatattattagatttctaggtttgggatcacctctaaattattgcccaaaggaaaagccctccacttcttaaggattctcaccaaatgtgttggaccatatgaagtgaccatttttgtaggtcaaaaatggctgaatagtgatggttacatatagctctatcttaaag

SEQ ID NO: 178838 - DNA, 194 bp, Homo sapiens
cacagctggctaattcttacaggggtctcactatattgctcaagctggtttcaaactcctgggttcaggaaatcctcccacgttggcctcccagagcactggggttacggtgtgagccactccgcctggcctggctgtgggtctctagacatgcttgttaccaagctgacgacgttctgctcatgactggctga

SEQ ID NO: 178839 - DNA, 260 bp, Homo sapiens
ttcagccttaatttgcttttgcttaagctgggtcactaatctgtgctgaggacccattatccattctttgttaggttctacagtttacctctagggtacatttcatagtccttaatgtctcttctgtataactgattatttatggaatttcatgatgcgttaaatactttggctgagtagcaaacacatttcatctaatctttcaattccacaacagtactactgggcaacatttttattcttggtggatacaatttctt

SEQ ID NO: 178840 - DNA, 646 bp, Homo sapiens
tgggcaacagagcaagactcttatctcaaaaaaaaaaaatatatatatatatattcttgaggaagtgtgcctagcaggtaaattttttgaagctttattctaactttatacttgaaattacttggctgggtatagaattctagattggaaatcctgtagctttagaatttcgaggacattactgtattgggttcttagttccaaagatgatgtttgaaattcaagaatgttctaaatcctgtgcatggtatgtgaagagttttttcttctggaagtttgcaggactctgtgtgtccctgatttcttaaatttcacattgctgtaggtacttttaaactcatgtttttcagcattgggaaattttcttgaattatttcaagatattttctcctctatgtttttcctcatgttttttggggagcacccattatctggatatagaacagtctgaattaattcttctaattaacatatctttttctcttttttttcctttatttgtttttgagacagaatcttgctttgtggcttaggctggagtgcaggggtgcgatcaaggctcactgcagcctcagcctcctgggctcaagcgatattcttatctcagccccgaccatgcacagtgctgtgattacaggtatgagcc

SEQ ID NO: 178841 - DNA, 1563 bp, Homo sapiens
tgggcaacagagcaagactcttatctcaaaaaaaaaaaatatatatatatatattcttgaggaagtgtgcctagcaggtaaattttttgaagctttattctaactttatacttgaaattacttggctgggtatagaattctagattggaaatcctgtagctttagaatttcgaggacattactgtattgggttcttagttccaaagatgatgtttgaaattcaagaatgttctaaatcctgtgcatggtatgtgaagagttttttcttctggaagtttgcaggactctgtgtgtccctgatttcttaaatttcacattgctgtaggtacttttaaactcatgtttttcagcattgggaaattttcttgaattatttcaagatattttctcctctatgtttttcctcatgttttttggggagcacccattatctggatatagaacagtctgaattaattctgtctctacaaaaaaatctaataagttagccaagtgtggtggtctacctgtaatcttagctacttgggaggctgaggttggaggattgcttgagcacagaagtttgaggctgcagtgagctatgattgtgccattgtactccaatctgggtgacagagtgagaccctgactcttaaaaaaaaaaaattctgtggtttataagccacccagtttatgactttgggtatagcagcttgaatgaactaagtaggtatgttttctaagttgcttttaatatttgtatgtaaaattagcagaaaacgtctctttcacaaacatacagatagtgctttttcccctttttcttttttaaaaaataaggcgaatatccatatccccagttcaagaaacagaacttttcagccatccaggagccatccatgtgttccatttcagtgtactcacctcccaaaaagaaaataccatacttcactctctctcagtcatttccttttcttttatagttttatcaccgtgtacattcttagacattatattttatttagtgttatgatgtcttttaaaccacagtttatgcctctatcccttttttttccttagtttttatgttgaagaacccagggagagttaaccaaagtttgaattttactgattgtacactcatgttgcatctttcttcattccttgtatattttgcaaattggttactgaactcagagacttggtcagactctggttcggtctctttagcaatactgtaggcagtgttgtgttctttcatggggaggcagaagtctggttttctcttttttttaaatcatgtccgcagttgttgggctcagtgcccagatccattaatttatcaatggtttaaaaatagtgacattctaattgtgtgggtttttttaaaattttttgttggaatacttttattaagagatgcttctgcttacctgctgttcagttatccagtggcacagttatataggaaaggtaggatatatacttgattctttgcctttatttattcttttttcaaaatagtgacttagttccctattattctctaagagaaaccgtcgattcgaggggtcctctaagtcg

SEQ ID NO: 178842 - DNA, 1162 bp, Homo sapiens
tgggaagattgcttgagatcaggagtttaagaccagcctgggcaacatagcaagattctgtctctacaaaaaaatctaataagttagccaagtgtggtggtctacctgtaatcttagctacttgggaggctgaggttggaggattgcttgagcacagaagtttgaggctgcagtgagctatgattgtgccattgtactccaatctgggtgacagagtgagaccctgactcttaaaaaaaaaaaattctgtggtttataagccacccagtttatgactttgggtatagcagcttgaatgaactaagtaggtatgttttctaagttgcttttaatatttgtatgtaaaattagcagaaaacgtctctttcacaaacatacagatagtgctttttcccctttttcttttttaaaaaataaggcgaatatccatatccccagttcaagaaacagaacttttcagccatccaggagccatccatgtgttccatttcagtgtactcacctcccaaaaagaaaataccatacttcactctctctcagtcatttccttttcttttatagttttatcaccgtgtacattcttagacattatattttatttagtgttatgatgtcttttaaaccacagtttatgcctctatcccttttttttccttagtttttatgttgaagaacccagggagagttaaccaaagtttgaattttactgattgtacactcatgttgcatctttcttcattccttgtatattttgcaaattggttactgaactcagagacttggtcagactctggttcggtctctttagcaatactgtaggcagtgttgtgttctttcatggggaggcagaagtctggttttctcttttttttaaatcatgtccgcagttgttgggctcagtgcccagatccattaatttatcaatggtttaaaaatagtgacattctaattgtgtgggtttttttaaaattttttgttggaatacttttattaagagatgcttctgcttacctgctgttcagttatccagtggcacagttatataggaaaggtaggatatatacttgattctttgcctttatttattcttttttcaaaatagtgacttagttccctattattctctaagagaaaccgtcgattcgaggggtcctctaagtcg

SEQ ID NO: 178843 - DNA, 147 bp, Homo sapiens
ctaagttacacaaacaaacaaatgaaaacaaacacctaaaaaaggacaaattaaagttcacgatacactacaatctagtaacattctcatgcaaagcaggagtgttctcaagtcagagtaataaatacttaataaataaaaatcctg

SEQ ID NO: 178844 - DNA, 273 bp, Homo sapiens
aaaacccacacagacatggggaagtgtgcaaactcagacagtggccatggccaggaattgatttttttccctcatcaacattatacaaaacaacattgaatgaaacaacattatttgagtaccagctgtaaatgcatggtcatagaaacatgaaacagcatggaatatttggggaattgctttgttgataggtgtggctagactgtaaagttaaagatgtgtggcagatgagcccctagaatggagctagatctttgtcttgcgtgccttgca

SEQ ID NO: 178845 - DNA, 171 bp, Homo sapiens
ctgtcttccatttgtgttcttaatacgtggtcattcttagagaaaactcttctcagataaccaggcaacgaatggagggactgttcagggcctatctagggaagcaggatgtaggattatgatgggcctcagaggcaggcgtgtgatgttatcttcaaatgagcttataca

SEQ ID NO: 178846 - DNA, 794 bp, Homo sapiens
aactccatctcgaaaaaaagaaaaaagaaaaagaaacttgaaataagtctgtttacaggggtgtccaaactattggtttccctgggccatgtgggataattgtcttgggccacacataaaatacactaacgttaacaatagctgatgagaaaaaaaaatcgcaaacaaaaatctcataatgttttaagaaagtttatgaatttgtgtaaaattcaaagctatcctgggctacatgcggcccgtgggccacaggttggataagcttggtttaagatgtgtagaaaaataagaaaataaaaagcaaaagcctttaaaaaaagactatgaagattaaaacaaaacaaaacaaaacaaaattgtaggaataaaagatgtagaagttgaaacacagtatctaagaaatgggttacacagtagaataaatacagccaaggaaagaactagtgaattggaagacaggttaaggaaagcagctagtacacagtgcagagaaaatatgaaggaaaagttaagagacatggagggtagaatgcatggaggacaagtgtccaacataccttaacagaaggagacaataagaaggaggcaatattgtaaacaccatgactaggaattttccagcatagaaggcaaacacgagtcctcggactgaaaaaacagactgagtctgtagtaagacaaataaactcttactgagacacatcagagcaagagagccagccatcacagagaaagaaatcctcaaatctcctggaaagaaaagacacaggactttcaaaggaacaacaatgaac

SEQ ID NO: 178847 - DNA, 399 bp, Homo sapiens
cagctcacttgtgggaaggtggcacctggttcaagtgaacctatatgagatcatcacccttccaggggccctcagggaagggctgagaactgctgtcccaggtgtgtggaggagctgcaggcgagatagggctgtgggccagggagaggagcagacaggttgtcccatcgccatgggagcctgcatgagctttagatgggggagtcctgcacctctgacctggatgctcctgtgtaaagagttggcttgctcagtgagatccatgccagggggtaaagtgggaactgatgagcaatgaggggccagagtcctgggtagtgctcaaggactgaattatgcgtctgtattaatcttggttgctctgacagcccctctctgtgccccaccagggataaagat

SEQ ID NO: 178848 - DNA, 336 bp, Homo sapiens
ttcaatttctacacagaggttttgactcactaaagtttgggaaccactcctgtggagcagggtttcccaacctctgcactgttgacttttttggctggatgtagaggatgggttaaaaacaaggaaggaattattcctgggttatgatttgggcagctgcatggagagtggtgctttatactgagatatgaaatattagataatgagatgggaagtaaagcctatttgagaggccatcttggaggctaaaagtttgagatgtctaatgaggcattcatgtagagatacactgaattagattttgctaaaattaaatattgtgagtgtgggacagca

SEQ ID NO: 178849 - DNA, 182 bp, Homo sapiens
cctccgagggcaaggtcctgggaaggagcccatgccccagtgggaatgcatgtggcagaggcacacgcatgctcctcacagcagcaacaaatgccccctgcacagttttggatgttggagtggctgctgcacctgtgcgctttcctatctacacccagcttcccccactggtgttgctgctc

SEQ ID NO: 178850 - DNA, 691 bp, Homo sapiens
ggatgaagcaatgtaataaatagatacagccaaacagatgagtgacccagagacagagagagcatccgttggggtcaattgaccctttgatgaaaaaacaggaggaaacacatactgagacacatcaaactgaagatagtgagaatagtctgttttagttgatattttctaatacttaggaatttctaagtcttaatatttctaacttaaatatagggcttaaaatatttgtaacaaggtataatgtgtatggtgttcacattacagttgtttttgtgaaacggaaagaaaagtgcatgcgtgactgtcttttgggctttagggagttaatgaggaaagggcagtaggctgagcagtattgtctacctggtatatgacttgtgggcatctttgcaggtcatggcttgagcatgggaaggcattaaagaattttgacttgatacagactcctattcctggccttcctggtatgggttgatttggagatgggatcactttacctcattcaggcaggctacaatttaccaaggagcctccttggaaccaccgatgtttagagggataatttttggtgctgatgcagaggcagtatcaaccaagaatcttggttctataggaattttatgccttctttagggagtattaaactgcctttctttattttaaaagtccccttaaattgagaagttgg

SEQ ID NO: 178851 - DNA, 1394 bp, Homo sapiens
gttcttgattatagatgataaagcttaggtggaaaatactaatattcattgtaaacgtatacgaactttggattcattttgtggaatcaatattagctacagagaaagctctgattatgcttgtataactggtatttgaaagggcaggcaagaggccagtgttgcacaaacaggaaggggtgtaaagagacagttggttctgttatgtctgtaagtcattcttgccatttacagctcttcttaacaatctgttttcttatattacctaagtgctttaatatcacttttatatctctaaatacaaatgcaattttattttctcaaagctgcactcttgatttgataatgtaaacaaaactttgattagctcacttgtttcaaaagaatcgctgtatattttctctcctagatcattaagtactttaaatgttgattgatgttgtaatactgtactttatttttaacacaaaacttggccagacagcaaaaatatttgccaggagaaacaattttgaaaaagacagattgccttttgttggaagaaagtacatggagacttgaatcgtaaaggcaaagtattggttacttctaagcatctgtagactaatgattaattgatacacagtttcagcatttaaacaatattaggaagctcacttttaaaagtattttattccaaatggttgattatatcattgctaccagagatgagatgattcagtctggtcaaacatatgaaaaagagagctgttgcaaataatgccaatattgaaacagtagactgttgataatttcagtcatttcttaagagtatgtatgtgcatctgtgcttatgaattaagagtatttttgggccttgtgtgaaaagtatgaagacagatgcttatcaggcactaaatatttaatgagaaccaactacttggcttcccattaggtgctatatgagatactagatagtatcccttttccaaggagtttagctaaggaaatgacacatcgtgtagataccccgtaggttagtaattgaagacagtgatgcacaacagtgatcataagacagggcatatttagttcctccagaatcccattaagggtcaggcagcattccatggagaaaaggaacttgagtagagacataaaccagcagtagggaactgtttaaatatttctccctgtctccctccccctctatccctcttcccgggaaagtaacgaagaaaataaatcctacgatcctaagtactatagtttaatagacagtgttggctgttaaaagaattactgctatccttccttttaaaaaattattctttcagcattttacctgaaagtgttcttcaatacagttccaaagacttcacatgccatcccatatccaaactcagtagagtggc

SEQ ID NO: 178852 - DNA, 237 bp, Homo sapiens
tgacaaccatgccatcacaacaatgcaaacgtaagacaaaggcacagactctttgcctatgtcgctgaggtacataaacaaagacacagacttggtatccaggaaaacaagctcctttgtcaatgactctcatgaaaacagaagtctgtccctgtaactcaggagtggggaaaagtcccagaggctgttgatcacccacctccattccagtgctcagaaaggccactactcatcctc

SEQ ID NO: 178853 - DNA, 313 bp, Homo sapiens
ttgcttctgtgtttggagatgagtaagcagggagtgggtgcatatgcaaacagggtggtcagaaatgctttggccggatgtgtgactgaaggctatgtgcagctgaggaaggctgggccaccacagtagcagagaggctgaccaatttggcatgcagcaagcaggaagtagaagggatcttaagcaagcaaagtgtttgggtagacaagattatgaggaatgagcaccaatgacatttccaacaagcactgaaagcttccaaatgcttctaacagttactgcctgtacaaacacaggacagtcttgactatgt

SEQ ID NO: 178854 - DNA, 331 bp, Homo sapiens
tggtataatattagtcatctccatctcagctatggctaataggcctttggctctgacccagaggtgacctacagctaggaccctgaaaggattccgtagcttcgaaggtagttactatcctgaagctcagctgtttcttttcaaatgctagatactatctaactgccctaataggaaacatctaatttgtcttctcctggattttgaggactatacagagttcaaacagaaaacacagtttttatccatctcttctgtcagaggctaagtttgtctaatccttcctatccctcttaatatatcaacatattttcatgatctaaccttgcta

SEQ ID NO: 178855 - DNA, 463 bp, Homo sapiens
tcacacagaataatttctctcactcagcgatacgcacttaaggctcatgcaggcctctccacggcttgagaacatcttttcaggactaaataatgttccaccatctggatgcacggagttgatccattcatctactgaaggacgtcttggccgcacttttccttgaatttccattgatatttttctcttttcgtaatatatattattcggatactgcaacacccacactcagcctctgtttatttttttcatatcatttaccagctgtcattttgctgtgagattttccctttattttctaaaccttcctttgattttatttttgctttttaaaaattattattggccgggcacggtggctcacgcctctaatcccagcactttgggaggccgaggcgggcggatcacctgagctcaggagttcgagaccagcctggacaacatggagaaaccccgtatctac

SEQ ID NO: 178856 - DNA, 310 bp, Homo sapiens
tctgggaccacgaggacaaagtgcatagtgcactgcatagtgccacctgaggcacagcagccctggggaaggatgcagagcagtcttgagtacctatctgaagtctttgaaactagcttcttttctggctccaaagagatactgagatactgggatgggtatatacccttaggatgaggggactgagtttttccaaaattgttactgacatggctgagaacatgcttgatagggaataaggtgagtgacagcttgaagaaaacaccctggcacccagtggtattcttatggcccttgcattccttctcag

SEQ ID NO: 178857 - DNA, 369 bp, Homo sapiens
gcacacacacacacacacacacacgcacgccttcattccatatcccaagagccatagactccataattcaccaggagactccaaagctcctgcagcccccaccactgtcccgactcagctttgggacagcttttcctccccggctgcctggcccctttctctgcccctctacactgcagggctagtggtgctccaggacttaccacaaatcaagggcagataaaccacaaccaacctgcaagtctgccttaaaaagaaacttccttcccacctgccttcaaatcaacaccactcctcgctctgcaccaggcatcctccttctggcctatgacagacaagcaagcaactcccagatcatccctcatcccc

SEQ ID NO: 178858 - DNA, 449 bp, Homo sapiens
cctggttatagtgaggagtcaaaaccagcctgcgccaacatgacttcttaagttaccccatctctactaaaaatacaaaaattagccaagcatggtggcacacacctgtaatcccagctactagggagtgctgaggcaagagaatcacttgaacccagaaggtagaggttgcagtgagctgagatcatgacattgcactccagcctgggtgacaagaggaaaactgtctcaaaggaataaaaaaaaaaaaggtttttccatgaaccaagtccttgaaatgaaaatgatctatcctctcacatcatgatacttgtgaacttcagtatctgtatcttcagtatttttgtccaaacatacagtttccattcttgtcagaggaccaataccagatttgtcaaccaagaaaggtaaacatcaacctcacacataaaatcaactcctcactataa

SEQ ID NO: 178859 - DNA, 504 bp, Homo sapiens
tagaaaggaacaagaaatgggagagacctaagaaggaagggagaggcagaggctaggttgggagacagtggagaaagaggagaccctggagagaagaaacacgtgggttcaagaaaactactcaggtcttatctgccctccagtccagctctaggctgggtgttattacttccctttaaaatgggaacaagcagctcctgacttggcactgaggcaccgacagaagcagatgggccaaactgtttagaactgcagcgcaagaagtgtccagaagagcgcagctctaaaacactggattcagttagagatgtcctgcctgagaaaggaaaatgaaggcattctgacatctacagtctccacagctctgtcatacatacaacaagactggccccctttgagaaatcagcgcattgctcttaaactccaggaggaaagcaggacttctttcaggcacattcctgtgtcataggcagtaacgatgcttccagctccctggttgtacaa

SEQ ID NO: 178860 - DNA, 155 bp, Homo sapiens
tcccaagacaaagtcagagctctaacacaatttccaactctccaactttaaatcttccacttctgcttcttgccttcctcacttcaatccctggttctaaccctactgaactactttcagttcctactgcaatatacgtgcggtctctcaccaac

SEQ ID NO: 178861 - DNA, 409 bp, Homo sapiens
tgctgggattacaggcatgagccacagcacccagccaagggttatttttattcatcatcaagattaaaagattgagtattgaaagtggaacaaccctaccccaatcctggcttttcattttagccattatataccagaattgcacctagtaatctagatacatacatgtggttttgtagctaaggtgtgttaggttttcttttctatctccagtatagacttttttttgtctttttgtctattacagcacatgagacttctatgtttaggacacaactgatactaagtctgattcctaaattatcctatttcttcccaataccacttaaataatattttttatgccagttctttaggaaacttctggctgggttttgtgtgtatcactcaattttaataaaaacttcga

SEQ ID NO: 178862 - DNA, 309 bp, Homo sapiens
cagagctgatctagagatccctccggttgcacgatagttacgcgtcaaagtattgggattacagggctctgctgccctgcatagccttgggacactgctctccacatcctagttgctccagatccagctatggctcatagaggcccaggttacactcaggccactgcttcagagggtgcaagctgtaagccttggtggcttccatgtggtgttaagcctgtaagtgcacagagtgcaagagctggggcttgggagcctccaactagatttcagaggatgtatggaaaaacttggatgtccaggcagaag

SEQ ID NO: 178863 - DNA, 1299 bp, Homo sapiens
ggcacgaggcactgatccaaattaactaggatggctccaagtggtagatagtactaacagcaagctgcagataaggagggtaggccctacttccatgtgaggtaattagatacagtttttgctgaaatctcaggtaaaggatatattagagacctaagcatagaattggaaggagcaaattgctgtctggttcaggcttctcagactataagttgctatgatctccacctcaggatcttgttaaaatgcagattctggtggtggtggtggccaggggctgtggggagggaaaatgaggagttacggtttaatgggcatagaatttcagttttggaagatgaaaagagttctagagatctgttgcatgacaaacgttacctgacagttaaggagaggagctgctaaatgggtcgtgtgtttctgaatgggttcctgatagtcctgtgaccatgcggaagccagcactcctcatccccaccaacataattcatcatgaggagagacagaaagaaacctttgtggtgtcaagcagcaaaacaaaacaaaaagattcaaattaagttggtttgggtggggcctgagattctgcatttttcccaagtccctaggtgctgccagtgctgctggtgcacagaccatctttgaatagcaaggctctagataactgggctacagatgaactctggaagcagctgaagaacggttggctgttccatcctaagcagttactctgatctagtccattatgctatatactgttttcgctcatctcttttcagattggaagcctgccttttacacattgctttttaccacacgtttccagaaagttaaaatgcggggtagagggaataaactacagggagacaaataaattaaagagatgagttgaggtggataaggatagcttaataacatgcaagctaatttacaaaatttccatataggttattattttgggcacagtggctcatgcctataatcccagcactttgggaggccaaggtgggaggatcacctgaggtcaggagttcaaggccagcctggccaacgtgatgaaactccatctctacaaaaaatacaaaaagccaggcgtggtggcaaatgcctataatcccagctactcgggaggctgaggcatgagaattacttgaacccaggaggcagagatcgcagtgagttgagattgtaccactgcactccagtctgggcaacagacggagactgtgtctcaaaaaaaaagtgttcttgtataccatgtttgaaaagcatagttgataaaggaagaacatgtaaggc

SEQ ID NO: 178864 - DNA, 429 bp, Homo sapiens
acacggaaactcgagttttggcaagaacacataataaacttcatccttcatgttagttttctttcttgtacttctagctatttgctctgaatttagcaccttgcatttgctaaagttggctgtactttttgtttctacatgtatcttttaatagctttctcactgctcaaattcagtaaggaaatcagttaggagcaataaaggtaagagacagagaaaagagggagggagaaggaaaagctggagctacaaagtaataagctcccccaactaatggtgttatttgctagaaaagataaagacctaagagaatatagaattaagaaaaccaaaatataaaagataaggattctcaaatatgtgaatacactaatcatcccacgcagcatatgtggaactgattccagaactacttgtaaaactttatgt

SEQ ID NO: 178865 - DNA, 225 bp, Homo sapiens
agttggcaaatcctggatacctagggctgtgtttgtgactgggtggtctgttgaccacttggatcagaataaggaccgaggacacaagcaaggcaaagctcttgctctgtctctactttgacttctaacagcgacaatggccagcattcaaagaagaagagactcttttctttctaatgggaacactagcttgaactttgacttgttttggatcaaatccattag

SEQ ID NO: 178866 - DNA, 480 bp, Homo sapiens
tggggttttctttgcagactgtacgtgatggactgtacctaaagtgaattcgtagttttgaaatctttaaagcatttgagtgaaatgtggaaatgcatcatcgtgagtgtgttgtgttgggaatatggtgactgtcttcttgctcactcagtagagttggagaattggtagggagcagcttgaggctctgacacagggatacccacagggtctcggtgtctctggcgcccttccctctgcccggtgctggcttgtggacgggctcagtctgctctgccatagaaaaccatttctgtctgctgggtccggtggctcacgcctgtaatcccacctcccagtttcagattctttatcttgctagatgcttttgtgaagcgccttcgtcagtgggaggtgagtttgacaaggccctagcgggtgtttgtgagacagaggtatgactggagcttggaggtggtgtttgggaaaggtgggagtgag

SEQ ID NO: 178867 - DNA, 459 bp, Homo sapiens
tcccaaagtgctgggattacaggcgtgagccaccgtgcccagccttgagaaatgtttgtttttgtttgtttttgagatggagtctcgctctgtcacccaggctggagtgcaggagcacatctcagctcactgcaacctccaccttctgggttcaagcaactctccctgcctcggcctcctgagtagctgggattacaagcgcctgccaccacgcccggctaatttttgtgtttttaatagagacagggttttgccatgttggccaggctggtcttgaactgctgagctcaggtgacctgcctgcctcagcctcccagtttcagattctttatcttgctagatgcttttgtgaagcgccttcgtcagtgggaggtgagtttgacaaggccctagcgggtgtttgtgagacagaggtatgactggagcttggaggtggtgtttgggaaaggtgggagtgag

SEQ ID NO: 178868 - DNA, 519 bp, Homo sapiens
gtaactcatcatcacaggggctaccatcataaatacagtttgtaaaaggagacaggatccttggaaatgtttccagcaggtggagcacatcatggctccaatccatgtgcggctcccctttattgcttactaaggatgcatatttcatatcctttaaaaaaataataaaatcacacacatgacagcaagatttaataagagagtctcaagccaaagagtaacacctagtgccaatctggatattttctggggcataggattgagaaatttcaggagacctctgaaaaaatacacatacaaatccccaaaataaaagctccagaacacctggtgctcctccctgggcctctgcgcctggccatgcctaggacacaggagaaggtgtgggagaagtgcaacgctcaaagtccactcgtaatccctgcaagacgcccacgcatattccaggaagatgagaaggtattcattttaatgcagcattcatagtttaactaaatacatgacagaacccacgaatca

SEQ ID NO: 178869 - DNA, 134 bp, Homo sapiens
tacaacaaattgtttgataagcctccaaataaatctttgagttgcctcccctgcctttcaactcattagagtgaacatctaatccctctattcagaatgctgcatgccttatgttgccactagttctcttatca

SEQ ID NO: 178870 - DNA, 780 bp, Homo sapiens
acacatttagcttgatgcctaatattatgggttggcaaactatggcctgtgggactgtaaagtttttgtaagtaaagtttcattgaaagacagagacgtccatttgcttccatattttctgactgctttcatgctacagtggcagggttgacaggccatttggttcacagagcctaaacattaattctctggccctttggagagacagtttgctggcccctgccctacaccatgagttctcaaggtcatctcagtgtagtattgagcatctttcaatagtatcttacacatcctcctttttattgatactctgaagttttgtttgatggtatttcacttgattggctcagtgttttgtacaaaatttgaattgaggtagccttaaacagagggcaatcaccatttccatccttaaacagtagcctcacctaattgtacatctgtacaattgcagacattagagcttaggagcattcccttagtcatctgaaatgctgatgcactgaggaatgcaggtgtaagtaggcatagtgccctatttgtatcatctgtcaaaattccttctggcaaagggagtatatgaggcccttaagtaacccaagtaatcctgagctggaaagttgcagtaggagtagagagtactacctaatttttcttcacgtatgacgttctttgtgaaacttgaggtaaagagctgtgcccagggtacttgagaatcaggatttagattgttaacatcgaaccagtgtgcaattaactctaaatgagacagaagcacta

SEQ ID NO: 178871 - DNA, 405 bp, Homo sapiens
tcattactcaatagagaaatgtaaattaaaaccaaaatgagatgtaactatatacctttttataagagctaaaaaatttaaaagactgacagtatcaagtactgacaggatgtggaggaactggaactcatactgctggtagaaatgtaaaattatacaaccagtttggaaagttctttggtagtaccttaaaaagttaaatataaggctgggcatagaggctcatgcctataatcccagcactttgggaagccaaggcgggaggatcacttgaggcctggagttcaagatcagcctgtgaaacataggaagactccatcttctataaaaaatataaataaaaactggccaggtgtgatggctcacgcctgtaatcccaacactttggggggccgaggcagatca

SEQ ID NO: 178872 - DNA, 532 bp, Homo sapiens
atgcattccttagttttactgcacttcttatcaccagaacaggaaaggaatggtgtcctacagctccttgaccaagtacctctccaccaatactatgagcactaaagatgcagcaacgaagcactagactctgggatgtgaagatctcaaattctattctctgtgcacttcagagttggagaaggatccatcaagtttcagtagaatgtaccaaggaagggaggcaatgtggtagaatggaaagaataaggattgtagttgagacacctgcaacctggacctgctagtccacctactgctgtgtaatcttggacattatgtccacctctatgggtttcggatcccttatctgtaaagtgaagagattgtccagatgctttccagcactagcaatctgtgctttaaagttttacctaacataccataccttttatcaatgtccacctagagataataacccagcttattttatttgagttttgagacagggtcttgctctgtcttgcactccagctggagtgcagtggcacga

SEQ ID NO: 178873 - DNA, 204 bp, Homo sapiens
ggtaaccagagtatatggactcagatgctggagcaggagaaagaagtaggggaagttctcttgtggaaatattcttctaattgtgttggctttcactgaaacagtaagcaaggccatcatctgaaagcggggatggggaggcaatgtagagatttcaggggagaagagaaaggattagtctgtaaaacaatacatgcaaaagaa

SEQ ID NO: 178874 - DNA, 207 bp, Homo sapiens
ttgaaatgaagatgaatcgtttcagtttgttcctctctgccactgatctggctttgcatggggtcgggaagaaaaaggaaaaacatgaagtctttctgcccttgtcaaattcactctttttaaagggtgaaaatcatgcagatctttcctgaattttgtatattggcatataggacagcaaaaacatcatttaaaaaatacatggat

SEQ ID NO: 178875 - DNA, 297 bp, Homo sapiens
ctccccaacaatagtacctactttttaaggattaatgagatgatggtaaacctaagggacagagcccagtttctggcacatggagatactcagtccatgcccactgttgtggtcaaggccacagtaggctttccctgcatgtgaagttgtctcagggaacttaactagatgtgtgggttagccaaagccttgtagcaaagtaacatattttaaagcagccatcatttgataggagtaggcccagctgtactctaggaagtaggctgaagggagccacttggggaaagggatggatcg

SEQ ID NO: 178876 - DNA, 303 bp, Homo sapiens
ttttctttcaagaggattttttggggaagtgggcagataaagtaccagcagattactttgatgctatcaaatattagttttaggctttgttaggactagcccatttaaggtttgatctttctccaagaacatagtctttaaaccataagatatgcttcttcatatgtcagggattttcttatgtgtcaactgaaatcatggagtgtttattagaatgtttctttttgttggggcataaactccattgcttttctcagaacaatataaccactgaaatgactgctcaactgtttagctctttgg

SEQ ID NO: 178877 - DNA, 533 bp, Homo sapiens
cattgtgtaaagggcatcttaaactccatatgcctaatattgtatacctattttcccctctcctcaatctaagcccttcttcctcagcttaagaaatggcaactccatccttccaattacccagccaaaaaccttgaggggccatccttgacgcctgtaattctcaggtgccccatatcttatccatcagcaacatctgctctttctgccttcaaaatatatctcagatcacatcctttccatacctttgctgacctcacttgggtccaagtcactattatctcacacctggattatttcaacagcctctgaattgcttccacctgtcctggcttctcagctcctgtctctgctcacagatctctcaggtgagattatcccttaccataatttacaagaccaacaaagtcaggccttctgctgtgacctctctgaccctatcacttgccactcttctccctgttcattcctctctagctatcctgacccacttgacaccccttaaatgcacttaccatgctcctgcctcagtc

SEQ ID NO: 178878 - DNA, 483 bp, Homo sapiens
attcccacacttgaatctgaataaacttatagacataggatagagaaatgccttgataggagcatttcttttatttactgtattcttaaaatacaatttatattttaactgaatacattaaaagtgcagatatattaggtcaatacttacaatacacaaattcttactgtgtgtcttacaatatgtaaaacattgtaataggttctgtggggacctcaaagattaaacagacactgaaattactgtaaagggacttagatacaaatcgcataatgaaaagggaagatgatcaatgatttaaggggtctgtgaagcatctcctgcaggaattggacatctcttctgatctcccaaagctttgggattcctgtacccatcacaggcaatagcggcaaagcagttcatttcttccctctccaatcacagaaacgtctgttgttaagtaagctgtcattctcctcaaaaaaaaacaacaacaacaac

SEQ ID NO: 178879 - DNA, 557 bp, Homo sapiens
ctccagctccacagtgatagctgtgctggcttctttccagcatggaccgctacatacataagggacatttcgtaaccactctttgtaactccatctgcattttcaaagttctcacgttcaccagaaatgatcattttcatttaggtctatttttacatgattaatatttggggattaactgaacctccttcttgtataaactgtgtgagctagattgtccctttgagcttcctcatgttatggaaaagacacagttattctgtgatggtttcccaatggcatccagagagtgaggacaggacccctgaagaattctcctgttgtcatttcagagcttccatttgtgcacctctgtgtctctgctccattctccaaggcagcatagcctcgtttagggcatgggctctgcagctcctcaccaactgtgtgaccaggagcaagttacttcacctctttgtctcaatttcttcatctgtcaaatggggataatgacagtatctacttcacagcttgttgtgaagattaaatgagatagtattaaagcacctaggatagtg

SEQ ID NO: 178880 - DNA, 725 bp, Homo sapiens
tatgttgttgatgcagattattgtaaaaatatattttccagagtgatgtctctaagcctttattgtttattttcacagtaatttttttctatacatggatttaaataatactgttgtttttccaatggaaatgggtaagttcagggacagggaaaggggaggtatattgagagctgattatgtagataaggatatgagacccctaggatggcagaaatataagtaggcatgatcttcaagtgctttaaaagcaaattaaactgggctcagcacagctcaacctggacaggaatactgccacctttctctgatatgccatgttactcaaactaaaaacccctcagtgtgcagatgctggataattgtaacttggcataattaccctggtgggagccattggtcaagatcacttgcctgtgggatttctttgaaaggagtagatgttttcactgtcagctgttccaagaaagagtagatcctggggccaaaaatggaatctaaaaagacagagtctagaaaagcagataaattcctttctctctctgaaaattgaatctggcctccaagtatcaccagcattgaggacatcatctgtgactcatcctcatggatgcaggcctatggagctaagagggtcctcatctagaaatgcttttaggttacatgttctatatgccccttccaatgtccttgaatcttcattagagttttgtcagtgttgtgac

SEQ ID NO: 178881 - DNA, 257 bp, Homo sapiens
taccacttttgtttcttttaggtgatttttaaaaaacatttgctgaaggagaggttgatgctcaaagggtacagtgataaatggagagacgggagtttaaaatgaaggataagccgcaaatgaggatgaagttaatggatagagaaaagatgggaggaagaggtatctctctttactcgtaagctgcccatcgatatgatttagactctaggagaggggcgtttctttcctcagtaggcacactcatagagtaaact

SEQ ID NO: 178882 - DNA, 352 bp, Homo sapiens
ggaagcaattagaataggcttccaaaaaataaaggagggacattaagccaagccttgaaggatgttggattgttcagagtatgattggagctcataggcagaggacactgcaaggacagtagcagtgaacataatgtggttagggaatgagaagtagtttgcagcagctggaacctctcgtgtgtctctaccttctggttctaaggtttgcattttaaatttttatcaatttattgtgtgttataacattttaaatctttttggcctaagccagagattctcaatcttggcaagtgacatccctgttggccctgtaatcatagactaagctatattttcttagttgtcagtg

SEQ ID NO: 178883 - DNA, 220 bp, Homo sapiens
ccaggagtccttccgggtgggagagaaggcgattttctttctccttacataagagccatgcggctcagcccctggaagtcaggagtgtttccatagtcctgagcagtgagtccacacagctaatctgctttggattttcggaagggcctcgctactgggcccatcatcatcctgtgtcttatcttgatgttttccaaaggacattgcttaaagaaactca

SEQ ID NO: 178884 - DNA, 516 bp, Homo sapiens
  misc_feature (513)..(513): n is a, c, g, or t
  misc_feature (516)..(516): n is a, c, g, or t
gaggcggaggttgcagaaagccgagattgtgccactgtactccagtctgggcaacagaaagagactctgtttcagaaaaaccaacaaaacaaagcacgcacaaaaaaaaaaaaaaataacaaaaaaaaaaacttttgtgggtgggccgggcttcggcgccctcagaaaaaggttttcatagacccattcgcgtttgtgggcgccggcggcgcccaggatggtatagtgtaacagttgggcataagcggtgtccactagaggagagacccgtggcgccatgagaatcaagtgtgcgctgtggggtttttcttcacaccaaattataaaaaaaaagcggcgccgggggggacaacacacgagggctttctttgagaacaaatcccccaaggtggggaggtttccagagagggggccaatcagcggggagcttctatctcacaagaggcggggttcccaaaagagaagaagatcagaggatatcaaaaaatttaacgcccccggcctggggtggcncgn

SEQ ID NO: 178885 - DNA, 346 bp, Homo sapiens
ttaccagccacagatgccaacagatgccaacagatgccacagatgccaacagatgccagccacagatgccaacagggtgcctggcacctgagaggacaggagacaccactgaggccaaaggagttcgaggagagaaggagggaatgtgggcatgggtcccaggctttcttcttccttcattcacacactccaggacatcatctcagaggggaaccaggaagcaggaggaaatgggaattgacctaagctgactgtttcagttgttgaatggactcaatgcaaccgatggaactaaatttagttctttccacttccgtgtggtacggacttgtaaagaatcacaggg

SEQ ID NO: 178886 - DNA, 197 bp, Homo sapiens
aataatgttgatggctttaaaacttctgcaaataaagtaaggacctgagccaaaatttggcctgttattctgccagtgaagaattttcaatacagtcacaaaccaaatgtgaaccacataatgacggttctgtcagtgcttgagtgcctataggaaggaaggtagtcccataagattataactgtatttttactgta

SEQ ID NO: 178887 - DNA, 183 bp, Homo sapiens
aagatgggattgtaaaaagcattagggcttcctcatatcaaaattccaaaccctaaggcagttagactatgcagttcttaaaacatgaacaattgcaaacttaattgacttgaaattttttagttacttgtcctggatgaagagaatatgatgacaatttctttttgttctataactatctct

SEQ ID NO: 178888 - DNA, 390 bp, Homo sapiens
cgctttctgaaattcgattcccaaatgcccaggatttcccctgtggttccagagaaagggagatatgtggcttctgtgaacacctattgagtgggatcacaaggaagcatcccgtgacctttcttctattttgagatgaggacgtaggtggctgtgctgctgaccagtgagtgagtcagtgggcccagggactgaacattgtgtataggtggagaacttgggaggcagaaccacatttaaagaaatgcttctggtcattctggtctaatttggcaatcaaataattttaaaactgaaggagtccacagagatttgtatacaagaatgtttatcgtaatgttttagtagtaacaacctaagtgtccacctgtaggggacggaggagatcaa

SEQ ID NO: 178889 - DNA, 409 bp, Homo sapiens
tgggggttcacctccctggcctttctctcttcatcctggcttctcggccaagcactcacgtgcacaaggcccagcgctgagctgtctgttagcaagatctccttacatccctacaacctcctggaacgctcatattctgtgctctcagcaatactcgtcagaaatttcagaaccgcagtgtcctcatctagaaagagacgactagaataggattgctgtctctagactcaaattttcccatttcttaaatatggctttatagattataattattaaaaattatacatgcaagccagacacggtggctctcgcctgtcatctcagcaccttgggaggctgaggcaggcagatcgcttgagctcaggagttcaagaacagcctgtgcagcatggcgagaccccttctctac

SEQ ID NO: 178890 - DNA, 206 bp, Homo sapiens
tttcactctgtcacgcagtctggagtgcagtggcaggatcacagctcactgtaactagggcttcagtgatcttcccacctcagtcccctacccccaccccctgaagctgagaccaaaggtgcgcaccatcacatcctgctaatttttttttttttcctgtaaagactgggtcttgctatgttgcccaggttggtgtagaatttctg

SEQ ID NO: 178891 - DNA, 484 bp, Homo sapiens
tgctgggattataggccttgtgagccactgtgcctggttctgtccctgcatttttgtttgagaattctgctctctgacttgggagaatttatacagtctgagaaggactggaaacaaatgtcttataaaggcaaaaatttatccagtttcgtatttctgccactcagtatccattcttttcctgcagcaacaataatgagattttgctgtggtggaagtaactctaggccccacacagatcaaggagaccacctgagggcttctgcttgagcacagctgtgtgtgggaagaagttatgtctgatggtgccgagcccaatcatggaactacggccaaggaggcagaagcagatggaccgtaactctagccctggactttttttagttatatgaactaacagcccttttatatttaagcctgtttagactgggttttctgtcacctgcaacagagacagttctaactgactaaggtttttaaagaa

SEQ ID NO: 178892 - DNA, 274 bp, Homo sapiens
tgctgggattataggccttgtgagccactgtgcctggttctgtccctgcatttttgtttgagaattctgctctctgacttgggagaatttatacagtctgagaaggactggaaacaaatgtcttataaaggcaaaaatttatccagtttcgtatttctgccactcagtatccattcttttcctgcagcaacaataatgagaacgtcctgtgttggataccagtttacgccccaccccaatactcggagaacgcccgagggcacaagttcgctca

SEQ ID NO: 178893 - DNA, 447 bp, Homo sapiens
tagagacggggtttctccatgttggtcaggttggtcttgaactcctggcctgaggtgatccgcccaccttggcctcccaaagggctgggattacaggcgtgagccaccacacccggccaataagattattattaatattaataataaaaatattgagttacagagataaatatttatacataataataggtattcagtagtttatcttttagtctcaggattgtcttactgatactggggctcaaaggaggtacagaaatttttgtttcaaaatcagttaattaaaattgtataacaactactcatacttcttagttataaatgattgtcaaacaaaaagagcatccaaaactgaaaataacctttgaaactatctgtaagtcaacattatgaagacatacgaaacttcacttctcatttcacaccttactacactgatagaactgt

SEQ ID NO: 178894 - DNA, 249 bp, Homo sapiens
tagaggaccccgttcattttctaccccgggaaagtgtttctttacagaaaaatgccaactaatgaatgaagacagaatgatagcattagaaaatcacaatctaacaagtaccctacaataaatacttctggcgagaatcatcactggatgttgaaacattgggtaaaaggttgttggaggacaggatgttccacacagcctctagataccatcctgtgtaaattacaaagagaaaaatgtaactttaca

SEQ ID NO: 178895 - DNA, 357 bp, Homo sapiens
cttatgacgacccaaagccttaactgatctggcccaccactcctttctgactccatccctcagaaccagctccactggctttcttgctaccaaataatagtttttgtaattgctcttccctcttctataaatgctttccctcagatagccacgtggctcctgacccttccagggttctacttaaatgtcatcttattagcgaggccttcctctactactttggagaagtagcagttccctgcctccactccccattacttctctgttcctcttcatctttcctatcctgttttaaaacactttttagccacacctaacatcttaggaagtatatcgatttacactctactttcttca

SEQ ID NO: 178896 - DNA, 286 bp, Homo sapiens
gggggtggaggaaagccttgaattactttgagaaagaaagcctggttccatgtttctgcagtgcacaaataggatggcagaacacatgcttggaagcttccaccaggaggtcacatgagccagtggttaaggggcaggggtgatgggagcaagtaaaaagggatccaaatccaggttccacctctaataaccatagtgaccccaactacttgtggtcccatgagccagttgacccttctgcataatggtcatgctgatcatccccatctcccttttgttgtggggg

SEQ ID NO: 178897 - DNA, 192 bp, Homo sapiens
ctgtgtgtctgtgtgcaggggcagtctctgtgtgtgtgtgcaggggcagtctgtgtgtgtgtgtgtgtgtgtgcaggagcaatctgtgtgtgtgcaggggcagtttctgtgtgtgtgtgtgtgcaggggcagtctgtgtgtgtgtgtgtaggggcagtctctgtgtgtgtgcaggggcagtctccgtgtgtg

SEQ ID NO: 178898 - DNA, 196 bp, Homo sapiens
tgctggatacacctgtagactaacaatagagaggacagacatacaagaattaatacaaaatttgcaatagtggaatttccaatggttttaacccaagtgacagggttaagatttgtgaggctatcaacagcttttaccattgcctccgtttctgacaccagatttaactgggcttttgatgtttcaaaaatttgtt

SEQ ID NO: 178899 - DNA, 857 bp, Homo sapiens
cacacatctcctgagaacacatgccaggctgtggaactgtggggagtgtggtggtgccggggaacattgtctgggaggctgggcggggcggggtggtggtggggactatattcttgaattcccttccagtagagctgggcttagggaacagccacagtctgagcccaatgacgagagggaggctggccctgggaagtgggaatttgaaaagtaacaatttctacaaagtcctcagttgactctttgcaaataacttgaaatgtctttaacttctgaagcaaagatgttagggaccagggatagggcgtcagaatttttagggaaagggagagtgggacagcattgcccccaaagaccagggaagagtaaaactccttcttcggttcccacttccacctgtctcctctccttgaggatagaccagcagctaccatttttgtcagtttacaccagcacctgtcctccaggaacaccgttggctagatgtgtgcttgtccatcaggtccaaaggcatgggggcagtgaatgcaagcagggatgggagctgcccatctgagggagcatgagcccagatcctttaacatctatcctgtcttgctgcttcagtccctaaggctgggtagggtgaggggcatgagcctttcagcagacggactgggatttatcacctgagggtctcctggctaagaatatgagctttttactctgccaataggttgtggccttctcctttccccccaagagggctggaccacgtgacggctaggtgatactgtatctgcagaccttactacaaccagtgggggtcagaaagagaaatgacatttgcagtctaggaaccctttgcatcggtcatg

SEQ ID NO: 178900 - DNA, 705 bp, Homo sapiens
gcgctccgacctccttctggccacgctggtgagatcagaggaccttgcaaagagactgtttacacttcagctttgtttttcctgagtgtttttgcgttctctgcaagagtgagggagggttttcctcactctgtgccaaagaatgatctgaaaatataattaaactgatgacttcacatattaaataccaagtcctaggaatataattgtttttaaaatttctaatggacttaagtctttgatctccctgaaatctgtgaacaaatttcccacatcataactcttttaacacatctaaatgtgccctcaggaaccagtatcttcttccaatattgactctagccatagaaaatggatggttaaaccgagaagagcagactgttacctctctgagagttatttctacctggtccatcttatcaggttaataagtgttactatgtataaatatagtaacccacaatatcttgattaaaaaaaaaagctgttattcagttgggatactttaaagccttgttttccatttacatgcctccttggaaatctatcttcttccccacatttttcattcccagtccataagggaagagcagaccaatccaagaagcccttcaaggaaaacagcatacttatgtgtagaccccgtgactgacaactccagcattaagaatttgtcctatagaaggactcacacaagtgcccaaa

SEQ ID NO: 178901 - DNA, 713 bp, Homo sapiens
ttctagatgtaaccctccgtcagcccacgctggtcgagatctatgatggaacccttccggagactgtttacacttcagctttgtttttcctgagtgtttttgcgttctctgcaagagtgagggagggttttcctcactctgtgccaaagaatgatctgaaaatataattaaactgatgacttcacatattaaataccaagtcctaggaatataattgtttttaaaatttctaatggacttaagtctttgatctccctgaaatctgtgaacaaatttcccacatcataactcttttaacacatctaaatgtgccctcaggaaccagtatcttcttccaatattgactctagccatagaaaatggatggttaaaccgagaagagcagactgttacctctctgagagttatttctacctggtccatcttatcaggttaataagtgttactatgtataaatatagtaacccacaatatcttgattaaaaaaaaaagctgttattcagttgggatactttaaagccttgttttccatttacatgcctccttggaaatctatcttcttccccacatttttcattcccagtccataagggaagagcagaccaatccaagaagcccttcaaggaaaacagcatacttatgtgtagaccccgtgactgacaactccagcattaagaatttgtcctatagaaggactcacacaagtgcccaaa

SEQ ID NO: 178902 - DNA, 1011 bp, Homo sapiens
ccagcactcaggttgaatgtcgaactgtcctactccaaaattgacatctcagatgatttacagccaaaaggaatgtcttaaaaacaactaagtcattcatgtcagaatcctttgcctggatgactcaaaacagtgacattgtatgcttggctgccggtacatgtattttgggagttgtgatgtttcctccactgtggtggttaatatccaggcctaaacactgtggtatttaatgtccctcctcctccaaaagtgctaatgaggatctatgctacggtctagccagaggaaaggagaaggaaggcatggtttgctgctgtcatcagaatgatactcacccaaaaggatgacccaggtccagccagaatgacagaaaaacccttgtcctaaactgtcaatataaatgaacagaaaggagaactagctatagaaatttgaaactcacattgtaccaaacgcttttagctattaatttagtaaaaactattatgcattagatttatttatattcatttgtatattctctgcaacactaacacatgatttaactaatcaaagcataatcgctcaggttctgctcttttattgtcagatttggcagacttgtctttccgtagctttttattttaagaaagattttctttcatttatcaagtattaattgcatgtctattactcagtgactctaaaagaaatggatggcactgaccttagcctacagcagcttagatagatttagttaagtaatcacacacaagagtagaggccagatgtcaaaatgaataatgtaactaacaaatactattgggattcagagaagaaagagatatgtattgactaggacaattagaaacaatttcatgagctggaaggagtttcatgactctagtgattgagcaccatgtggccaggagggaaaatcttgcaggttcttcagcaaatacttcttgaaggcctgctatgggctaggcactgggctaaattcctaaacataaggtattaatgagaaat

SEQ ID NO: 178903 - DNA, 325 bp, Homo sapiens
tcttttgattgtctcaaagtgaagtttctcattttggagactaccctctcaggctgtttcctcttgagggttttaagatgcagtgattgcaccacaaataattgtttagtctctgctgtctgtaccagcagtcattcattttaatatggagagattgaaacagatctgagcttagtctccgccctttatcctttttaactgttaggaatttggaaactctgtatttttttagtggctttattgaaatatagtttaccatagcgttgacttgactaataaagtctaaaaatcagtggtttggcagcttttcaataatgtgaattaa

SEQ ID NO: 178904 - DNA, 449 bp, Homo sapiens
catacacaaaagcattgccaacaagggcaagtcatcttttttgagaaacaaaaacaactctaaatgttgaatttagtgggcagaggcaaagtagtatttgagaataagtctttagaagagctcaaaatgtctgaatcattggtccaaatttcgggcttgcagtagccgaagcacatggaaaatagctatatctattcaatttcctgataaatgcactaagcctgtgaaactggtcatccctgtacaagctgattcttgcactacatagtacattcttgtctcagccaaccacgcaggaccccagagcttagtacttaaggaggtcaggcttaagaggatgccgagaccagatgatggctaaggtccatcaaaccctgacttctgtgattctggagataacacctggattaacacttggctatctctgatatttacattaaatatactga

SEQ ID NO: 178905 - DNA, 599 bp, Homo sapiens
catgggtgttatgtgatatttaactagtattcttctgtcacagagaattttattccctttaggaatattgagaaactttagtgcctaaaattgccagatttgagacttagcctctggctgtggtaatttcaccaaatccatgctgtcctctgactcttggcagtggactagctggatctcccggttatacctcttcttcaacatgcatgattgtcatctccccttcaaatgtcaataaatagtaacttgttttttgaagccatcttttgatagttccatgcctgatgattctttaaaaaataattcatttttaattacacaatacgtgatatgttctctatgtaaaaaattcaaagactaaagtgccttttgactgccatcctccatgcctccatgcctgtttcctttccttccctgtctactcttccttccacggtaatccttgtctctgatgtttgtgttacaaccttccaaactggttgtttttgttgttgttttttgggtttttcttgagatggagtcttgctctgtcgcccaggctggagcacagtggtgcaatcttggctcactgcaccctctgtctcgcaggttcaaatgat

SEQ ID NO: 178906 - DNA, 566 bp, Homo sapiens
catgggtgttatgtgatatttaactagtattcttctgtcacagagaattttattccctttaggaatattgagaaactttagtgcctaaaattgccagatttgagacttagcctctggctgtggtaatttcaccaaatccatgctgtcctctgactcttggcagtggactagctggatctcccggttatacctcttcttcaacatgcatgattgtcatctccccttcaaatgtcaataaatagtaacttgttttttgaagccatcttttgatagttccatgcctgatgattctttaaaaaataattcatttttaattacacaatacgtgatatgttctctatgtaaaaaattcaaagactaaagtgccttttgactgccatcctccatgcctccatgcctgtttcctttccttccctgtctactcttcccttagaactgctgtcttttatattgagtatgggaaaaggatggtcagtgtacctgactgtcaaatatggtaagattcataagtaaattgtaattctgctgcttatccccaccattgtagctactgtgtggtttactga

SEQ ID NO: 178907 - DNA, 834 bp, Homo sapiens
gttctggtggggcatgaaccagtggctggggcattggaagcttcccaggcgatgcaaatacaaagccctaataaagctttcaaaactgcgttagaaacaggtcacttttacatttgtgttggaaacttgtcttgagacaaatgaatacatttgagccactgggatttttggggaaaatacagctaaaagggttaggaaatgatacataaggaaattctcccatctgatgctggctggcttgcttgcttgctgcaaacccgagtgttttctattaagtgaggcattgtggttcctatgctagccctgatgggccttcagcactggcaggtgtaaatgcggctcattaattttttaagaagttggaactctgacagttttcagggatgctgagtagctggtaccagatgtttcttttgttaagggcatggagaggcagtgtcacaggtaatcaggctgtggtcgttcactcccttggtctgagactatgcgttttgtggtgctgaatgttttcttaaaccaagaagggtgtggggaggtgcatgttctggtttctagttgggctttcccccgacactggctcttgcagtattatcttaggtagaggtgttgactcaattatcattagacccagctcctgttggaagagagtaaatggtgcttggggcctctttatctagaccgttttgccaccgctgaagtgacagcctgtgcttctaactgaattcagtccttttttttcactccctttctgtggaacaacagcaaagtcggctgctcatcattcgggtgcagactttacagcctctgaacagcctctgcttttgcagtttatga

SEQ ID NO: 178908 - DNA, 138 bp, Homo sapiens
gataaggctatttaaagacagagttactaagctgggtagaaagcactcagggaacttttagcaattcagttattatattggactgctgaagaattgtactggacgattgcactataagatgctaggaggtcatatata

SEQ ID NO: 178909 - DNA, 307 bp, Homo sapiens
ctcccgtccacaggtccctcctgaccagctcttctccccaacaagatcgtgtgccccttgggaagccacctggtcaggtaggcactgccatgagcccctgttacaggagagaactgaggctcccagccgggcagggctcactcgaggtctacaccctggatgcagatgaccctcacctctgtcctgtgtgggagccacaggaggaaggtggggacaaaagaccaattcctgctgtttagccacccaccttctggagggaaaggcagagaagtcaaccgcaatagtaataataacaagagaccgccag

SEQ ID NO: 178910 - DNA, 465 bp, Homo sapiens
ttctaaaggggccacgcagcagttgttaacaatgaacaacataaattccaaaagtttgggcatttaactattatttgggcatcattaataaattagttgtttgtttctaaactctcctgatgctaagcaaatccagaccatcagcaatcaatctaaagacaatgagcctacttgatatcacacaatctcattaatcttcatctgtcctaccgcatcctatcactcttacgcaaaatgaacactagaggacgcaacttcaacttctcttcactatctaagcaggaggtagaaaaaagcctcggggatttagggacatcacaagcaattatttcaccagcctagtgtgctacatcacagcaaatgagtctgacatgtaaatgtgacatagcaaggagtaaaataacgcagttcttgagctatgtgtctcactgtctttgctaaaacaccagagcgtggccagaaact

SEQ ID NO: 178911 - DNA, 326 bp, Homo sapiens
gaggggaggagaggtggcggcgttgaagcgccatggttcatctcataggtgttccggaaggggaatgaggaggagcaggagttgtagatagaagagctgagaattctccacagctgacgaaaggcaggagacccaggttaaaagtgttttccgtattcctagtaggataagtaaaaagaaactcacacctgtccacgttgtcctacctgcataacatcaaggtagctgcctaaggaaagagacctgcccagaaaggaggccttggactgaaccaggagaccttgacctcgtcaagggaggaccggaaggcagagggttatcatcta

SEQ ID NO: 178912 - DNA, 452 bp, Homo sapiens
ccctcagattacctcaacacaatgaattccgctcaccaactgtgaaaaattctgatggataaaatttgtcactctttatccctgaagagatttgaataagttggtagaaaggagcagaaactttttatataacacagacccttgctactcaaatgtgtggtggttcttgaatcagcaccgtctgcatcacctggaagcttgttagaaatgcagaatttaaggcttaatcccagacctactgaatcagaatgcgctttttaacaatacttctctctactcctgggtgattgattcatgcattgaatttgaaaagcgcttcactcgttgccagatgttttgctctaaattccttcttctgtgtactaaggcataatataggaaagactcaaaggatttctccctacagctggagttcataagcttccattattgaagtgaggtgtatagtgttt

SEQ ID NO: 178913 - DNA, 741 bp, Homo sapiens
agctcatcagttttgctactattcttcatttacagactttcctttgaagattgttttcttttctttattccttgctttctgcctcctcacaattttctctgccttttctttccacacatgaatatatgcctccagactattttaattaagaaaatagcacaaatccaaaagtatgtcctgtggctgcatacaagtcagagacttgagagtgaagtgtctagggcaaagacccgtatttcctcctctgcactgtgcttctcccgctgaagcatccttctgtgccacactggggtcctatactgtttccaacagtcttacttattgcttctcaaatttgtcttttgaatacttaatgctcctcttttgatttccacccagaaaatgtacctctctgagttcagaaaacttcagaatcctctatttcccaaagtttagggtgattgaactgaatcacacagctcggtattgtctgaaacagttaagaacttctagcacgagcatcgcactttcctcagctcatatttcacattttctccattcttctctgaaaggatcctggaccttctaccaatctttgattggttacttcataattgatttcttaagtaacctagatgtttatctctttcacatcattgtttagcttacagtatctacagccagaaagcacctctttccctttcccatttatagagagaaaagaatcctgaggcaaactttcacttagggattgaaatagcc

SEQ ID NO: 178914 - DNA, 629 bp, Homo sapiens
ggcagggcaggacagggcgggggtgagggagccactcctgggtgggaagagtttcgagtggccagtcaccttgccccctcctcacagcactcccacgcaggggcttttatgactgctttgtggataagaaaactgaagcccgtggaaatgaagtgactagctctaacgcgcaccatgagttggaatcagcagaagacccaagctctgattccaactacgtcccagcggagcccttaataaggtggttatttgggcatctacggtgtgccaagaactgcaccaagtacatctcagtaggatctcattaaagacccaacaacccaatgaagtagagagcatcacctccatttgggaaaaaaaggaaacagcctcagggaggttaatttgcttgcccaaggtcacagaattagaaactggcagagttgaatccaaacccagatatgactgcctcaatgaccttcctaaaatacacatctgaccaggcttggcctctgcttcccactgctccctggtgcctcaaggaccacaggctaaaacccaagagccttcacctggcattcaaggccctcctcactcaggcccaccttgcccttccagccgattccctcacattgctccttctccagccc

SEQ ID NO: 178915 - DNA, 341 bp, Homo sapiens
caacctctattttcaaaaatagaggttgaatatattcaacaagtcttatattgagggcctatagtgtttcaaaacctgttgtaagtatcaagagtataaaaatacttaagaccagccaggtgtggtggctcatgcctgtaatcccagcactttgggaggccaaggtgggcggatcacctgaggtcaggagttcaagaccagcttgactaacatggtgaaaccccgtctctactaaaaattcaaaattagccgggcgtggtggcatgtgtctgtaatcccagctactcaggatacagaggcaggagaattgcttgaacctgggaggtggaggttgaagtgag

SEQ ID NO: 178916 - DNA, 229 bp, Homo sapiens
agctcaagcgatccacctgcctcacctcccaaagtgctgggattacaagtgtaagccaccacacctgacctgttttgtatattttaccacaataaaaagcctttaaaaccccaagcagacagttcattttcattcaggcccaactcagaatctgatcacagcggggtttcccccctttctagcgagtagctgaagaactgttttctctccttgatggtataactgtctc

SEQ ID NO: 178917 - DNA, 308 bp, Homo sapiens
gcatcagtaggaacgaagaattattctttctcaactcatagctactttcatatcatcgtagttaatgagatgacaggaaaagtacaatgtctggcacaaaatatcttccttctctactctttctcacagcccaatccataatcaatataaggcttactaaaacagaaaatgaaataaattttcctgagcaagtcatcattcctttcatattttcatctcaccagtgaaacaggaagaaaaattttcctacctgtatctcacctgttcaactagtaaagtaaccaaatttagaatgtaatgcctattct

SEQ ID NO: 178918 - DNA, 900 bp, Homo sapiens
cccctagtcgtggctcgctggctgtgttccagccacaccaccagccaccgcccctgccccccgtccccacgcttcaggcctctgcgctcgcaccacctgcctggaacacactctgccacgtagcccaggcctagctccctcatgctcttcaggtcgctgctccgacattaccacctgattaccatctaatttagacaagactttggattttagagtttagaattgatgctggaatgagttaagacatttgaggttgctgggcggaattaatgtattttgcacgcaagaacatgaattgtggaggaggggtgggatgatattgactgtttgagttccccaaaagccatgttgaaatcctaacccacaatgtaatagtaataagatagtaaggccctcctggggcctttgggaggcatcatgagggtaaagccctcatgaataggattagtgtcatgaaagacacccccagagagctctcctcccataagctttttagaatgtgagactacaagaagacagcagtctcaagacagcctgaaagaggacattctccggaacctgggtatactgacaccctgatctcagagtttcaatctacagaactgaaaatacatttctgttgtttataagccacccagtctatgctactttgttagcagctcaaactgcctaagataactgatttctcctttttcctcatttgattcctccttcttcttcgagttcctgcattttaaacagagtggaaaacaattaatcataaaaacagaaatactgtactttaattttgcctgagaatgcttaatctaagctgatataaattgcataacatacagtctgagaatacatccctgatccttgtatctgcttaactctcattcacactagtgaagccacggc

SEQ ID NO: 178919 - DNA, 546 bp, Homo sapiens
tagacgatcccccaaacgcagagaggataaatacaaagctgtgagagtattaaatatggacactagatgtacatttccaacaagaaattcatctccctccaaagtcccagaccagggctagaatgtggttcatttttaacaatcaaagtggcaagatctgtttggtgatcactgtaaaaacaggaaacatagctaatgccctttcatgttgaggtgctacaaaggtccaagcttttaaagactatggcctcaacgtccatgtgtgaaacaagtgtattagaaaattctttaagtcttgttgccttaacttagagatctccaggcaacaggcctgacgatagccatggctcctctctgcgtttgcaaacgcagggaggaggaggaaagctggtagtaagtgtggagatcttttaattgcaagaaaataatctgggagcctaacatttttgcagtattttaaagtgtgcaaagacttcacaggactagcacattctcaaatgacacctctaagaccaacccaagcataaagatcttctgaggcttata

SEQ ID NO: 178920 - DNA, 608 bp, Homo sapiens
ttagcattgagtcaaataggttgaaagtaacagaactgaaaaaatctatattccatgcaaatagtaaccacaattgggtgaggtggtaataattatattgtatataatatgcttgtatataacagcataggacatatgcttgtatgtaacagcataggacaaacacgatattatataacggtcaaatgagtcaatttaccaggaatctgtaactatcatatctatttatatgtatacatacatatgacataagggctccaaaatatataaagcaaacgttgacaaaggtgaaggaagaaatacatagcaacataattgtggcgatcaagacatcatttgcaataatagaaaattcagataaaatatcagtaagaaaacagaaaacaggcattatagactgtattaactattttgcatatagaggaatacctgagtgtgtaacttacaaagaaagaaggtttatttggctcacagttcagcagactgtacaagaaggatgtaacagcatctgcttccggtgagggtctcaggaaacttacaatcatggtggaagacaaagagtaattttggcgcctgtaatcccagctactcaggaggctgaggcagca

SEQ ID NO: 178921 - DNA, 394 bp, Homo sapiens
atggaatataatctatccattataatttaactgacataacttatacttttcaagaaaattatctgaaaatttatgacactctatctactgttaaaaagaaattacttatgaaataccaatggattaggctaatgtggtagatggttgagtctttccctaaatttttcatcatttttgagctggtgtctgtttagtgttcctgaattgtcatcaggtttctgcttttctaccttgtgtgcagaggtaaacagctgaatatttatgtaaacagctttgtatagaaacttttccgtttaaaactaaaaagggaaggcaattgcacttaagattgaatgtttcctgaaggggttgtttcagcattttacagcagctgctgcctcctcttttggagatg

SEQ ID NO: 178922 - DNA, 720 bp, Homo sapiens
atattggtgactactttatggtatttctgtcgtgtggcctgatgtttcatagaaatttgatttgtgacttgttactttatattataaactagaaatttgctaatacattcaaagctgtgttcaaatagatttctccaagaagcccttctcttttctattctgctagccaataaccaaacataattttgcattattgcccctcaggtttattgtctggactttcaggtgacacggctttctaatgaatggtgactgaaagtcaaggcaataaaattaggggcaatgggatctaggaactgtgtgtgggtttccaggctgtgcattaggtagagagacaccctgtggtctttgtgtacattacaggacaacttgggcaaaacttgatctgcttgggctggtttcagaggtgcatggacttttcaccaaaacactttaatgatcctctgtaaatactcttatctaacagatgaagaaactgaggccgaggtctgcaggtgctcaccgggttagcaatcctctcagagttagcacttgaatgcaggtctccaaactttctgttcagagccctttccaatatattaccttgctcctctgtaatgtacttccatataaatctccaatttatcaattgaacagtatatttgaagaatatttcacttttaaggaatatttttagttctcgacatgtggggttattattgaaatcaggtctcaaagatg

SEQ ID NO: 178923 - DNA, 262 bp, Homo sapiens
gagagactgaaaaaatatctgagtttttacctgaagctgcaacaagaacagcaaagcaaacgcaaagaaagcagaaggagggtagggcattgtagctcacatttgtaatcccaatggtttaggaggccaagactggaggattacttaagcctaggaatttgaagccagcctgggcagcataatgagaccccatcgctatgaaaaacaattagctgggtgcagtagcatgcgccagtagtcctagctactctggagaatgaga

SEQ ID NO: 178924 - DNA, 323 bp, Homo sapiens
atggatacaagcttcaaagatctctattctgccaagctgtcttaccctcattttatagtttactctgcaagatgagaataaaacctgccttccagggattgtaaagattaagtgaaagaataaatgtaaagttattaacacatagtaatttgtcagtaaatgctgctggttattacttctgtatagtatggttgatttttgccattttgaaagtaggatttatttttaactttattagaattcatcatgttgattcaattgagatcacattgaatcttctttcttttatttgtgatattggctacttttcccagctttgtatg

SEQ ID NO: 178925 - DNA, 334 bp, Homo sapiens
gaaggtactttcgctttccctttctcgtctcaacatactcctaccgtatgatccggcaatgtgttcttgggtatttatccaaagatgtagaagacttatgtccacacaaaaacctgcatatggatgtttatagcaaacagctttattaataatggtcaaacctgggaagcaaccaaaatgtccttcagcaggtgtatggatgagtaaactgtgatatatccagaaaatggaatattatgagactgagctcttcagtcatgaagggacatagaggctatgtaagtgcatgtggctaaataaaagaaaccaatctgaaaagactactgtgttattc

SEQ ID NO: 178926 - DNA, 138 bp, Homo sapiens
attaaaatcagtaaaatgaaaaaacaccaactgttgatctcccatatgctgctggtaataatataaactgacctggccactctggaaaacttttagcattagcagaacaactatcatactctagagctcagcaattct

SEQ ID NO: 178927 - DNA, 653 bp, Homo sapiens
attcctggagttttattgtgggaattctttgaagcctgtgtttagcttaccttccatgaggtaaaattttcatttatatttgcttctgccacctgcttagaggtactactaatacataacctcttaaatgtaaaagttttctgaaccatatacataacataatttctatacctaaacctctgccagcttttgattagaatttggagtggggtataggggctttttcttcttttcctccctgagcgaatgcttagactgagaaataccctctttccatggtgactttcttgatcactcttagggttggtcacttactagggttgttgccttttgcctgttccagctctgcgcagtctctgatctgagtcatctaccttgagaggaccctggccttggcccattaaaacccaagttctcatcatgaaatggtgcctccctgcaaaaccccccaccacccaccagaggaaacactgttttggctgattgcttacttctctgaagttctcctttctcttttctagcctctgacaatttctcttaatttttcacctgcctagctctgcattaaaaattgaaaaagcattattaaagcataatctgtataccataaaattaaccattttaagtgtacaattcagattttggtaagttta

SEQ ID NO: 178928 - DNA, 384 bp, Homo sapiens
ttggtgatcagtttattacctgtgcaggtaacaacctgaactgcccgtgtggagtagtacatcctttgtcttatcttttttgaaatgtagctgacttgggatgttctcttgtttttatatggtcaacaaatctaagttaatttacctgtgctgttagcggttttgtagattttttgttctcaggtttgggacgatcctgcttgccagctgcagttggtgagttacctgctccttggtgatgctgctttttaaaatgcatattgtcagtgcagacttcctgatttccttttgtaagttgctacacgaggcccgctttgaggactttttagaaaggatgtagtacaagttttaaaactaatttgggcccttgggtttaaggctgtt

SEQ ID NO: 178929 - DNA, 474 bp, Homo sapiens
ccttaaaggcctcaccacaggcttgagatgatactccaagcttctgcagataccacaagctcttttggaattcactgggtcactagcactgatgcctaggcccaatagagccttttcttgccttaagacctactgaaatctcaaatctcacagctttttttaaaaagcacatgtcaaatgaaggctaagtagaaaaagtatgtgcttagtagaagaaagacagagcaatagtgattaatttatctttatgaatgtatctagatttttgaaatctagaaaaaaattgtttaattttaacaaacacatatattgtgccttttcataagttaaaattttattttggatcacatagtagggtagaaaatcatttcggtacttaaacgtcagcaaaaggtcttaatcagatatttagtgaataggccaaagcagccacccattgaaaactgtattacctccagaaacgaaacaagtcca

SEQ ID NO: 178930 - DNA, 473 bp, Homo sapiens
atttataatttatatgcaacaagatgtagagatattaagtgataagtttaatgagctgaggcaattgcttatacagctgtaatccacatagaaaccaacatccacaagaatctcagcaccccagaaagttctcccatgtccccttttttgctcccttctcctctacccaaaaggcaactaatctttgatgtcaataaccatagatgagtttttcttgttttggaacttcatacaaatgaaacaatacagtatttactcctttatcacaggttactttcactctatataattaaatgtttctcaaattttatgtaatttgtgtatttatatatacattcatatacagtttttgctattttgattctttatattaagtagtataaacacataaaaatttgtttattgattattagttggtgggcatttgggttatttcaaggcatagttattatgaataaagttatgatgaatat

SEQ ID NO: 178931 - DNA, 351 bp, Homo sapiens
tgccacttttctcccagtaactgtgtgcctcatgagtattcagtttgttggatggaagctctccactgctctggcgtctctgcgtttctttgatgctggcataagaggcatggtttctccactggcagcatcagctgggacattggatttgggaaaaactctgaggttcctttgcatcaggctgggggctgagccctgaggtccatgtcttcatggagcctggagtctatggaggcacaaataagtcaacaaagtgtccaattgcaatgcggtgagcacgactccagagggaagcccagggcattattattaaagtgtgatgggtcgtgattaccggtggcttatgcctgt

SEQ ID NO: 178932 - DNA, 436 bp, Homo sapiens
gataaggtaaaaagttttcatagagggagataaagtttcttattctcaatccctcctttagagataatatattctaggttcaaatgcagctcaagaaaataggttaacggcactccattttacacctcccagtcatattttcattatgggactccttaagatgctaagggctaaaactggttttgacttatcctgaaagtggcaatatagagttttcctagtgctgatgttcttaaaaatctctgattacgggggagagtgagatctttcttgaagaaccaaggaatagttcctcaattttcaaagattcaaaagttccgttgaagccgtcgacggcttcatcggatctttacatctatgattacaaaatagaaaactcggctgggtgcagttggctcatgcctttgtaatgccagccactttggggaaaggccga

SEQ ID NO: 178933 - DNA, 404 bp, Homo sapiens
  misc_feature (17)..(17): n is a, c, g, or t
cagctcctccttgtacntctggtagaattcagctgtgaatccgtctggtctggactttttttggttggcttttgagactgcagtgtgaacagaagacacaacaacccacggagtgaagaattctctgggctgccccagcaatgcagagcagtgttcccctggagggtggatgaactcaggcagaggggcagccccagccctgggctcagggggaatgggaatcaggtttgcccttgcaccccagggtagctggtgaaggctgtcttggataatcttcggcctctcccttccagactcttctttaagcatccccatcccaccttggtatcctagtccctctgctactcccgtgcttgccttcctgggacagtgatagttgcagttcctgctgacttggagtgccc

SEQ ID NO: 178934 - DNA, 553 bp, Homo sapiens
tacaaaaaaatacaaaaattagctgggcatggtggtgcgtgcctgtacttggtgaggagggcggggggtggggagagctgaggcgggaggatcacacaagtcgaggctgcagtgagtcatgctcatgctactgtactccagtctgggtgataaaatgaggccctgtctctggaaaaaaaaaaaatgcagctgatttccttagctttgtaggaatggttaagaaaatagctacaaacaattgaacaaccacaaactttgatttaaagatatccctggaggaaagatcgatcttcctagaatggctaatttcagagtttgtctaaggaactcaggaagtaggccttaagccacagggctcttctgttgtttgcacaaggaggaagtgagccctccactgcctgaagtaactgactccaaaaggaaggcaggatccttgagaattttctttccctgtgggttcagaccagcccctggaccaacagcaacagcatcacctgcgaacttattagacatgcaaattctcagcccctccccagaccacagagtgattccg

SEQ ID NO: 178935 - DNA, 661 bp, Homo sapiens
gccatacagatccaccgcagcacagggctgcacctggcccaaggctctgccatgcccatcttgcccgccaacctgttggtggagaccaatgccgtggggcaggatgtgagcgtgctgttccgcgtcactggggccctgcagtttggggagctgcagaagcagggggcaggtggggtggagggtgctgagtggtgggccacacaggcgttccaccagcgggatgtggagcagggccgcgtgaggtacctgagcactgacccacagcaccacgcttacgacaccgtggagaacctggccctggaggtgcaggtgggccaggagatcctgagcaatctgtccttcccagtgaccatccagagagccactgtgtggatgctgcggctggagccactgcacactcagaacacccagcaggagaccctcaccacagcccacctggaggccaccctggaggaggcaggcccaagcctcccaaccttccattatgaggtagttcaggctcccaggaaaggcaaccttcaactacagggcacgaggctgtcagatggtcagggcttcacctaggatgatgtacaggctggccgggtgacctatggggccatggcacgtgcctcggaggcagtcaaggacaccttctgtttccatgtcacagctccaccat

SEQ ID NO: 178936 - DNA, 570 bp, Homo sapiens
ctgatacgtgacttgcgatcctcaacatgctgaccacacacagtgtgttccgaactgggcttctgagtttggggctgtgtaatgtctacgcgtggactgagtcacttcctatgggttgctgcaccttagtgagatttcgctgttacagtcctcccccactcctggccctctgttctgtggttttcggtcttgctgtactgtactgtgttgaagtagcctttctttttgttcagctgcctacaactatacatgtatttgttggggctcagaaaacgacaccccttggcatgctgagtgcttcgaaccaaaggagatgggaaggtttcagaagcagccttggaagcaaagtcttcctttggccttctcctgccctcctgtctcccgctcctctttctccccctgagtgagtcatagaaattagaattcctcttccccacagtgggtcagagagactagaagggtcactatgggggaggccaaggcaggaggattactcgaggccaggagtttgagatcagcccaggcaacacagtaagacctagtctctacaaagaaataagttaaaaaaat

SEQ ID NO: 178937 - DNA, 295 bp, Homo sapiens
tccccttgaaggatgcagcaccaggtgccatcttggaaacagagagtagcactcaccagatgaccaaacctgtcaacaccttgatcttggacttcctagcctcctgcactgtgaaaataaatgcccgtttttcacaaatcagccaatctcaagtatttttgttatggcagcataaaactaagagagtagctcttgtgattagagtggatgtggctttcatttcaattagaatggatgtggcttttcaattgcaatagggtcttactacttacgtaacaatactattgatatttta

SEQ ID NO: 178938 - DNA, 671 bp, Homo sapiens
gtgttccgaggatctccggtcttgttcctgcacttccctgcactgtctggtaacattgactttcgatgctataagatagctgtagaagaattctggttgcagaacatccagggtattagaattggaacgagatgggaccctcattggatctggttctgaggaggacacacctggtgttggatgacctttataatttatctatgataatgccagaagttctcaaactatctaggaagaacaatatttcccactgatacgttttggtccaacttatggatgtgcatggaaatcaacgacctacgcagactatagatccacagaaaatgacgtgctggagacaatacccctggctgtagtaaaatggcgcgatcttggctcactgcaacctctgcctcctgggttcacaccattctcctgcctcagcctccggagtagctgggactacaggcgcccgccaccatgcccagctaatttttttgtattttttagtagagacagggtttcaccatgttagccaggatggtctcaatctcctgacctcgtgatccgcccgccttggcctcccaaagtgctgggattacaggcatgagccgccgcgcccgtcctcgttcattctattttttgtagccattaaccatccccggttctgtgcttttgaagcgctaggattc

SEQ ID NO: 178939 - DNA, 477 bp, Homo sapiens
gatcttctgcctgccactggagaagcagtgggtccgggacccaaaaggcatgtggatgagtccagccctcggacaacctagtcctcattgggcagagggagccatctcctggaatttttaattcgaggactttttaccttgacctcttgcgaaatccctgggccatagtgggttaactgtttgtattctggtcccactgattttctgtgtttgcttcagagaaggtgaaggtgaattctgcagattttccatcctaccgtctttggaacaactgggtactgtgtctccttaatgataaaagggagctcttcttgaaataggatgatcattttccacagtttcttggtaaaccaattacactagtggtgattaaattaggtctttgataggcatgcaagtaaaagcatttgttgtaatttacaacaataagtaaattgtctaaatggttttaatatcattaaaaatttttatctggca

SEQ ID NO: 178940 - DNA, 192 bp, Homo sapiens
tgccaagagcagaaaggcatcgggaagctttccccagttttcagagagacacagctgacaaatggaaccagaggcactgcagttcccaggcggggctttaggggagagagctgctcagattcacaaccaggaccagtctttctactgccagctgggccggaacagatggactgggtgcaggcaactgtctat

SEQ ID NO: 178941 - DNA, 219 bp, Homo sapiens
aacacaaccttctcaacaccttgtgagacccatttcagacttctgccatctagaactgtaacatagtaaattgtgttgtattttaagccactaaatttgaggtaattttttatagcagcaacaggaaagttaaacagtgggagacccagtaggcaagtagaaatggttaccaaatgaccagaaccctgaactgaccagatgagaactccctggatggga

SEQ ID NO: 178942 - DNA, 443 bp, Homo sapiens
aataaaaaaaatgtttcccaaaaggtagtgaggagttaggttaaatggttaagttcaggaaatcctctcagatgtagtgaaggtgcaaaataattgctacgatttccagcatgcctaacgtgccagtgttgtaagtattttacatgcttcttgaggcaagagtagacaagcttttctgcagaaggtcagatagtaaaggcatttatctttgcaaaccatatggattctgctgcaatatgtaaccaatgtctgtgcgccaagtggactttatgaacataaaaacttgagtgtcacataattttcatgcatcacaaaatattattgttctttggagttttgaaaattattcagacatgtaaaaaccattcttggctgggcaccgtggctcatgtctgtaatcccaggactttgagagccagaggcaggcagatcacttgaggcca

SEQ ID NO: 178943 - DNA, 609 bp, Homo sapiens
aatgcactccactttggaagctactgatttagaaaacaaaacattattcagtacatgcaaatggttcttttggagctatcacacttatcctagtttgatttttgaaaaatgtggtttttagtaaacttcagaataaatgtgtcttgagtacaacttctggtcacgatcaattgctatcagttatctgtttcagttatctattatgggagtgtggtaaccaattaaccaggacaagattctacaatttcattatgaaatatttaagacatacaaaagtataaaatgtaatatgacaaatgtgcatgttttaatccaccaccttaaaaaagttaccttccagcaaagtgctgggattacaggcatgagccaccacacccagcctgttttgaacgttttaaactttatgcagtacctacatacaatatatagcatacatttgactacaactatttttttttcgccctctaaatgtggttgattatgggtaaatctagttcattcattcccacagctgcattctctaaagtttgagaatgccacagtatatccattcgtctataagtgacttttaggttctctcttgcttttcttttttttttttttttaaac

SEQ ID NO: 178944 - DNA, 368 bp, Homo sapiens
ttagacctttgtcagatgggtagattgcaaaaattttttcccattatgtaggttgcccgcactctgatgatagtttcttttgctctgtagaagactgagacattattaaacagataatttcatggcctgatatttcatttacattttaacaaaaagattttctcctgatattccatgtttttctcaaaattcatttctaataaccatatactattccaacttgtacatgtaccaatatttcccagcaaccatcatcctttcttgttacatttgagattctttttctctcaaatattgctgtgcattggctttttccttctctcagatcgtttactaatgatagaattatgagagtgcgattatggggt

SEQ ID NO: 178945 - DNA, 235 bp, Homo sapiens
tggagaaaccctgtctctactaaaaataccaaattagctgggcatagtggtgggtgcctgtaatcccagctactcagggggctgaggcaggagaatctcttgaatccaggaagtggaggttgcagtgagccgagatcacaccattgcgatcttcaaaaggaacattatatttaatattttatcaaaaattatgagttcctatttacatacacctttaacaatgttagctacctaa

SEQ ID NO: 178946 - DNA, 455 bp, Homo sapiens
tttgaggggaagcaaatgctcatctagtggcctttcttctttgcaaaggtctaagtcaggtcatctgctaagagaaagactgggagtgaagtggacaggtggtttggaggagagaaggcggctccatacagttgtggagaattgggagtcctatgtgcattttgtgtttgtcagccatcctgagtgcattatgcaattttcccctttaatcctaacaaaaactgagcaaggcctatgccttaaccctttaaaaatctaattactacctttgttgaaactaagggtgcttgagtaattcaaaccctggtccatgtgattctgagatatgaaatctaacactgtgtctgacaccgtgtcctgttcattgtatgatgaatcccagcagaacccagcacttaattggcttttcagtgccctttagaactctctcccctgccctcaatagctggatgtat

SEQ ID NO: 178947 - DNA, 271 bp, Homo sapiens
tgtaggttgcactggggaaaaatattttaagaaatataggtagtactcatagcagataggaatagcagatcatttgcttcttgctgctcacatttgctaagactcttatgaagattttccctgggcacatgaatcagtttaataatgattgctgccagttggtggctagacatcagactgccagcctactcaacagtgttgccatctgctatttggattcacagtgtgttgctgctacgcaccacctcattaagaacgggacccttgtgag

SEQ ID NO: 178948 - DNA, 177 bp, Homo sapiens
actggccaggccagtctccactagaggaacaaaaccaaagtccacggccaccttcttagcgcagagcagcctggtaaagagagacccaggtacaaatcctgactctttcataggctattcccacgaacttgggtaactcaacggctctgggccttagttttcccacctgtgaaatgg

SEQ ID NO: 178949 - DNA, 307 bp, Homo sapiens
gaatatttgggtttgtttcacttgctgctgcttcctcagcacttagaactgtgtgttgaagcacagtaggtgctcaataaatagtggttgaatgaaagaaaatagacagtcccagaaattaatcttaatactgatgctgtgaaatgaaaagctctcaaagtgggagtggacatacttttaagagatgattccctttcatttaacttaaagcccaaaggacttttcaaaatgaaattgttattccaactacacccaaaaatcattaaggctgcccctgggtgctcacgtacgttttaacaaaaagcaa

SEQ ID NO: 178950 - DNA, 557 bp, Homo sapiens
gattagcctctcgtttgccttcagctcctaatctgctcatcttcctgtaatctttatccgaacctgcaccctcattcctgaaccttgctctctacttatatctgtgcatgtctctcgtttctggaggtaaatcttcccccaggagattcagatgcacaccatatttgggaacaactgagttaaaggaaggaccccttgccaaaatacttgtgctctaggtactttgagttgagatagttatacttaaggcaccttacgaactaccatcgaacccagccatagtattcatttgatttagcaatatcaagaaatccgtgacccatctagatattagggaaggggcttgttcatatggtacaactataaaggattattgtaagttgctgataagactagattgaagaacataccagccaattcatgattattaggaggaactaccagtttctccagcatgtacctcctgatgccaatagtggtgccttcctgttctgcttgctgtagcccccctcatggttactggacacccatgccaccttattgtcttgatgcatgtc

SEQ ID NO: 178951 - DNA, 536 bp, Homo sapiens
agagagcctataagcggacgtgcaagtagggaagatatcactaaattcttttcctagcaagaattaatactctgggaaaggaatgcattcctggggggaggtctacagaaggctgctctgggagtgcctgtcttatgtggttgagataaggactgaaatacgccctggtctcctgcagtaccctcaggcttactaggattgggaaaccccaccctggtaaatttttggtcagactggttctctgctctggaaccctgttttctgttgtttaagatgtttatcaagacaatacatgcaccgctgaacacagacccttatcaggagttccacttttgccctttgccttgtgatctttgttctcctttttgccctttgaagcatgtgatcttgtgacctactccctgttcttgcaccccctccccttctgaaatccttaataaaacttgcttgttttgtggctcaggcgggcatcgcggccctaccgatatgtgatgtcacccggggggcccagctgtaaaattcctctctttgtactc

SEQ ID NO: 178952 - DNA, 111 bp, Homo sapiens
gggtaccatgagatgctctgtacccttataatagattctcttttctgcttttcatcacctgaaatgggttctattacccataaccaaaatagctttaattaaacccatcag

SEQ ID NO: 178953 - DNA, 179 bp, Homo sapiens
aaggttatcttctacacagtgtgatgttagctgtaggttgtcatagatgccctctatctggttgaggaaattcccttttatttcctgacaattgttgtcattaatgaatgttgaattttgttaaacattctctagcatttattgccatgattacatggttttcctactattgtctgtta

SEQ ID NO: 178954 - DNA, 647 bp, Homo sapiens
cctgggcaacatggcaaaacctcatctctacaaaaaaatttaaaaattagccaggcatggtggtgcaccagaggtcccagctacttgggaggctgaggcaggaggatcagttgagcccagggaggtcaaggctccagtgagccttgacctgggcaacagagtgagaccttttctcaaaaaaaaaaaaacaaaaaaaaaccccataaagtttgaatgttatcagccctggggatccttcgcacccatttaagctctataatcctacaataataatacaaagaatgtctcacccatgtgagctactctagaatttagaagatcccttcataatcatgatctctttgatcctcatgatctttggccctgtgaagtagtccaggcaaatatcatcagctccattttagaggtcaggagtttggagatcagccttggcaacacggtgaaaccccatctctactagaaatacaaaattagccaagcatgctggcacatgcctgtaatcccagctactcgggaggctgaggtacgagaatcgcttgaacctgggaggcagaggatgcagtgagccgagatcacgccattgcactccagcctgggggacaagagtgaatctgtgtctcaccaaaaagagacgaagctaaacaacg

SEQ ID NO: 178955 - DNA, 728 bp, Homo sapiens
atgcatgcttggtgtgtttgagaaacagcaaagaggccattgtgactggagtagagtgagcagggggaagagtgctgggaaatgaagtcagagagagaatggtgacctgatcctgtagggttatgggtgccattgtagggactttgaaatggcaagcagaacagaggggtgacatgaagtgacttacgtttaagaaggattactctggttgctgtgttgatagaagaacaagggaaggagcagagagatcagctgggaggctatgctgctgcccaggcaagaaatgatgacagcttaggccagagtggtggcagtgagttattgagaaaagatatatttcgaaggtagagtcagcaggatttcttgatggactggatatgggagggaagagaagagttaaggatgacacatgaatgattgaggttggaagtgcctgagtttagagtttgggagtagtttggccctcattgtcttatgccccagctttagggggtggccaggggcagaaccagaataatgagtggactagtcatatcttgtaaatgtttgtgaagccataaatttcttctttaagttcaagaggagctagtcaacaaagggaaagtttggacttatcagaagtgtctgaagtagagtctaattatggtgccactgaagaggatttaataacatctgcatcaaaaacagaagagaccttgtcaaaaaagagagtaccagtcttcctcctg

SEQ ID NO: 178956 - DNA, 428 bp, Homo sapiens
agggttgttttccttcttacaatataaaagttaggttaagctggtattcagataatttttttctaatatttttatgttcatcttttagcaaacaaatgaacaatgataagaaagcctaattggcagcctttgcaaattcactaaaaggacactggcatacatttgttcaccatgatatactacactgtgttcaacacctatgctgtaaaattcggttttattatctaactcctttctcagcccacacatctattatcaacgaactcaattaattttctaagtcttaatgcccttatcctaatttatgctgttttaaggataaaatagagcaaaaagactaccctgaaagatttatatcttattccctataccattcctttcccacatacacataaagataattttctcattcttctcttagaagagtt

SEQ ID NO: 178957 - DNA, 257 bp, Homo sapiens
ctcgtgatccgcccacgttgacacttcagcccaaagtgctgggattacaggtgtgaaccactgcacctggcctctggctgagatttaaattgagctttgtgaggcaggcacagatgggagcttgaaaagggaagtggtgaaaaatttggccatccatagcctaggcacaacccagccatcaaaccctgggatgaaagcttcttggggagcatgtactgtacatcccggttagggagtatagtaagcagtgtcaacgt

SEQ ID NO: 178958 - DNA, 528 bp, Homo sapiens
gagacatgaacagaaaatcttttcaacccatgcggggttggaaacaggcgaatgtaatctggtgcctgagttgagacacaggcattgataaatactagaaatggcccttgcagaccatgacgtggggggaaggtggcgggtgccctgtgccaggcaagcccatcctgggtgacacccggccaccttgaccggccaccggtgggtgcgctctctgccctccgtgtgtctgtcccgtgttctcatcaagtcctccgttgtccacctcttgctcagaacaggatccctgctgtcttggctggggtgctgcgaggtattggaggaaatagtaccacttttgctgttaactccatgaaaggatggagttcgagtgtgggctcttttaatctgtctcatttttgcgttagacagacctccctgagtgtgcctctaatgctgcagcctggacattggtttttatcctaagtgaaagtgaagaagtcctgtttttttgttttgttttttgttgagacgaagtcttgctctgtcacc

SEQ ID NO: 178959 - DNA, 437 bp, Homo sapiens
cgagagtgagcaaggactgtggagccagcagcaggcagcgtggagcccaggagcctttagacaaagcattctgctgcggctctgtcagcgcgcacatccaccggcagcaggcaggaccacagctgcccggctgggggattacaagcaagaatgaatcagcacccggggacacttgacttcatgggcatagaagaacctgccacgtaggctcctggagcagacttccccattcaagggcaggggagctcaagtatcccccagactcggcatcttggagcgctgcggcagcgtgcatccagaaggccgccgggtccctgaccatcatctgttctgcaggagacagaggagagggagtggaggctggcagagttggtcaccagggtcttgtagataaccaaggaagttggcattgtcctgccccaaggggcagaaagtac

SEQ ID NO: 178960 - DNA, 486 bp, Homo sapiens
  misc_feature (30)..(30): n is a, c, g, or t
tcagatcgagccggtaccgattacgctccnagacggcatgcctgttctttgccatacgtacatcagtgttgactctggatgatggatagcatctcaaatttgaatatcaattctgaaaatatgctttgttttcatatgtaactgtagtttgcagaccacaccatagtcttcctcccttacatatcttggcacgtggtattataatcccttctggaatactccttccccccttactttatagttttgagcccatcttaatatttccatagcatgtacattcttaccacaagttaattgctgtaactctttggaggactgagtctgctattggacggagtccctaaaaagaagaacctctgtattctcagtgtataacaagatgcacggcatttaatatatagcttgtcaggcagcgttagaggaatagatatgtatggttttaaatagaattttgtatcctttcaccttcccgtctaggagcgtaat

SEQ ID NO: 178961 - DNA, 173 bp, Homo sapiens
aaagtaaatatatccaataggaaaacaaagaattcttccatctgtaaattttctgtgtctggcaggattaaaccaggggtcagttatattactataaactgctaatggcccttcctcttaaaatcagtcccaacaagttttcttacatatggtaaagagacccaaggaatact

SEQ ID NO: 178962 - DNA, 368 bp, Homo sapiens
taaaccaagacaatgaaacaaggccttcttaacgaaaataatctctaacctcaaactctagaacaagacaaacttacaataaagtatcgtagaataaagacacttcaaatatgcaacaactctgttatccacaaagagaccgtaaaccaagaaacaggaagacagaaaaactgaaaaagaaacaaaaagaaaaaaacaaaaaagcccctcacagcagaggatgaacacagaaatcagtatgaaagcagtgcgctggatatagaggacaatcagtctagattgaagagatggacattctgaggatggtcatcaccaagatcctgagggcaaaatgctcatatataagccttccccactgctgggaccag

SEQ ID NO: 178963 - DNA, 260 bp, Homo sapiens
caagtagctgggattacaggaatgcgccaccatgcccagctaatttttgtatttttagtagagatggggtttcaccatgttggccaggctggtcttgaactcgtgatccacctgccttgggctcccaaagtgttgggattacaggcgtgagccgccgcacccagccaagaacattctttttaataatcatagttacaatgatcaaaatcagcaaactttaagttgatgtgatgttattatgtaatccacagtccatatgt

SEQ ID NO: 178964 - DNA, 1132 bp, Homo sapiens
ctgggattacaggtgtttgccaccaaggctggctaatttttagtagagacggggtttcaccatgttggccaggcttgtctcgaactcccaacatcagttgatccacccatctcggccttccaaaatgctgggattataggcatgaaccaccgcatctggccttgtctttcatccttaatgacactttagtcctaataatgctaaaatcattttctactctttgaattgaaacacagcttatctacatgagcccaaggcagtagcaacattcacctccatttcttctctgatctctaccttctgaaccctgtggacttggttgtaaatggatgagggcaagtcttgcttccttcccctgtgtttacagaggatcgtggctgagatgctgggccacactctgggcctgctggcacccctgggccggtggctgctgcccctcagggtgctcaccacctagaccagaagaaccaaggtgagggagagcctgttttctttcttcctgtggctgcgggggctgtgaggcatgggtctagtggctgtgtttagctggggatgcctcctagaaatcagctccaccgttgaagagatcaaagcaatgcacagtgccacttgaaatgaaacgattgagcttatcagcgcttttgcaaatgtacaagagggtagctcccccggacatcctgaactgagccatgctcttctattttgtgtaacagcccagtgacccctgaatcttcccctgaggcaggtccccgaagcttcatggaggatgttcctcagctgaccaaggtgaggctcttgagctcctaaatctttgtgatactgtttatacatctttgtgctgtactttttaagctgacttcgtgttatcacctgtatgattttatgttttgcttctaaataagtacagattattttaaactctaataatgggtgctacaaaattaaagattatgtcaatcactggtcaaaaaaaaaataaaaaaagaaaacaacaaaaaaaaaacccgcggggctctcttttctcgggggggggaaaaaagggttcagaaagggccgggccaaggttttccgcacccttttgtgcaccaggggaaacgcgggccccaaagggcgaaaaaggaaaccgtactag

SEQ ID NO: 178965 - DNA, 510 bp, Homo sapiens
tttagcaagaaagagggcaatctcattttaaaaatttactcaataacagcacaaatttgaaactaaagtgtgagactcctacttttggttatcatatagtcgccacagtaatgactaaaattcatgtagcactcacatagctaactctccctgaagaaatgcttcctttctcaagaggtttaagtggaaaggaatatgaaatttcttaacacatctatgttcgaaataactttgtttcaggagtaatcactctgaaacaactgagtgttaaataaaaaccagcaacccccaaatctttgctgatccatcactttaactgatcagtttactaccaactacagtatttacctttccagtaacacttctagttccatacaaactgttttgttctacataactgcactggatttggatgtacactcagattttaaacgatgacctacattcagtggtgtgtgggtacctataaaacacagaaaagggcccactttcttttttttttttgagatg

SEQ ID NO: 178966 - DNA, 959 bp, Homo sapiens
acagagcaagactccatctcaaaaaataaagcagcaaggttcaggaactcaggcttattttaaaaaaaagaaaatgaagaagaagaaagaaggaaaaggggctggatacggtagctcatgcctgtaatcccagtattttgtgaggccaaggagggaggattgcttgacctcaggagttcaagagcatcctgagcaaactagcaagacctcatctctactaaaaaccaaaaaaattagctgggtgtgatggtgcacacctttagtctcagctacttaggaggctgaggcaggaggatcacttgagcctgggagattgaggctgcagtgagcttgatcaccccagtgtactccagcctaggtgacagagcaagaacttgaatcaacaaccaaaaaaaaaaaaaaaaaggaagaaaaaagaagcaaaccacctcatgtgtatgccacactcacaggaaattaaagatgtgaacaccaaaaggtgggatcactgggggccatcttagagtagtaatttatatttagtatggaacatataataagaaacacgtatagcatagaacatatagaaatataattcatacttattatatattacgatatgttaaatattttacagcattgtctttaataataataataaacaaaatgaggaaaaacagatttcggaaatagtctttcttcttgtgaactttaaaagccattaaaaaaaaatgatgaaggaccaggcgtggtggcttacacctgtaatctcagcatcttaggaggctgagacaggataattgctttaacccaggagacgaaggttgcagtgagctgagatcgcgccattgaactccagtctgggcaacaagagcaaaactccatctcaaaacaaacaaacaaacaaaacaaaaaacaaaactaccatagccggtatgtcagtaatgagtaagggtgcattctaataaaactttatctaa

SEQ ID NO: 178967 - DNA, 536 bp, Homo sapiens
acagagcaagactccatctcaaaaaataaagcagcaaggttcaggaactcaggcttattttaaaaaaaagaaaatgaagaagaagaaagaaggaaaaggggctggatacggtagctcatgcctgtaatcccagtattttgtgaggccaaggagggaggattgcttgacctcaggagttcaagagcatcctgagcaaactagcaagacctcatctctactaaaaaccaaaaaaattagctgggtgtgatggtgcacacctttagtctcagctacttaggaggctgaggcaggaggatcacttgagcctgggagattgaggctgcagtgagcttgatcaccccagtgtactccagcctaggtgacagagcaagaacttgaatcaacaaccaaaaaaaaaaaaaaaaaggaagaaaaaagaagcaaaccacctcatgtgtatgccacactcacaggaaattaaagatgtgaacaccaaaagcaggtagttccaatttgccagcagaatgagtacagaaagagactcagaaacgacattt

SEQ ID NO: 178968 - DNA, 188 bp, Homo sapiens
acaggtaactaacgtggcaaggagcatccagtcccttccactcttaagttccccagaggacattaaaataaacagcaggccctggcctgtacaggctcacgcctgtaatcccagcattttgggaagccaagacaggaggatctgttgaggccagaagttcaagactaccctgggttaggtctacctgg

SEQ ID NO: 178969 - DNA, 467 bp, Homo sapiens
taaaagaaagaatggtaaaggcaattcacaagaccgctgaaaaaaggaaacattcagtggaaatattgtaaaatcccataaaattaaaagatccacctttcagagcacttgaacagcaaacttttcagaaggaacaaacctggagttcaaggttagaaagaacaagatggtccaatgaacagctctaattagcatttttcctagatgtattgcaaaggaaaaatgaaggtgtaagtttgggtgaaataaaagccagtgcggtttaaccctcacatacgtttgctcacctttaatactactactatctcattaaataggccacaactcttctgtcgctggtcgttagggttcagagtttatgtcacaattgtaatgggttattgactgcctcttaaagaacttcatagctccccaggctttgaatccattaatgaatgttggagctgataaagttgagtttaattaca

SEQ ID NO: 178970 - DNA, 114 bp, Homo sapiens
gtgttgagaattaattgtcttttatttttccaggagcctaaaggatgtagtggtggttaatctgtgacatgaaatcattaacataccttcttaggtctcaacagaatatggaat

SEQ ID NO: 178971 - DNA, 434 bp, Homo sapiens
tcctgctgccaccaccccaacaaagagctttggctggcattcccccatcggagtgttgtggacaatatagagcatgaacactttggcccctccagtgcagcagatgcctaaccttgaaagaccagagaacaaagcgggggggcccaatgccagttcctcagagttagagtatgaagcctaggagtgcagggctgagcctttgctccctataatcttacagagacaatgccagttcactaaacaccacaatcacatcctccaagtgcatcaaagaagataaaagcaaaaaacaacccatccaaaaagtagcaatttcaaagactgaaggaatatcagcccacacggatgacaaagaaacagcccatgaactctgacaactcataaagccagaatgtctccttacttccaaacaacagcactagttccccagcaat

SEQ ID NO: 178972 - DNA, 628 bp, Homo sapiens
tagctttttataaatggttggattactcatgatatatattatatgtactatacaggcatatgctttattgcactacaaaatattacattttttccaagttgaaggtttaacttgaataagtctattgacaccatttttccagcaacaggtactcatttcctgtgtccgtgtcatgcaatattctgtaatatttcaaatgttattataatttctgttacggtgatgtgtgatctttgatgttaatattttaactgttttgtggtgtcatgaaccatgcctatgtaagatgcaaacttaatcaataaatgtgtgtgttctgactgctctaccgaccagccatttcccccatctgcttccctctccttggacctccctattccctgagccacgacaatattgaaattaggccaatgactaaccctagtagaatggcctctaagtgttcaagtgaaagaaaaagtcacacgtctctcgccttaaatcaaaagctaggaatgattaagcttagtgaggaaggcatgctgaaagctgagacacgatgaaaaccaggcctcttgtgccaaacagttagtcaagttgtgaatgcaaaggaaaagttcttgaggaaaattaaaagtgctactccagt

SEQ ID NO: 178973 - DNA, 493 bp, Homo sapiens
atacaatacctttggaactcttcaaaatatgtttgaatatttaaagcaaaaattaaaacacggtcttgtggggtggctaacgtacacagatgtattatataagacaactatactctaaagcgacctagagagtggcaaggtttctattaatacattctacttgaagtgaatccacactgattcaaagctgtgagaagactgactggtagattcaggagttttcagcctgatctctccattatgaaggccccatcaattttttacctaatggttttaagcagtcattgatgatcattacctagacccatttttcattaggagttacaaaatgaaaaatgggtctaggtaatacactgtaatgacttagcacaatgtgatacagagtaatcactcctcagatagatatcttaaaaaataattgggtcttgggagaggactggcctgtagggtctgatttgggagttattgtggtgtgaagcaatgtgatgtctga

SEQ ID NO: 178974 - DNA, 650 bp, Homo sapiens
cacccttgtaatcccagcacttagggaggcagaggctagaggtttgcttgagccccggagttcaagaccagcctgggcaatatagcgagatctccacaaaaacaaaaacaaaaacaaaacaaaacaaagaaatagaaatccagaataaactcaaagtcaaaactaaatatcctaactgctgcaaattttcatttcttttttttctgagacagggtctcactctgtcacccaggttgtagtgcagtggtgtcatcacggctcactgcaaccttgacctcctgggtttaaatgatcctcccatctcagccttccaagtagctggaaccacaggcatgcaccaccatgcccaactaatttttttagtttttttttgtagagatgggctctcactacgttggccaggctgatgctgcaaattttcaagcaagctagcccttagcaatcttgttccacacgatgtttatctcatctaagccccaagaagggaaagtgattaagtatatttttgtaagaattttgattacattcattcctaagaaaacatcggacctgacttaccagtgaattccatggctgcattcatgtcatttactatgcagttaacataaccactccaaaactttgtctctgaaatcagtgtgggtagatct

SEQ ID NO: 178975 - DNA, 120 bp, Homo sapiens
gtatatttatagagtacatgagatgttttgatacaggtgtacaatgtaaaataagcacatcctggagagcagggtgtccattccctcaagcaaaaattgacaattttctttaaagtgata

SEQ ID NO: 178976 - DNA, 346 bp, Homo sapiens
gtgctggggtcgatctagaggattccctgtatcccggggaggggattattgacgttgttactctgtaggttttaaggatttcaagtcatcagtgtcttccagctaaggtcagatgtgctgctgatgacccagagggcttgcagggtgacgtctctctgctgggggaggcctcggggtctttcctgtgctgctgggtggtgtctccctgtcctgtgacccagtgtgttttcttcataatgagcattcattgcatttgggacagtacagtggagattaccgctgctcccaagggtgggcccagtgagggtgttgctcccacctcagtccacatcagctctctccaaag

SEQ ID NO: 178977 - DNA, 1047 bp, Homo sapiens
gttccatgcccttcaccccaccctcgccgacccgctgctgacatgcagcggtccctaagccgtcccccgactgcccagcctcttgggcatcctggggaagcgtgggcctcagagccaagcactgcccctcagaacgttccagagtgtccccagctcccccagagtaaacgcggagtcctgcagtgatgccctgcggcctcctgccagctctgtcccagccgttcatggctgtgcctacgactccacgaggccccctcacccccgacaggcttcacatttctctgtagcagcactcgccacatgcttggactggctgcctcttacttctgggcctcccatggtatagagtgtaagcgccagcaaggcgggagccccatgctcatgaggtgttgacccactgcccaccattactagctgtgagcgccagcaaggcaggagccccatgctcacaaggcgctgacccactgcccaccattactagctttgttgatggcatttcctgtgctggctgctgagagaatcatcaacacccacgtgcagatcctctgccctccctggcgctgtacctttgtgcaggtggagatcttccgccttcctcagtctcttctgctaaagaggcactggcactgacagcaagaggacctgctatgagaaccaaagggatggaagggcccggcaccactccttcccagtgcagctgtggagcagacgcagctgctgtccctttgtcatttacggggaggggattattgacgttgttactctgtaggttttaaggatttcaagtcatcagtgtcttccagctaaggtcagatgtgctgctgatgacccagagggcttgcagggtgacgtctctctgctgggggaggcctcggggtctttcctgtgctgctgggtggtgtctccctgtcctgtgacccagtgtgttttcttcataatgagcattcattgcatttgggacagtacagtggagattaccgctgctcccaagggtgggcccagtgagggtgttgctcccacctcagtccacatcagctctctccaaag

SEQ ID NO: 178978 - DNA, 302 bp, Homo sapiens
gagggtgactcccaggattaccaggtagactaactggttgaattgtcataggagcctgggtgagcagaatatttctcttcacacaaattcccaaaagtttcacagtctctgcattcttttctgtttctgataagaaaaactggttgccctcctctagtagctgggcttatttattcatgaattaaccttccatcatccacagaaaaggtaaaatgttattctttcctcatgcttgaacatgcttcaagttaggattctgagttttttaatacttcatgtagatcaagtgttagtctacctgg

SEQ ID NO: 178979 - DNA, 128 bp, Homo sapiens
tatgtgtcagttggccaccagtagtttgtagatgttacctttccaggtgacatgtttacaatttaatgaagcctctggagatagtatgccttaatctaaaggaatggttctaatgattaaaatttgag

SEQ ID NO: 178980 - DNA, 317 bp, Homo sapiens
tgttgccaattgaatggaagaatgtcaaagtctctgctctgtgctgaattggactaacttacacaagttgagagtagaccacttgagagtaacacagaccctcaactggttagaaaatattatcaacaataatatcagtagccaaccctcaaggggcacttaccttgtttccccattaggaatgagctaactgctttataaggatgaactcatttaatcctcaccacagcccaacatgtcagatcctattatcctcaatttacagacaaggaaactgaggctttgggaggttgtgcaatgtacccgaggtcacctag

SEQ ID NO: 178981 - DNA, 183 bp, Homo sapiens
gtcacgccacagtactccagcctgggtgacagccagaccctgtcttaaaaaaaaaaaaaaaaaagttacttaaggaaaatgggaaaaggcttataatgagggccatcttctcagagttgatttttgcatatggagtgaggtggggatccagtttcctcgtatcctatatggatacacatttgt

SEQ ID NO: 178982 - DNA, 1476 bp, Homo sapiens
cagagcgagactctgtctcaaaaaattaaaaaaaataataataataataatgaatgaagctggacggacttcgcgtgcaccgcggtcagctcggggtctgctggggggtctgggtcagctcagggtccaggaaccgaggccaacggcaccccgtgctgcgctggggtgaggggtctgccctggggtctcggggttcagggctaggtcacggaggagtcggctctgggcgcttccttcctgaggagaggagctgggcaggccgggccgacgggttgggccgcatagccgggcctgtgctcatctccagcataaaactccacttcatggagcctgcacctcgctcgtgctccaacgcttctgccaccgccgaccacggccctgcgccccagccaggcctgaggacatgaggcggccggcggcggtgccgctcctgctgctgctgtgttttgggtctcagagggccaaggcagcaacagcctgtggtcgccccaggatgctgaaccgaatggtgggcgggcaggacacgcaggagggcgagtggccctggcaagtcagcatccagcgcaacggaagccacttctgcgggggcagcctcatcgcggagcagtgggtcctgacggctgcgcactgcttccgcaacacctctgagacgtccctgtaccaggtcctgctgggggcaaggcagctagtgcagccgggaccacacgctatgtatgcccgggtgaggcaggtggagagcaaccccctgtaccagggcacggcctccagcgctgacgtggccctggtggagctggaggcaccagtgcccttcaccaattacatcctccccgtgtgcctgcctgacccctcggtgatctttgagacgggcatgaactgctgggtcactggctggggcagccccagtgaggaagacctcctgcccgaaccgcggatcctgcagaaactcgctgtgcccatcatcgacacacccaagtgcaacctgctctacagcaaagacaccgagtttggctaccaacccaaaaccatcaagaatgacatgctgtgcgccggcttcgaggagggcaagaaggatgcctgcaagggcgactcgggcggccccctggtgtgcctcgtgggtcagtcgtggctgcaggcgggggtgatcagctggggtgagggctgtgcccgccagaaccgcccaggtgtctacatccgtgtcaccgcccaccacaactggatccatcggatcatccccaaactgcagttccagccagcgaggttgggcggccagaagtgagacccccggggccaggagccccttgagcagagctctgcacccagcctgcccgcccacaccatcctgctggtcctcccagcgctgctgttgcacctgtgagccccaccagactcatttgtaaatagcgctccttcctcccctctcaaatacccttattttatttatgtttctcccaataaaaacccagcctgtgtgccagc

SEQ ID NO: 178983 - DNA, 1313 bp, Homo sapiens
cagagcgagactctgtctcaaaaaattaaaaaaaataataataataataatgaatgaagctggacggacttcgcgtgcaccgcggtcagctcggggtctgctggggggtctgggtcagctcagggtccaggaaccgaggccaacggcaccccgtgctgcgctggggtgaggggtctgccctggggtctcggggttcagggctaggtcacggaggagtcggctctgggcgcttccttcctgaggagaggagctgggcaggccgggccgacgggttgggccgcatagccgggcctgtgctcatctccagcataaaactccacttcatggagcctgcacctcgctcgtgctccaacgcttctgccaccgccgaccacggccctgcgccccagccaggcctgaggacatgaggcggccggcggcggtgccgctcctgctgctgctgtgttttgggtctcagagggccaaggcagcaacagcacctctgagacgtccctgtaccaggtcctgctgggggcaaggcagctagtgcagccgggaccacacgctatgtatgcccgggtgaggcaggtggagagcaaccccctgtaccagggcacggcctccagcgctgacgtggccctggtggagctggaggcaccagtgcccttcaccaattacatcctccccgtgtgcctgcctgacccctcggtgatctttgagacgggcatgaactgctgggtcactggctggggcagccccagtgaggaagacctcctgcccgaaccgcggatcctgcagaaactcgctgtgcccatcatcgacacacccaagtgcaacctgctctacagcaaagacaccgagtttggctaccaacccaaaaccatcaagaatgacatgctgtgcgccggcttcgaggagggcaagaaggatgcctgcaagggcgactcgggcggccccctggtgtgcctcgtgggtcagtcgtggctgcaggcgggggtgatcagctggggtgagggctgtgcccgccagaaccgcccaggtgtctacatccgtgtcaccgcccaccacaactggatccatcggatcatccccaaactgcagttccagccagcgaggttgggcggccagaagtgagacccccggggccaggagccccttgagcagagctctgcacccagcctgcccgcccacaccatcctgctggtcctcccagcgctgctgttgcacctgtgagccccaccagactcatttgtaaatagcgctccttcctcccctctcaaatacccttattttatttatgtttctcccaataaaaacccagcctgtgtgccagc

SEQ ID NO: 178984 - DNA, 426 bp, Homo sapiens
tgtcgtcagccaacaggatatgtccagccacagggtgttcagtatccagtggccagctcctcaagggcatggctgtggaccacattacttctgcttggtcttctgctgggctggtgctggagtgaccgttgaagggcagggctcaggcaccttgggctggcagggctctggaatcctgttggctggcgacacgttccagccagcgaggttgggcggccagaagtgagacccccggggccaggagccccttgagcagagctctgcacccagcctgcccgcccacaccatcctgctggtcctcccagcgctgctgttgcacctgtgagccccaccagactcatttgtaaatagcgctccttcctcccctctcaaatacccttattttatttatgtttctcccaataaaaacccagcctgtgtgccagc

SEQ ID NO: 178985 - DNA, 269 bp, Homo sapiens
cctctctcagccaaggtttttcatgggcctgctttgcacgagaccgtgagctgggtccctggggccactgtcctctggatgggacccttttctcgtggtgccgttcaggctgtattttgctggttgccttgacaggctcatgcctgctcagtgtgtttgcagatggttcaaggtaacacagtaaagtaaggagcggcgtggctggccgtgttcctgctggagagaggaaggaagccatgccgggcagcaggctgcagggccgcacgtgt

SEQ ID NO: 178986 - DNA, 430 bp, Homo sapiens
tacatcttccaacgtgtgacatttctaatcgtggacaggcacgctaactgtttaagaggctgggaccacaggcataaactgaagctccaccagcaagcctggatgtgtgatcaccctaagtcagacttggaagtgcagctcctgaagggcaggaaccatccccacgacccctctctgcccattctagttcacttgaactgacttttggtgtcaggaaatttatttttgtttctaccccatccaccaaccccacaccaccaagcatttcagatcaagtatctgtgaatcataggtcaggttgactcatttcttaaagattccaggctgtgaatgaaaatggtattgatggctgggaggatgatcagatgtagggagtgtcaatgtgacttgttctacatttatctacaaaaatgcaaaccagatctgcaag

SEQ ID NO: 178987 - DNA, 447 bp, Homo sapiens
tctgaattttggatttttggattaaggatgctcgaccagtaagtatagcacagatattccaaaattccaaaaaaattcaaaacacttctggtcccaagcatttcaaataagagatactcaacttgccccaccctggctggcatcctgcctcatcattaagtctatttctgttttcatatttgaaaacataactaaaattgaggggttctttacctggggcccaaagtttgctcccagggaatctaatgaaccacctggaatcaaacatttggagagaaggccagtcacttttatcggaacgtcagatggtcatggaccctcaagaatgattgaagaaatttgtaagcccagttaaaacatccacagtcttctttcctcagtgcaaaagttgccctttttgatatctcatatttagagtaaaaaaatttcgttaataagagatcctct

SEQ ID NO: 178988 - DNA, 426 bp, Homo sapiens
aaggttgcaaggaacaaaggttttctctgacatagccttaatggcctaagcaggttgctccttgagtaaattacacttctgcctttgagaaaaccaggccaaggtgcttggattccaggccacctgaaagctcagttctaatcattgagaaagagtttttggaaataacctaggattctggcaaagattaaaaagaatactagcattactaagaagaggaggaaccattccttacacattaattttctttgaagttactctaaaatttctataaaacccatagtgaattaaatttctttttttctttcttttctttttttgagacggagtctcgctctgtcgcccaggctggagtgcagcggcacaatcttggctcactgcaaccttcgcctctgggttcaagcgattttcctgccttagcctccc

SEQ ID NO: 178989 - DNA, 212 bp, Homo sapiens
gggctgaaaaccaagaagaaccgagaaccagctgaaacttgcagtgttccccaactcgcacacagacctactgatagagggatggagactgacctggcaggtgactcctggttcagtgctccttggagaatttggatgccatgaagtgatattagatgtcagtttagctacctgttattttgagtgcttccttagcggtactgttgaggcag

SEQ ID NO: 178990 - DNA, 302 bp, Homo sapiens
aaacaagaatcaaccaacccaaaaatagcagaagaaaagaaataaaggtgacagcaaactaacagaaaaagagactaaaaaagaatacaaaggatcaatcaacacaaagttcgttcttgaaaagacaaaactgataaaccactagctaagctaaccaaggaaagaagcaagaagaccaaataaaattagaagtaaaaaaggaaacattacatctgatactagagaaatagaaaagatcatgagacattattatgaacaagtataaactaattgcaaaaacttagaaggcgattagggttagt

SEQ ID NO: 178991 - DNA, 501 bp, Homo sapiens
ttcaccccctttttttcctccctttcatcatcatcttcatcttcttcatcttcatccttatcccctttctttatcaatatcttcccatccttcttcatcatttatctccttccctttcttcatcatccatattgaaaaccaagtagtactgtaatggatttgtccaagtattatctttgatgaactctcccaactcaacaacacctgcatcagaacggtcagtaaaccaggtaaagaagctctctggttcttcgtgctgcctcttcctgctgactttactctgcgtttgactggaacgttttcattatatcctttccagatttgcatttgacttcagtggactctaaaaatagatcaccactctcattcagatgaaattccttggagagaactttattttcaaactaaagattttcatcaaaataaaaatctttctgtaacctgatttaatacctccaaattctgtcacttcaactcgtcaaataatacagtgcctctttg

SEQ ID NO: 178992 - DNA, 630 bp, Homo sapiens
atatccttctaatcaattgtggaataaagcctctatggttccatgataaattatatttaattttatagtgttttccttgaagcattttaacatgctagagatagatgtgtgtgtgtgtgtgtttacagttagatgtaaaatagcactcgtgttttcttcttgaagggagtcatttagaaattacctctcagccaggtgcagtggctcacacccgtaatcccagaactttgggaggccaaggcaggtgaactgcttgagtccaggagttcaagacctgcctggacaacatggcgaaatgccgtctctacaaaaaatagaaaaattagccaggcttggtggtgcatgcctgtggtcccagctgctaagggaagctgaggtgggaggatcacttaagcacgggagattgaggctgcagttagctgtgattgtgtcactgtactctaacctgggcaacagagtgggaccctgtctcaaaaaaaataaataaataaaagaaagaaaagaaatgatctctcctcatagtttgtgtgtaggaaaagaagtgataaaactgacctaattgaacttcaccttttgctcagtgacagataaagctttccttgatagcatacattggctcagtgccagtag

SEQ ID NO: 178993 - DNA, 750 bp, Homo sapiens
  misc_feature (694)..(694): n is a, c, g, or t
tgctggtttatgggaggtggagcagaggctgggcctataattagcaccccgcctgccttcagctttcatacgtcaagttatttgggtttttttgtttgtttgtttgttttttgagatggagtctcgttcttgttgcctaggctggagtccaatggcgcgatctcggctcactgcaacctccgcctcctgggtcaagcgattctcctgccttagcttcccagctactcaggaggctgaggcaggagagtcgcttgaaccagggagtcaagaggttgcagtgagctgaaatggcaccacagcactccagcctggcgacagagcgagacctgtctcaaaaaaaaaaaaaaaaaaaaaaaaacctgtgtgaaagctcctttttgaaaacgggggggaaccgggggaccaccttggggaaaaatttctggggacccccagtggaaacccttttgtggcggtgaaaaacgtggccctcaatggtggactctccaagggcgtgaggaacccagggtgttcctggtttccccaaagaagctttgggctcccccaaagggatttcttgttgtttccccctttgaccccccttttctccgaaaatctccaagaacatttcattgggcgtgaatccattgtgcctgcaatctctccctatcttttagacgctggttgctacaccattaaagggcgtgagacacanggccaggcttaaaccgaggggctcacaccccttcaatacaaggcccgggaaaccgg

SEQ ID NO: 178994 - DNA, 211 bp, Homo sapiens
caaagtaacaaacaaggtgtagtaacttaataggtgcttctgaccgcagaggacttaaggccagatgagaaagacaggggcagttcctccactcagggagaactcagcttgagggagcagatgtagagccacagtgggaaagactgttagtgctcagagcaggaagcctggggatttgtatctctgagggttgaggcctcgagggcagccc

SEQ ID NO: 178995 - DNA, 512 bp, Homo sapiens
aatatgacatgtgagagaggaaccaaggatgattccagggtttctggtctcagcgttagaaagttgccatcaacaaagacagtgatgactaaaaggagcaaatttgaggactagattaggaggagttcaattttaggcatagtaagtttgagattgcctgttagatattgagttgatttgataaccaagtctgaagttcaggggaaaggtctggaatggagataaattttgttttcaccagtttaggtattattcaagccatgaagctggatgagattaccagagaatccttggtagaaagagagaagggccaaggattggtctttttattttttttttaagatggaatcttacattttccccaggctggtcttcagcctgggctcaagccattctcccacctcagcctcctgagtagctggaactatagatgtgtaccaccacacttggcttgattggttttttaaatgcctgtgttaagagaactgttttagtgtgcagtttgaggtttt

SEQ ID NO: 178996 - DNA, 830 bp, Homo sapiens
  misc_feature (87)..(87): n is a, c, g, or t
gagggttgaggattgcttgagcctagaagtcaaggctatagtgactacaaatgtgcactgaacttcagcctggtgacagagcaagancttatcccaaatttctcttttttcgttgttgagacggaatttcactcttgtcaccgaggctggagtgcaatgttgtgatcactgcaacctctgcctcgtgggttcaagcgattctccagcctcagcctcccaagtaactgggatacaggcgcccgccaccatgcccggctaatttttatacttttagtagaaatggggtttcgccatgttggccagggtgatctcaaactcctgacctcaagtgatccacctgcctcagcctcccaaagtgttgggattacaggcatgagccaccatttcctaagtgagcacagctgttcacctcccagatagagaatcagacctttaccagcagcccagaagccccattttgccctcttccagtcactgccttgctttccttttttcaaaagtaactactatcctgtcttctattctgacttccatggattattttttcctgtttttgaactttatatatgtaaagttcacaaatggaattgtactgtaagtggaattgtacagttcatattttaagaaaattgaccgaagtatgaaaaagaacatatagacaggttagacgagtgcacgtatcatccatgctcagcttgatgaattttccaaccaaacacatccacacagccaacatctgaatcaagacactgccagtaccgagaaggcccagctgtgttccttgcagtcactgccatcccctgccctccttcccactctgagcaaaccgc

SEQ ID NO: 178997 - DNA, 272 bp, Homo sapiens
ttatttgtcattcatctaagatttgtctttctgcagtgtttagactagtgctaaataggtcatttatgaggaaagtgtagaaaaactctttagtaaggtactatatattcttcatatagaagtgtcctttttaaaattaattttgttcacaatatatgcttcacaatattccagtcaaatctgacctaactgaggctattgcacacatgttgtgacttgtaaaggctgtgggacaggacagagaaaaggcatgaagcaaattttcagtccca

SEQ ID NO: 178998 - DNA, 561 bp, Homo sapiens
tcacctgacctggagagttcaaagtgcctaacacagggatgctgctacccacaagcctggatcctggcgtgctccgcggctctccttcaagccctggcctcatcagacctccaaggctccctagacagggttaattattcacgtggcctgggacccagggttcgtttgtttgtttttcccgacacagtagggtccacgaggaagtcaggatccaccggcaatatttgcagtgttatgttgaatgtggcaactggctgcgtgaggatagagaagtaaacagcatgtccggtggcagtcggttaccacacagaatttaggaggcccagtgaaatgcaaatgctaggtccccctcccctctgggtgagcctggatgccagcaccctgttccgcccgcccagcatgcagaacaaaagcacaacgcacagaaacacagccggtgcgcgcagggcggcaggctggcttctccctccctcctgccgaggtctccggccccttcccccttccctccttccctcccctctcctcttctattagaaaatgggagtgttagggttgaattgt

SEQ ID NO: 178999 - DNA, 2110 bp, Homo sapiens
  misc_feature (971)..(971): n is a, c, g, or t
  misc_feature (1016)..(1016): n is a, c, g, or t
  misc_feature (1027)..(1027): n is a, c, g, or t
  misc_feature (1040)..(1040): n is a, c, g, or t
  misc_feature (1062)..(1062): n is a, c, g, or t
  misc_feature (1067)..(1067): n is a, c, g, or t
  misc_feature (1098)..(1098): n is a, c, g, or t
  misc_feature (1121)..(1121): n is a, c, g, or t
  misc_feature (1129)..(1129): n is a, c, g, or t
  misc_feature (1202)..(1202): n is a, c, g, or t
  misc_feature (1205)..(1205): n is a, c, g, or t
  misc_feature (1752)..(1754): n is a, c, g, or t
  misc_feature (1925)..(1926): n is a, c, g, or t
  misc_feature (1955)..(1955): n is a, c, g, or t
  misc_feature (1960)..(1961): n is a, c, g, or t
  misc_feature (1972)..(1972): n is a, c, g, or t
  misc_feature (1980)..(1980): n is a, c, g, or t
  misc_feature (1990)..(1991): n is a, c, g, or t
  misc_feature (2013)..(2013): n is a, c, g, or t
  misc_feature (2017)..(2017): n is a, c, g, or t
  misc_feature (2032)..(2032): n is a, c, g, or t
  misc_feature (2098)..(2099): n is a, c, g, or t
cccaaagtgctaggattacaggcatgagccactgtgcctggccatatgggacatcttgtaactgggagttggagtcctgggtacaagtcctggcttcaccgtgtaccagctttgtgaccttgggcaaatcacttaacctctctgagcctgttttcttgtctgtaaaacagggataagagtgcatggggacccagcccccagcactgtgggtttgagaggagactgcttgtgtaggatgctcagtacagtgtctggcacagagtgagcgcccaggagatgccagctctagttcttgttgccatagctgctgctctgggagggctgctgagacccgctgaaccgggcatcccatcagccagcacctgccctgcacccagcccttggtggggctgggaacgggggaatggtccctctatcctgaacaggctgaaggcacctccttcccatattcgtggtagggaatcgagtcacctgctggacctggcatggccgaggggacggccctctcctgactgccagagtctcttggatgggcttcctgaccatgagggcacagggcaggcagcctgggcccctcactccccactgccagcaaggcggtccatgcctgctctgccttccattgggaaagatgtgtggtcacatggaaacggcctgtgcagtggggcgtgaggtgggctaggacaggggatgtccccagagaagccaggtgactgaagtggccctgtcagggcctggctgccatctgctgaggcctaagctgccagagaagacccctgaaggccttcaggggtggggtggagggcgctggcatgcttggttggccagctttggaggtcccagaggccagggcagtggctgcttaccagacagaactggctaagatctggttcctccactatgttgggcaagcccctgcctcttttttttttctttttttgagactgagtctcgctctgtcacccaggctngagtgcagtggcgtgatctcggctcactgcaagcttcgcctcccnggttcatgctnttctcctgcctcngcctcccgagtagctgggattncaggngcccgccaccacgcccggctaattttttgtntttttagtagatacggggtttcnccgtgttngccaggatggtcttgatctcctgacctcgtgatccgcccgcctccacctcctaaagtgctgggattacaggcntgngccaccgcacccggccagcccctgcctctttaggccttggggtttcccatctgttccttatgggggcattaataggaaaaaaatgcattaccacactggaggggctcataaacggtagtgactgttattagcagtgagggatctcacttcaccacccacaggactccgagcccctcgagggcaggggcagctccatggactctgggtctccgtccctggacagggctcctctgcggtgggggcagcccgagcatgcctgcccctggaaggacatacaggaactcatgatggctcatggctaaggagtcttatggggaagcaggctgccctggtgggcacggctgtgtgggagtctcctgctctgtccactcctggcaggggcagggacgcggctgtttatatccgcgccgggtgtcaggagatggaagccagggaggacgggaggatgcaggagcatggagagcatgtgggctgcagatccgggggaggatgggcaccaggacagagcttgtcctgacagtggtgcgggaggcagtgagcagaggtnnngctgagaggtcactggcggcttcctccactgaggcatggctggcattcccttcggttcattaaaacccatcagtgggccgggcgcggtggctcacgcctataatcccagcactttgggaggccaaggtgggtggatcacctgaggtcaggagttcaagaccagcctggccnngatagtgaaaccctgtctctacaaaaatncaaannttagctgggcntgatggcnggtgcctgtnntcccagctactcgggaggctgnggcnggagaattgcttgancctgggaggcagaagttgcagtgagctgagatggtgccaccgcactccagcctgggcgacagagcnngactctgtctt

SEQ ID NO: 179000 - DNA, 132 bp, Homo sapiens
agtcccttatttgttttccctaagcataagaaactaaaagataaaaatgatttggtttattgggttgggtagttagctgtttctaaatgttttatcttataaacttctgagaaaacaaagcttgcttctata

SEQ ID NO: 179001 - DNA, 467 bp, Homo sapiens
tcatcataaacttctgctgatagttaacattttggccaagctatttggaactcaaccccttcaccatgtcaataattgcaaatttttattaccattcaccgaagtttattcatggttttggttttttgttttttgtgtttcttttggcattttcattattcccaaactctctggttttccagaaaatgtagtgctgccctctgctggctcttatgataatgacaacctgaaaatgtctcccatgacttttaggctgttggattataaacattgcttagagatattattcaatgtatctatctgttaaataaatcttccttataatatagtttcccacagtcaaggcagtcacaacataaaatcagatggagaagaaatagcactgtatagttctattaaaaaattgacctaggggctgggcattgtggcttatgcctataatcccagcactttgggaggccaaggtg

SEQ ID NO: 179002 - DNA, 419 bp, Homo sapiens
ttcatatctataaagtgatgataataataaataatatctaccccataggctcgttgtaaggattaaatgagacaatcgatataaaatactacttaacccagtgctggacatgtagtaagcattcagtaaattttaattgttctttgatatgttatttaattttttgttatttgggattcctcattaactagcatcttattatagaatgaagtttctttactaagaaaatgccataatgaccttgccttgagctctgtgtttaatattcctgcatttcaggtttccttattaattttcctataacttgcattttcagaatcttaaagatgctgttcgctgggcatggtggctcatgcctttaatcccaaagtgctgggattatagacgtgagccaccacaccagcctattctatttctaa

SEQ ID NO: 179003 - DNA, 259 bp, Homo sapiens
tgtttcttctagtctaacagcatttcttctcacaaaattagccattcccctggtttcctagtataaaattaccgtggatatatgcagttggatctacccatagtgtaactgaatcagtcctttgtagaaggattgtataatcattttgtgattaatcccacttaccttggactttttagaaggtggtattattagattgggtctaaagttagcaaaattatccacctatctaaacaatatcaaatgtgagtgcatttgt

SEQ ID NO: 179004 - DNA, 318 bp, Homo sapiens
gtgtgatctagaggatccctgtgaatacacagcgacagaataaatagcagactggggtcagtctcctgtgggattcctatgttggggatattctccctcctccttgggcagcccagtggctgagctaagtctgatgtgcacttagtatcagagaaaggttaagtcattggtgcatgaggctggaaatgactgatgacctgtaacatgttgcaagagggggtaggtcaaggactacatccaccctgtgtggccctctatgcttggctcactgactgtcaccacacttctggtctctagcctaggctcttgctggggatt

SEQ ID NO: 179005 - DNA, 184 bp, Homo sapiens
cccaaatcgtgcctttaagctgtttgttggtcttggaggacctgcgattcctggaatgttttcagaatcagcaaccattgctgatttttgcctgaaacaattactcctgtggtgtggcccttcctccttggcaagactgtagcctctgcaagagggtctgggtgcctgggagcaggagatgtgg

SEQ ID NO: 179006 - DNA, 241 bp, Homo sapiens
gagacgatacaatcgagctcggtacctcataggttcgcaggacttggattatcccagctcttgcctatttagacaacctcagagattctatttccactgtatgtggaggggactgagtattggtacttttgaaaagtttcttggatggttcaagtgtgcagccagagtcaagaacccctggattagtagagctttccaggccagctgaccccacagtcggcccttgggtcaagttcaagct

SEQ ID NO: 179007 - DNA, 387 bp, Homo sapiens
tgttagtcattccttgctgtgtttaacaagatatagtaagagataagctcaggtaagaacatactgacttgcaggtgaaaggaaaaggaatagaaggagtccagcaatggagccttgtagggttggagaagctgctgaaccccaacaacaggaaaaaagactgaaaaggctttgagaaacacaggtccactaaggtatttcaattaaacagaggaattcagcactactgcaaagaacagtttaaaggtgttttctcttacctaaacctattgtttcctatggcctcactgtaactgccattaagttgagagagagaggcatggagtgaagaaagaaagagataagcaaaagttgatatttatgtcttgaaaaaaatccagcctggcc

SEQ ID NO: 179008 - DNA, 523 bp, Homo sapiens
caggaaaaatccgggtatttcttctttaatgatgtcctgatagggcagaaaaaaataatttgtcttcagaagattggcttagagtggctgaatatatttaattcaattactggttcttgcctcatagccaggaattcttcaagtgatatttgctgagtgtgtacatggagggaaatggagacaaatgacattgcttgtgacccactgccttgagaggaaagccttcggtaatgattccagtaaaactagagctagagcttgggaagctaaacttgtgattacttactagtaaacaagagaaaggacctgttgtaggtgcaaaaatcttactgaaatgcctgagtatgcactggagaaagccctggactgcacaccaggggtgctcacccacttgtttactttttgtggctttgagcaagtcatccattctgcctttggtttttcacttgtcagaggggtgctagatgatgataattactgctcagtgggcttcagttacaaagcaccttaacatagagtagct

SEQ ID NO: 179009 - DNA, 532 bp, Homo sapiens
gaggatcccgagggccaggagttcaagaccagcctgggcaaaacacagcaagaacccatctctacaaaaagtaaaaaattagccaggcatagaggcatgcacctgtactcctagctactccagaggctgaggtgggaggatgacttgagaccaggagttgcaagggatgatcatgtcactacactccagcctgagtaacacagcaagatcctgtcttgaaaaaacaaaaacaaaacaacaaaaaactcacaacaattaaaagacaactcaaagaacagccaaagaatgcgaatagatatttttccacagaagatacacaaatggccaataagtacctaaagaggtgctcaacatcattactcatcagagaaatgcaaatcaaaaccacaatgaaatgagataccacctcacacccaaaatggaatggctacagtcagaaagtcagataacaagtaccaatggggatgcagagaaatgggaacagccatacactgttggcaggaacataaaatggtccatctctggaaaacag

SEQ ID NO: 179010 - DNA, 247 bp, Homo sapiens
tccttgaaccaggggcggaggttgcagtggctgagatcatgccacggccctccaacctgggcaacagagtgggactctgtcttaaggggaaaaaaaatgatgttttacagatttgttttatgcccaagttaaggtttaccaagcagctggcatgctttagggacccaacaaatgctagtcccttttcttgtccattgaatgaactcaacattcctttaaccttccacatgtgataacagcacctgct

SEQ ID NO: 179011 - DNA, 222 bp, Homo sapiens
attcatgtaaaggttaggattaggccatgagctctaacatggcttctatagccatggttccagcatcagttcaactttcaaaggcttatgctgtgccatctgaatttgtcccacttttgtatcatcgaatggttagcctgggtgacagcctttatttccaagtatgtatagttcagggaattcataaagaactttatggtattgcttttccaagcttctctt

SEQ ID NO: 179012 - DNA, 530 bp, Homo sapiens
tgcattggttgcctgtgcttgtggggtattactctagaactctacccagtccaatgtactggagaggttttccactgttttcttttagtagtttcatagtttgaagtcttcaacttaagtctttaatccattttgatttgatttttgtatatgatgagagatatgggtctagtttcattcttctgcatatggatatccaattttcccagcaccacttatttattttgtttgcaacaaagaaagagtttaattgtcacagggccaaccaagtgaggaagacagtagataattctcaaatctgcctccctgagaattcgggggctagggtttttcaaggatagtttggtaggcagtgggctaaggaatggggaatgctgattggttgggtcttggataaaattgtagagagttgaaactgtcttcttgccctgactcagttcctaagtagtggtcacagaaccagttgagtcagtttcttcatatgggctcctggtccaagtggcaccaggtggtccatcaaaatgcaaggt

SEQ ID NO: 179013 - DNA, 274 bp, Homo sapiens
tcatgccattctcctgcctcagtcctccaagtagctgggactacaggtgcccgccaccacacccggctaattttttttgtatttttagtagagacggggtttcaccatgttagccaggatggtctcgacctcctgacctcatgatctgcccgcctcggcctcccaaagagctgggattactgacttgagccactgtgcccggccatcctggtcttatatctttctgtcatgagccctttttccaaaagattggaatgaagaaagtgctttgatg

SEQ ID NO: 179014 - DNA, 592 bp, Homo sapiens
taaagacatgcttcaagtactcctccctcagagctgagagtacaagaaggggtcccagacttatttgttcctttccccaaccctcactgattctaaaattacttctcaatcactgaacattagtcaatatgtttattttttaaagtaaagtgtgggaaggttgtggagagtgaatgatgagattctataatctgatttaaatcttatctgcaggttataaaatgttaaaattcatgtttggaatagaatgcaacacaggcacatattctccttgaaaattttattcctgcagtttaatttagttgggaagaaatggtcagaccagctatttttttaatcacgtagatagattgtgtgtcctgtccaaacctggcaacccctgggatcactgccttcttcctctcctgctaatcaaattcaacccatttttcatgtaccaggcaaagtcccactcttctaggagggtcgcctgggcacccatgagcttcttgagggcccagcctctgtttcagccatctttgtggcccagcaacaagcaaagtcagggacttggtagaagtgtggggaatgaatcaaaatgaacaactttctc

SEQ ID NO: 179015 - DNA, 185 bp, Homo sapiens
ccatatttggtctagaggccatactttgctgaccctaatataataagtcttactatgtgaccattaaaaagaaccaaatagaattatatgtactgacaaagatatccatcaagttgtttttttgttttgttttgttgagatggagtctcgctcttgttgcccaggctggagtgcaatggcgtgat

SEQ ID NO: 179016 - DNA, 188 bp, Homo sapiens
gttgcattgaattgatgaagcatctcatttgttttgaagtcaaccgtgttgttgcatctggctgcctttgattccccctggaaaactaagtacccctctcttgtatcatctttattcatttacttattcattcatccgagtattatcatacaccataacaaaggcctggggattcaggagtaaatata

SEQ ID NO: 179017 - DNA, 224 bp, Homo sapiens
ctatgattacacattaattatttaatcactcatctattgttagatatttgggttgtttctaatttttttttactattttaaatggcaccaccataagcatgtttctatcaaaagtcttgttcttatttcctgaagggagattcttagaagtggcctccatgtgttctccatagcctagtcccacctcttcccagagtaccagccgtttccttgcttcatctcgt

SEQ ID NO: 179018 - DNA, 187 bp, Homo sapiens
gggagtagtccaaaagcacactgagtaaaaggagaaaaaaaaaagaagagggatgaaggagtgtgtagtgggaggcgatagtaagtaaacacatgtacaaagcttatgtagaaaaatggaagtgaggttaaaaaaaaaaaagggcggccaaattaaattaaaggggaattgccgggtaagagagcca

SEQ ID NO: 179019 - DNA, 525 bp, Homo sapiens
catctcaaaaagaactaccggattacagttatgttatgttcacaataccagcatccaaaaatatccagtgacaggatacagcaagaaacatgactacaaggtctatgaaacaggagactacagtacctaaaaaggcagatttaaacaaattcctgtaatgtgctcatttcagtcatgctaacttgagaaagcttttaaaacttttaaatgtaaataatccactttcacatttcttccaaaatgaaaaataactccttttttctgtcactgactttggcgaattttccaaaaaataaagagaaaacagttttgttttttggttgttgttttttgagaccacgcctggccttgaaaacagtatttatttattttttttttttttgagtttcactcttgttgcccatgccgctcttgaactccttggcctcccaaagtgttaggattacaggcgtgagccactgtgcctggccccaatttagcaccttactgggtgctgaggctgtgagccatagtagaatgcatgtg

SEQ ID NO: 179020 - DNA, 535 bp, Homo sapiens
tgcctattttcctccaaatattactaagtatttcatcatatacaaaaaaaagatatcttagcattgaatttagtaaaggacaaaggaggatacagctgcatgaaaatagatgatatattcaaatactactatgtttgcaaaggactgtttctattctgttcattggtagcgagaggcagcattggaaaaaattttaggataaaatagattttaacagctgtcttagtccatttgttattgcttataacagaatacctgaaactgggtaacttataaagaaaagaaattttttttttacagttatgaaaactaagtccaaggtcagggggccacatctggtgaaggccttcttgctgataaggactctgcagagtttggtgtcagtgtagggcaccacatgacagaggggattgaacctgctagctcaggactctcttcttacttttacaaggccagcagtcctgtcatcatgttaactcattaatccactggtccattaattcaggaatggattgatccatccatgaagacagag

SEQ ID NO: 179021 - DNA, 316 bp, Homo sapiens
gcgagagaatgagatgctgtctcaaaaagaaaaacagaaaaagaggaagaacaacccaggaccttgagtggagtgaggaacttgttggccctgatttgtgtccctctgatttcactttaaaactgaaacctcccttcctgatgcaggtttatttgcagcacttttaacatcagtacctatggtcaggcttgcctatgggctcagtcgggtggaatcaaggaaggtcagggagaggaacgtaaccaggcaagggcaagggttggcagagtgagatgaacgcgctcagcgcgcctgtgtgcgaggccagtgggtcgcc

SEQ ID NO: 179022 - DNA, 372 bp, Homo sapiens
gctaagtggtagagcacggattagaatcatctattggactcccagaccagtactctgagtcactctgaatcagagtggaaagggcaggggagcacagggcaccagggcagacagagcctagggtgggacactagggtctgaggatgaaagctggataaggttcctaaggaggagcatggggaagaatgtgacaccccaggtcctaggggctgagctccggtttcccaggaggcagggtgggtgtgggaagaggaatccactactgccaagccctcccaaactccctggagcttatactcaccagaaccccaaagggatgagattagctgatctacagctccctaccgcattccctccagaaagaaagaggaa

SEQ ID NO: 179023 - DNA, 751 bp, Homo sapiens
ttccctggatgggggtcaccacgtctccagcaagaacttggaggtgaagatcaccttttccttcctctccttacagagcctggcagaggcatggcttgttgctgactgagagcatctggaaatgagcccccagcactcagagtcaccaccctcaccatgccccccagctctgtgctgtcagttcctggtcagactgcaaagatgcccatgagtggactgtgcccatgccctgcccctgctgctaacacccagtcccccaagtcttctctggcgccagggaccaggtctgagacagctctgtttccaccacttgccctgtggctggcctggcatcctcaggatctgccctggaggggaaagaaaggcagggagagatgggcccagtataccctgagttcttttctctacccaatgactctggcttggctgcccagagtgtggcctgggctttgatagtgaacaatagggaagcttctaggcctgtcttgccccagagagccagctttgagtccctgccagggcctttataatccatttattatacatgctgtcacaacagggctgagctgactcctgggggcactccagcacccctggatgccagtcaaatgaacccctgcttggtactgggtgacttacctcttcaccacatctgcaagagggacagataaatatgaccttccagaagtgtctgcatcacctaacaatgcccttccagtgaagatgaacccctagctgcaggtcaggccac

SEQ ID NO: 179024 - DNA, 516 bp, Homo sapiens
tgatggctaattctgaaatgggattttgttataaccaatccaataaaactttttgggaccagattttcaactttttggtgtgagcaggaagaggaattttaaatcagtttatggctcagaaaacactaacggaaactcaaagtaaaacatttctgttaaagcactaccacaacagtttatacaaacttctatgcaacccacagttggtcaactaaaatggaaaatgacacctctctagggcctgaaaatactcaaaaaacagagtgatgatagctgatactgagcactcactgccatccaaagcccagagaatttagtccacagctaagacactgtagggctagggttcaaacccaggcagactgggctaagaatctacatttttcatctctacaccagtgtttctggctgaatttagtcctcccgccaaagtttttatgttgaaatcccaaccactagtacctcagaatgtaactgtatttgaagataatgtctttaaagaggtgattaggataa

SEQ ID NO: 179025 - DNA, 463 bp, Homo sapiens
catacacacaggttcctcagggaagtgcaggacttgagtatgtgcagattttggtatactcaggagtcctggaatcaatcccacatgtataccaagggatgaccatattttcgtcattaattggtacagcttgagtatctcaaatctgaaaaacctgaaatcttaaatgctccaaaatccaaaactttttgagggcccacatgatgctcaaaggaaatgctcattggaacatttctgatttcgagttttcggattacgaatgctaaatcagtaagtataatgcaaatattccaaaacacacacacacaaaatccaaaacctaaaacatttcttgtcccaagcatttaacataagagatatgcaatctgtactaccaggtattcagcaaatattgaaatgaatgaatgcatgaacaatgaatgaataagtcaaataaagacctgaaccacatgagaacttttgc

SEQ ID NO: 179026 - DNA, 365 bp, Homo sapiens
gtatggctggattttatatgagatttatcgaaaactgttaaaactttctaaaagaaaggagatgaaggtaaagccaattctataaaacaccaaactgcaaacagagcagttaggaaccaactttcttcctaaaagagcagtaacagaatttgtttcctagcttgtcagcatctgacgagatgatctgacagaaatggtcttttttcaacgggaaacatctaaggagttggaagaggcagacaggatgtagctcagagttggggaaacagccagagtctgcttggatgggatgctgacactaaagagaacgcagagatacacatgactctttcatctactttcaaccttggaagagtccagcacag

SEQ ID NO: 179027 - DNA, 428 bp, Homo sapiens
  misc_feature (13)..(13): n is a, c, g, or t
tcggtacccctcnacgctttatacttctcagggcagcatccctgagaaggtgaagcatgagcgagagtgggaagatgagtcgaaagtagccagctgaggggtagagaggagaaagaacatccaggcagggagaatagcaagtgctaaagccggggctcatgaaaaggcatgggagcaggacaaagtccgtgtggtagaggtgcggagagtggtgttaagatgaaggggagaggcaggcagagccctgggcagatgagcaaccagggcttagtggatcacagttaggactttgggcttcagccacagagcagcggtgggctactgagattttttaaagcaatagtgtgacaatcagatttgtcctttttttttttttaaagatgctttgacaaccttgtgagaaagaattgaagggaagcaaaaggtgt

SEQ ID NO: 179028 - DNA, 464 bp, Homo sapiens
cttggccatggtaagagatacagagaagtgcagggtgccacaggagtgtctaacagaggaggtcaggggcagcatccctgagaaggtgaagcatgagcgagagtgggaagatgagtcgaaagtagccagctgaggggtagagaggagaaagaacatccaggcagggagaatagcaagtgctaaagccggggctcatgaaaaggcatgggagcaggacaaagtccgtgtggtagaggtgcggagagtggtgttaagatgaaggggagaggcaggcagagccctgggcagatgagcaaccagggcttagtggatcacagttaggactttgggcttcagccacagagcagcggtgggctactgagattttttaaagcaatagtgtgacaatcagatttgtcctttttttttttttaaagatgctttgacaaccttgtgagaaagaattgaagggaagcaaaaggtgt

SEQ ID NO: 179029 - DNA, 233 bp, Homo sapiens
ctgcttctttccacatttcatatgggagaatggtcagttggatggaatgaaaataaacttttcttagacaagttacatgatagaaaacatcttgaatctagttaatagtcttagctccattaattgttagaattttgtcagagtagagcaggtagaattgagcagtattgaaacaaaacaaaatcttgggttattagctttggtcttgctattcacagtgtgtgaggctggag

SEQ ID NO: 179030 - DNA, 251 bp, Homo sapiens
tcacctcagcctcccgggtggctgggactacaagtgcacgccaccgtgtctggctaatttttgtattttttgtaaagatggggttttgccatgttggtcaggctgttctcgaactcctcagctcaggtgatctgcctgtcttggcctcccacagtgctgggagtgtaagccaccacacctgtctaaggaaagggatttaatgcaggtattgcaaaagtatcaaagtaagcttgaccaaggtaggtggaaat

SEQ ID NO: 179031 - DNA, 460 bp, Homo sapiens
atctcctgacctcgtgatctgcccgcccccacctcccaaagtgctgggattacaggcgtgagccactgcaccggccaacagtgtatttctaagaacgtaaattcttaatattgataaattgtgtttttcccattatatctaagaaatctgtctaatccgagaccacagagatgttctgctattttcttctggagattgtatagttttaggttttacatttaagtctatgattcatttggagttaatttttatatacggtgtgagggatggatggaaagttctttagatatagatataggtatatctaaactttaaaaaaaatcactcgtgcttgcttcagcagcacatacattaaaattggaacaatatggagaagattagcctggcccctgtgcaaagatgacctgcaaatttttgaagtgttctatatttttcagggagtctcaggccaaggatgtcg

SEQ ID NO: 179032 - DNA, 196 bp, Homo sapiens
ccattagagggctgctctaggactggagaggatatatacataaggggcagaaaacagtacctggctgagttggaactcaacactgctctcttttctatactagtcttctgccttgggacagaatcaaagaataagcattccctgtgacctcagcaattcccaaggagaccttcaggagataaggatcagacagaag

SEQ ID NO: 179033 - DNA, 681 bp, Homo sapiens
tgctcctaagcctgctgtttccagatgccaatgccagtcaatgcctgtatatttacccagagaaaagagagcccacggacccatccaaaagtcaccagaggcctgatgtgggagtatgaaggagagatcaaggttgtaattcaaaagaaaatgagattttctcatttttattctgctcctgctggcgatggcgctggcccgggaggcctgaggaagcgagctggggagagggaagcctggcacaggtggtggcaaagggtcccctggctgccctttctggtctggggtcaggtcattcccccacccgtataagcacttggaaggtggtcctgaagtaagaaaccaggccactgcaggtcttcaaagccccaagcagcaggaatacccaaaaaagcccccaaaagtactggttctactagatggagggaagaggccaagctaggagcagccttgggcaaggctgacaaaaaggatggcctgagctcctacagcttccccaagttcctccggggtctccgagcaccatggatgtgaaccaactgcttcacctcatatgtgggtaaactgaggcctggggagactggtcagagactgaggcagaaagaaaataatcaggaggaagaagtccaggaagcagatgttttcatgaaaacatcgacccaaccctaaagccctcatata

SEQ ID NO: 179034 - DNA, 239 bp, Homo sapiens
gggcgtaacagtgaaagccacgtgaatgtcatctgggaaaaacacggatggccaattcgtaattctttaaaagtcttaaaaaacatggcaccaagctgggcgcggtggctcacgcctgtaatcctaatgctttgggaagctgaggcagggagaatcttgaacccaggaggtggaggttgcagtgagccgagatcatgccattgcactccagcttgggcaacagagcgaggctctgtctc

SEQ ID NO: 179035 - DNA, 311 bp, Homo sapiens
agcttcaacttcttactctaactctacaagccagactggaagacaaatatttttttgcttttcctctatgtttgctgggtgttcattctcactgcagtagaataatgaattatccaatatatagataatagaattagaaggagggagcttaatacggaaagttctaaatagtgttttcccttatgggtagtttagccagcctttatcctttcaaattcacttaccttttcctgttctcattccaaacattaattgaaaataggtcacagtagaaattagccggtttactttgtgggtatactaagatggag

SEQ ID NO: 179036 - DNA, 670 bp, Homo sapiens
ttgtaacagtgcagcacgatattaattaggaaaaagacccatgaaataatttttaaaaaactttcaaaaggaaaaaactatttgggcttccttctgctgaaattcgcctataaacataccacgccagctagaccagcattccctttcacgtggtctgtacaacatagtactgcacaatgtgagcaattactttgatgaacacattgtttttttgtgtaaactgatttcagtttacacaatttataacctggtattcaaggccctctacaatctaccctttcttgctgctgttttgatagtcaaataacataagtgaagtattatgcaaatatcactgtggttgttaggctttgtctttttccctcactgttacctttaccagccccaggtttaaatcaaaccagtctaatcagtatccttaagcatactttgtgtttttttctttctcagcatctttgttatagcaattccacttccctggaattctctccctcccttctttcctcctatatcctttttgaaatcttactttttgaaatcagagtctcagtgatcattcacttctttgaatcagttgtaacatattttttataccatgtgttatttagcctgtgcatccttaaattattgtttgatttgtgtaaactgattgggatcctctcgacatcta

SEQ ID NO: 179037 - DNA, 465 bp, Homo sapiens
ggggtgtctagaggatcccaatcagtttacacaatttataacctggtattcaaggccctctacaatctaccctttcttgctgctgttttgatagtcaaataacataagtgaagtattatgcaaatatcactgtggttgttaggctttgtctttttccctcactgttacctttaccagccccaggtttaaatcaaaccagtctaatcagtatccttaagcatactttgtgtttttttctttctcagcatctttgttatagcaattccacttccctggaattctctccctcccttctttcctcctatatcctttttgaaatcttactttttgaaatcagagtctcagtgatcattcacttctttgaatcagttgtaacatattttttataccatgtgttatttagcctgtgcatccttaaattattgtttgatttgtgtaaactgattgggatcctctcgacatcta

SEQ ID NO: 179038 - DNA, 670 bp, Homo sapiens
tagtaactgaggtctaagacctggtagcctttttatctccttccccagttatcactatagccttataaatttcttcctttctgttcccactgctgtcactttaacctgggtcctttttagcttattgctgaactgtcataactagtctccctgcctctagtttctttatcttctaatgatggagtattccatcttagacgtgtagatactgctgctagaatttataacctggtattcaaggccctctacaatctaccctttcttgctgctgttttgatagtcaaataacataagtgaagtattatgcaaatatcactgtggttgttaggctttgtctttttccctcactgttacctttaccagccccaggtttaaatcaaaccagtctaatcagtatccttaagcatactttgtgtttttttctttctcagcatctttgttatagcaattccacttccctggaattctctccctcccttctttcctcctatatcctttttgaaatcttactttttgaaatcagagtctcagtgatcattcacttctttgaatcagttgtaacatattttttataccatgtgttatttagcctgtgcatccttaaattattgtttgatttgtgtaaactgattgggatcctctcgacatctagattgtgaaacttttgatg

SEQ ID NO: 179039 - DNA, 409 bp, Homo sapiens
gtatattccatctcaagaaactactttctttgctcatccataagcagcaactcctcatccattcaagttttatcatgagattgcagcaattcagtcacatcttcaaggtccacccccaaagaacatcctcagggtcttgaacccctccaaaggcatccatgagggttggaatcaacttcttccaaattcttattaatgttggtattttgacctcctcccatgaaccacaaatgttcttaacggcatctagaatggctaatcctttccagaaggttttcaatttaccttgctcagattcaccagaagaatcattatctatggcagctacagccttacaaaatgtatttcttaaatagtaaatcttaaaagttgaaattactccttgatccacgggctacagaattattag

SEQ ID NO: 179040 - DNA, 300 bp, Homo sapiens
aggtattaagagctgttgccaaaatcacatgaaggtaagagctctgtggagaaactggatcctctctaaggaacagatttatgcttaactcatagaaacctaattacgcaactgatcttgttttcctctttgctcagagtcaaatctgtggtctgcttttagcagggatctaggtctgtggcaaacacatcactatccaaccttcttcctatactcatcttttttcttaaatcgtaattaagccgggcgcagtggctcacgcctgtaatcccagcacttcgggaggccaaggcggacaga

SEQ ID NO: 179041 - DNA, 251 bp, Homo sapiens
gacctgttctaccataaatcattatttacttaccccatttacattatagtgcaggtccaatggaagacaaattatactgagctcaggcagactaatcaatacctgactactgatcacagggtgaaagaccaagtaagttcaattaccgataacaataagactgtattagtccctacaaattttccccacaatgaagtagtaacaatggaactaggcctaagaacattgcattgcatttttctatttctatt

SEQ ID NO: 179042 - DNA, 828 bp, Homo sapiens
ctcccagaagtccattttacagatgaggaactgtgaggtaactcacccaaggtcacacatttattaagaggcaaaggtcttatgtggatctctgccagtttgacttcaaagcccataatctaaactactatgctataaagtcttccataaaacatagtctaagggaacagtcatttaatagcgtgatgctggagtgagatcagggatacacacggttggaataggctacaaaggagcgattatgtataagaaccaatcctacctaaaaatgcaagccatgataacacaagcactacacaacaatgggaaatggggcaggcatttgaggggggaggaaattagctaacactttatatctaacactaaaatgacctccagacagattataaagttaaaacttacataaataagtaatacaattctagactagctagtaggaaataaattctttttagcctctggaaaagcattcataaattttccttaacttccttaacgttcctgaaacttcctaaggagttttataaatgttctagcaaaagaagaaatcacacggaaaaagacaaacctgtttggccatgtggtgagcagttttgtggggtggcgagggggtccccaggagcaccactactgcagacatgtgcaggagtgaccaaccgagcaggaggaagccacagcgaccagcagtgtccgtcatttttgaagaccgagaaatgacaacaatatcatgcacccattggtctcccacaggagtgctcctttggggccaggcacggtggctcacacctgtaatcccagcagtttaggaggccaaggtggatggatcac

SEQ ID NO: 179043 - DNA, 234 bp, Homo sapiens
aagaagatgagggaaacgctgtttgtcatttgatcatggttacataaagttcagaagagggctgagcgcagtggctcacacctataatcccagcactttgggaggccgaggtgggcagatcacttgaggtcaggggttgaagaccagcctggctaacatggcaaaaccctgatctttttaaaaagatgagtctgacttgggagagggggcagaattaagggtagtggccagctg

SEQ ID NO: 179044 - DNA, 134 bp, Homo sapiens
gatattccttttttatgacttttctttcaaccttctcttctatctacggtcattcagagaaggcacttctaggaaaatattgttacaaaggggaagggtgttttactataataaaaaagcataattaggccaag

SEQ ID NO: 179045 - DNA, 315 bp, Homo sapiens
tttgtcacattcttcacatttctaggatttctcacccatatgatttcttttatgtctagaaaagtttggggtgttgtcaaaagcactgtcacatcttttaggtttgtatggtttctctccagtatgaattttcttatgtcgagtaaggtttgaggaccggttaaaagctttgccacattcttcacatttgtagggcttctctccagtatgaattctcttatgtttagtaagagttgaggaccagttaaaggctttaccacattcattgcatttgtaaggtttctctccagtatgaactctcttatgttcagtaag

SEQ ID NO: 179046 - DNA, 389 bp, Homo sapiens
ggtgtggagggaaggaaggggagggctgaggaactgggttctcctgagagaaaggctgccagcctccctgggggcaacacctggcgaggtacaggagtcgcccagtccccaaccagggctaccccttctggttgcttatggttgaggactctgatgggagctgctccaactgtcctcctcttgctgggtgagagcagggctgagcaggacagctcaagggagtcggggatgagaggtgtcagccacataagtgcacatagcaagggtgaggcacagagcttctatacacccgtgatggcctgcagagagcttggacttccctccagagcaggaggagctggtttgtttgtttttgagacagggtctcactctgtcacccaggctggagt

SEQ ID NO: 179047 - DNA, 340 bp, Homo sapiens
agatgcccaggtgacttggaaggttctgaaacaggacaagagcaggaagcaaagtggtatttgaactggggagaggacagtctcctgttggccagaagtcactgctgaccccttgtcagtggtgctgctgatccatggtacctgaatgtatctgaggggctgtgaagagttgaatagacttagaggttacacctaaagacttaaaattatattgtgagagataacaattattagtaacagtaattagacgtttaaaaaatgtacgtgcatctctttattaagctgaacaatgtgattccctaaagaaataaatggaaccatgttctgtccagaaatctca

SEQ ID NO: 179048 - DNA, 850 bp, Homo sapiens
tggaagatggagattctcaccttccctgaaaggaggaaacgttcccatttccacacccctctctctgtgcataaaagggggcggagggcactagccaaactggccccctagacctaaagggacctgagacatagacgcagagagaaaagagaacatctttggcagaaaggctgccctgccacgttgaatccattaaaaattgcctagtgcaatttttgtactaaaaaaaaaaaaaaaaaaaaaaaaaaaaaaaaaaaaaaaaaaaaaggggggggcgcgccccaaagaatatatctcccccgcgagggggccacacaagtttccgcgcgccgtcccccgagttttttgtgtggaaaagagaggggcgcccctatatagagggagagaggcgtatatatatataaacagagaggagcgcggggggcgcggcgcgtttataaacagagagcgcgcggagagaggggggaaacaacgggcgcgaacacctggggagaaaacctctgtgggagaaggaggagaacacctctatatttgctggggggggggggggagaacacaaatgtggggggccaaacctcctctcctctccgcggagagtatatttaatagggccctctagagagagagaactatatatatccacaaatctttctaacgagcggggatatatatatggggggggtgataaaaaaacaaacaagcgcgcgcaatatattgcacgcggggagagggagtgagaaaaaacattatggcgcgcatagcgcggagagaaatatctgaacattttatcagaaaaacacatttttattataccggggggagggataatgttatgcttaaatatacatcg

SEQ ID NO: 179049 - DNA, 330 bp, Homo sapiens
agggacggtagatttaatggtgtgatgagaacgtctgaaagctagatcgagctggtggctggctgcacaacatcgtgaatacacgaaacaccactgagtggtacactttaacaccattacctataatgtcaattcctccctccctgtttttctgacaccagatttctgtgcaagggtagaaatctgttcattcactgaaatgagaaacataggaggaggtttgtcaagagaggggaggaaatggtgatgggcttggtattaaatgccttttgttagggacaaaaaatacattgctttaaaagaatctaccgtgcacggtggctcccgcct

SEQ ID NO: 179050 - DNA, 383 bp, Homo sapiens
tgacactagagcggacagtaataggagtacctgagatgtagcagtaatatcatgttgccaaatttctttagatcttatttccttaagaaattgaatggtcatcctaggcccagcttcctctgtgctcctccggccactacgtgtccggccacgtggccggacacgtatgctaagacttcaccagtcaaagcgaactactatactcaattgatccaataacttgaccaacggaacaagttaccctagggataacagcgcaatcctattctagagtccatatcaacaatagggtttacgacctcgatgttggatcaggacatcccgatggtgcagccgctattaaaggttcgtttgttcaacgattaaagtcctacttccggcca

SEQ ID NO: 179051 - DNA, 968 bp, Homo sapiens
ctgtgtgctgtgatgctaccaagctagaagaccagccttaccagatcagatggcctgggtttgagttccagttctgcccctccctggctgtgtggccttggggagttggttaacctctcagcagctctgtttctcctctgtaagggagcccaccacccaaaacagatgtgagggatgaattaccccggcacgtcacgtttaatatatgcttgcaattgccctcgttatgaccgccgcacctgctctgcccatcacctcttttaatcctcgccataagccagcaagttcagtaggttctcattttcgcaaagaaacaaaggctcagcgctggcaagggaaagagctgagtccaggtctggcttcaaattcatgctttttgaccctcacagctgcctctggtccaggcagctgttctaagtccgacaccccccattcattcctatctcagagtcaagcgtggtgccataacaattcatggccagtggggaggcttaaaacaaaaggaatttaatctcttggagttcgggaagccagaagtcggaaaccaaggtgttggcagggtcacgcgctctccagaggctctagggatggatcttttcttggcccttgcagcccccgctggctccttggtttgtagtattaggttggtgcaaaagtaattacggtttttgccactggatgtaatagcatcacttcaacctctgcctctgttttcacaggttcttcctccgggtggctctgtgtgtcttcttttctgtctcattagatttagggcccaccctaatccaatgtgagctcatctggatcctgatctgaattacccctgcaaagaccttatttccaaataaggtcacattctgatgttttaagatgcacatgaacttcaggaggccacaaacccacaagaatgaatggccacagccttgcaagcttcctgacaacaatgtcactctctccaggggcttgag

SEQ ID NO: 179052 - DNA, 180 bp, Homo sapiens
gtggcatacatacctgtgtccacatggggcaaagtctgacagtgcagaagaacagaatcgctggaatcactttaaatttttgctcggtttcttcttgtcttcctagtcatcatcgcagttactgctgatggagactgtactacatcccaggccctctaatgcagcggtccccatactaca

SEQ ID NO: 179053 - DNA, 1018 bp, Homo sapiens
ggccgactctagagtatccactcgccttttgataggcaagggagaatatgaagaattgactaagagataaatcaaaagtatccaggaatggaaaaaaagggttatgaaaggatgagtagtgaactctagcactgtcagagttcaatcagagaaacagaatcccttggagatggaaccacagttccagctgagtgaaactgacatacgacaaatccatcacaaccctgcatcacttttaatggaataactgaggctaagcaagtgtggagttagaattctcaaactaacaacgacaacaacaacaaaaaaaacctgaaggtgggaaaaacaaaaacgggaaatataaatactaatttcctcaacttcatagtggagaggacatctgcctgaacctgataaatcaagaaatagaggcttgagtatatcacttaagattataaatgtaaatactacaagatctaaaaacacacataaacttttcaagttatcacagtgaaagcatgaaacacagaccaaagaaaacagaccctatatcaaaagataaaccatggtaatgaatttaagaccaaaacacatttattttgtcaataaacataaatgaaataagctcacctactgaaagaaagatgcccttagtttgtatttaaaacatgtcccaaatatgtgatgtacaaaataaatctgtgtaaataattaatctaaaaattatgatgatgaaatcattttactgagataatgtttaaagttttgctaaaagaaaaatgcactgccttaggcagtcatgcaaatacaaatggaaatagattagttgagtattaaacttaagtgagaaaagaactgtaaaataattaagaaatgatgacgtaattagtaaggatataggcagaaaataataaattagaaaaaacaaaactagatctgctaaatccaagagctcttaaaaaaaaatcaaaggtcgaacaatgagaaaaagcatctaaagacaattagcaatcagattggggaatgacaattgata

SEQ ID NO: 179054 - DNA, 130 bp, Homo sapiens
tgccaaattgcttatcttggcactaggcagccctgtattctatatgtagacagtgaagactgagatcatggatgccacacattccagtttagtggtcattaagcacctgtcatattttggacatggggtt

SEQ ID NO: 179055 - DNA, 707 bp, Homo sapiens
gtctcctcaaagtggctcctgtatttttttcacaatattgagaatgctcaagcggcaaggcttactcatatttcaatgtaacagctagaacatattctgagtgagatataaaagatgtactggtactctgtcatttctatatcatctagaatatactcctttccacaagtttggataaacaagcaatgtatgttgattgataactccttacaagcatctttcattctgtaaccacatggtgggcaccaggcatagtgttgtgcactcaataaacacccgttaagtggaaaggaattgagactgcaacagtgggatgtttttcattttaatagaaaatttccattcctaccactatcctgagagatctttccataccaactgagttaagtgtagcactggtgttaacaattccacatccatatgaaatcatgtgtatatttcacattccttctatcctcttgtctttagcctgacttatttattagctcataaaagcctggcattatttttacctatcttgctttgtatatcacaaggtctcttcaggtagaccttgattttccttttgtagactggttttctttaaaaatgagggaaggcaaatatgtatatagaggaagacatgttcttaaaatgttgccaagataaatccagttcatgtttacagtaaccttccaaagacagcatgtaacatatgaacaaccaag

SEQ ID NO: 179056 - DNA, 436 bp, Homo sapiens
tcagacggagtctcactatgtcaccgaggcttgtgtgcagtgttgcagtctcggctcttgtaacctctgcctcccaggttcaagcaattctcctgcctcagtgtcctgagtagctgagaattcaggagcatcaccacacccagctaatttttgtatttttagtagagacggaatttcaccatgttagccaggcttgtctcgaactcctgacctcagatgatccatcggcctcggtctcccagagtgctgggattacaggcgtgagccaccgcacctagcccgatctccctgtatttctctccatgtcctggtctctgggcctctcacttttccctcaccgacactcaaacgactgttcacctggactagactctgagctcagcatgtgacatgcacggccttgctgtgggggaggccctgatacgatgcccacttc

SEQ ID NO: 179057 - DNA, 400 bp, Homo sapiens
ttggctttagcccccaccctaatccaatatgatatcatcttaagtaatgacatctaaaaagacccaatgtccaccaggcacagtggctcgtgcctgtaaccccaacactttgggaagccgagacaggaggatcactgaaggtcaggagttcgagaccagcctggccaacatggtgacaccctgtctctactaaaagtacaaaaaatagccaagcctggtggcgggtgcctgtaatctcagctactcggacggctgaggcaggagaatagcttgaacccaggaggcagaggttgcagtaagccgagatcacgccactgcactccttcctgagtgacagagcgagactccatctcaaaacaaaaacaaaaacaaaaaccctatgtccaaataatgccatgtt

SEQ ID NO: 179058 - DNA, 218 bp, Homo sapiens
ggaaggggctgcctggggaggctgagagagctggggtaggccctgggtgggggtaggggaggggagtgagaggccatgagaggcagtgaggctgcctcacttccttctttggagatgtctgcctggatttggggttctgtatcttgtctctagctgggttgttatgacaagtgggttggggtgggaggagaggtgctgaaacatcaaagggaggtccc

SEQ ID NO: 179059 - DNA, 447 bp, Homo sapiens
agttagctcatttcagtttggaaacaactcacagacagttatataggtgcttcttcactctggcatccaatcttggaaggattttgccttgaaaaaaaggcctgctatctctctggcacttaacgaatctgaagtttataaaacaaccatctacccttttgagagtcattaaaataaggtgggaaaatctttggtggcctgtttatacacattttaaaaacaaagagatctgtctagaatatattctcaacacaaagcctttcttcctaatatgtgcttttaactctgatctcactgaaactacatgatttctacagtcttgcatatctggtaagaataaagttcacacagaataatattcttatactcattatttttactgcagtatgcagctcttactatgaattggtggttattacttgaaaaaggaaaacaaaacatcactgg

SEQ ID NO: 179060 - DNA, 555 bp, Homo sapiens
gctttggggtctccatccgctgggcctgggcttcctgctgtccaacgagggaccctaccatatcagaggcacacaccggatgttcgaggcgtaacagcccctgggtggccagaccatcctatttttcaagaaaggccagaaatgcaggctttggagtgaaacttcttttttattttattttatttttttgagacggagtcttgctctgtcgccaggctggagtgcagtggcgcgatctcggctcactgcaacctccacctttgggattcaagcgattcttctgtttcagcctcccaagtagctgggattacaggcgtgcaccaccacacccggctaatttttgtattttcaggagttcgagaccagctggcaacatggtgaaaccccgtctctaccaaaaatacatagttagctgggtgtggtggcgggcgcctgtaatcccagctactcgggtggctgaggcaggagacttgcttgaacccgtgaggcggaggttgcagtgagcagagatggagccactgctctccagcctgggtaacagggagactctgtctc

SEQ ID NO: 179061 - DNA, 277 bp, Homo sapiens
atcagttaaaggaaaacagaggacaacctacagaagtgccaagacccaggattaggatgggtgtgcaagatttgagagggaaaaatctaggatagggctgaaatgtttccttgttttccttttataaaactggaaatggaggcccaagttcggcttgttcatttccctttataacgataacctgctattatgttaaactccaggctgggcacggtggctcatgcctgtaatcccaggattttgggaggccaaggcaggagaactgtttgagcccagg

SEQ ID NO: 179062 - DNA, 554 bp, Homo sapiens
ggctcggtaccgatacgctcctagacggcagagtattgagaaaatcttcataccatttgcttgatagatagaatatatatggatatatataactatgtatataaaaacatacctatagatatattgaatctgtatgttttaattctgtgtagacacagtccattaaggagttctgtgtgtaattagtattttataatgttgatgtactgtattcactacccaatagactcaactggtattgtggttatccttcttaaagcattgtatctgcttctaaatatttcttccagcctcctcctctcttttgattttaactaaaagaggaaagcaagaggctagtatgggacatttccttccctgtagacacgtgtgcttggcattcctcctccccctttaccatcatgttacttgttgcgggaagtccgggaccccgaacggagggaccagctgaagccatggcagaagaatgtggattgtgaagattttatggacatttattagttccccaaattaatacttttataatttcttatgcctgtctttactgcagtctc

SEQ ID NO: 179063 - DNA, 240 bp, Homo sapiens
ggctgcgggtttaggggaggaaggccacagaggcccttctcacctcatcctgtcagtcagccggtgtgtgatgtcccgtcagcaggtgtgtgatgtcccgtcagcaggtgtgtgatgtcatgtgacttctcgctggtgtgtgatgtcatgtgacttctcgctgacgatattcagcccgatcatctgtctctgtgtggttttagttgcatctccctgcttttgaggaggactggagcatca

SEQ ID NO: 179064 - DNA, 414 bp, Homo sapiens
ctgaaacaagagtggtcagcataaggtgtcacccacgcagcctcaccttgaatttcaaccacactaaaaacgttcccttccctgtaaaattctccatccacgtagactcatatttgcacagacgttcactttaccttggcatgcccaaccagatggcatttaaggtatccaggctaaggagcagctaactcagaagctgcactgacctctccagagctctgtcagcgtcaggggcagttagcaagcgcctcccttactccctccacattctcttccaagcctgtcactctgccaccaaatgcactgctaggctgcagggcagagactttttatcctcaggagaacgaggacttcaatgcctaaaacaaagtccttgtccaaaaaacatgttttgaagcatacaatacaatctta

SEQ ID NO: 179065 - DNA, 449 bp, Homo sapiens
tagcagggctgcagctgatgtacactttgcatatccaagtgcatagtagggtatgggtggtgtctgttaaagaaggagcttagttgatggattggttttgactgatgagaatgttggtgcatgtcctatatttcattttcccactagtggatgcttctgttatttccagtcctttgctgttataaacatcctggacatgtctgcaagtgcccttgggcaagacattctctagagtatctctctaaaagtggaacactgagcagtaagacattcacattttcagcatgcctggaagctgtcaagttgctatccaatctgtgactctccctctagccttgtatgagagccctgatgtctccaaaccttcatattatcagacttttcaattttgccaatcccagagtgtgaaatggcatcttgctttaatccctctcccacgatgaccccta

SEQ ID NO: 179066 - DNA, 273 bp, Homo sapiens
atgggacagacaggtcatagggtgtcccggagagaacacaagcttgaggcctcgaccccctccctgaatgtgaactcagcaatgttacctctctcagcctttgtttcctcttctgcgaatgggaaaatgaacagctcctaccatagtaagctatgaatgctgaagcaggtaatatacaaagcatttctaaatatggactcaaaaattctttgctttgggggctgaggaagcagaacacacaaagaccccctcgtgggggaaaataggagcatt

SEQ ID NO: 179067 - DNA, 342 bp, Homo sapiens
tctggctttagaattagtaaccaaaaaattgcttaatgaacacagaatcagagaataatgatgccttaagggttgtttgttcataattatagtagaaattctcaacctcccacctccctttttacagagtccttacaaccagagatactgtacacttcagctagattctatgtctttattcctggagtgtgttgaactgacatctcttctcattccagcaatcttctatgctttcgctctgatgctcagtcttatgtttaatttttcttttgatatgttgctgtgcacggattttgctctgggccacttactagtatgcactgatgttataattcagagttg

SEQ ID NO: 179068 - DNA, 280 bp, Homo sapiens
cttatttttcttcccaaagctttttatttttagctgaattgcaatgagattgctttctattttccaaagcatcaaagttggacattttcagtgggaaaattacactaaaaccaggaggatataaacttaatgaaatctttagattttaggaaacacatacttttccttttacttgttctctcaaacttcaattcaatttaaaagaaaatgttccatcatctctgaggcttcatttaattttccttactgcactttacagtgttagattactacttctagc

SEQ ID NO: 179069 - DNA, 326 bp, Homo sapiens
ctggcacagcagctcaggagctcccatcctgcaagttacataacctcccaagccatgattttctcatctgtaaaatggaataacaacagtacctcccccaaggttgtggggaatacacagaaacagccgtgctgtgcccagcacttgggaaaatagcagtggctgatcctaggatagtaatattccttccccttctacatgcactcaccaagccagaaccggacacctactccatgccagccactgtgctgggttctcagggtctaaggagctgaaagtagtacccccttctgcctctataacccctcaagagcatgggacggcgt

SEQ ID NO: 179070 - DNA, 548 bp, Homo sapiens
gcccaccccaattttccattagtataaacaatcctgcaaataaatacttttttcttcttttggataatttccttagggtaaattgtccaaaatactaaatcacaggggtcaatagatacaaggattggtatattccgtcaaattcttttcaaacagatttaatgctaccagcataatacagtaatgcacaaatttcatggtattaggcaatgccattttaagatttccaattgaaaagatggaaaatgatacctcattttcaaattttgcatttctcaattggtatgttaaagtttttcccattttactaattttatttccactcatacgtattgtctatttttttgcacatttatctatccaaacctagatgcttccatcacattctatgcagtgcatggatactaacaatattaatcccgtgtgtaataaacttgcaggtatttttctgagtgttttatattttacagcattctatacagtttagcttttatttattcaaagttgtaaatctgtccttttgtaacttcaattaattcaaagcttac

SEQ ID NO: 179071 - DNA, 780 bp, Homo sapiens
  misc_feature (715)..(715): n is a, c, g, or t
cgtgaccacgcctggccgcagtcattattttaagtcacaacaaagttacgtgaaatttcactatcatgtccttcattatcatgttttccacttccagaattcatgagagatcaattgtagagatacttaaaaaccactatctatagagtaataggcccttatatataaagtagcatctatagagcaactagagtcatgttatctgtaaggatgcttagaaggcattgatcctgtgtgctggaaaattgttggacatcatcaggaaaagtaggagggacaaagtaggaaatgtattctaattattatagtgattaatagtgattgatatttgagtgtgtgcaacatgccagacattgtgctatgtactttatgtgcattgtctgtctaacccttacaactgttacaactgcccattttgtttgttaactgagatttagaaacattaaatagcttgtccaagatcacatagccagtaagtgttagagatgggattgaaatccagatctgtttgattgcggagcctgaactttagatctgaatcgtaatgggatttaccaaattatacccattaaacccactgctgtaaatcaccaatcatagttacctaacctcaagtaagaagaatagactagaattgatttatgcacggtaaaaatgatacatgctgaaaaaagatcaaactttttttttcaggatttgtcttcttcactccagnctgagtgacagagcaagaccccctcaactagatagagaaaccgtcgaattcgagtaatcctcgga

SEQ ID NO: 179072 - DNA, 302 bp, Homo sapiens
cgagttagacaggactggagagatccaggtgggtactctgagcatgaagatgactaatttcatgaatgtggataagctctctaggtggagagacagcaatgggcctggaggaaaaataaactccggagaaggagagaaaggaggagtcaatgaaaaaagggctcattcatcagaaaattaagatggggttaacaaatgggtagagtgggtaagcaggacaaacaaggccctggtcttggagctctaagtggggaagagagacattgaccatatagttagggttgtgctgggtgctacaggag

SEQ ID NO: 179073 - DNA, 240 bp, Homo sapiens
agaatcctcctttctcccagttgtttctaccatcatgtagtatactcacatatactaaagatttcagctgtgtcttctgacaaatagcttcatgcagatatctccttttctgtaatctcacctgccttcttattctatattttgccagcaccctggacgagtattctgtgaaattcttcttccctcagcttcagggttagaaactgtgattctctttcctcctggaaaatcctttccctc

SEQ ID NO: 179074 - DNA, 462 bp, Homo sapiens
ctaatgtaggaaagaataaatgtttatctcctagtaagccggtaagaagaatttcaaatttaaaacattaatttgatctagcctgggcaaaagagcaagaccctgtctctaaaaataaaataaaaagtaaaacattaatttggcaggaaattggtctcctgtgccttactgggatggggctgataacctttgtgatctcatttccctccttaattaaattaatacatttggaatttaggatatataggttgaaccatagccaattttttgactgtttttgacactcaaaacagcagtttcatagggttcaatccaacagggtcaggcaagcttccagagagctgaggggcatggaggcctctctacatcctaagtaaggctaagtggaattaaacccaaagttcagatgtcagctcagagctgaaaggagctttggtgccttgcctgtgcggctcattagta

SEQ ID NO: 179075 - DNA, 552 bp, Homo sapiens
aaagtatgatttcaataatcgcacggtgtattaccatacaaagagattctcttccctgcttccctacaatgctcaaacggggagaaaatgagaaaaaatcttgtagggaatacactcgatagacacagtgagttccattttatttagagtccaattgatgaattctggtagctcaattaagatagaatcaggcctcagtggaagtaaagtctaatcacagttcgatatgtacttttctatgggagcttctcaggagagatggtttgaccacacaagtccttgtacactagtgagtggtgcaggtattggcaggtgagactttggagaacagcttgaaggctgacaaagagtagtcctgctgcatcctgaggtctcagtgtgtcttgtcaaagtcctggggttaggtcaggcatgggtggttcacacctgtaatcccagcactttcggaggccaaggcaggaagattacttgttggcaggagttcgagatcaacctgagcaacttagtgagaccccatctctgtaaaaaatataaagattagctgggtgtggt

SEQ ID NO: 179076 - DNA, 459 bp, Homo sapiens
ttccggaggtgggggcggggaacggtctcgtagcggggagtggtgctagttcctcttccctgcgaccgctcgggccgcctgcgcgttcgcgtccccagacgctgcaccccagtttgctgcaacgtctgcttggagtcgcggtagcgggtgctgcgcggagtctaggacgacgcgagacgccatttgcatcccccctccctcctgcaggttggcgagggcggcggtgtcgcccgccgcggaagcgtattcctggcagtgacactgattagatgctgtgtcgatacgtgcacagaatcggggtgggccttcacctctcgtgtgcgcacacactttctgttggaaaagttgcgatattttttctccccctctcgccgcacagctgctgtctcccgggcggaattaggcgaccacgtttgctcaacccgaaggagagaggatcgcgcgggcgctgggcggccg

SEQ ID NO: 179077 - DNA, 391 bp, Homo sapiens
gcatggtcctggataccctacctgctgtgccatttaattttcacaacaaccgtaaaaggagtaaaatgaagaaatggaggcttaaaggggttcaagagaaatgggaagcaaacatcactatagctgaattggcctcacctggatcaaaatgaaatgtatttctctaaatgagacaggctcccccgtaaaaaaaggaaaggaaggaggttcacagtagccaagaggtgtaacagctaaatgtccgagggcagatgaatgaaagaaaatgtggtaaaccgtggactactatttacccttacaagagaaggaaattctgcagggtgacaacatggatgaaccttgaagacatcatctgagtgaaatgggccggtcacaaaaggacaaatactgc

SEQ ID NO: 179078 - DNA, 240 bp, Homo sapiens
gccaagaggttagatcccaggactaatatttggctctccctttcaaagattagatcccaggactaatatctgacaatccctttcaaagattttgtggttataggtttgttgaaagcataagtaaaacctgaatgtctgttggtagcagaacatggataaaattttggtatcttcatataatggatgttgtaaagcagataaagtgaataaaatagaactatatcaaacaaaattgatata

SEQ ID NO: 179079 - DNA, 138 bp, Homo sapiens
cctcggtccgtggcggacgtaataggagtacctgagatgtagcagaatggtaggattggggtttgaacccaggcagttttgactctatcatgtagcttcttaatgattatattatactgtcccccaagttgtatacta

SEQ ID NO: 179080 - DNA, 363 bp, Homo sapiens
attgggagggaggagatagactttaaaatagtttaacttcagcataatgattaattctaaattttattaaatcctaataacttgcagatatgttacctaatgtgtatgtttatgtatatattaaatgtctctgacatacataggatgcatacatatctctgacatacatacatattttaactccattttattgatggagaaagtgaaagactaatggagttgtaaaaattagtttgaaataagaggaataggatctgggtttctccctcctattcaagtgtgtctcttctggttattaacttttggagatatagatttttaaatgaattacattaatacatttttaaaaccaaaatttgtctg

SEQ ID NO: 179081 - DNA, 312 bp, Homo sapiens
ccttaataaaaatggttattgattcttaaatgactccttagtatggactttcattttgcttctgtccctgcaaacgtgacatgttgaagttccaacttccaatatgatggtattgagagatggggcctttgggtggtaattagggttagattaggtcatgagggtggggctgccataatgggattagtctttgtaagaagagacatgagagagtttattctctctctctctcctccacgtgagagagtgagaaaatgagagagaccgagaaaggggctggctagctataagctgggaggaaagccaccaccc

SEQ ID NO: 179082 - DNA, 184 bp, Homo sapiens
tgcctttgctggctagtgtttctgacacattagtcctgactaatgacaacaggaagataattaactctgattttgatatattacatttgaaaagacttctctagatggcaaggagctcaagagaaaaatcatggctagaaatatagatgtaaaagccacctttagataagtggttgttaaagct

SEQ ID NO: 179083 - DNA, 599 bp, Homo sapiens
ttaaggtcggttgttgatgagatattggaggtaggatcaatagagggggaactagaatgatcagtactgcggcgggtagcctaggattgtgggggcaatgaatgaagcgaacagatttacgtacattttggttctcagggtttgttataattttttgttttttttttcttccccagcttaattgttgctttagtttgggatggagttttggagttaccttttccattttcagcctaccccccacatcagtttttgagtaattactctgtggaacaacagatgtgcctggcccatcttgtccttttcctgcagtacctctaccattagccatttctccaaaggacattgttctttctagtggaggatggaatttaaaaaccaagatctgggtgcttattgctaaaggttgtcactgcctcaatccctctcaattgacagttaggaaatacatgtgtgtatgtatacatacacacacacacacagaaatacacatgtgtacacctatttttgtattggtctgtctatacatattttttaaacaatgagtttacgtagacatttcccagtttcaatcttaaccccatagcctttctgttttc

SEQ ID NO: 179084 - DNA, 493 bp, Homo sapiens
cttctacggatactcaaaaacaccccctctccaagtacatcaaattgagaattaggtttcaatgtataaagttgaggtgggggacaaacattcagatctataagcgtcaggattgtctgtgattttaaatcattgatgacctcactaaaaagtaaaggtctgaagaaggtgaaaacacaaatggtgaggataccatggagagtggtattccagggtagagagagctacaggggaaatgtccttaaggtagaaacatacctgatgtggtaggagagaaacaaagaagtactgtggcaagaggagcgtcaccaaataacacagtcatagaagagtaagtcaaagaggtaatggggtggcaatcatctggggacctccaaaccattttaccattgagttttaccctgggatagatggaaagctactggaaactttgaagtaaggagtaatgtaatctgaactcatttttaaagggatcattactccatctgttgtg

SEQ ID NO: 179085 - DNA, 818 bp, Homo sapiens
tctcagggacacacttgccactgctacccacagtgggtagcaacaaggactaaatgaactctttaggaatactaggtataggaagactaggtataggaagattctcatttccccttgttgcactgaccactatgtctcccatgcatactctgggaaattttaggagccctggtggagatacacgttgctgatgtgcatttgattaataggttttactatgtcttgcaataaagacgtttagccttaagacccttgaatggaactccagctgtgatagagctgccaatgccccttcctctctcctcccttatcacctagtgttgcttaaagaggaggccattgagggcacacttgatgccccagacagcctccctctgttgctaaatcattgttattgctctatatactgccttctcactcgcttcaattaaaaattaccttcaccagctcctgtgccctccacctgggggagacttcatgatcctctcagcactgactgcaaacatcagagaaaaaaacattttctcaccaaaggtgttcatgttgagaagttttaatttctaccccctacagctcaaaagaatcaatgtgaatttatctgcagcttaaattcaagtgaaacttcattctcatgcaagcatatcagacttattctggaacctctagaactggacttgaattccctgcaggtgccagactggtgggtgccctccctgcctgccattaaacttttcttacagccactgtccctttatctgtgacttctgagtcatccgacggatccattagttgttcaatgagaagttcacagatcttgt

SEQ ID NO: 179086 - DNA, 575 bp, Homo sapiens
tgtgaggtcgtctagaggatcccaactcagggcgagctgccaatgccccttcctctctcctcccttatcacctagtgttgcttaaagaggaggccattgagggcacacttgatgccccagacagcctccctctgttgctaaatcattgttattgctctatatactgccttctcactcgcttcaattaaaaattaccttcaccagctcctgtgccctccacctgggggagacttcatgatcctctcagcactgactgcaaacatcagagaaaaaaacattttctcaccaaaggtgttcatgttgagaagttttaatttctaccccctacagctcaaaagaatcaatgtgaatttatctgcagcttaaattcaagtgaaacttcattctcatgcaagcatatcagacttattctggaacctctagaactggacttgaattccctgcaggtgccagactggtgggtgccctccctgcctgccattaaacttttcttacagccactgtccctttatctgtgacttctgagtcatccgacggatccattagttgttcaatgagaagttcacagatcttgt

SEQ ID NO: 179087 - DNA, 475 bp, Homo sapiens
gactagttctagatcgcgagcggccgccctttttttttgcctcagcacacattttagttttctcattctctcgctgttagatagaatattcttatgtatttttttgctgttccaaagttagtttcatctgtttgacctttttgtaaactgattcttacatgcatcttacttgactgctaaattaattttttaatttgcccacaccgtgacaaaaaggcagtcttccttatgagcttcaagcgtgaagtcccggagaaagacactgattggcccagcttgggtcatgtggccatcctgaagaaaagaaatgggctattatgatcatatgcccatccccgagggtgaatggacagtgggtactgtggtgacagctctatcacaacaatgtgagatgtgaaatacaggtttccaaaggaaggaagaatgttgggtaggtaaaaaacatgctggataatgcctataatcccagcattca

SEQ ID NO: 179088 - DNA, 983 bp, Homo sapiens
ttcaaaaaaccacagatgctttcagtccagtatatcctagaaatatagagctctactttgtgcaatgcactggggatacagtggcgatactgtccttgtcttcaaggagttcggagtcctagtataggagacatacataggagaagataattttcacactgcagtggttgtagtaatagaatgggagtccaaaggggagttccggagaggtcaggggtgacttcctggaggagatgcccaagcttggaggctggataggctttgttgaaagatggtacacaagagtgtgaaacaaaattgtgtgtgcagggagcttaaaatacaaggctggggaaagaagttggagaagcaggaaagcccaggccctctagtgtcttacggaacatcctgtggaggtgagagctgacttgtaggtggaagcagctctttggaggtttgatttggaaggtgaactgagaagaaggtggtgatgcaagccggccgtgctgaagccaggatgaattggtgtgactgggcttcagttaggctggcatagcagttgagagagcttagcagtgggcagcagggcactgttgggggcggtggtgagcggtggattctggctgtttggaggcagacagggtggaattcgatcattgattggacgtgggacagagaagggagaagagaagactcatctaggatgagtcccaggtttctggctcagtcaactggggaaacaaagtcacagagctagggagtagttagagaacacatctgggggtgtgactcatggtcagttttgggctcgtcagttttgagatgcccaaatatcatgcagatctgtcccacctgaaaatggagaagacacgggaaaggagaggagtaaaaactaactccttttcacaaagtggaagttaccagaatgtgatttcagaggccccgggggatttatcatgtgactactgacccatcccacctcttgcccctgcctgttgcacagt

SEQ ID NO: 179089 - DNA, 212 bp, Homo sapiens
tagaaaatgcctcagtcagccactgatgaaaatcaatggagactcacccaacagcagcattgcagcttctcccaggtcacctcgcggtgggtttctaaggcatgagaggaggtagtctcctcttgtttgaggaggcagtcagcttcctgaggccagggcactcccttacaagaggggttatcatttgcctccaccgtgcctgttccattagt

SEQ ID NO: 179090 - DNA, 327 bp, Homo sapiens
ccacgatttgctggtccgtgaaatgagagggaggctggatcactagctctttaacggtcttccagctctagattcttatgagtctatgacttttacaaagtggcagatgatttctgttaggtgccagttaaattactttaacacggcagttagtgatgtaggaactggtgtagagtgagcacagcttttgtttttttcaatttggattcattcatgatggagtctgaagatgtttctcaggtttaaaagatagttttccttcagtggtagtatcagttactaggctgtgaccttttggaatgaatgtagcctctaacatcttcctat

SEQ ID NO: 179091 - DNA, 440 bp, Homo sapiens
tttcttttccttatcttcactacggcgctcattctatgtctgactcttgagtgtaattagtgtaagtcctttttatacactcacgttctttcatcttccaacaactcttgtggttcctgatgaggaggcaccacgatgatgattccttgtctgttccagaagggctcccggcccttcacttggggagtttgctggaggagagctgggttgccttgctctgtcagccccaagttgtaaagtgtcacagaattggcagggagggttcgtgggtcactgattagtgtttatacttctccagcaaggatggaggctgggggagggctgggcagcctcaggagtgccaccccctctatgagcaaacagctcagtgccagccggtcaataggatgtgggtcaaagctcatgctgcccctgatgtccaagtgtggagctctgtcctt

SEQ ID NO: 179092 - DNA, 1668 bp, Homo sapiens
ggtccgggcgcccgcgcagaatcagctgtctgagctgcccaggcggcgggggagcagcgagcgggcttcagcgagccgcaggaggcacaggcctgtcctgggtccccgcaggtcagtgtgaaggcgtgcgctgccggcggaccctgggacaggggtggagggggctggcagtaggattggggagggggcggagaagggatccggtagattggggaggagggggatgcggagtcgcgggggcgggggcagtggagggagaacccccgaagcaagcctggctcgccttctcgacgcccccttgcactgagtcctccatccattttagtgctggaaatggggggtgggggtagcgaccccgcagtgcgacagtgaaacgtagacatattctggaaataaccccttctcacaatctacacccatggaaacacttgatctccgcaaaaatgaggtggcgctggggcaggttgcctccggggaagggggacacagagacaaacgcagtttggaaagcatcctggtttggtgcccgaggcctggaaagaaatggcggctggggtgcgggggaggtaggggaggaaaacggtgggtaagcagggcctggactcaggaaagggaaccgagtccctgtgagcccgctaagcgcgcagcccctgcccctgtctcctgtctgtccgcaggtctgcgcgtctgttgttcccagcgctctgagaggcctgaaaaggaagagcaacctgtccagaatccccgcaggaaaggaaaaggaggggaaatctcgacatggaaaaactcttcaatgaaaatgaaggaatgccttcgaatcaaggaaagatagacaatgaagaacagccaccgcacgagggaaagccagaagtagcttgtattctggaagacaagaagttagaaaacgagggaaacacagaaaacacgggcaagagagttgaggaaccgttaaaggataaagaaaagccagagagtgcgggaaaggcaaaaggagaaggaaagtcagagaggaagggaaagtcagagatgcagggaggatcaaagacagagggaaagccagagagagggggaagggcagagggtgaaggagagccagacagtgaaagagagccagagagtgagggagagccagaaagtgaaacaagggctgcaggaaagcgcccagctgaggatgatatacccaggaaagccaaaagaaaaaccaacaaggggctggctcagtacctcaagcaatataaggaagccatacatgatatgaatttcagcaatgaggacatgataagagaatttgacaacatggctagggtggaggataaaaggagaaaaagcaaacagaaattgggggcgtttttgtggatgcaaagaaatttacaggaccccttctatcctaggggtccaagggaattcaggggtggctgcagggccccacgaagggacactgaagacattccttatgtgtagtgtccctggcaggcatttgtcaggccatatgttttaaccttatggtaatactttgctttagtcgttcctcctgctaccagtagcgttttgacccacctgccagtgtttgcttgctctatgtttcagtagcagattttcacacatgtgcattgcagagacgtcatgattcgtggaaaaataaagcagcttataatatcaaaaacaaaa

SEQ ID NO: 179093 - DNA, 1102 bp, Homo sapiens
ggtccgggcgcccgcgcagaatcagctgtctgagctgcccaggcggcgggggagcagcgagcgggcttcagcgagccgcaggaggcacaggcctgtcctgggtccccgcaggtctgcgcgtctgttgttcccagcgctctgagaggcctgaaaaggaagagcaacctgtccagaatccccgcaggaaaggaaaaggaggggaaatctcgacatggaaaaactcttcaatgaaaatgaaggaatgccttcgaatcaaggaaagatagacaatgaagaacagccaccgcacgagggaaagccagaagtagcttgtattctggaagacaagaagttagaaaacgagggaaacacagaaaacacgggcaagagagttgaggaaccgttaaaggataaagaaaagccagagagtgcgggaaaggcaaaaggagaaggaaagtcagagaggaagggaaagtcagagatgcagggaggatcaaagacagagggaaagccagagagagggggaagggcagagggtgaaggagagccagacagtgaaagagagccagagagtgagggagagccagaaagtgaaacaagggctgcaggaaagcgcccagctgaggatgatatacccaggaaagccaaaagaaaaaccaacaaggggctggctcagtacctcaagcaatataaggaagccatacatgatatgaatttcagcaatgaggacatgataagagaatttgacaacatggctagggtggaggataaaaggagaaaaagcaaacagaaattgggggcgtttttgtggatgcaaagaaatttacaggaccccttctatcctaggggtccaagggaattcaggggtggctgcagggccccacgaagggacactgaagacattccttatgtgtagtgtccctggcaggcatttgtcaggccatatgttttaaccttatggtaatactttgctttagtcgttcctcctgctaccagtagcgttttgacccacctgccagtgtttgcttgctctatgtttcagtagcagattttcacacatgtgcattgcagagacgtcatgattcgtggaaaaataaagcagcttataatatcaaaaacaaaa

SEQ ID NO: 179094 - DNA, 247 bp, Homo sapiens
tgctgggattacagatgtgagccatctcgccgggccagaggtatgtttttatttttagtttaccagtttaggggtaagcttttataagttacgtgaggagacaaaccagataaatgcttgattggttgcagagatgcagttgccttatttggacttgtcactccgaaataatagaaaggtcaagatttcagttggaagagtttattcaagcggaaggatagcagtggcccatttgggaaaaacacag

SEQ ID NO: 179095 - DNA, 736 bp, Homo sapiens
atggtgtacatgagaagttttgatacaggcatgcaatgtgtaataatcacatcattgatcaccaaggaaatgcaaatcaaaaccacaaagtacttttttaaagtttatggagtcaaatctatttttccttgtcatctgttttcttccagtacttttatgcttagaaagtccttctgcatatagaggacaaataaacatttattctttatagttattttatggattcactttgtttttacatttagttctttaattcatctggaatttactatgacaagtagtatgaagacaaaaaaatcgatccttattttgcaccaaatagccaattgtcacgtaattgtttatggaataatacttccttttacctctgattttgtaatgctgagtttattagacaacaaaatcttatatattctaagatctgtttctgggctctttccattccattgaactatgccataccattttaaatattgtagttttacatttttccttggctattttgacctgtttattcttcttgaacttagtaggcccaccgattaagattttatttggaaaagcagtgtctctgcttttaatgagctgagtgaggcaaatcacttaacctctccatgcctttgtttcttcatctgtaaagtggggaaaagagtatctccttttgcccaagttccagggaaattgtgaggatcaaatgagatggttatgaaaacattttgaaaaagtaaaaaaaaaa

SEQ ID NO: 179096 - DNA, 543 bp, Homo sapiens
atggtgtacatgagaagttttgatacaggcatgcaatgtgtaataatcacatcattgatcaccaaggaaatgcaaatcaaaaccacaaagtacttttttaaagtttatggagtcaaatctatttttccttgtcatctgttttcttccagtacttttatgcttagaaagtccttctgcatatagaggacaaataaacatttattctttatagttattttatggattcactttgtttttacatttagttctttaattcatctggaatttactatgacaagtagtatgaagacaaaaaaatcgatccttattttgacctgtttattcttcttgaacttagtaggcccaccgattaagattttatttggaaaagcagtgtctctgcttttaatgagctgagtgaggcaaatcacttaacctctccatgcctttgtttcttcatctgtaaagtggggaaaagagtatctccttttgcccaagttccagggaaattgtgaggatcaaatgagatggttatgaaaacattttgaaaaagtaaaaaaaaaa

SEQ ID NO: 179097 - DNA, 376 bp, Homo sapiens
ctcacaaagtgctaaaaccattaggtgaacagatttttggtaacaggatatttgcatgggtttttaattgaaagcgagaagcgtatctttacaatggcaagttctggcagtctccatcttaacccagtgatcaaagttagcgtcgctaatggtagcacaatctgacgtatgtgccttccaatgtgataaaatttgaaatccacatcgtctagaagtatttttgcccaaaatgtttaacctaaattgaatcaggctcctagaccagcacatgtcaatacaaatatatgtaagccacttatgtaattcaaaattttctggtaactgcatttggaaagtaaaaacaaaagagaaaagcccggggtgaaattagtttaaa

SEQ ID NO: 179098 - DNA, 976 bp, Homo sapiens
ggccctgtgtcgaagaaggaacgtactttggcgttcttatgagctgcctagtacaaattattggcagaaacaatgaattaaacattcaaaaagtaacccaccggccggccgcagcggcttatggctgtaatcccggcactttgggaggccgaggcgggcgcatcacctgaggacaggagttcgagaccagcctggccaacatggcgaaacctcgtccctactaaaaaatacaaaaattagccaggcgtggtggcgggcgcctgtaaccccagctacttaggaggctgaagcaggagaatcgcttgaaccccggaggtggaggctacagtccggcactgttggcaccaggtcaccaggacccgcttcagcacaaggaatgtcatcaaggtgccactgcagaagcgggcagtgccctccatgaggtgcgaaactgtcttcaagctgactcctgaattcttcagtcctggaaagtccaggggcctagattctcaacaatgcgcacaaaggcagagatggggataccggaggagcctccaggaatcatgggcccagaacctgctctctccacagcacccatgtccaggcccaccttcgggtgtccacacccactctgagcccatcttttgtaccacctccatttcaaacacctgtttactgcctcagaacagttcctggaaagcatggcaggtgccttggtgtctccatgatggtcagactcgccctgccttggacatgtgtcaagagatggagcagctgctgcttcactcacaggaaaggttggtgtcactggagcctgtcatcagtgtgaggtctcgccccacctccatgaccttaaccacctctcttccaaacttactttcagctgagaggctgcagttctgcccccagagagctcctgcctgatccttcccaccaaacactgagaatgtgcacttggaagtcttggcactgtcgaccagaggcctgggaaccaggg

SEQ ID NO: 179099 - DNA, 855 bp, Homo sapiens
aatcaggatactgcaagcaacgagaaaggcatgttgagtggttaaacaagaatacatgtattcaatacagtgttcattaaatgtttgataatagaaggacaggcagatccaagtatttcataggaagaaagaaatcaagcagaccgcaggttatatcaccccatcacacattcagggaacttaatcttttcattccagaggatgggtttgtttaaaacaagttcttcctcctaattacttttgaacaattccccaatactgtccttacctgcaccaagagcatgctaaccaggcctggcaccagggtcagagttgaggctggggcatcagccccctttgtgaggtggcctcagtgacaggggtgctatgaggtggcggctatcctacttaggaggctgaagcaggagaatcgcttgaaccccggaggtggaggctacagtaagttgagatcatgccactgcactctagcactccagctgaggcgacagagcgagactctcaaaaaaaaaaaaaaaagggccggccgggttccgggggcaccccgccgtgtaactcgcagcactttgggaaggctgaggcaggcggactcactaggccaggaaatcgaaaccatccgggctaacacggtaaaccgtctctactaaaattcccaaaatttagccgggcatgttggcgggcgcctgtagtccccagttactcggaaggccaaggcaggaaaatggcccgtaaaccccggaaggcggaccttgcagtagacccggagatcgcaccactggcacactggcatcccagtcggggcaacagaagtgagaccaccgttcaaaaacaacaaacaacaaacccggaggacacaac

SEQ ID NO: 179100 - DNA, 1266 bp, Homo sapiens
aatcaggatactgcaagcaacgagaaaggcatgttgagtggttaaacaagaatacatgtattcaatacagtgttcattaaatgtttgataatagaaggacaggcagatccaagtatttcataggaagaaagaaatcaagcagaccgcaggttatatcaccccatcacacattcagggaacttaatcttttcattccagaggatgggtttgtttaaaacaagttcttcctcctaattacttttgaacaattccccaatactgtccttacctgcaccaagagcatgctaaccaggcctggcaccagggtcagagttgaggctggggcatcagccccctttgtgaggtggcctcagtgacaggggtgctatgaggtggcggctatcctactgcagctggctgcatcagatgtgccaggcctgccctctagctcccaacaccatctgcctgatctaagctttgccatgttgttgtcactgctgggtgcctgtgctgtggtggggccattccatggccctgagtgggagccagtgcagggcctgctctcccagaatcacagctgcagggaccctcagtgctgtggcaacctgcttgtcctctgcctctttctggtctggcaggtccggcactgttggcaccaggtcaccaggacccgcttcagcacaaggaatgtcatcaaggtgccactgcagaagcgggcagtgccctccatgaggtgcgaaactgtcttcaagctgactcctgaattcttcagtcctggaaagtccaggggcctagattctcaacaatgcgcacaaaggcagagatggggataccggaggagcctccaggaatcatgggcccagaacctgctctctccacagcacccatgtccaggcccaccttcgggtgtccacacccactctgagcccatcttttgtaccacctccatttcaaacacctgtttactgcctcagaacagttcctggaaagcatggcaggtgccttggtgtctccatgatggtcagactcgccctgccttggacatgtgtcaagagatggagcagctgctgcttcactcacaggaaaggttggtgtcactggagcctgtcatcagtgtgaggtctcgccccacctccatgaccttaaccacctctcttccaaacttactttcagctgagaggctgcagttctgcccccagagagctcctgcctgatccttcccaccaaacactgagaatgtgcacttggaagtcttggcactgtcgaccagaggcctgggaaccaggg

SEQ ID NO: 179101 - DNA, 380 bp, Homo sapiens
tgcacagagtcctgtgatgtgaacaatttatgggactctcagccttggacaccagtgcatgttccagttgaggtgatggagggtgcaatggactccacgggggtccttagctttggtggtttaatgctctatttttgtgctggttggcctcctaccaggaggtggtgttttccagaaagcatcagctgtagtagtgtggtgagggactggcagtgggtgtggccctagatctcccagaattatataccctttgtcttccactaccagggtggatagggaaggaccatcaggtgggggcagggctaggtatgtctgagctcagactctcctgtgggtcttgctgtggctgctgtgggggatggggatgagattcccaggtc

SEQ ID NO: 179102 - DNA, 621 bp, Homo sapiens
ccagctgtgtggaactgtaagtccacttgaacctctttttcttccctgtctcagatatgtctttattagcaacatgaaaacagactaatacagtaaattggtaccaggagtggggtgtggatgaaaagataaccgaaaatgtggaagcaactttggaactgggtaacaggcagaggctggaacagtttcgagaactcagaagaagacaggaaaatgtgggaaagtttggaacttcctagagtcttgttgaatggctttgcccaaaatgctgatagcaatttggacaataaaatccaggttgaggtgatctcagatggagatgaagaacctgttggaaactggggcaaaggcgactcttgttatgttttaggaaagagattggtggcattttgtctctgtcctagagatttgtggaactttgaacttgagagagatgatttagggtatatggtggaagaaatttctaagcagaaaagcattcaaaaggtgacttgggaactgttaaaagcattccattttaaaagggaaacagagaataacaattcagaaaatttgccgcctgataatggagtagagaagaaacacccatttttttgaggagcaattcaagctagctgtaga

SEQ ID NO: 179103 - DNA, 226 bp, Homo sapiens
tatcacactctccagggatgagaactcatctctgagtcctccctgcatttctactgtagtagcctttccactctattgtttctgtgcgtttttaatgtcccctggggcacccccagacacactgagctgcctatctgggctttccaagttatccctgaggtatgcattattatttggttagcgctgtgattacaaaagtgcataggttttgagtggtctactctga

SEQ ID NO: 179104 - DNA, 168 bp, Homo sapiens
cgttgggattacaggcatgagtcactgcggccagccagagcaagatattattaaaataactttctcacaggggcccaaaataggctgatataaaataaatggaatctatatttcaacagccagcagtcctgaacctcttcctgccacactgttcgtccccagaagccg

SEQ ID NO: 179105 - DNA, 730 bp, Homo sapiens
ggctatatggaagctggaggttgcagaaaagctctgcactcctgaagcataaactgccataggaaccccacaaataatttgtataagcatttggttcatggtagcttaccctccagtcatactgtaaaatacatgtctgcaccaagacaggaacagcatctaaaaaaacagggcacataaaaaagcataaacctgagcccatctctcaagaaaattaagaatggcagtgaggtatacccaagtacctatcttttgctaaagaaaaaccttgggaggctgaggtgggcagatcacgaggtcaggagttcgagaccatcctggccaacatggtgaaaccccgtctctactaaaaatacaaaaattagctgggtgtggtgccacacgcctgtaatcccagctactcgggaggctgaggcaggagaatcacttgaacccaggaggccgagactggtgaaccaagatcgtgccactgcactccagcctggcgacagagcgagactccgtctcaaaaaaataaaagaaaaaccttgggatggagttaattcataactgaagaaacaggcaaaaactgactctttggggctcatacaagacaatatcacaggacagaaagtaaaaaagagctaagttcctactttcactgtgttgtcaatgtacctgaataagttccgaatcccagcttgtgggttcgagtacccttggataaatcatgtcatcagcctgcctgaaa

SEQ ID NO: 179106 - DNA, 341 bp, Homo sapiens
ggcaatggcttagttaatcaggactgggcactgctggccttccctgggtagtgttgtgggagagagttagtgtcactccatcaggccacaccttcactcagagcactctcttcccactcacgatggactaggaccctcaccttgggtgagaatgtgatttgtcatggcatctgtgatcataaagtcactgaacatgacctcagagggacccaagactccttctcttgacagatgagggaactgagcccgtaaatgaacaacagatgtgccaaaccccctcagctggtggctgtttgtcatctgtcacctgatcatggttctcctggcttctatgttgccct

SEQ ID NO: 179107 - DNA, 1035 bp, Homo sapiens
  misc_feature (3)..(3): n is a, c, g, or t
  misc_feature (5)..(7): n is a, c, g, or t
  misc_feature (730)..(730): n is a, c, g, or t
  misc_feature (742)..(742): n is a, c, g, or t
  misc_feature (767)..(767): n is a, c, g, or t
  misc_feature (858)..(859): n is a, c, g, or t
  misc_feature (884)..(884): n is a, c, g, or t
  misc_feature (890)..(891): n is a, c, g, or t
  misc_feature (900)..(900): n is a, c, g, or t
  misc_feature (914)..(914): n is a, c, g, or t
  misc_feature (953)..(953): n is a, c, g, or t
ggnannngcataactcaaaatccaggtctagtttttccttaatcctggaggtactggggcgtcctgcaccttactttgccctgtccataggttccctcttttcttgatcatagacaaaattacccctgagaacaacaacagcctcatccatgagatgtagtttagttttcctggtgtggaaaagaaaactgcaacatccaacagtacactttctgttgcacgacttgttcagtcaggaaatacagtgcatttggagcgtcagaatgatttagcagagcagggggcttttgtctggtcctctttagagtcccactgccagaacatgggggaagttaagacttataatcacccatagctttcaaacagaacacacatagcatctccaccaccaccaaatgaccaccttcatcatcttcatctgcaaccccatcactaccgccatgaccatcaccaccataccactaccaccaccatcaccaccaccatcactgtgaccatcacctccacctccaccttcattaccaccatcaccaccaccaccacctccatctccaccggcaaccccagcactaccaccatgaccaccaccaccatcactgccatcaccatcattaccatcacctccacctctaccttcaacatcaccatcacaatgaccaccaccatcaccaccagaaacactgaataaaataatgaaagtgcagccttaggctgggcacggtggctcacncctgtaatcccngcactttgggaggctgaggcgggcngatcacttgaggtcaggagttcgagaccagcctggccaacatggtgaaaccccgtctctactaatgtgaaatactaaatgtaaaaatacannaattagctgggtgtggtggtgggcncttgtnntcccagctncttgggaggctgangcaggagaatcacttgaaccccgggagatggaggttgcngtgagcagagattgtgccattgcactccagcctgggcgacagagtgagactccatctcaaaataaataaataaataaaaatt

SEQ ID NO: 179108 - DNA, 434 bp, Homo sapiens
gtgcatctgacctggcctggtgagttgacaagaaccattttcttttctttttttttccagacaaggtctcactccgtcacccaggctagagtgcagtggctcaatctcaggtcactgcaacctctgcctcccaggttcaagtgatgctcctgcctcagcctcccgagtggctgggattacagatgcacactgccatgccagctaatttttgtatttttagtagagacagggttttgctatgttggccagtctggtcttgaactcctgacctcaagtgatggtcccacctcaggcctcccaaagtgctgggattacaggcatgagccactgcgcccagctaagaaccatttcaataagaagataactactttttttttttttaagaactgtgtaaaccatttctaactgtacttaggtagataccattacagaaa

SEQ ID NO: 179109 - DNA, 457 bp, Homo sapiens
taaaaaagtaaacctttatgtattcactatcatgcacttaatacctaacacctacaatagggacaaccagcagttgttgaggatacagtggtaaaccaaatagacatatcctcacagaccttagagtccagtaggggtgatgaataatcactacgaaacatataattacatatttgtgataaattccataacagtaacaacaacatttgatgatactaacatagtgcttaacatatgcctagcattgttatctaagggatttatatattttaattcatttaatccttatcttatgaattaggtactacttttatgttcattttaagacaataattacagaggcacataaagattaagtaacttgcccaagtctgattccagaatccccactcttaacattccagagtcctagctgttttttatatgaaaaacaaaacaaaacaaagtgctgcaagag

SEQ ID NO: 179110 - DNA, 528 bp, Homo sapiens
ctctctactttgagatcatattcttctttttttatatacaattgtaatctgatccgggctgaaaaacgaagtatagcagtttaaatagcaggaagtagtcaacaactcattataaaagcaacagaaaacacggaaatgtgcatcagaaagtcccaccggtttctcccaagtgtttgaccttgagaagatcactgaacttctctgtaaagcaggcaatatgtgtccctgtgtttctcaccagttggttgggaagccctgaacacatatcaagtagggttgctattcatgtagcctgccctcagctgctattgtagtcttgtcctctgggattttctggacttgtaaaacctcaagctgcagttaaaacaccatcctccacatcctaggccagaatgcctgggctcacctgggtgactcagctgagacatggcaaaaaaacactcaaaactttgaatctgagccggcttctttcattcaagtaagggccagtttacagagcccctccaagggagatggtgcttggagtag

SEQ ID NO: 179111 - DNA, 631 bp, Homo sapiens
tagagagaatgttccaacagcatatgctggtagtgggggcttggcgggagcctgacccctcttgggggctgtattttggagcatgagcagtcctgaaccaaagaacaaggcagggaaaggactttcaagtcctagggcctgtggaaaggcactgagaagagagaaaacactctaggtttggggggcctgggtaagtatgactggacaaaggcatgagcaactttgaggggcaggtgggctttaaaccatttcattgctgatctcagtgtgtagaggtcgatactcttagcattatcaggcgtcagcctggactcaccacagcttttccatacaaggacagaatccattttgagagctggagcttaagtaatattttctcaataaacttagtgagatttttgcactgtcagagcagtgtctgtggtgaagagaagcagaaggctacatccaataaatccctgttatttttcagttgtcagacttgacttaaatgtaaatgcctgactagctttccttctcccattctcatagactctatgagtttttcctttttactccaggttcaggatggaaccatgtataagcgagaaaaattccagtgagaagattccaacatggccctgaaaattaa

SEQ ID NO: 179112 - DNA, 487 bp, Homo sapiens
atatctcaattaactgtagaccatctttcctttttttaataatcatatttaaatcagtggtcttcaaaaattaaataagaccacactcctctatcaactgtttactattatttcactccctttacaatccaatgtttgtttcactaaaataatgtagaattggagtctctgtgttaacttccgagagctacttgaagcaaaccttgtagtcataaatatttatttatttattttgagatggagacttgctttgtcacctgagtggagtgcagtagcagtatcttggctcactgaagcctcagcctcctgggttcaagcaattctcctgccttagcttcctgagaggctggggctacaagtgtgtaccctgacaactggcttttttttttttttttttttttttggggttggcagagagggttgttttttcgcggagccccttccccccccggcctcccccgggttcatcgtctctagggcggggaga

SEQ ID NO: 179113 - DNA, 430 bp, Homo sapiens
aagtttaactgaataaacataggccttttagtgttccttaaaccccaacaaagttgggatacatcaatttaatagaagaaggaagtccctaaggcaaggtaactctttgatttctttttggttcttttcatcaaagatcaaatctagagagtgtatgaaaatagcttcagttgaccatcaacatggttacagcaacaaaagaaacaagaatacaacctcaataatgaggatccatatcctgtgggcattttagataaaagaaccccaccttaactgaaaccaaaatgcacagaaagccatgggaaaacccacaaagaaaattaatgtaattatttccatgtgatcaatataactggttgtataacttactatctttagtaataagcagtagcaatttgccttttacatatgagttttatttaactgcctt

SEQ ID NO: 179114 - DNA, 735 bp, Homo sapiens
  misc_feature (662)..(662): n is a, c, g, or t
  misc_feature (684)..(684): n is a, c, g, or t
  misc_feature (692)..(692): n is a, c, g, or t
gcacggcttgcccatgtgtgctgcagccgtcagccggcccagctgagcagcagcaacggaccttgttaacggcgcggcagcctccaccgcctgctgttgccctcctctctcggtggtctgtccgcccagcgcacgtcaccatgggcaagagccggacgaagcgcttcaagcgacctcagttctcccctacgggcgactgtcaggccgaggcggctgcggcggcgaatgggaccggaggcgaggaggacgacgggccggcggcggagctgctggaaaagctccagcacccgagcgccgaggtccgcgagtgcgcctgcgcagggctggcccggctggtgcagcagcggccggcactcccgggcctggcgcgacgagacgccgtgcgccgcctcgggccgctgctgctagaccccagcctggccgtcagggagactgcagccggcgcgctgagaaatctcagtgcttgtggaggttttgaagtttgtgatgacatggtgactaaggatatcatgacccctctggttgcgctgctaaaagagtgtagtgctggactggattcaaatgagatgtctctgcaggagaacaacagatcagaacagaaattctattgagaacatagccaatgagactgtgaacgtgctgtgggaatatatgtgactgcngtagtagagcacgtgtctattncaccaccngcagggtgtaggagatgtgtacagtattagtacgttccctacc

SEQ ID NO: 179115 - DNA, 485 bp, Homo sapiens
ataaatctgcagtagccaacacagccgtgccagtgtaacatttacggaaacaaagcaagaccatcatcccacgctcaggaaacaatgggccggtaagcatttttctcttaatgcagtcagggctgcgggaatgatgatgcttatttgaaaaatcccatggtaattgagtaaagtcttgagtgcacattagagattaatattttaagagctggcattttacagatagaggcagtctaaggatgacattaaacgtgtgtcacacaaagcagagtcttctgtagattaaaaatgcttctgttcatgcaataaagtcataagaaatccaaagatgtcagctgtagatctggatattaatgtagtgatccaggctaggaaacagccacttcccaagggttggggaaagaagtgcaccgtactgatggcatttcacttgcttggaaggctccctctcaagtggagtcaagatgagaaaagaagtttcacgg

SEQ ID NO: 179116 - DNA, 215 bp, Homo sapiens
ctcctgcacactgtctaggaaggaatgtggcatccttggagtacatgctggtgctcagggataaggttctctggccagattccctaggtttgaatcctgtctttgctcccaggccaactatgtgcccttgagcaagttacttaacttctgagcctatttctgcgcctgtgaagtgaggacagtaagaataataaaacctatcttaagaagatcaa

SEQ ID NO: 179117 - DNA, 206 bp, Homo sapiens
attgcgccattgcattctagcctgggtgacaagagcgaaactctgtttcaacaaagaaaagaaaaagagaaaagaaaatgtggaaggcttacctaggtgtccaggcccccagccctcctcaattcctacagatcctcagagctcaaacaactgattcctcctccccatgtccactgaggtccccttctcccacaaggccctcttcc

SEQ ID NO: 179118 - DNA, 1426 bp, Homo sapiens
tgtctcctaacatttaccattcatttacataattgtactatcccattatacaggtataactgtttcagaattgttgatttttacccttactggaaacaactctatcaactggagtataatgcttatgtatagcttcttttgcatttagtcttacagactccacttattaatggtgagagactggacatactgctcagatcgggaacaatgcaaagatgtcctctctcaccactcctaatacaagaaaaggaaatatagactggaagggaaaaaataaatctttatttgtagattataagattgtctacatagacgtttttagagcatctccagaaacctagaactaacaaatgggagtaagaaggacacaaggtattacagttacttttcattttctgttagttttggcatctcatatttaagtctggttttcaagattgcattcttttcagatggtatttttttctttgtttttgtatacattataatgttgagagtcaaacatataaagtagtagatactgaggtatatatatgtattttctttgcgataagcacacctttccttcatctaggctattagcgtggaggtttttgtgaaattagtcaggagttggtctgggattgaagttttgttgttaccatggttactctctgtgtatcagaaacttcaaaccctataatgataccttgtttttgtgtccttgtttggcgtgggttttcaccttttcactcttctctagagaaggcctgtggttttcagctttcccctgtgcattactttaattttatttgatgtttagtctgtggttggggcgaaaaagaggcatgttctctaatgttctaatttaaactcagtcttaagtaggcactgtgaatctgggtcttgtgggtgtggctgtcataagtctttcttttccagtcaatgcctagtatttattcccattcctcccctatggctaaagctttatgtgttccttacctccttacccagcccctgttgcttccactccagggtgtccctgcaaattgctctaaggtttttgcttcttaggcgagataggagacgggcctctggggaattttggtctgctttatattcccttccactgcttcatgatcttttctgtaaatgaagaactttttttggtggggcgtggtggttcacgcctgtaatcccatcactttgggaggccgaggcgggcggatcacctgaggtcaggagtttgagaccagcctgaccaacatggagaaaccctgtctctacttaaaatacaaaattagctgggtgtggtggtgcatgcctgtaatcccagctactcagaaggctgaggcaggagagtcacttgaacccgggaggtggaggttgcggtgagccgagatcgcgccattgcactccagcctgggcaacaagagcgaaacttttt

SEQ ID NO: 179119 - DNA, 1296 bp, Homo sapiens
tgtagtgtgtgtgtacacacacgtcagggctccatcatgacttttgtgggttgtagtcacttctgcctttgcagcttcctccatagaactattaagaaggttatcttaggactgggttggtcgccagtgaaaagatgcactccagaatgggttttgcacgttttgtttgtgatttgaagagaaatgaagacattttcatgggcttctaaaagtgctgtgggcctggccctgctcctcctgtaacctttcccaggaacgtccggctcggccaggctgggaccaggctggttctgaggacgtttatgctgcactgggcacagagtctggcatgtggtagaagcttagggtctccttcctgagtcattactgagtaactctaggtcctctccctgctttctctgcttagtctctgatcagggtgggttgtgtttgtggtgtttgtggcgtttgtgatggggagccgggcagcccccaggtcatgccttgtttgtctcaccttcacctggaaggctgccaggtgggccacgggctggtggcctgcgacctccgatggttgagccagctctgtcgggctgccagcagagaaagggcgggtatagctctgagagacagtcacagcccacacagggtggccagggagtcagaccccaaacttacagtcctgcagacctcactgtgagaccctcctgctcagggactggcaatgcccaggcagaaatagctctgctgaacacatataacactagttgaaaataatttggaatggtttacgctttgaggacagctatagaaaagcacagggtaaaatatagccttctgcttagatttagaatcttgcagtttctaagagcttcctgtctttttattctaaaaagtcacacttcacattcaaaacattatttcctaaaattatcagctgttggcacttttccagaaaagaggcctagcttgccatctttctatagtctttctacaggcaaaagtcaagcctgcctgacatgcaaagcaccttgacctctgaccccagagctccccagggccacatgcctgcccagagccaaggaccatcttatgactctggtaaaagactgggaaaggcagggaaggtgccaggggctggggaagttgggtcccttctctcctctcccccaggtgactctcagtcccaccctaagtgatactaggggctggggaagttgggccccttctctcctctcccccaggtgactctcagtcccaccctaagtgatactatgggctgtcaccctgggggcgggtggagcagccctgagagct

SEQ ID NO: 179120 - DNA, 536 bp, Homo sapiens
gaatgttagagatttgaagggagaggaggtagtacgagacggtgaaagtaaattaactagaaaagtggaatagggttgctaggcagcactgagaccccattggagggtgtagtcatgaatttggagaacactcagcatgatcgtaatttgtttgtttgtttcctagctcattcagctgcttgggtttggcagagatttagtattgaccaaggttagaagtcttatttgtccagtaaaacccatattgaaaggagcaggagcactgatggtaatataaaggagtggttttcaatgaagtatggagcctagtccagaaaggagggaagtgagcaaatgaaggggacaatatgtagtgagaatgtggcttggaaaacccactagaatgaggaatggttggagtcagactattctgagaaagagccagaagaaaggaatgatgtttgaaattgagatttagagtaatgcagggttactgataaagataggtctcaggtaaggtcataatgttggggaatgaggtcaagtggaggacaaaa

SEQ ID NO: 179121 - DNA, 225 bp, Homo sapiens
ggttaggaggcatagtgggaaccagaaaggataatgccactcccagaaggagatgggccctcctcctggcactgccaacccagcctgggggatctgtgctgacattgtgaggggctgcctgtgctagtttttgtgggaggggaggtgccagctatggggttccagggtgccgggggcctgctgactgccgaccactcatttctccctgccgtatatcaattttga

SEQ ID NO: 179122 - DNA, 577 bp, Homo sapiens
tttcgccatgttcgccaggctgttcttgaactcctgacctcaggtgatccacccacctcggcctcccaaaagattgggattacaggtgtgagccactgcacctggcctcacactgactttctttgctttcttcaaacatgctgagagtcctctggtgactattccctccatctgagaggctttctgcagttaacatacagcccactctcatctccttcatggctttgctccaaggccaccttctcaacaaggattactctgactgccctatttgaaatcacaccccatctccagcccctgcactcccaattcccctctccttgctctgttttttcccataggagctggtaccttcgcttatacaaatgtacttacttattacatttcattgctgtcagctccacgcaagcagggatatttgcctgttgtacacttggacggagagaatgaatagtgcccctctgttgacatcattgcctctagcctacgtctctttccagggctttagatcctgtttctagagacccactggtgtctcacaggcaactcagctcctagatggaaacagcctcctccg

SEQ ID NO: 179123 - DNA, 892 bp, Homo sapiens
tattatatttttaaaaaatagctatcctatgactaggtaggtgtttagtaaaacatgtgacctcaaaccactaagttagctgtgaataactgagttaggtgaagaaggtgtcttcttagtctcattacgagaatttcaattacttctcccatatcaaagggctcaccccttctgcatttacacagtagtaccctgtgaaaacactgttaatggaatgattacatttctttcactctaaagaatgatatttaaataatcttgaatttctgcagatcagataaaaacattcatgtaaactggtcatatttaagtaacattattttataacttacattcaaagttacaaatcaatagtttctcataaaacaataaaaccatttcaaaggtctttataatttattagattacttactcattttcaagatgtctacatttaaactacagaaaaagacttgcatttttttcacattatgtggtttagtgaaacgtctggttcatccaatcaaaacaaatggcataatcttctgctttcaaaagcctagtgacctatttagcaaaaagctgtttcactgttactgacaaatgtacagagatgtatttcacttagaatatattctataagagggtcactgaatacattttattgccgcttgcctcttagctagttcaactaaacctggctcactgcaacctccacctcctgggttcaagtgattctcctgcctcagcttcctgagtagctaggattataggtgcccgtcaccatgcccagctaatttttgtatttttagtagagaccgggtttcaccatgttggccaggctggtcttgaacccctgaccccaggcgatctgctcatcacggcctcccaaagtgctgggattacaggtgtg

SEQ ID NO: 179124 - DNA, 1063 bp, Homo sapiens
gggctaaagataatataggggaaaaatagttcttaaaaaaatgatagaatattggaaagacttctgtctggacataagatgttatatttcaaggaggaatgatgccgtggaattcagttctgctgtgataaaattccatgtttgcaatattgaaaacaacacttccaaagagatgcccatgcatctaaccctgatgggatgtgtattagttcatttacatactgccataaagatacgacctgagactgggtaatttataaagaaaggaggtttaactgacttacagttccacgtggctggggaggcctcaagaaacttataattatgatggaaggcaaaggggaagcaagacaggtctcatatggtggcaggagagagagagcaagcgaagagggaactgccaaatgcttttaaaaccattagctctcatgagaactcactcaccatcatgagaacagcatggggtaaccgcccccgtgatccagtcatctccctgcaggctccctgtcctgacatgtggggattacaacttgagatgagatttgggtggggacacagagccaaaccatatcaggatggctagtgtatctcagggaattacctttggcatcaggaaaaggacagatgatatagtcatataaaatgcacctaagaaataacttggctgataccttttcccactgtcagcaaaactgtgctctatgctgagaccttaagaataaaatattggttaggttgggaaagctccatgtttccactgtcctgcattttgcctgtgagagttactctagtgtggctgttggaggctgcagcttggcctcctggtcagtgtaagttagggactgccccacccattcacccctagatagcccattaggaggccatggaggaatacacctgcacttgcttttaaaatcaaggtcggctaggtgcggtggctcacgcctgtaatcccagcactatgggaggccaaggctggtggatcatgaggtttggagatccagaccattctggctaacacagtgaaaccctgtctctactaaaaatccaaaaaaaaaaaaaa

SEQ ID NO: 179125 - DNA, 281 bp, Homo sapiens
gtacctggatgactgacggtctgggattctggatccaaaggggtagctctgtttctgtgcctttatctcagagacatgataaaaataatgaagatgagagacggccatacctgtggctcaatgtagcaccactcccagcccctcagccacccttttgcctctgtaacttttctcaaggagaaatctctgctacctgaaacaagtagagtgaatctaggcaaagagacaggcagcctctgatagaggaagagatccacagaaagtgcatccttctgcagtag

SEQ ID NO: 179126 - DNA, 523 bp, Homo sapiens
ttcctctgcacctccactgccttcaggcaggccctcatctttgtctaaaccattgtaactacttgctgtctcgtttccttgccccgggtctctctacactttagcacatacatcacggggcactgaagtcatctctcctgaaacctacatggatcacgtcactcctctgctaaaaaccttcacaggctcccataggtaaagtacacatcttcacctactaggaatgaggtggcaactatcacttactatgctaaatatcttggtaggatctttatatatattattcatgtaatcatcacaacaatgcaaatgaaatgaatttaagtatcttagttttatagattagagtcgaatgaggctaatcattaagcactaagggaagtcaaataacttttccacagtctaaatcagtcaaaaactgaaattcacagccacgtttgactttatcctgtatatatgtcagtacagtgaattaatatcttatgtagagaataaactctgaagtcaaagcataagatgaaaa

SEQ ID NO: 179127 - DNA, 748 bp, Homo sapiens
gctcccccaatggcagcagctcgctgtcccccgagcgccaggcaacggggacctgcctccagtgcccagtgcctcggacttccagccactgcgctatttggatggtgtccccagctccttccagttcttcctgcccctcggctccgggggggccctgcacctgcctgcctcctccttccttacccctcccaaggacaagtgcctctcgccagacctgcccctgcccaagcagctggtgtgtcgctgggccaagtgtaaccagctctttgagctcctgcaagacctggtggaccatgtcaacgattaccatgtcaagcccgagaaggatgcggggtactgctgccactgggagggctgcgcccgccatggccgaggtttcaacgccaggtacaagatgctcatccacatccgcacacacaccaacgagaagccacaccgctgtccgacctgcagcaagagcttctcccgcctggagaacctgaagatccacaaccggtcgcacacaggtgagaagccctacgtctgcccctacgagggctgcaacaagcgctattccaactccagtgaccgctttaagcacacgcgcacccactacgtggacaagccctactactgcaagatgcccggctgccacaagcgctacacggaccccagctcactgcgcaagcacatcaaggcccatggccactttgtgtcccacgagcagcaagagctcctgcagctgcgcccaccccccaagccgccactg

SEQ ID NO: 179128 - DNA, 586 bp, Homo sapiens
tggactaatacagcattatatgtgatcaataggtatggggttatatgaaaaaaaaaatccaaaatttacaatatacaggaaaaagatgggtgacattctgtaacaccctagcccaagtattgtttggtaattatttagtactgacccctaagtacttcgttgactcactgagaatgtgcatagtaacatgtagactttgcccagtggagatcatttctcttaagcagaaaatataacctcaaagtttatggtttgtgactttgtaggacattagtttgtaactatcaccaagtttattttagcagacctttgatgagctgactgtagaatataatctccattccttggagatataatctctcttatatgctataagaaagaattctggccttcctaccatcttactgattccgccactatttagtgggttgaatgagatctttcatggctgtttattttgtgtgtgtatgagaaccttgcttttaagttttttggaaaattatatgttattagctgttgttgcattttaacaatttagccatggaaatttatgggacttaaattaggcttgactcatgaaggccac

SEQ ID NO: 179129 - DNA, 474 bp, Homo sapiens
tcgcctactcctccttagggcaagaggaggctttttatctgatcacagaaagacaaatgagcatgtggagaagcacagcctttcttttttccttcctcttaagggtgtgtgttctctgcctccaagggcagccagcaggtggatcctggacctgccagggagacagggcggcggggaaagcatggtcaaggaggcttattctggtccagcattgctagatgggaaagatggtttaatcctgagactatttattttacctttaagtttttttaagagacaaggtctcactatgttgcccaggctgttgctcaaactcctgggctcaagccatcctcccgccccagcctcccaagtgtgccatgacacctggctctgaggttgttttagaaagcatgctgcttgcttgcacatataggccacgttctccattatctattagtaatgtaagtgacattttggtcttgtttgttttat

SEQ ID NO: 179130 - DNA, 438 bp, Homo sapiens
cagttctccagcctcagcctcccaagtaaccgggattataactgtacgccaccacacctggctaatttttgtattttcagtagagacaggattttgccctgttagccaggctgatctcaaacttcagagtctgtccctagaaagtgtgtgccaagggacttggctagtgaatcagtttcccgcagctcctgtaacacagtactgcaaactgggtggcttaaaacaacagagatgcattgtctcacagttctggaggtgaaagaccccggagcaagctgcctgcagggttggttccttctggagactctcagtggagggagaatcctttccatgccccctcccagcttctgggggtgcagcaagtcttggtgttcttggctcatagctgcatcactccagtctctgcctctgtcctgagattgtcttctcctctgggtg

SEQ ID NO: 179131 - DNA, 138 bp, Homo sapiens
gattgggcatgtgatctaagcaggtatagtctgagtgtattctagttggtatggtaagtggatataaggcctctattctgccatatgatttggttaaatataagaagtgtctatggggcacagtgactcgtggaaatg

SEQ ID NO: 179132 - DNA, 447 bp, Homo sapiens
ggcggtggggtggctggaaaggcagtggttgatgaccagtgtggtgggagagtccagacctgagtgagaaggtggggagcagcaagggaagtgagggcctggaggcctgggaaccggggaccgatgctgagtagtcacctggccagcagccacaggcacagcatttgcccctcaggcccatcccggccttggcccaactgagcccaattcctggcccctgcctcaggccagggaaggtgtggctggctgggcaggagccatagtgccagcgtctactttggtcttagttgggttgtttggattttggtcctgacctcgtttctgaatgctgcttatgtgagctggagggagagtggacactgcccccccatcccctctcactgccttgtgatgggatcttaagagaggctgggcctcgaagactcaggtgtggccccactgggtcag

SEQ ID NO: 179133 - DNA, 1792 bp, Homo sapiens
cagaatggtctgaccaactattgtgtaccagcgttctcgtttgtagccatgtcccaggaggttggacatccaacaagatagactctaattcagcctccccagtctctggccacccagctcactcagggattcagctacccttggctacccaagtagtctaaacattttatctttatcaggcacatatacagtctggttctctgtagccaaatttagatacccatgacatttatctaatgatttcaaaccaaacaggttcctaaaaaaacattcagcctacttctagaacttccccattttgcttggctgtgaaaatgtatttgtcccatgcaggcccttgctccagcccagtggaagcattagtacctcttcctagcgggaactcagtccagctacacaccagagccaggccagtggttgtctgggaaatcttcaaaggccgtgaccactcagcaagggtcagtggcacctctccccactgtctcctcaccaggtgcattcatcccatccatccatgcattcactcaccctccgtgttgtccagcactatgtatagtgctgcagaaacaagaagaatatagtgcttgccttcaaagacctcccaaagtggggagatagtctggatgacaggtgctgtaatagaagtgtgccccggatgctataggagcacagaaagagggcaactgatgaacactggggtgagagtggaagaggagaccctggaagactccctaaggaagttgtcttactctggtcaagcaggaggccctgtagagggagtggtgcagacccaccagcatatgcagcttcacaggggcaaaacacctgtaggtccatcacgtgttggggactagcaagtattcagcttggctggagcagaggcaggagtggggaactggggacaggtgagactagaggttggcagaaaccagccatagtagtttttgcctcatttggacaacaaggagccatccaagagagagcggtgaagctgatggtgacacagccatggcgcattgaaatacccccagtggctgtgttgtagggtatattgggttggggagggacaaggtcaggaggcatagactcgacatcatctgatgtgattcaggacagaatggcgagcctgaagtgaagtgtctgtaggataagttggaaaggaaggaaccaatatgagatattaaagaagtgaaagctataggtcccagtgccttaataaaggtaaggagtaagagaagattcgagattgactcccagactctccagtctgctggacatgggagatggaatagaagttgatctcggtgtggtcagaggagagcagttactgtgttgagcatggagagcctgtcgttccccaggagaaggagtacagctggctggaaataggcaaggcagagatggagagatccaccttggagtcactcctaggggcgacccttgaagccctgagtagcaatcccaccagaaagatgcaagggctgaagctgaaacttcagagagcatcggcatttaaggaagaaccttggctgggcgtggtggctcacgcctgtaatcccagcactttgggaggctgaggcgggcggattgcttgagcccaggagtttgagaccagctggccaacgtggtgaaaccccgtctctactaaaaatacataaattagctgggcggtagtggcatgtgcctgtaatcccagctactcgggaggctgagagaggagaatcacttgattctcctgggaggcagaggttgtggtgagctgagatcgtgccactgcactcctgtcttgaaa

SEQ ID NO: 179134 - DNA, 467 bp, Homo sapiens
atcctgggagaaagagcccaagaaagctcagcaagcagccccctacacagggccagttctcaggagcctttaggatcagaggtaaatctgggcaaggccgaagcctggtctggtggtaccctggagccagatcgtttccagaactggaagagtaacatggcattcatccaggggacatgctccttatagttgcttttccttaactgaaaaaggaattcttggctagagagcctaaaagcctaaaggcaaaattatatggataacccagagagtatgtatggacctcagggctccaaggaaaacagtgaggaggcattatgactttgtacttcagcaatgacagcagtggaggatgggccaaatctctgccttcccgataaaccctttgagtagaactgtaacacagcccaccataatcctgactcgcctccttctctagtttcctggacatggagaattgctgccat

SEQ ID NO: 179135 - DNA, 638 bp, Homo sapiens
agattgttgtaatagcccctaaccagacacacttgtcctcttccggtattctgcacagtaatcagagtgaatcttttataagataaaccactttgtttcctgcttacacacttccagtggttcaccattacaaggaaagcaaatacggaatcttcatgtgcttgaaggcctcacatgatctgacctctggcaatttgtccagccctgcatcctgcacccttcctcttgctcccttgctcactcctctccaatgactgttttcagaacccatcagtttgtttcctcggtagatttcatgcctttctccatatcttgctccatcgcttcattcaggtttcagcccagaatgtccagtctacagaggccttccctgacctccacatctagaatagcatgtggggagcatgtagatagaggtgtgcatcatccctacagagtatgactgagctctctggaaggagtgaggaccaaaaaaatgacagtggaagaatggggaagaggaagagaaagggaaggaagtcagaatcaggagaaagagtaaagggaggtatcctgtcttagcaagggatactgagttcagtgactccctgggtcaagatcatctcattcaggatcagaaagttaccatgacagtgccc

SEQ ID NO: 179136 - DNA, 809 bp, Homo sapiens
acacaagactaggacctccctctgccagatgttcctgaccccatctccacctccagcctctagcctcgctgggagttccctgtgacccagcctgttccatagccaaagggagaccaaagtgaacgatcacagtgccccgcacctattctaggggacttggatctcagtagagcttaatccatggcatctgagagcacccaccctgtccctgagggcagctgtgccgggccagggggccgcaagggcatgggtggaatcttggtcactggcagcactcagccacgtgcctgaggagctcttcaccttgttcgtcactgaagcactgcaggcagtgagggcactgaagttccccctggcctctctgggctgcgccaggatgcccgccctctgcagggggttccaaccgcctgggacccagtcccaggcctccagccaccaggcacgataagctccactgcatcggtggccaagtacttggcagttttgctcccagcgtgaatccagccggcgtctggctcttgagaatcctgtctccaggacacctggtgcagcaaagaggtgaccttttcctccagttcctgaatcctaccttgagcctgttcccgatctgccctttctgacatgaagtcatccttgtaagcgagaatctgctattccagtatctgcacccattccagtgcagcatcccgtgccgtcctcgaggctgccagcttctacgtcaattctgcacagtcgtttattttctcttccaactatctgttgagccgggagatctccttcctcatcagctcgggctcatgggggggggg

SEQ ID NO: 179137 - DNA, 247 bp, Homo sapiens
agggcaggatagtcagggattaggaggctatatagggatttggagttttatcctaagagcattgggaagttattaaagaactacaaacaggaaatcaatctgttgttctgtggatgggagagagactactgagtggatagtgcaaccattcatggtcttgaagattaggtgttcagtctgggaaatctttgattcaaagtacctgtgaaacatccatttggaggtattaagtagacaattggctata

SEQ ID NO: 179138 - DNA, 251 bp, Homo sapiens
ggtcctggcttgacttcttggggatgggagtgagcctggtgggagcagggaactgaggcccaggtttagaggtagttaggacgggaagggtgctatgtgccctattgggtcagcatctcccgccccatccaaatggccactccactgccttcttagaccagaggatgttgggcatacttcactgcctggaagtccctcagctagggaaggggagagaagaactggagccctggtaattttttttttttttt

SEQ ID NO: 179139 - DNA, 221 bp, Homo sapiens
atgcaatttactgctcagaggatgtaacctatttgagtctagagagctaattaataacacagtctaaaaagaacgcagagttaatcgccatccatctcctgggctattttaacttgtttttttgacagttgctgttaaacaaaattctaaatattgttatagcagtcagttattagttaccttaacaagatgcaagtttggtgttggtcaaagttaaatcc

SEQ ID NO: 179140 - DNA, 504 bp, Homo sapiens
taatacggtcggctccaagaaaggtcagccacgtgcttggggccagggggccatcttttattcattccctgacacaggctcattaattattctggcccagccggagctgtgctcggacgggacactaatgagaaaaaggagagtggatttgagatccacacgccatccgctgtggggacgtagagggagagatggaagaaacactggtgaggctctgaggcgggatggggcctgcagcctggctccctgacagtgctggttaggtgtgaagaggtgagcggagctgatccgcaggtgtgtggggcactggctgccacatcccagctctcccagagagatgaggaacaggagcagatgcagccagtatcagagagcaggaggtgcatggggaagtgaggctgaggctgtgggtgccccaagcacactaggcccagcgggtgcaggaacccccagagaagccactgagcagagacccagaggggaggctcgcagggccagcggtta

SEQ ID NO: 179141 - DNA, 501 bp, Homo sapiens
tatgagaaaaccgagggccaaggccacacatttaggtggtgccagagctgggctgactctggcgtctgctcttaaccagaattgaccaagcctaagtggtggcctaggtgttcctgtgggtgtcaagcgcatgccccatacaacacaatttgggggcatgaattgtggccacgaggtgcttttgtttggttgcttgcttgtaggatagcagctaggttctggatagttgaggttatcggttaagtgacttccagataagtgagtcacagctacagcaagttacacccaaaagggggttgggggctgatgaatgggaagaaatggatgactttcatggcacagagaagatcctgggtccttcttgagtcttctgagtctatcaagtggcttgctagactttgggccctagagttcggcatccacaggagactcctgcttccatggagcttctctcctgctgccatggtgatgtaagattacacatctgcgtggccagaagga

SEQ ID NO: 179142 - DNA, 463 bp, Homo sapiens
agaatgagcaggagaagccacaggaggcagcttcctgctctgcagaggaaggactttccaagagggagaaaaacagagagcaaccttctgttatgtgatcgtggaaagagctcccaccagaaatgcctgcatttaagtccccggtctatcacttattagcagtgtggctttgagcaagttgttttggctctctgagcctccgtttcctcatctataaaacggggattataatacttttttcctagggtagttgtgtgaatttaataaggtaaagaacatttggggcttagcacagtgcttggtacagaataagcacatataaaggaggctgcttttattgttaaaagagagacttggataagtttctatctctctgagcctcaatttccttacatgtaagatagggttaaaaatgcctttcttttttttttttttttttgagatggggtctcgctctgtcacc

SEQ ID NO: 179143 - DNA, 244 bp, Homo sapiens
ctcctgacctcgtgatctgctggcctcagcttcccaaagtgctgggattacagacatgagccaccgcacctggctggccaatttgatttttaagtatcctatcaattatttaggtctcagatggtacatcacctctcaggaagcattccctaaccatttagcaggtcaggttagttcctcttgcagcataatcccacatcacccaatgcttccccaatatgtagttacttgcttatttaaatgt

SEQ ID NO: 179144 - DNA, 552 bp, Homo sapiens
atcaaaaagtaagtatgaagtttcgtacaatgaagatgatcccattttcctaaatagcacaggagagtttccaatgacagactatacaaatgaaagaacccttagagatcacctatttaacaaatgagaaataaacggaggccaagattagctgactagcttaaggggtggacttagaagtaatgcaagacgccatattagaaattatttgtacaggctgggtgcagttgatcacacttataatcccagcactttgggaagccgaggcgggtggatcacctgaggtcaggagttcaagaccagcctggccaacatggtgaaacctcatctctactaaaaatgtaaaaattagctgggcatgatggtgtgcacctgtagtcccagctacttggcaggctgaggcaggagaactgcttgaacctgggaggcagaggttgcagtgaggcgagatcgcaccactgcactccagcctgggcgacagagcgagactccatctcagaaaacaaataaattatttgtacagctgttaatggtagagctgaaactggaccc

SEQ ID NO: 179145 - DNA, 493 bp, Homo sapiens
ctccctgtgccctggtttctcactttctgggactccctgagctccagcattagacaaagggcacattttcagggaaaataatcccttgtttgtttgttttattcacaaactctcccctctctgccttttcccatccaggacattcctgctttcaaacaggagccactctccaggctggatgatggccaggctcacaccggctcccaggagtcctgtgggctaagcccggagggtttgctgcagccaggaatgccggggctgcctgcaaggagtgggctccacactgtggctgcaggttgccttcctgctggctggcccatggggagtggggaggaacctgagcccagcccaaggatgggcagagatgagtggtgtgaagggtgtggtggccagggggagggacacatacatgcgggtctgtaaaaacctccacacacacacacacacacacacacacacacacacacacacacacacgcagagtgcacagatt

SEQ ID NO: 179146 - DNA, 294 bp, Homo sapiens
cagctctctttaacctgatatccccatccctcctgcaaaactgctcttatgaaggtcgcaaatgactttgagggtgccaaactcaatggaaacatgtctgtcctcatcttgatttacttcttagctacatttgccacaacctaactctccctccttcttaagagaatctctttgctaggccatcctgacagtatattcttctggagttctttttacctctctagccattttttttttttttttggggggcgataaggggtagggggatcccgagcctcgattcggaaactcagg

SEQ ID NO: 179147 - DNA, 138 bp, Homo sapiens
caccatggtccctcggctccgcgcacatccacatgattctttcttgcaagatgaaagaactcgtatcgtgtgtgtgtgtgtgtatgtgtgtgtgtgtgtttcttttttaaagacaagtctcaggctgtcacccaggct

SEQ ID NO: 179148 - DNA, 244 bp, Homo sapiens
taagggcaccaccataatacaccgctaattcctggcaccggaagagatgaaacacactctatcttgcacatacctgccagaggaggccactttcctcttctgtgagatttaaaaagctcccccaaaaggttatcactcccatcaccaatacacagaaaatggaggaaaggctgtttccaattcttggcctttaaacaactctaaatgtcagtactcatagtggcgtattacaaagtaataaaca

SEQ ID NO: 179149 - DNA, 122 bp, Homo sapiens
aaggctagctaagaagggttcccccacaatgtcctggccttgaatttctcctgcctcccccagatggaaacctaacataaaagggtggtcctcaggctacagctccttcctctaacctgatg

SEQ ID NO: 179150 - DNA, 332 bp, Homo sapiens
aagcactgtcagtggtctagggcagaagtgccaaaatgcaatagatcaaaattatcaagactcagaaaacagaacatggaaaattcagttccatatgcagaagagagttcaggaagtcaatatataatgttttaaaacattatttttatgacagtcaaagcccaccaaatgagtactaacactagatataaacaaaagacgttacccataatgtcaggtattataagcagaagttatacatctaagtaggtatttaggctaaataaaactgctgatttatagattaaataatacattattgatctgggcactcacaaaatgacattgccaaa

SEQ ID NO: 179151 - DNA, 566 bp, Homo sapiens
atttatgtcacagtgcaagacctatctagcgtgagtttggacggttatctttcccctcgttgatcagaaattgtagacaaaataagcagttactgcaattcattttgctgcggtaattgtgagttccagcttagcagactttattcatcagtgacagcgcgtaagacaacactttggacctccatggaaagacaaagacatttttcctgatagtagtgtataatgtagagaggaagacaaagtgtagacagctaacaaatagaaggttaagctaggtggaaaaagagcagaggaatagggagagaattcgtacaatacagggtttttagggagggagtttaggcccagaagaatgaaacctaggttgtgtattccttacacagttggtgtttagcgctggtctctcttgaacaaattcctccattgggtttctggtcccacctcacagtctcagtaatggttgtgaggaaaaaggtgtagaaaccctgctaatagtattgctgtactctttcctgttgctcagttacccacgagttagtctcaaaacaatgaatgtattattctca

SEQ ID NO: 179152 - DNA, 475 bp, Homo sapiens
acccagaaattccccaacatacctgatctcagaacacttttggacatatcatgttaaacttaagttcagaaaataattttggaaatcagaaattcaacctgatcttatcattaggaaattgactccaagaaaagatgttaggtccaggaccacagtgggagttaacacagacaggaccagaacccagttgtcctattaaccttaagccatttctttctaggtctacctgggttaggtctacctgccaggtagacctaaccaagctggcccaaggagaatacattgcaccagagaagatagaaaatatctacaacaggagtcaaccagtgttacaaatttttgtacacggggagagcttacggtcatccttagtaggagtggtggttcctgacacagatgtacttccctcatttgcagccaagcttggggtgaagggctcctttgaggactgtgccgaaaccaagttttagtctac

SEQ ID NO: 179153 - DNA, 805 bp, Homo sapiens
atgcaaatggttttccctgctctcaaatcagatgctgaggagaggagagctgaggcttcctggagctccccctgctggcaggcagccgagggtgtctcctgccctcttggcactgttctcccagccaaggaggtggccttttctctcttccaagtggggaggagacattttatttctactctgtcccttctgctagctcctcccacttcctgggaagactaattctagaactgcttgaccttggccagggaagggctggatgtgaagttccacacctggagtgatgggtccttaaagtcccttctttctgttctcaggctggcccttgtgactagttcatggcctcagacactgtactgtgggcaccatctcttgactcctggccggccttctcttctgggaaggggctgctccaggtcttcattggacccagagcttcctggatcccatcagcagaggcgggacaacggggaagggtgccagaggccagcggggtgggggagcacagatgcttccagttggcttggctccctgcacttggtcctgaaggggttaatgaggcttgaactgaacagaccgggccctcactcccttccgccccctccccctttggtccccttcctctggacctcacatcctgtgtttaggttccagcccacatacctctctaatctgagaggcctgagagcccgttggctggagctgcctaggttccttccggctgcagctggccacccccggctctccactccgactctgccctgggtcactgccctctggtgtcctgatgttcctgaccccaccc

SEQ ID NO: 179154 - DNA, 501 bp, Homo sapiens
cgttatctgcaggtcgatctagactgatcccgtcagggagttaccagtcgctagttactgtttaaaaataaaaattaacccacatacgaacaattaactgctgattatgtaagagccatgtgttgccagcagggtattatagctgtaagatgctattagttttcccgaaacagttcaccaatgagtgaaaactgctggggaacaggatagttcatgtagtctcaaagattacttaccaattacaatcacaggttacctaatcattatactaggagaaaggtattgtttcaacagagagcaggcggacaccacttgaagcaggtgaccacacttagcaccacgaagtaacaggacaaactgagattgtgagcctgtgctgtgaggcagtgggaagtacctatgacctcaggaagtgccctagccaaaaatattcaacttgaatttaatcacaaggaaacagacagacctagaatgtggaacattctacagccgaagaccagc

SEQ ID NO: 179155 - DNA, 384 bp, Homo sapiens
agtcaaacatttgaggtttccttgggttatatgggtaactagcaggagccaaatgggaagaaagtgccacacttgattgtaagccaggtctgtgcatgggtctcaccagtgatgtgaggctggaggagctgctgccttttcctaggcctgtccaattctactcttagtctggctctaagaaggatgaagaggagagttgcccgttacaggaaggaggagcaggagagatgcttgaagttaatgaatttgtctataagttaataaatttgggttaggtctacctggccaggtagacctaacctacgccaaaatccatttcactatcatatgcatcggcgtaaatctaactttcttcccacaacactttctcggcctatccggaat

SEQ ID NO: 179156 - DNA, 402 bp, Homo sapiens
acttaatttgaactctttgttaataatgtatgttacaaatattttcccttggtttatggctggttttttacaatctttctttcactgacatatcttttgctgaacatatgttcttaattttaatgtagttaagtttatcatattcttttgattagtgatttttgtattttatgtaaaaagccttccttaaccaaaggtcagaaagatattctcctatattttcaacttaatgctgtttttcacattgaatttcttacctacctagatttttaaaaaatattttcctttctggataatgacaatcatactaccatttactgatgagtccctttctctactgacctgcaatacgtatttgtcatatatgaatgtttcataaatattgggtctatcttatattta

SEQ ID NO: 179157 - DNA, 239 bp, Homo sapiens
atgcctagtcaaaataaaattttctcctttaaaaaacagagtcaatagtgtagcatatatgagtatatacaaactgtattttttcttttttcataaaagttgtgcaaaatggcatttatcataattcctgtttttgaagggtccaaacctcctagcagtattataaacagtgagtatggctgtgtatgcagtcacaagttttatgcatcccatctactagactgaactgtgttatcccg

SEQ ID NO: 179158 - DNA, 727 bp, Homo sapiens
  misc_feature (620)..(620): n is a, c, g, or t
  misc_feature (624)..(624): n is a, c, g, or t
  misc_feature (642)..(642): n is a, c, g, or t
  misc_feature (656)..(656): n is a, c, g, or t
ccggagttgaaggggcggaggggaagtgggatgcggaaaaatgagttcggattaaggagactaataccctactggaagacaggcatagtagacatctatcgggctggactgagaactcggtgggaactagaggatgtcagggagggggacccagattttagtaaagaaggtgagtggtctaaatggcttctaagaagttgggtgcagattttcatgggactttcagttaccttgatgatgtcccatttaagacaggagacaaattcaaaacaccagctaaagttggtctacctattggcttctccttgcctgattgtttgcaggttgtcagagaagtacagtatgacttctctttggaaaagaaaaccattgagtgggctgaagagattaagaaaatcgaagaagccgagcgggaagcagagtgcaaaattgcggaagcagaagctaaagtgaattctaagagtggcccagagggcgatagcaaaatgagcttctccaagactcacagtacagccacaatgccacctcctattaaccccatcctcgccagcttgcagcacaacagcatcctcacaccaactcgggtcagcagtagtgccacgaaacagaaagttctcagnccanctcacataaaggcggatncaatctgctgactntgagtgtgaagaagacccatttgataatctggcagttaaaacctattgatgagaaggacgagctgagacac

SEQ ID NO: 179159 - DNA, 537 bp, Homo sapiens
cggcacgaggggggcccatcccaccgcttctggggagaggaatcggggtgggggcgcccgcagcaggggagagacactacacaggcctgggaccgccaagcacaccagctgcgagctcctgaagggcagacacatggacacacggacactgaaaccacgagcatggcacagccacagggagtggggagttgagggtgagctggggacgtgcggtgtagatttagttctccctgaggcaatgagattggggagaaaaggtggagactagaccagaggtgagtgatctttggggatatctttggccttgtctggtcttctccaggtatgtttatccgccttttttgtttcttgggtggaggcttacctatacagtccacctgggcctcaggaaccgccccagtctttcttgtggaacgtcaggttcatttatttgagctatatcagtgatctttgacctttgttgccaaatgtaattgtttccagactagcgtcttaaaagtatggttgggcataaaaatacgttttatgttaaactga

SEQ ID NO: 179160 - DNA, 533 bp, Homo sapiens
ccggagttgaaggggcggaggggaagtgggatgcggaaaaatgagttcggattaaggagactaataccctactggaagacaggcatagtagacatctatcgggctggactgagaactcggtgggaactagaggatgtcagggagggggacccagattttagtaaagaaggtgagtggtggggagttgagggtgagctggggacgtgcggtgtagatttagttctccctgaggcaatgagattggggagaaaaggtggagactagaccagaggtgagtgatctttggggatatctttggccttgtctggtcttctccaggtatgtttatccgccttttttgtttcttgggtggaggcttacctatacagtccacctgggcctcaggaaccgccccagtctttcttgtggaacgtcaggttcatttatttgagctatatcagtgatctttgacctttgttgccaaatgtaattgtttccagactagcgtcttaaaagtatggttgggcataaaaatacgttttatgttaaactga

SEQ ID NO: 179161 - DNA, 642 bp, Homo sapiens
ccaagtggcttaaaaatcggaagtttatgtcacacagttcttgaggctaaaagtccaagatcaagctatcatcctctctctgcaggtgcaaggaaagggcttatcccaggctctctcctggcttctgagttccttcgcctgtggtggcataactctaatcttcacatggcattctcccagagtgtgtgtctgtttccaaacctcccccttctaaaaggacaccactcatgctggattagagacctgccatactccagtatgatctcatcttaactaaatacatccacaactcaatttccaaataaggtcactttgaggtactggggataaggacttcaacatatgagtttggggggacaccattcaactcataacactgctgatgttttttccttttggagtggtgaaaatgttctaaaatcagattatggcgatggctgcatgactttgtaaatatactaaaacagatgaaattgtatactttaaatgagtgaactatatggtatgtgagttgtatctcagtaaagctgtttggaaaaaaaaaaaaaaagacaagagagcttgggtttaaagagtctgcccaagctcaataatcaactcaatggtgtgtttgggaaaacaggatctctcaacaagggcagt

SEQ ID NO: 179162 - DNA, 189 bp, Homo sapiens
aaacatttccagctgctcaaatagtatcatggcatctgcaaggaggcacttagtcattaatgtctgtccatactggcatccgctaaagcgtggaaatccatctctctttagctaatgtttcccctatgctagaacctgctgagatggcttcaaatacatattttatttgcccaaactacacttcaccta

SEQ ID NO: 179163 - DNA, 475 bp, Homo sapiens
tcgtgctaatgtagtctgaacatactctcctacctaattggaaattttaagtgattaaacatcatacagcaggtgactaaactgggatgctcaagtaaagctacttcgtttctaataaaatccaaggattatataataagctttgacttttcaataattttctattctgtcaaaggcaacagagacaacatccattttacaagaaaacatggagttaataaaatatattttccccccaactaagaattgccttctcttttgtcaatattacaagacattcatctactgacaaagagaaaaaatgaacaattcacttgcctgttaagaaactaaattggaagcattaccagtcataggtttaattaagttgttactagggaagaatatttaaagcaaagggattatttaaagttcactgccagccgctaaatttgggggaaaccgcctgaacgagatagtccctatgtcacttgcc

SEQ ID NO: 179164 - DNA, 505 bp, Homo sapiens
  misc_feature (474)..(474): n is a, c, g, or t
attcagcaagccacgttttgatgatcactttgctcccggtttcctgctacaatgaaaaatgatgtagtaggcaccctagccgatatgtcttcacattctgatgttttacatttcattggccagagggcacatctatttttcattaaatatcaattgccagtttgccttgttaaaaaacgccgtggcactttagatgcccaggacagctcatgagaatgaggcagctcttaattccttatcatgctgcacatatgacacatggaggcccccagctctgccgtgatgagctgcgtctgctgaggagctcctcagcagacgcagctcataaacatctgggctattcaactagcagagagactgggctctggccacggctaagtggctcataccgtaacggcccactcctctgcctcagaactgtacaacactagaaggcagatgtctccagacaccaagcattgccttggctctgangctagacaccactttccgactgtggcagtga

SEQ ID NO: 179165 - DNA, 326 bp, Homo sapiens
tattagtgatattctaagttcatttctacaccaagtacatacagagccgttcaaatacaaaaagtttcgtcttctatctgaaatctcaagaatgaattatttcaagaaagaaaacaaattctagattccagtctccagccttttcaacaaagcttttagtcaacaaactacatgtttcattacagtgcctacagaataaaacttggggccggaggcggtggctcacgtctctaatcccaccactttgggaggctgaagtgggcggatcacctgaggtcagaaattcaataccagcctggccaacatgggtgaaaccccgtctctac

SEQ ID NO: 179166 - DNA, 104 bp, Homo sapiens
aatttgaatgagatttcccaggctgtattctgacttgaattttagcaacttctgcaatttttctaatcttttgggtgcctggaatactcagtatgagcggttaa

SEQ ID NO: 179167 - DNA, 122 bp, Homo sapiens
tgcatcttgtgctactataacagaataccagagactgcataatttataacagaaatttattttctcaagttttaaggggctgggaattccaagatccaagcaccagcatctggtgagagccc

SEQ ID NO: 179168 - DNA, 765 bp, Homo sapiens
ttattcagtgtgatccagtaagtgcttattacacacccaccttactctcagcgttgggctcggtttggcacagagcaagaatttcccgttcgtcttaattattcccagatggcatcagcggattcctgtttctaaccaccaaatcagtgttctggtagaaacactcctgtcttgtgacctctaaattacacactctccatctgcactgatttgagatgtagttaccacttttctgttcctccagagatgcctgcgtcaatgccctctaggtctgaagatggtcctgttgtgcggctatttcacgtgtacaggtgggactgaaagatcagtctgggactgccctctttcccctcagcacacacatgagcagctttgtgtttgcagcagctgcgtgcacgatcagcttccacttggctttgcttctgcccttacaaaccagctgatgatgatgacacagcatgttacactgttgtccccggttttcctagattccacgcacctttgtaatagaaaccgtggttactggatgccactgctgaaactactaaacacccagagatggcagtgattataagaacattaatcgtgggctgggcgcggtggctcatgcctgtaatcccaacactttgggaggctgaggtgggtggatcacctgaggtcaggagttcaagacctgcctggccaacatggtgaaacccagtttcttctaaaaatacaacaattagcccggcgtggtggcatgcgcctgtaatcccagctacttgg

SEQ ID NO: 179169 - DNA, 653 bp, Homo sapiens
  misc_feature (572)..(572): n is a, c, g, or t
gctactttttcccacagtaatcaccactagaacatgtgatttaatgttccagagtttgcctgcattcttctcacatgttgtggcccctgagtagctgggattacaggcatgtgcccctatgcctggataatttttgtatttttaatagagatggggttttatcatgtcgaccaggctggtctccacctcctaacctcaagtgatctgatcacttcagctcaggagtttgaggccagcctggggaacacagtgagactttgtctctacaaaaaaattaaaaaattagttgggcatagtggtgcgcacatgtagtcacagataatcgggaggctgaggagcaggagctacaggtgtaagccatcataaagtggaaaagccagataattttttaatttttggaagagatgggggtctcactatgttgtccaggctggtctcaagcaattcccctaccttggcttccccaggtgttgacattacaggtgtgagtcactgtgcccagctaagctgattgttattaatgacttaatcttccttcccccaaaataagaccagttcgaattgtaaccatncaatggtctctccttgcccactgtcagatagagccaatttatcaaaacaggggaatttcaatagagaaaccgtcgattcga

SEQ ID NO: 179170 - DNA, 167 bp, Homo sapiens
ttctgccactcacctcctcctcccaaaagcatctctggactagaaagggcttaccagccccacagagggttcagtcaggacccatgtgctactttcccctggcctggcagccatgttcggtcactgcccagctgctctctcttgatgcctttgtctccctttgtcct

SEQ ID NO: 179171 - DNA, 280 bp, Homo sapiens
aaggagtggaataggaatgtaatatttatgattggataatattccattgtatgatatatcatgttgtttatccatttattaatggatatttgggttgttttcaccttttggctactgtgaatagtgctgctatgaacattcatgtataactatttaaatatttgctttgacttcttttgggtatatacctgggaatagaataggtgggttatatgacaattttgtgttaactttatctttttcctttttttttttttccttgagatgacgtcttgctccg

SEQ ID NO: 179172 - DNA, 185 bp, Homo sapiens
gataattctcaaatcagtctccctaagaattcagaggctacggtttttaagggcactttggtagacaagggtctagagaatgggaaatactgattggttgcattgaggatgaaatcacagggctgtcagaactgtctttgtgcagctgagttcctgggataaggtcacaggtccaggtggcatca

SEQ ID NO: 179173 - DNA, 1277 bp, Homo sapiens
acctctggggctcaaggaatcttcctacttcagcctcccaagtagctgggactataggtacatgccaccacactcagctaattttatattttttgtagggacaagatcttgctatgctgcccaggctggtctcgaactcctgggctcaagcaatcctcctacctcagcctcccaaagtgagggccaggtttttttgtacataatattctatatattattctgtgcacttgaaaactgcactcaccagcatcatcaatcacgtcctaattgctagcccagtggatgtttggtggttctctggaatatctctgtggtgtgctcctctgcttgccctgtcttctttttcaccctgtcctccctactaggtgctgagtactgcctgatgctagagatagggcagtgaataagacagatacaacccctgccctgccctcacggagcttaaagtctagcgggaaaacagatcagttggcaaacaattttcactcaattgataagagctaccatcagctccttttaacccctccttcctggatttgtccaggtagctttcagccaatccctttcctcgacgaggtacctgtttcacatgtcctgatctttccttgtcctctcttaaggggtcttgtggattcccagtctggatgacagtgacccagactgcgaatatttgctaagaccaggagatctaaggagcccttgaagggagcctataacccagcttggcaggatcaaggaaggcttccaggaggaagggatgactaagcagctgagacctgaagaatgggcaggtgaaggtgggaagaaagaatgatccagacagaagagatgcatttgcagtggcttagagattagaggctggttcaaggcagcagacaggtatggctgggagctgcatgggggaatgtagagagaggagtctggagaattaagcaaaagtcaatcgacttgtgacaactggaaaggctccagtaagaagaagagagccattgatggcctagcacagtgcctcatacctgtaatccctgcactttgggaggttgaggcgggcagatcacttgaggtcaggaattcaagaccagcctggccaacatggtgaaaccctgtctctactaaaattacaaaaattagccaggcatggtagtacatgcctgttatcccagctacttggaaagctgagacaggagaatcgcttgaacctgggaggagaagtttgcagtgagccaaggttgtgccactgcactccagcttggacgacagagggagactcaatctca

SEQ ID NO: 179174 - DNA, 767 bp, Homo sapiens
gataaataaaacaggaaaaaagccctgttcacttgccatagaggatgatgaacaatagacgaatgtgaagatacacaagtgcagcctcaacacatgcatcatcatctcatttaaacccactgtactgaaggagaatgtgtggttcagagatgtcaagtaacaagcaagtgtgggtgctggtgttcccacccaggcctgttgacctatttatggcatcccgactttattataaagccctgaacaaatgcaaagagtgatgctaattgttgccaaaattgagtgaaatgaaatgcaggcaattttatgcggaatttttacttgtcagaaacaccagcctcttggatttgtagttttcttcaaagatgtgtctgaaaagtggaagctatattccttccactgatcatacttccctgagaagtaaattacattttgaaatgattgggtatttttttttaatgattaggaacattaaaatacatcttacatgtacagcttgactttatgtgtatacttatgtaaccacctaaataagatgaaatagttgattttaattaacatctgcttagccttgaaatctgtcgcagcttccaagtggataaaacatcttttggtccccaagaaaaactgatgtttattttcaaaacattttggtttgtgatattgatataaaggtagttgcactttcccaacccttccagcttccttggtggaaggtacttcccatgcttgcccctggaaaggcagccacatcatcacacacatgtcct

SEQ ID NO: 179175 - DNA, 645 bp, Homo sapiens
aggatcacctgagccagggaggttgaggctgcagggaaccatgatcatgccactgccctccaccctgggtgacagagcgagaccttatctcaaaaaaaaaaaaaaaaacaaaaacaacaacaaaacacaatgagatatcactatactcctatcaaaatggcaaaactaaaaaatagtgatagcatcaaatgctgacaaggatgcagaaacactggatcattcattcatggctgctaggaatgtaaaatgatacagtcagtctggaaaataattttgcagaccttttaaaactaaaactaaaactaccatacagcccagcaactgataacccttgggcatttaccagagatataaaaatttatttttgcacaggaaattgtatatgaatattcatagtaattttattcattaacagccaaacacagaaaactacactaatgttcttcagctggtaaatgtttaaacaaatgaaactacattatatgatagaatacttctcagcgcccccctccccgccccttaaaaggaacaaactagtgatatacacagcaacttggatgaaccactggggctagagagagtgggtgaggttatcaaaaagttagcaagagggagtcttgtgggtgacaggacagttaggtatct

SEQ ID NO: 179176 - DNA, 693 bp, Homo sapiens
agttcagtctgtgaagattcattattgatcagatatatacaatctgtaatttggaatattcattcatatttagttgaactttaacaagtcacaagttgttctccatagcaaaccgtaaaagaataaaattaaagttaaagagaggtctgtccgtcagcatattaaggtttgtctgttttgtttgcctcattaatattttgtttcccttttttctgatgtgatcgttttcctccaatttagatacgtctgcaatttattcttcagtctcatttacattcatgacccatgatcctcaaaacctataccttctctaaaaccttatctggaaccatggcctccctccactgtggacgaggcatcattctgtaccatacgccagttcctggttgtttcctctggcatcttcttttgtagctcctttaatccttcagactgcttagatcctatgatctgcccccataacacttactaattttatcttgcatttttttacattggcaagtattcgtttacttactcatgcatatttgccaaaagtctgcatttccattcaacaggaatctcattggtaacagagattacttaaccattaatattgatgatcaactggctggctgtttaaattgccactttcctattgaattttgaagggtgcccatggtgaatcttgtgtgtccctcatgcttggcacac

SEQ ID NO: 179177 - DNA, 398 bp, Homo sapiens
cccagaatctctggctgtactgattgatagggtcttctgaacgagtccaggttgtgactattctaatgcagaaatatcaacacagcatcaaggaaaatgaataaccaggtgaacatgttccagataaaggaacaatataaatcttcagaaacaaaccctaatgaaacatacactttgcctgatacagaattcaaagtagctgtcacaaagatgttcagtcaagtcatgagacaatacataaacaaagtgacaatctcaacaaagagataaaatggtaagaattgccaaacagaaatcatggagctgaagaacacaataattaaactgaaaatttactagaggggttcaaaaccagactagatcaagcaaaagaaaggatcagtaaatccaaagacagg

SEQ ID NO: 179178 - DNA, 235 bp, Homo sapiens
ttccaattctcacaaacaaatatgcaagaaaaaacatgccgttttttcttcacagatactgcaacgattatcttgagacataataatagaagctacatctactgtaggtatcctatgtggtaggcattgtgggtagttgcctatctctgattacaattaccagcaaagtagctcccttgcccatttcacagatgtgtaacttgcctagtgacactatataagggcatatggctag

SEQ ID NO: 179179 - DNA, 537 bp, Homo sapiens
cccacttctgttcaacacagttttggaagtcctagccgagcaattaaactaggtaagaaaaaaaaaggcctccaaatttgaaagaaagaagtaaaattatctctgttcatagatgatacatgattttgtatgtagaaaatcctaaaaattccacacaaaaatctattcgaactccaacatattcagcaaagttgcaggatactacatcaacacaccaaatcaactgcatttctatacagtaacaatgaacaatctgcaaaggaaataaaacaattccatttacaatagcatcaaaaagaataaaatccttagggatagacctaatcaaggaagggaaaaatctgtatactaaaacaataaaacactgctgaaaaaaattaaagaagacaggctgggcgtggtggctcacgcctataatcctataatcccagcactttgggaggccaaggcaggcagatcacttgaggttaggtgttcaagatcagcctgggcaacatggcgaagccctgtctctactaaaaatacaaaaattagctg

SEQ ID NO: 179180 - DNA, 175 bp, Homo sapiens
acgaaatgggacaagaaggccaaaaaccaggtttttcagattcataggagcatttggaaatttggagtcaagaagctgagaaagacaagagattggggatcttgggtagggaggagagtgagcatcagagaatcttcgagttatgtggattgacttttcaagtagtcacccactt

SEQ ID NO: 179181 - DNA, 235 bp, Homo sapiens
ctacctcattctgcaaaaaaaagttcataagggctgttaagaaacatttgtatagagcactaaaagtgcatcaggaaaaggttttatataaatgttaactccaaatatataataaagatcttttatgtctatacattttttaaaagatggtaccctccttgacaaaggatggtatgcaacgtcaagttttacatcctaaaatacgtatcaggttccccatccagtagtacaaagt

SEQ ID NO: 179182 - DNA, 499 bp, Homo sapiens
aaatactatttggacacaatgtataattcttctatttaatagtatgcagttttcctgctaaagaaataattttagggctagaaaagaatatctagtatctttgtagattaaaaaaaaaccactcaacacacagaagagacaaaatgcaaaacaaacaaaaacccttaaggccaataaagcctagatgatttgtttaaggtcacactgcttgttaatggcagagtcaaaaagaaaaaaaaggcaggtctcacaatcccttggttcaactgattgtcggctaagattttacttagtaagtaattttgtaccagtactaatacgcaatatttgacgaacatcttcccctttttttttttttttgagatagagtctcactctatcacccaggctggagtgacatgctgtctcaataaataaatacattcatctgaaaatgatgaggacagacacaaacacaaagaaagccatcaagaagcagaagtcactcaagatacaggtc

SEQ ID NO: 179183 - DNA, 676 bp, Homo sapiens
  misc_feature (674)..(674): n is a, c, g, or t
cttttcccctcaaaatcagtttcctagttttttgtttttgattttttgtttgttgtttttgagacagagtttcgctcttatatgccaggctggagtgcaaatggcgtgatctcggctcaccataacctccacctcccgggttcaagcgattctcccgcctcagcctcccgagtagctgggaccgcaggcatgcaccaccatgcccagctaatcaaaaaaaaattttgtagtgatggggtctcactgtgtttcccaggctggtcgtcaactcctgggctcaggtgatctacccgccttggcctcccagggtgttgggattattgtcatgagccactgtgcctggcccagccatagacttcttacagttgaaatacaatgatgattttttgcatcattagtcatggttaaatgccatgtgagaattatgacatacaacatatttttattaagtacaatgtttgttgtaggttttgtgggtttctcttcaaaacctttgccagttttggggggtttgggttaattattagtggaagggtgggttgtggtattgtattaaaggtcagtggtgcatttataggattaggagtatttttaatttatttgaggggaaagacctgggtacgagctcgaatcgaatatgtctagtgttctgttaatgattccgcaaaaaaggngg

SEQ ID NO: 179184 - DNA, 204 bp, Homo sapiens
tccacttcaacactagttcatttccatgacacttttgtgtcatgacagtttcttttcctcaagttacaagttatgcaataagacaaacactgttgatggaattattaaggaggagttacagacatcaatcaccatttgatgtaatgccagacatccaaaatggagcttctgtccaaggatcaaaaaacataagggagggccatg

SEQ ID NO: 179185 - DNA, 335 bp, Homo sapiens
tggacatgaaaatttaagggcgaaagagatgtttaaatcctctaaggaaagctatgggaaagctgtgtaggcaccattagtttatttggatcatgaagtccaggtaagagattttcatgttcatgtgtcaagtaacaaagataagtaggaaaagtgttgtcatgtgttttattatttaataaggaaatacattttgttatgaatgaatacatttttttcttggcgtgtttaattggtattccttctcaaaatgtccaatgactcatcaacttagttatggcaggcatcttaatttgttaagttgcttaagttttctggttgttcatttccatgaa

SEQ ID NO: 179186 - DNA, 715 bp, Homo sapiens
atgaaatgtctagaacaggcaaagccatagagacagaaagtaaatttgtagttgggtagtgggctaagaggtagagggtttctttttggggtaatgagaatgttctggaattaaatgatgattgcacaactcaatatactaaaaaccagtggattatatactaaaaagcgtgaattttttctggcgtttgacttacattgcaataaaactgttataaaaatagtaaaattaggtcactcctaatctcaggcactccctgcttaaaatgtatcagtggtttcctattatatttcatataaaattcagattccttatcatgaccttcaagaccctatgcaaccgacccctgccttcctctgatctctgcttcacccatgtgctccagccacacaaatcttactattcattagagatgccactttggtttggatgttctcattcatgtcttcctttctaaagtgtttcttctcagtacatatatatttactttttccttctcattcactagtatattccataagggtagggatgctgtctcacttactatactcccaacatttatgacagattctggcacatgatatctacttaataaattctttttgaattaattaaaaatactgtagagttttagttatttttagttattggggcgaaaggatcacttgcagccaagagttcaagaccagcctgggcatcatggtgagaccgcatc

SEQ ID NO: 179187 - DNA, 779 bp, Homo sapiens
cctgtggtcccagctactctggaggctgaagtgggagaatcacttgaacccgggagcagcggttgcagtcagctgagatcgtgccactgcactccagcctgggcaatgaagcaaaactctgtctcaaaaaaataatagtaacaattagattctgcgcacagtccataaaactatgccaagtggaatttgggtttccagagccattctatccttactgttttagtccatataaccttatgtattatttgtgttttttgtttttgagatggtcttactctgtcacccagcctggagttctgtggcacagtcatagctcataatagcctcaaacttctgggctcaagcaacccacccacctcagcctcccaaacagcttgaactacaggtgtgagtaaccatgcccagctatttttttcttttttgtagagagtgggactaactatgttgcccaggcttgtccagaactcctggcctcaagcaatcctcctgacttggcctcccccagcagtgggattacaggcatgagcaccacatccagcgcttacctagtcttagacaaaacactaataacaacaatcacaagtcctggactgctcaaaccaagttaggacctaaagataagaagacacaagaccaacgaaaggcctgtaatcagctcagtattaaccatccagtaggcaggacaggaactctcaatataggaaactcttttctggtgctgtatcctttatccactattactggctacacgcttaaagcaagaaactcctgggcaaaca

SEQ ID NO: 179188 - DNA, 714 bp, Homo sapiens
gggctcctctcgaattcgacggtttctcatgaacatcctaccatcgagagggcccttgctgtagctggtgaagacaaaatcttctttttaaaaagctaataaagattttcaaattgggatcttttacagatcagattttacctctaaacaacaagaaaaacagtttaaatcaacaagaacattagagccctaatcagaaccacaagatagggattgactcctgaaactcgcagatgtctctagtaatggaattggtctgtctaatgtgtttccattctatttccttggtgcagaagaaatgctgctttagtgttcttgtaggtttaaaaaattaataaacagagattaagaggaattactggatttgtttgctgtgtctaagcaatatatctaattagacagtacaactaaaggaatatggggagctaggatacaatgtgaattgatttgtagtactaggttaaggcatgatgacatctggaaaagtgctaaatttctttctttctttctttctttctttctttcttttctttctttcttttcttttcttttcttttcttttcttttctagtattatttctgaagagtggtcagctaacttttcttttctttccttttttccaagacgcgatctcgctctatcacctaggctgttgtgcagtggcatgatctcaactcactggaacctttgcctcccaggtttaagcaatcctc

SEQ ID NO: 179189 - DNA, 822 bp, Homo sapiens
tcaatcgtacctcaataaagctgaaaaaatgtcattcagaaaggaagcaaacagtagatactagcattaaaaatatgttgtaaattttcaagcatagaatgataacataaggttaggaacaagaatatgtgtatagatttaaatatttatctctgtgaatattaatccatagatacaaatgttgaaggcaagttacaatcttgaagaaaatgaaaattatgttgtgtacctataatatgaaaataaaaaatcacacaaaggcatataccttcactcaaggatgtatactcgagtatacatattatttataatagcgcaaatttgaaaacagcccaaatgtccctcagctggtgaatgaataaaccagtggtgatgccttggaactgtggaatactattcagcaataaaaaggaactactgactcggcaacatgtgtaaatctcaaaaatattatgctaagtgaaagaagccagggtcaagagatgacatactatatgatttcttaaaacttccagagaagacaaaattcaggacagaaagcagatcagtggatgccaggagtgagagttaggggaggaaatttattgcaaaggagcagtaggggattgattgtggtgatgtttgaaatgttctatgtcatgatcgtggttgtagttacatgactattctgaaagttcatatttaataagtgatataaaagaaaaaagtattaatggcttaaacattaattttccaaatgagagcactaattaaaattctcaagtgttgagaacaaagatagtatctcattgtaatttttattctttttaaggttagtgaggt

SEQ ID NO: 179190 - DNA, 350 bp, Homo sapiens
agatgaccaaggcttttggattgagaaactagaagtatagaattgttataactgagatagtaaagtctgaatatggagcatgttgagcaggaaagatcaaaatatatttagttttcaagatgttatgtcagagatgtgtatcaggcatccaggtggacatactagcctagagttaagaggagagccaggctggagatagagatgggaactcccagcatactgagcccagacgagctaactaagggatagctcaagcgtagatagagaagagcaaagtcccagtgaccatgacctggggcactctaatattaatttggagtaaagaaaagctagcaagagtctgaggagga

SEQ ID NO: 179191 - DNA, 273 bp, Homo sapiens
gaatgactactaagtggtatggggtttcttttctttctggggtgatgacaatgttctaaaattaaatggtcgcagaacttggagttgactaaaaccaccaaatagtatactttaatagagcaaatcgtatagtatgtgagttatgtcttttttttttttttttttttggtgggtttctagacagggtcttgctctgtcatccaggctggagtgcagtggtgcaatgacagttcactgcatcctccacctcctggacccaagcaattctcctac

SEQ ID NO: 179192 - DNA, 338 bp, Homo sapiens
gtttatctcaccaaggcaaaatgctacatatagggcagtttattttttaaagcattttttgctagcctccttgcagaatcagcctgatgtatatgaagccaatttctacagacttgctctggtatatgcagcacaagagccagaaatattttttgtagtctggatctaagtactttctgaaatgtcttcccttgaaagattctaacttagcactattctggaaccacatgaacatctgagcagaactacgtcttttttgagcaacattaacagtgatgaaaaatgcacatcaggcagttagattgcaactaatcaagagcaccacttcagcctagtat

SEQ ID NO: 179193 - DNA, 410 bp, Homo sapiens
gctacaagatatcacttcactcctattaagacaactaaaaccaagaagacagataataacaaatgttgacaagaaatataaacgctcataaactgctaagattgtaaaatgggactgccactttggaaaacagtgtagcagttcctcaaaagattaaacattaagtgaccatatgactcagcaattctactctcaggtatatacccaatagaattagaaatatatgtgcaggccaggcgcagtggctcacgcctgtaatcccagcactttgggaggccaaggcgggcggatcatgaggtcagcagatcgagaccatcctggccaacatagtgaaaccccatctctgctaaaaatacaaaaaaaatagccgggcgtggtggcaggcacctgtagtcccagctacttggaag

SEQ ID NO: 179194 - DNA, 260 bp, Homo sapiens
atgactgcaaagacagtaaactccttgactcatgcatttatttattcctcaaacaggtatcccatcccattgtgttataataatctattaattgtttttcccagtagatactgagattcttaaaaataggaactgtcacctgggtagacctagtgcctagcacagtgctgagcacacgtatggttttattcctaatatgaattcaaggaaggaaggtacaagtgaatttctctttcccattgtcagcatgagtcgcctct

SEQ ID NO: 179195 - DNA, 681 bp, Homo sapiens
ttcactgaaaaggtctagaaataatgaccagcccagtcattgagcatccctagcactcaaagggacccagggatccttgaagaaatagctgtctccagacctgagactggcagtactgcagatgagcctagaatatggtatcaaaccagaaactaaggagggtgtcaaagattactagagtcctgtcaaagagaaaaacaaatctgatcaggcctctagatctacccactaatttaaaagaaatttgggggacagagggacatcttcaagggtaccacagaatcctatgggggagtactactggatgagtgacctggtttcttcaacaaacaatttgcaatgaaaagcaagagatagagagggaaactatgaagtaaaggagactataaagagatgtaacaagttgcacttacatggactttaatagatcccatttcaaatggggggaaattgtttagaatattataagctggaactggagaggtgaatattatggcacatgcaggactttcctgtgtaaactagtttaattttgatgataattaagtgttgtggtgattgagagaagtcttacatttggatataatatttatgtgattgaattttccatggatttcttcatattattttctatatctcttatattattcaaagttaattaagaagtttttaaaaagacgg

SEQ ID NO: 179196 - DNA, 286 bp, Homo sapiens
taaatacaatcatcctttcaaaggactattaggaaagctatttaactttaaagattgataaagattgaaaaagctctttggagaactagactatcagcaaaacaaagaaacttattttacatgctaacagcaacttgatcaactgcattcaagaccaccgataaaacacgtcagtctgcctcaaagtagctacagtaacacctgggttccatttaaagagacccactctctcctttttaaccatcttaaaatctgttccaaaatttgcatgtttcccatataatgt

SEQ ID NO: 179197 - DNA, 373 bp, Homo sapiens
tagctcgggcaggaaggtgggggacaggaggagaaagccgttcaaatgaaatgcaaacaagaacacagaggctggctcagctctttgcggtccggcaaggcggcggtgatgaagcagagtccccggctagcagcaggctgggggctgcagaggagggggcagccccagacaaggccggctccttcgaggggctcaggcgcctaaagcttgcaccccaacccccaattccacaagtaggtgcccgtggcacacgcagcccggacccaggccaccacggccaacctgctgaggggctgaggggtgttagcggcccttgcaggtcctgccctgcctcacatactccagggcacacaggacccatttccactcactg

SEQ ID NO: 179198 - DNA, 234 bp, Homo sapiens
cactcaatggtggacttttaaaggttccatcccgggcccttgtcctctcaaaggcctcccctgtgtatccccctctacagtgcctgtcgtttcccgttactcctcctccagtggatcattccaattacagggcctcggttaggtctacctggccaggtagaactatccagtaaaagcaaaagcccaggaaggggacagaggggcggcccgataagccatggcgcagggggagag

SEQ ID NO: 179199 - DNA, 611 bp, Homo sapiens
cttggtggcatgtgcctgtagcagtcccagctacttgggatgctgaggcacaagaatcgcttgaacctgggaggcagaggttgcagtgagctgagatcgtgccactgcactccagcctgggcaacaagagagaaactccagtctcaaaaaaaagaagaagggggtcgaggcaaagccctggagcagagaaagatcagtcagtggagacaggaagaaaaccaagatcatctcagggatggaggattcacttaactatgctgaatgctacagagaaagataccattacagaaacagacatactgataaaatttggaaataaggtcactggtaacttaaaaaataagagcagtctcagtaacatggtgacaaagaagagtaactaggatgatttacagtagacaattatttgcatgtaattattataataaatattttttaaaataaaattattttaaacattttgtcagttcccccatatgactgatttcccagagggagagaaccatgtcatattcatctctatgttcttagcaaagtgctgacacacagtagatattttaaaaatctgaatgactactctttcaggaaaacatcttctgaggaagaaactc

SEQ ID NO: 179200 - DNA, 335 bp, Homo sapiens
cacagtgtggcatttgcaagtcattgggtgtgtccattttctgggggtggggtgcacagctttcatcatatttccagaggggtcctcagcccctaaaagcaataacattggcatgtgggcagttctgggtttcagggagagccctatccagcagttgtggggctggtggagacagtcaagggtctgctcctgggatccaggcaggactgtgaggtggcactggagcggtgaggactgggtggagggcaaggggaagaggttggcctaggagctgcttcccccatcgccccataaggactcggggactacctcaaacattagcatcccaggggagc

SEQ ID NO: 179201 - DNA, 509 bp, Homo sapiens
tacttgacaacatgataatggagtcctgagagtctaaaatttgttatggaggcagtgagagagtgatatttgaccttgagtctttcttgaacaaagaaaaattcttttatctcctggggatgttaaaagaagaatgcttcagggtctaaaaccaaagcaagaaagtaatttttttaaaaaaagagtgctcaaaagacggaatgtggaaagccacaagagttgcttgatagaaaagtgctaagtgggtatgcgtggtggttcatgcctataatcccagcactttgggaggccaaggcaggtaaatcacttgaagtcagcctggacaacatggtgaaaccccatcgctactaaaaatacaaaaattagacaggcatggtggcgcgctcctatagtcccagctacttgggaggctgaagcacaagaatccttgaacccggtggtggaggttgcagtgagctgagatcgtgccactgcactgcagcctgggtgagagagtgagattccgactc

SEQ ID NO: 179202 - DNA, 394 bp, Homo sapiens
tagatatctcagtatgcatatgcaaatatttaaaaaatctgaaaaaaattcgagacacttatgcttctaagcattttgcataagggatagtcacccggcactacctagagttttctttttcctttgttgtgagccacatgtaatgtgcctcccattccctgctcactgattttctcccctctaattttagtttcagaaacacaacagacctttccataatgcagctagattgtggttggctctccctatatactgtctgcagactacactacgtggaatgtccatggctataatatgtttgttacttgtaacttgtgaatatatcatttttcctttcccccataccaacagatctaccaattccagcatgaaagctattaactttagggcgtaa

SEQ ID NO: 179203 - DNA, 724 bp, Homo sapiens
atatttcttcaaataatctttcctttttctgtatctcttcttcttctggaactcatacaatgtgtatattaggccactcaattatgtcttataaatccctttaggccctgttcactttcttccatttcttttctttttttttctgactcaatgatttcaaatgacctatgttgaaactcactgattcttttttctccctgtttgagtctgctgataaatacctctagtgaatttttcaattcttttattgtatttttagctccagaattttttatatagtttctatctttttgtttatattctcattttgttcataaaatgttttccaggcttcctttagttctttgtttctattttcctttggctttttgaatatatgtaagacagttgttttaaagtttctgtctaataagtctgttgaatgtctcatcagagactgtgtctagaaatttaatttattcatttgaatggccatcttcccctatttctttatattctttgtcatcttttgttggaaatggaacattacaatataacatctatcccagtctttgaagactgctatgaaggcctttactaactagggggttgttgagctttgagatcagtcaggagtcaatgcttaagggcttccctggtcttttgtgggtatgagttctgtctgggcttctgtatgtgtgctgtatttccccccagtttacctgagattattaatatttaaaac

SEQ ID NO: 179204 - DNA, 408 bp, Homo sapiens
tcaatattgtcaagatgtcagttcttcccaacttgatctattaagatcaacgcaatcccaatcaaaatcccagcaatttttaatacacatcaatgaattcaatctaaagtttatatggaggggcaaaagactccgaattggaggactgacactacctaacttcaagacttaccataaagctacagtaataaagacagcatgtatcaacgaaatagacacattgatcaataaaacagaattgaaggcccagaaatagacccatataaatgtattcaattgattttttgaccaaaaaacgaaggcaatacaatggagaaagtcttctcaacaaatggtgctggaacaactggacatttacatgcaaaacaatgaacccagaaacagatctgacatccttcacacacaaaa

SEQ ID NO: 179205 - DNA, 430 bp, Homo sapiens
gaccacctgttctgatttccctcaatcccatgagaactactgtccatgtccacttacgtgaggacagagcttggtccctggttgcatctaagcaaagaaaagaactgaaagcgaacttgggggcatcttcctcaatttcttcattttgcagatgaaaatccagagaagagagtgacttgatcaaggtcacagggcaaataaagggacaatataaacacagtaaagggggtgagtatcaaatacaagagtcttattttctttctctatatgtgttattaacctagaccaatcagagctcatgcagagaaaaggcaagacttgtgagaaaaagatgttgcaaaggaaggaaagaagtccagagaagcttggctgccaacttcagtgctctacaggactgtggaaagaagaactgaggcacgcatcatgtcac

SEQ ID NO: 179206 - DNA, 434 bp, Homo sapiens
tgcacactcctgcctgtgaaaccacaataaaggctcttgcccacattttcctttcactcccactgcctcctgactgactcaggtgcttccccatggggcacccctgcacgccatgccatgcctcatgcatgtttctagggaactgtgagtaaatgtcttcctccatgaaagtgattcctgtgtctgcacgtcttgccacacctgattaaaacaaaccctggctacctttacaacccccaggtccatccagccttctgagccaccaccctgacttgatcgagcatcaggaatctcatttctgggcggggtgcagtggctcacgcctataatccctacactttgggaagccaaggctggcagatcacttgaggtcaggagtttgagactagcccggccaacatagtgaaatcctgtctctactaaaaaaaaaaaaa

SEQ ID NO: 179207 - DNA, 358 bp, Homo sapiens
gagaaatgagtgttccagagagttgttatattgtgctgtgttgtaaagctggaaaaggctaaggtgaaataaccctaccagtaagaagagaataactgagtttgctagtttctgagttaaatgctggccaagtagaaagaagtttttaatgcaccttctggagtgattttcaaatttttttgtgactctcaggccttgactatgaaatacggaaggtgatttcttaaaactaaataaagttggttagtgaggtaaaaaaagaaaagaaaagaaaagaaaattgataaccaaccatattactatgaatgtaaaatatttctgaagcaactgctctatgaacaagagctcaatgcagaga

SEQ ID NO: 179208 - DNA, 420 bp, Homo sapiens
tagggaatattcatttattccagcaccatttgttaaaaagccttcttttccccattgaattgtcttagcgtccttaagaaatagttgtacacatatgtgtctatttcttgacttcctattattctgttccacttatttataagtttatcttttaagcaataccaaactgtcttgatcactgtaactttatagcgttcttgaaatttggtaggatacgttttccatctttgttccctcttaaaattgctttggccagtctagggcctttgcattttgatatgaagtctggaatttatttctacgtattttatgtttttggcattattataaatggaagtatacatttttttatttcactttccagttttttgttgctggagtataagaatactgttgatttttatatattaaccttgtatc

SEQ ID NO: 179209 - DNA, 377 bp, Homo sapiens
agttgtgttgctctgtgactagatggtaagagaaagagagcagccttacagtcggtttgcctgaaaatgataccattgatttaagtgagatgccacaatctacccagtttccagaggaagatctctgtttttgataaaatagaccatgaacaagtcagagcaaaggggctgttcctagatgcaaatgagccctcacaggaggtctctggggtcccaaaacaaacgcagaaccatgctgacagttgggtctgagttctagggcatgttctgtcctctcacagggccatgtgggcagccagccctcatcctttttatagtccgcttgcttttaccggccacagcatacccatacaaccaaaaaatctcctgtgccaaag

SEQ ID NO: 179210 - DNA, 318 bp, Homo sapiens
aggagactgtaacttcccacacatttcctctggctttttcagttagcatagagaaccaaagttcccacctatggccctacaaagaaaggctaagtattaacaaagtaattctatgttaaaacttcttaaggaatggaaatatcgagtatgccaagtctttgtttctgacaaacaaggagatgccgggctgtaggactgctgagaaaacccgataactttcccaagtacacaacaacgcgaaagacgttaatcaagcccaaagttctctagcccaaggttcccaaagcccaaagaactttaactgcacttagcacttat

SEQ ID NO: 179211 - DNA, 376 bp, Homo sapiens
gaggccagtgctgctggagcacagtaaggtagcaggagagaggtctgaagtccgaatgataggctggggtcaaatcacatagatctagtaggatttggtaaggacttcagatatttagtctaaaagtggtggagagctcttggaaggttttgagcagagaagtgacatgatctaatttatgaaagaataactttggctgctatgtgaacaataaatggcaagcagcaagagtggaagttgggagtccagttaggaagtgactacagtagtccagatgaaaaatgatgatggcctggaccagggtggtggttgtggaggagtaggaaatcactgagttacgaatctagtctgaaagcagagctcacagtacatactg

SEQ ID NO: 179212 - DNA, 400 bp, Homo sapiens
aaaaatttttgtctcttctctttgggaatcatactccaagttttttgctaaaatcatttacttttttattctggtgggcttttcttcttatctagttattccaggtggtacaatctgagcaatgggtataaccagaaactaaaaagatgaggacagaatatccccaattaacctcatcttcaaccaactcagtggtattggttgccaagggcttgaaaatgagcccctcagagggaacaggaggactgcggtggagacagtgtccacacattcacacaggcaaccagcaatttgaattaattcctgaaaatgtgatgttgcctggtgtttaaaaagtaaaacaggtgacacctctgtacacctgcatcttttctctttagtggttagttgctcatgatag

SEQ ID NO: 179213 - DNA, 670 bp, Homo sapiens
gcatccccatcaaggagggcacatagcagaggcagggcagccaggccagggaggctgtggaagtgacttctgtcctaggagggagctggatggccactcttagaggtccctttcaacccagaaagtctgaagttttgagatggaccccaggttctgttgctgctttgaagcttctgagattggtctcagtgtgattggctggaaggttccaagattgttctccaggccctgaatttgatgccatggttcagactgtgaccccactactccaaaatagacctcaaaactctgtggctgtcttcagggctttgagattgactccagtgtcgtaaggctctgagcctcttctggagcttctcagtgtgatccaaggttctgagacagacttcagggttctgaaatagacctcagggttctgagattgacctcaaggttcagagatagacctcagggttctgagattgacctcagtgttctgagatagacctcacggttctgagattgacctcagttttctgagatagacctcaaggttctgagatagacctcagggctctgagattgacctcagggttctgagatagacctcaaatttctgaaattgacctcagggttctgagatagacctcaaggtcctgagatagacctcagggttcagagatagacctca

SEQ ID NO: 179214 - DNA, 523 bp, Homo sapiens
tagtggggggtggggcagaagtagggatagttaatgggtacaaaaagaagttagaaagaatgaagacgatctagtacttggtagtgcaacagggtgattatattcaataataatttcatgatacacttaaaaataactgagtataattggattgtttgtaacaaaggacaaatgcttgaggtgatggatatctcatttatctgatgtaattatcacacaatgtatgcctgtatcaaaatacctcatataccccataaacacatatacctactctggacccacaaaaattaaaaattaaaattaaaatgtaccgcatctgagagaaccagatcatctcccccacggcttaacatcctccagattttctagctaaaaaagtagataaggctatgtccatgaccaaatgttcataattcttgctaagatgcagagcccaaatggaaagaaagttattttacattttattggaatcactaatttgcctttcttttgtttgtttgtttttgaaacagaatttcactct

SEQ ID NO: 179215 - DNA, 301 bp, Homo sapiens
gaagcagctttcggagaaaccaaatgtcaggaaactgctggcagctgatcacaggcctgccgaagccaaacgcctccttcccactcttcgcagtgtgtcctcgacgaggccaggggcagaggagctggtacactaacagcctgtcatggtggctcctggactaagaatgccttcctgccctttcatcagactgcatctgatttctttttttgaggtggggccttgctatgttgctgaggctggtcttaaactcctggcatcaagcggtcctctccccttggcctcccctcctctgtgctgt

SEQ ID NO: 179216 - DNA, 541 bp, Homo sapiens
cagtctcattattcattaaaagaagatagtgtcataccaaagccttcctccttcaggaagtctttcccaatcatcagagccaaaaataatagtattctataatatgttttatttgaggtcactatcctatttttgcatatttattttaacatcatcttccttgtagtgtagagttgttataatgctgttttctttgaaaatttaagaaaaaaattcatcaaaatgtgctactcatatagctctctttcccatgacctgagggctggcccatgaaagccaacagagcagccagattccagcattcttggacattgtcatggcaccatattgcaaattctccctgccagaggaggtgctgccatgctagcctgagctgagtgcactctgcagcgtatatggcttattacatcagatctgctatatgccatgtgtttatagacaacagttttaagccataatgactgaaaaaaaaagtctgaaaacgacagtgctgcaaagaaatgcaagagtgccatgctgaatgttaaaaggtaagttttag

SEQ ID NO: 179217 - DNA, 246 bp, Homo sapiens
cactgaaaccaaataaaacagaagagacaaaatcctgcagctcgctctggcccaaacctttgctagggcaggcaatcacaaatgagcaaattataataattctaatgaccacgttcccgcaattgacttggaaatgctggattaaaaaaaaaaaacttcactcctgatccacaccctggggacaatattatctccccagtgtcctacctagcccacaactacttatgtctcatgccagactgagcc

SEQ ID NO: 179218 - DNA, 812 bp, Homo sapiens
tattcacctctccattcacatgtatacttataagaagaaataaaagaaagatttttatgacataaagaaaaattataaaacttaataacattaaaagagatttaaaccaatgggaaggtaaggtataccacgttcataaacagaaagagtccagtagtttaaagctaccaagttctctcttaaaacttaagtcaaaaacttaccaagacttttgtacaacttgacaaattaattctaaaattctaaattgattctaaaatttttgtgaaggaggaagagctaacaacagccaaaacacccctgaaggaatgggaggagaaagcagaaaacatgtcctattggatgtcaagatctttgcataaagcactttagttagaaatgcaattttgacttaaagatagaaaaataaatcaattaaatcagaagagaattagcaaaaacagacccacaaatatatggaaatgatatataataaaacttacagtacaaataattgtgtaaaggaaagacaacttaatgatactagaaaaatagttatttatataaaaaattaaattagatttctctctgtgtataaaaatctattccagttaaagtcttaaatttgaaagtgagtcattttagattttattttaattttagaagacaatataggagaatatctatatgacctttgggtggaagaaaattttataaccaagacacagaagtgctttcataacataaatttgtatctatttaacatttcataaaatatactattttgcatttgctagaatgacaataatttaaaagcctgctgatatcaagtt

SEQ ID NO: 179219 - DNA, 628 bp, Homo sapiens
cctggctaattgtgtatttttagtagagacagggtttcaccatgttggccaggctggtctcaaactcctgacctcaggtgatccgcctgccttggcctcccagagtagctgggattgcaggcatgcaccaccacgcctggcaaattttgtattttcagtagacacagtcaggctggtcttgaactcccgatctcaggtgatccacctgcctcggcctcccaaagtgctgggattacaggtgtgagctactgcgcctggcaacatataagtcctgttaacattcccatggcataaggagacaaggggttggtggcttcattgtctgagaactgtgtcctgtctcctaaggtggattttttttcagctccagagaaggcgagaggaacatagctacacacctccaactccccggcctaggatttaagctgcagtttaggacggtgagactctgttcccaagcaggtgcccagctagcacatcctggcacatccaccagccccaagggactcagctcacgtcagcaggagcccagaggcctggatgggaagaggacactccctggggccctgctgtttctgtttcaagacccgatgtcccctgggctgagggaggacagaggggaggggac

SEQ ID NO: 179220 - DNA, 382 bp, Homo sapiens
ttgtttaacatgtgaaatatcttagtaccctgaatttcctcctagatgatagattttaatggcatcgtttgaactatgatttaactcaaaattaaattgtattttaagatcttctaaagtgacagatttggttaaattatacatcatttagtggtgtacatattcatgaaaaaaactgttaaactagaaagattactttttcttaagtttcttcattaatatgtactgtatttgctatgtattcattcattttgtttggatagaatgacagacaagtggtagtagaatgacagacaagtggtagtaggcaccaaaggtgctttaaaaaaaatttatgggccaacattcatgaactaagtcagcagccattaaaaatgacata

SEQ ID NO: 179221 - DNA, 707 bp, Homo sapiens
ggattacaagtgtgagccactgcgcccggctggaatatgccttttaatcttaaactgcaccacagacccattctgccctgccaccttcaaattaataggattgttgttctcaatcttgcctccttctttgggctttctgtcagccagagtcttcttagctgccacttcacaaaacaggtgccagttctgtgccaaacaagcacacaagctgtaccctattaaatcattttaaaacataacagcaaggggaaagagattgagtggactaacatattttggttaggatgtggggaggggagagagtggaaggattataccatctgaatcttaatgttactgttcgtgtactgtttgatgcatcagacttccttgctggtggtgtagttatgaggaccatagtgaggatgagcaagactgctcagcaggtagaaggtggagccagcacacacttttcttttggagaactgctggaacctgactccagctataactgcatttataaccagttataattaacctactgagcagctatggatggtatctgtgtttcttggacagagcacgtgtggggccagagtggatctcaccagtgagtggctggtttagggataacatagttgtcagtctggcagtaacatgatcattaccttatgaatatttaagatttatttggggctgggcaccgtgtcccacgcctgtaatcccag

SEQ ID NO: 179222 - DNA, 415 bp, Homo sapiens
gtgaattgtgtattgcagattcaacactagaaagcccccatcacacaccacttgggtaaaaaaaacccccaaatttcagaactcctctcagataccaggactattcaccaggtcattaagaagcaacagatgctgaaggggagaaagaggacaaagtgccagcgagtccaccctgctgatcccgctgatctgcttggcttagagaagagctgtttcacgaaagaggagaaagtttgccaaatctactgctggttaagtttttttcccgaagcaaataaggtagagatgaatttcttgaactgccttgtttttcttgaggcggagtttcactctgtccctcaggctggagtgcagtgagctgagaatgcaccattgcactccagtctgggtgacagagcgagactccatctcaaaa

SEQ ID NO: 179223 - DNA, 444 bp, Homo sapiens
cgaggtaggtggttcacctaaggtcaggagttcaagaccagcctggccaacatggtgaaaccccatctctactaaaaatacaaaattagccgggcatggtggcgtgcacctgtagtcccagctacttgggaggctgaggcaggagaatcgcttgaacccaggaggcagaggttacagtgagctgagacccagcctgggtgacaagagtgaaactccgtctcaaaagaaaaaaaaaaaaagaagaagaagatgatgctgactaaatatgtctgagtggatgcacacatgagcaaacaggccaccaagctctcgacagttccacgccctccttgcagacacccagtgttggggaccactgtggcctccccacttcctgctcatggatcagacagatgacctggaggcacagtgatgaccgccacccccacccccacgctggccaca

SEQ ID NO: 179224 - DNA, 412 bp, Homo sapiens
aaattaacgttttcccccattgcccacacatagtaagtctcttatgatgctgctgattagagaagcaaaagttgccgctacaattctcttcctgcattttaatataaacaatcatcagtcttttcttcatagagtgcagtgtgggcactatcatcagaatgtaccagcactgggtgtacaaagtttacaaagattagcaagagcaaaagcgttgagatttttgaaattcatgctgctgcaaagaagtatgtaaaaactcactcactatagaggaccacacagaaactcaggcatgaagttatatggctgtgtgattggtttgggagaaggaacagaaagcacttccaccaacctatatgcctgagcaaattaatgcaaaacctcagaagctacaaaaaagtttatctaccta

SEQ ID NO: 179225 - DNA, 596 bp, Homo sapiens
tgcatattccatggtccaggcagttcctctcataacgaactatcagacagaaatacttgtaaagatacttcatttattttgaaatatttttcctcttctaatgtattcatttattcattcaacacttatttttgagctcctactatgttccaggcactcctctagcaaacaaagcaaattctctcctctttttcaatatttgtggaaaaagcaaggtctccctcttgtagagtttatattctagtattttcataagttatacctgctcactggagaatactgagccatacagaaaaacacagaggaaaatttcacttatatttttccccatgtaaagataaccactcttaacatctagtatatgttcttccaggatttttctatgcacacactgaatctgtatttttatttttaaaatgttatcatattgtatgtacctctttgcagcctgcttttttcagttagttttttttgtttttttgtttttttttttttttttggaaaccaagtcttgctctattccctaggctggagcacatgagccgagatcgcgccactgcactccagcctgggcgacacagcaagactctgtctca

SEQ ID NO: 179226 - DNA, 267 bp, Homo sapiens
cgaccggatcttgtgagacctcactatcatgaggacagcactaaggggagggagctaaatcatccatggaaggtcccaccaggcaccacgtccagtattgcggatcacagttcaacatgagatttgggtggggacagagatccaaactgtatcaagaattattccatttcttctcctcattgagcctttgaatcacaccacttttcctattttcagtcatcattcctgtgactataaagagtcagaaccacacgacagttaactctc

SEQ ID NO: 179227 - DNA, 444 bp, Homo sapiens
tgaccttaggaaaataatgcaacctctctgagtctcactggaaaattgggttgatacaggtacctactgacaagtttatgtgaagattagctgagataatatgtggaaagcgctagtacttatggtgcaatacctgccacttcgtaagcatgcagcgagcggtggctcaccatggggaggggtcttccatatttagccccacccacctcctccatccacaccaaatcattctggcaaagccccagcatatacaagtgtacagatcagagtcaacattcagaaacttaatggctgtgtctatgcttacatttttgtataccatggttttgtttttttaactgatagctacagtccttattacggttactagctcttcaaattttcacctgctaaacccaaaagttaaattatactcatttttattttgtcctcagaaccagtgat

SEQ ID NO: 179228 - DNA, 241 bp, Homo sapiens
aacatgccagtacaatactaggaacaaagcaagtccttaatccatatttatttaactgattgcattatgaaattaaggaccctaattctcctaaatttaaagaatgcttaggtgagctactcttagaaaagtcaccaaaccaattaaaactggtatcacaataagatgagtgactatactacacagtctaaattccacatactactcaactgtatttgcctacagacaagacagaccaagg

SEQ ID NO: 179229 - DNA, 217 bp, Homo sapiens
atcacttctacacaattaagctaaaaataaattgtcttatatggaaaccactgctgagatttttctaaaacataactctagtctttgggtaatattagcttaacattttgtagattttgaaatgtatttactatactaaatgcagaatatctattattaagctttttcccttatacagtttaaccagggtatacatgttattcatatttagttcatc

SEQ ID NO: 179230 - DNA, 707 bp, Homo sapiens
attgtttgcaccttttagctgtttataaacattcattacaagtttttgtatggatatatgttttcatttctcttgggtatatacctagacagatttcctgggtcatgtggtaactctatatttaaccttttaaggaactgccagactgttttccaaagtaactggactattttacattgtcagcagcagtgtatgtaggttccagtttctgcaaatccttgccaacacttggtattatctgtcttttttattatagccgtcatagtgatgtgaagtggtatctcatggttttgatttgcatttctctgatgactgacaatgttgagcatcttttcatctgctaattgctaagctccttaaatggaaaattataggaagcataaagcatgtttgcaaagaagtgattatattcgctaggattaagattttaagtgaatatttaagatgcccatgactagtgtccactctctcgaatcaagttttatttaaaccattgacttttcctcataactggaaatggtcccagtgaaagtctccctcacttgctggaatgtggggccatctctgctgtctgtcaagccttgatgcccaagtggccattttctcctggagtctgcatcagatggtagagtgtgtgtttcctgagtgtgagactggatctgctccacaatgctttgctggttaactccttccaagagtgcaatacc

SEQ ID NO: 179231 - DNA, 277 bp, Homo sapiens
tattattaaatccatatatccttagaaaaaaaatcctttaattatagagtagttatatacagtagtctaatatagtaggctatagttgtattttgccttaattattcttcattgttaatacctctgtaataaacatataaaataacacatgcttaattccttagtttgcaaattaatttaccaattcattcattcattctttctttctcaagaacagaaaaccttatagtaatacaggtcatctaaggtccataaggagtaatttaagatcagaaat

SEQ ID NO: 179232 - DNA, 201 bp, Homo sapiens
ttggcagaaagaagaaactgaagcagacacatggtgaggcagaggttagaaccccacaaatttcttgcagagtagcagcaacatctgcgggtgcaatgcaggaatggcccccggtaagagaatgagagtggaacttcatttgcaggtatttctgttctttttccagggtcccatgaggcctgcctatgcttttgctcacag

SEQ ID NO: 179233 - DNA, 657 bp, Homo sapiens
aatcttactttttttcagagtcagggaatgagaccatgatctttcatcattttgttatcagatacccaaattgtatgaaatcatctttgtgtcctgaatgccttatgtctatttagatgctagcaaatatttgctaatagtagattaaaacacattttatttaatagtcttgcagtgtttttttcatttaatataattgatattgtttgggtaattattggctaaaatatttaaattagagtgggaaaccagatgtttacaatattttataatctactttcagggtcagctgtgcttgtttaactttagttgcactcctggtgtcctctgaaatggctcaagctctgaacttaggggaggcagaggtgctgggacttgggcttcagaggcatcttccatatctctttgtgaggatcatctttaaagggcatgtgcacagacctttcacccagttctaaaagcagagtatttctgtgatttaaaaattgcttgaattggtcataatcctttttggaaaaagatgacaaactcaagctagataaatacagtgcttaattaatttgctcagtgtagatatgatatactaaagctgtcctgccctataaaaataaagtggttataaatgcctcaaatttaaaatttgtgtttatacgtata

SEQ ID NO: 179234 - DNA, 622 bp, Homo sapiens
ctatggctctccattccccacttggacaaaagctggcaggttaggcaaatagaaatcaataattggctttatccattaacatccgagtcaaagcaactctggatacggctttatccataacagatacggctttatccattaatggatatgactttctccattaatatctgagtcaaagcaattctggaattcccagctccatagtgtggagcttggcatcatgaatccaaaccacttcctttcagaccaagatgtctgttcaggcttaatgcgggtagctaactccagatgtggaatgctgatttgtacaatctccaggctaaaagggaccttaaacttcttccaatgaccattttcaacaacattcctcattaagtgcgcaaccagcttctgcttaaacatctccaacatctggagcagttgctggattctgttgagccaaaatctttctcaatttcctaattctgcccattctgaaacacatctgctcctcctgcctctaggacagttctcctcaaatcttctcttctccagaggcccatgcccagccccgaccactgtggcttagagcacgcgattactccctgggtcagctgggagggcaggggctgctgtggattgt

SEQ ID NO: 179235 - DNA, 113 bp, Homo sapiens
ggaatgcagcaatgagcaggacagataggattcccttgtctcatggggtgtacatttcactgagggacagcagctaaaccaaagaagtaaataaataaaccgtcaggtatgtt

SEQ ID NO: 179236 - DNA, 156 bp, Homo sapiens
attaattgcactaatgcctagattgtatataaataaagtacacacacacagagtactcaaaatagagcactaataatgtctgcatggtttatttttatcatttgtgaagtgctctgaaaaaaaggggctaatcaaattggctaggatgagattctg

SEQ ID NO: 179237 - DNA, 321 bp, Homo sapiens
ggacacccacgagccgaatccagattttccttcataagaaacttgagaatgtgcaaatgtgttgctagttcaggtcccaaaattttacaccgtgagagtgacccagttatctcagtctggaaaatttcaaaagatcgtagaaccagatgatctcagttaaacacggaccatgctgtgacacccacatccttggctatctccaggatgtattacggcagaaggaccactgagagtcattggccacatgcagtggtggcataagtggtcaagtgttgggaaagctgccaggattgctggtgtttgggtttcagagtcattatt

SEQ ID NO: 179238 - DNA, 479 bp, Homo sapiens
caactttggaagacaatttggcagtttctttaaaagttaaacataaacctaccaaccatatgacccagccattccactgtaaggtatttacctaagagaaatgaaaacatacatctacgcaaagctgtacatgaagttcataacagccttattcataaaagcaagaaaaccagacacaatccaaatgttcatcaataggtgaatgaataaacaaatcttgttacatccatacaatgtaacactactcagattaccactcagcaataaaaaacaacaaactctgatacaaacaacaataaatgaatcttaaagaatgctgatgaaagaagagtacatcctagatgaggccatttatatgaaattccagaaaaagcaaaactaacctatggtgacagcaaatcagtggttttctggaagtggaggaggatgagaatgaatgcaaacagtgctactgtaactttctgcgagactgaattgtt

SEQ ID NO: 179239 - DNA, 607 bp, Homo sapiens
atttcattaagacagcattacataaagcagctttacaaacctgcaagccttttgggcctggtagaccatgtaaattagtgaaatggcctgggtgtaagacaacggggtaggtgggtaccatggctgaagccaagtgcatgccctatctgcagaagtctggatgggttagattaggccagagcaacaaagaagccaaagaagctcagttgttgaggacaacacaattttcttgcttgttcatactacctgttaaaggtcagctggagactctgttctttgtcattagtgcagccactgtctagaacactactggttactgtggcagagtaaaaagaaagagcacagcttctttggcttagtgaagcagtatttgtttttgttaatttgaaaaacattaggccaggcacggtggctcatgcctataatctcttcactttgggaggccaaggtaggcagatcatttgaggtcaggagttcaagaccagcctggccaacatggtgaaactggtgtattctctactaaaaatacaaaaaaccaaaaaaattagctgggtgtggtggcaggtgcctgtaatcccagctactcaggaggctgaggcaggagaat

SEQ ID NO: 179240 - DNA, 483 bp, Homo sapiens
agtgagtgagtgcctgaaggggagaagtcaggtagtagatcaataaataaaagtggtaactgcagagcctgagcttgttagaagacacaagtagatgatataataaatagtgcccagggaatgttacccacttacctgcagaaagggaaagacaagttgcagacaaagttaggaggcccctgagctgtccctctgaggcactcatcctaaggtatggatgacaaagacactgccatttaggcaggggtgagcagggatcatgaaaccaatgagagctcagtaatcaaagcatgttcccttttcactgtctgctgaatgctctgctctaaaacttttcatatatggtacaggcaacagagaaagtcttcatgtaaataacataacagaagtaaactaaaaggactccaaattaacatacagataaacacagactgaaaggtaaagtcatttgacctctggaattctctttcagcccacagacca

SEQ ID NO: 179241 - DNA, 752 bp, Homo sapiens
gtctctattaaaaaaaaataataataaatattaataacatcattgtttttacctccctgctattagacttactcccctttttcatgttaattaattaattaattaaagctttcctaaagtatttcctgatctttaggaatctctcacataattgctaacatttttttggcacccactttgggcacctttatagtatttgaaatttgacagcaggtggcagaaaactcaaccaaaattagatttttagttgttgttcacattacaagaagtctagggcttgggtagtggccccatggtagcgtcattgttccaaatgcttctttcttcctgccctgcaatcctctgggccataagatgggtttggcttctttggcataacattcatgtctcaggaaggaagacgaaaagaagacagaaaggatggaggccaaggacttcctcctctcaaaggtttaccattccattcaaggaagcaaatcctcgccacagatgttcacccacatctaactggtcgtgattgtgccaaatgactacctctatctggaaaacaagctgggaaatcaagtacttttagttagagagtgttctcacctcaaacagaatcagggtaatgttttgaagaagggagaatgagtattggcaactagccatgtctggtacatgagctcatttaattctattttaaaatgacagtctgtccaagatccagtactatggacttgaatctagaattccataattgaggtaatggg

SEQ ID NO: 179242 - DNA, 445 bp, Homo sapiens
gaggagatcaccatccatggcccttaaatgtctgaaggcatggaatgatgaagtgcaatgtcttttaggatatttggtcaccgctatacatatatagctactaaggaagctgaggtgggcggactgcttgagcctgagaggtcaaggctgcagagacccatgatcataccactccactccagcctgggcaacagagcgagacactgtcccaagaaaaaaaaaaaattattcgatgtagtcctaaaactattatgtagaatactattgtttacatcacatcacgtcagccctttaaatggcttaacgcttatttaggtacaatccgtaaagttttcctggtaattaagtataccgaagaacaattaagtataaaagagttactgccttgacaggaagattgtaaaaattgtaaaaagataaataaataaataagagtcaaaactgt

SEQ ID NO: 179243 - DNA, 587 bp, Homo sapiens
gagactggttcatctcactcatccttgtattctctgtattttgatgcagcagtggaggggcttgacacatctattataaaagaaattattagatcattgaaaatactgcatcttctcattagatcaatatcaacctcctggtgaacaaacagttaggaattgttctattaatacatactaggcggttaacattctaagaatttgcctcacattcattcaatagttcctaagtaccgactatgtgctattcatggagtgggctgacaaataaaaaaaaatgaatgagacatacacatgaaaaccacaagtacattttgttctactagccacttatataaagagggccacaaagtaaagggtggtcaaagttgcctgcaggaataagaaaacgatgagataaatattcactgcctcgaataccaagccaaatattagaccaaaaaatgaaatagataaaagtcggctggacacggtggctcatgcctgtaatcccagcactttggaaagccgaggggggtggatcacgaggtcaggagatggagaccatcctggccaacatggtgaaaccccatctctactaaaatacc

SEQ ID NO: 179244 - DNA, 283 bp, Homo sapiens
aggcaatttccaaaatcaactcgggcatgtaaaatgtcaataaaacccaactctgaagtcacatctaaccgattctgacagagttttacgctgagccaaggccatcctgcccaagcacactaaatgttgactctgaagcacatgtaggggaattaaacagtaaccaaggattggaagggaattttgtcacagtttacacagtcagtagcaccaggatagaaaagcaaaggcacctaggagaattggaaaattctgtcactaccagcacccccaccacccctga

SEQ ID NO: 179245 - DNA, 490 bp, Homo sapiens
ttcacctggatgtctaactgacctcatgaacatatcaaaattcctgtcccccacccctatctatcccactgcagacttccccatttcgtggcaaatccacccttccagttgcttatcccaaaaaccttgaagtcatttatgacttctttttttggtaagggggtgtcggggaggggagacagggttttcttgttctgttgcccagtctggagtgcagtggtgcaattatggctcactgcagccttgacctcttaggctcaagtaatcttctcacctcagcttcttgaatagctgggactacagacatgcaccatcatacctggctaattttttttatttttgtcgaggtggggttttactgtgttgccgagactggtctcgaactcctgggctcaggcaatcctcccgcctttatctcccatagtgctggaattataggtgtgagccactgcgcccagccaacaactacttttttttcttattcctacat

SEQ ID NO: 179246 - DNA, 179 bp, Homo sapiens
caaagaaacgattgaaaacagaatttttccaaacttctttgaccttcctttgcacccagcctgtgtgcctgcccacatgactcttgctttggggaatgcagctctgagcatgtttttgtcatccgaccctgagatgctgaaaaaagaaagactctttaagccattttgctaaccttctg

SEQ ID NO: 179247 - DNA, 217 bp, Homo sapiens
ttacagggagagaaaagtggttaaaaaaatagagctccttaagaatactgttaaggtggggcacatacaattagttttttaatagatgaactttattttttaccttgggaatgaaaagtggggaggtaaaataaggatttggtcaactggctacaaatatctatgaactagtccactgtcaaggcaaacgtctatgcagggcctccctatgtggttg

SEQ ID NO: 179248 - DNA, 524 bp, Homo sapiens
aaaagttattcgtgttgcactgagaaaattgtccattttattcatcagaagaaaaattcaatgacctttactcactgacaacagtgagaatcagaatgaatgaatcagagtgtctgtcctaactactccctctggttctactgcagttcctgctgtctccatatggttcatcagtgtgtgggagatgaatgtggtaaaactgaagtagctgcttgtgcttggagaacaacaacaacacactgaaattcactgcttagaagctgttgaaagagtttggcgataaatacaacctaatattcacaataaagagcaatgatctataagcccattttcacatctattgtaaaggccaaccatgtgtttcagccaaaacaaactgattttattaatacaatgaccagacatatataaagaataatatgagtttattttaccagaggacttggctctcacacttgcattctattgtaggtttttacacttatccaattctaacaagagttggataaactcagggttttcct

SEQ ID NO: 179249 - DNA, 263 bp, Homo sapiens
tttaagtcccatggtcttctcttcaacattttcatccaattagcccacaatcaacttagattccacctgcctctcacactaagtagttctctctacttcttaggcctccattaatatgatggggtaaggtatcagggaaggggaagcattctataattaggtctcagtcttttagtgagactatgcccctggactgtgaactttgcaagtgtttctcagttttttttctctcccatttaggtgaaacagcatggcaagatggg

SEQ ID NO: 179250 - DNA, 163 bp, Homo sapiens
tttaagtcccatggtcttctcttcaacattttcatccaattagcccacaatcaacttagattccacctgcctctcacactaagtagttctctctacttcttaggcctccatttactttcttagtttctctactcccttccgtttctcttgtttcctaccgcaa

SEQ ID NO: 179251 - DNA, 424 bp, Homo sapiens
aaacatctgttccaatagcacatagtgataacatccagcatttgcttgatgtgaacagtcatatacctatgaaactcacctgtgttcttttctcatttgcttagaacagaagttagaaaagtaccaggtgatgacatgcatataaacaaatgcatatcttcttgtatcaccggtgaaatgtaatggagctttcttttgccaacatagaagcactctcaaggctgggaggatggaggaaaactcctcattagctctgacctactgcagtagaacattcttctcataagcatgtgcaacacagttggctaaaattcttaaacaaaagcacgcaaaaatatttccatttaatgggaacaagttattttcaacatgtaatttttcaacccttttttatgctggtttcagaaaaaaatgtttaaaccag

SEQ ID NO: 179252 - DNA, 658 bp, Homo sapiens
gccggtccagttccatgtcactgcagttccatttcacctgcagcatctgttgctagccctaacctggaaggaagggaaagcccccttaaaggtctcttttctctcctcaaattgtctctccagtgccttttactcatcatcaagaaactcttcctgatacctaatttgaatctgtcttgtggtttttagctcctttctttgggataggtaaggtgggatgggtaagggaatccttagggcactttggggattctgcagaggaagtcctgagagatgtccctgccacctgaattgttgaggcatagtagaagcctggggcttccaagaggatgtgttccttgaagctaagccttaaagaactagaaagaattagccacttggagaaggaaaataagcactccaggcaaagaggtcagcctgtgcagaaatgtaggagactatgaggaaatatagaaggattctaatgagtggatcatgggttacatgatccccatgtctctgcctctctgaaaaggctactgttgccccaggcctgtaggattccaaatcaccttttacagcggagctctctctcatacccatatcatccttcatgtgtaactcttggtcctgagagagtgccagtacttatttgctgactttttattttaccaagtgt

SEQ ID NO: 179253 - DNA, 1414 bp, Homo sapiens
tcctagattgtacttacacaacctacatggtatagcctactacacacctgggctgtgtggcatggcctattcctcttaggctacaaacctgtacagcatgttactgtactgaacacaatggtaagtatttgtgtatctaaacatagctaaacatagaaaaggtatggtaaaaatacaattttataatcttatgggactaccatcaatatgtagaccgtcattgaccaaaacatcctgatgtgtgcatgactgtacttttcattaaataacagataaggggctatagaatttggggctctgactgatcaaaacctgtgtatctgtgtcaagttttaagacccctgaaacagctaaaacaggtttccaaagtgtaatcactggatttcaaaaccatgttttagcccttcattaatgaagcctgttgtacagatttagagtcttacaatatgagggaagttggttctgggaaggtaagatgtagccagttttcatctgggcacctctgaaagagaaggagtgcaggagagtaagtctctcaaggacgttcaacaaaggaccagcagcatcttatcaggcgatcctcagaggctccaaggagcattggagagaatgcccctttctgggcttgatgtcttggttttggtttaataccaaatttctcttggtcttggtttaatacccgactcctcccaaattgaacgattatctttgtatgtcactcaaaaataccaggtttcctgaatatgttattaagaatttcagatatccaagcagaattttattatggacaccttgtaatgaattcaaatcgtgtgacagcaaacgggataaatggccccttctcacccagttccgctcagggccatacaggcttgcacatagagtgtgctaaaaatggtaacctcctttgagcattgcagaaagagggttctgtttcaaattgggctgaccgtaaaagcaattttgatgtctttcaaactaccataaagggattttaactgtatttttattcttagaaacaatacacctttaaacagatgtcaagaccaaagatgatgtataataaacagccggtggttatggtgtggtgtgagcaggcccccggatcaccagccctctgctggtggtcataaagcacacacagtttgtacttgcttcctctcgacgcctgccacaacagttttgccagtcaccaaactcagaaaaaactagctgtgtgagcagcaccgtaccctagcggtcttcagacattaagttcacgtcatccactgaaaggaagggtccttgcgttgacagcgtgtggctttggagtccgtttatggaagcactctacaatgaacagttgaattttatgtctattcttttttcctattttaaaagttctagtggtaacacaaactgtaaatttgagtca

SEQ ID NO: 179254 - DNA, 493 bp, Homo sapiens
catcagtgtcattaccaaagctgactgcgcttctccgggtatttagtactgtggtgaggagcattggggaacgcttcagcccaattcgggtcctccgattactgaggcatacgtaacagatattctgtacagagtaatgagatgtgtgacggctgcaaaccaggtgtttttttctgaggctgtgttgacagctgctaatgagtgtgttggtgttttgctcggcagcttggatcctagcatgactatacattgtgacatggtcattacatatggattagaccaactggagaattgccagacttgtggtaccgattatatcatctcagtcttgaatttactcatgctgatgtgggcgctatctccaactgtctttgcacttctgagtaagaatctgatgattgtgcacagtgacctggctgttcacttccctaccattcagtatgctgtgctctacactttgtattctcattgtaccaggtactgtattcacaaa

SEQ ID NO: 179255 - DNA, 563 bp, Homo sapiens
tcgtgcacactgcacacggtgtctgtttatccgtgctgtgcccttcctcaccccctgttggctagcaaccatactatatccttaacacttggttcaggcagcacctgcccaatggggtttgatggttttccctgcctcttctctccgtactttgacctgtttgtaatcctctgtctggctgtctcctattccaaactgagtcagggacattaccttactgtttctctagtaccaatacagagtaggtagttataaatatgtaccaaaaaaaaaaaaaaaaattctgctgagtttggaatgccctaactcagtgagatatgtttaggtttgcttcatctcaactgtttgagtatataaattaaggagactgacacaaaatataatatttagtagccaacagcagtttgatacctgataagtaaaaacagtgtccgcctaccatctaatatgacagaagagaataggacaaagaaaaaaattgttttcccttctttttaaaactggctttatgattctaaggctgtttttgtggctaagcacaaagaaccacagctcatctgaac

SEQ ID NO: 179256 - DNA, 384 bp, Homo sapiens
acttgaacctgggagatggaggttgcaatgagctgagatcatgccactgcacactccagcctgggccacaaagggagactccatctcaaaaaaaaaaaaaaattctgctgagtttggaatgccctaactcagtgagatatgtttaggtttgcttcatctcaactgtttgagtatataaattaaggagactgacacaaaatataatatttagtagccaacagcagtttgatacctgataagtaaaaacagtgtccgcctaccatctaatatgacagaagagaataggacaaagaaaaaaattgttttcccttctttttaaaactggctttatgattctaaggctgtttttgtggctaagcacaaagaaccacagctcatctgaac

SEQ ID NO: 179257 - DNA, 625 bp, Homo sapiens
cttactcttcccagctcggtcaataattctaaagatataattagaacgcattttatctagcctttttagatgttttgtactggaggattgggagaaggcaatctaaactttaattttaaattttaaaggccaaagtcatcttggtcatgttgtacagggtataactttgaggatgctatcaaacacctctttaggtactagaataatccctagagtacttttagagagcagaggtgaaatagttttccagccaggctaccagcctagttatactcttcaatttttacaatagtaaagtatatttattcccttcttcttagaataggatgaggcactggattaaatgctttatacaagttatttcatttaagacacaacaggtaaggttatgccaaagtaacttgcaataaactaatgctcctgatgagaataactagaagccattaaaaaaataccccaaaacttttttgaagacattagagagtttctgagacaacgagggcttgaacataagcagaaactatagagagaactcaaagatctgatggacttccacttctgaacgtgacgaggggctttgaggaagataataataacatataggtcaactaaaaatgcaggaaaa

SEQ ID NO: 179258 - DNA, 531 bp, Homo sapiens
acttgaagtcaagagttccaaaagaaaaaaaaaaaccactgttaaaaatacatctgaaaccactaggtctagtcaaccaaacaccacttaatatattccaggtatacctaaattctagtagtatggggacagtaggggttcttgaacagcacacagcagtatgagaaatcagaagttagatccagcaggcaagggaagtatttagaagttttaaagtgacgattacatatctggaagtatgctttcagaaaataaatctcagggggagggacagcattaggagatatacctaatgtaaatgacgagttaatgggtgcagcacaccaacgtggcacatgtatacatatgtaacaaacctgcacgttgtgcacatgtaccctagaacttaaagtataataaagatatatatatatataaaaagaaaagaaaagaaatctggtagcaatgtgttaaaggaaggagaagtgtcacctttcaattcttatctccttcatccaatttcctttccagggctaacccaatacaccacat

SEQ ID NO: 179259 - DNA, 250 bp, Homo sapiens
tggccaagtgagtggggcccccacaggattgctgaacctcggggtcctaatgggctctttttccagagtctgtctgcctcttcctggtcattgtaaagatgcccggcagcagggtgggcttccccgatcctcggctgccgtcgctcctgctgtggtctggggcaggcgcctctcctggcagacacacctgagggtgccgtggtcagagactcactggggacgcatgtgattcacactggtgcgctggccg

SEQ ID NO: 179260 - DNA, 261 bp, Homo sapiens
ccttggtaagccgctttgtcagagctggaagccaccagtggacctgtacttgccagttttggggtctcaactaatacacccacaaactcagaggcctatctggcagggcggccaaaaagatggtttcttgttatattatcacagtgttcccctcgggagcttgtctgcaccaagagctgcctggaggtgtgtatggaacttaaagaatccgacagtagataggtccttcaggaagagtgtgttcttgaagaatcgtttgca

SEQ ID NO: 179261 - DNA, 396 bp, Homo sapiens
gtcaatttctacactgtgaagctctaggtgtaactgcagggttctgtgatgaatgagcttgcttccagaaaacagtggcttgaagccccctgggctaagcgctagctaccttgaaggctaagggctatagagttgaaagaaagagaaaagcatgtactgctgttctggctatttatatgacatatgctttgtaatcccatgtagcaactcttctatttctccactgacttacatacaatttctaacaaagttcatttgacacatatttaaggacaagcacaaatgaaggtagaaattgtgggcgacaaatgataaggtggcccctatggccactgcctcatggtgttcatgcctttgtgtgaccccctcctttagtatgggcaagacccgtaactg

SEQ ID NO: 179262 - DNA, 574 bp, Homo sapiens
ataccctgctttcttttctctcctctaaagaagtccttgaattagctctgctggtaaatccactggtaaatccaaatttactctgctggtaaatccactggtaaattcactggtaaatccaaatcccagctttgtggctgcatatgatttctagatcttttcccactatggattttaaaacaactactactgggaagaagatgcatgctctggtctttggtgaaacctatagcttgaagaacatttagagattgtttcatatttcctgccatagctataaattgactttaggctcgtcattcaggagtccttagatattcacagtagggtctgtgtgaaggaaaggggaggatatccgtgctgtagatcaaaaactgattccactgactaaggctgatcttaattcccaagctctatgttctgctgaacaagaattacattgtaagaaacagtggagcagcttgatttatagagaggttaatgttttatgaatgctgggctcactttggcttggaggcaatctctgttttgggtaaggcatggataaatgcctatggttttctaagatggggtg

SEQ ID NO: 179263 - DNA, 190 bp, Homo sapiens
  misc_feature (1)..(3): n is a, c, g, or t
  misc_feature (190)..(190): n is a, c, g, or t
nnntgacacagagacctttgttcacgtgtttatctgctgaccttctctccactattatcttatgaccctgacacatccccctctccgagaaacacccaagaatgatgaataaatactaagggaactcagaggccggcgggatcctcgtctgctgaatgccggccccctgggctcccttttttctttctcn

SEQ ID NO: 179264 - DNA, 463 bp, Homo sapiens
actcttggatgttgtgggttagattccattgacctttaagctctgaatcttggcctcttatagtcaagcttgctgcttcactggtccaagcctatgcctccctcatacaaaaaagatgcaggagcttggcagagaagcatcctggaaccatgccaaaccatgaaacaacacattcttggaatcccatataattgcttaaatcttgctctcctgatcttgagctgtctgcactgctttttctgaagagtcagctcaggtatcacttcctccaaggagctctctgtgatttcactcccaggctaagttatcttttgcatctttcccataggctctttgtagtgagcatttgttgaaaatctggattctcaggatcttcgatctcaccatgttgggagaattcactcattcacttaatgcttggcatggtccgactcagggtctgctatgttccaagcactaaaga

SEQ ID NO: 179265 - DNA, 234 bp, Homo sapiens
catgtgctaaagtcataaaagcaggctatattcaatatggaaacaagtgttaaaggtcattcacaaacaataagacttgtagggatatattttaaaacatttatagcaaagtccttggatggtgggacagaaatataaagacagtcaatatttcagaccaatgtgtgtgcattggggaaggatgatgacctgacatggtatatcatgtcagcaaaaccccagaacaccgagaat

SEQ ID NO: 179266 - DNA, 278 bp, Homo sapiens
attagcttgagcttttcccacaaaggtagaattgattcctaaattttaaaggagaagttgcttttacaaataaggctagcgaaagaaatattgtaaacataaatcaagtatgttaacatgccccaataattaagaaataaatgtatatggtaacagctcttgagtccctgcaaacatatatcaactctatttttgaatctgttcaattctgaagctccccttttttttttttttttttttcagtttttgtggttttatttaaacacaaataaaacatg

SEQ ID NO: 179267 - DNA, 187 bp, Homo sapiens
acaaaaaaaaaacaacaacaaaaaaaaaacaaacaaacacaagaaaatcccaagtgaagcagaccacgtaaagcacaccaatggggctcgcactgtgtgaaccagttccttgctcttctcattctcttcagttagttcttcatctctctacccatatctgccaggtgctctttcttttcttttcttt

SEQ ID NO: 179268 - DNA, 249 bp, Homo sapiens
tctagaggatcccggtcaatttctacactaacctcagcctaccttccagctttatcctgtggcgctccatggctttgctaatttttcacctcagccacattagatttttcctacaccccaattatcttcaggtgtcctctcaatcttacaaaaacatttacaaaactgtcctctcaatggcacaagaatacttacaaatctcttattctttctaccgctccttttattcctccaacaccacctgtatct

SEQ ID NO: 179269 - DNA, 245 bp, Homo sapiens
tttaccccagatcgccagacccacagaataagagtgtggatacgctcagtgtactcagagaagttatatagctatgagaagctgctcatgcttaattagttgaagaagaacctgcctctttgtagtttttttttttttttttaagagacagagtcttgctctgtcacccacgctggagtgcagtggtgcaagctcagcttattgcaactgctgcctcctgggttcaagcaattctcctccctcag

SEQ ID NO: 179270 - DNA, 1004 bp, Homo sapiens
aatgaaagaagaaatgattaatgctgactgtgacatttttgttcagaagcaacaaggtgctgtgcaatacatactaatttgggagacagaaaaccaaaattctatttgtctttgccatcaagtaagcaagttattttacttatatgatcttgattgttcatgtgtaaaatgtggatatcatgttatgttttattcaaggtctcagatattctgtgagactctgaaaaaaggtctaaaagtctataagcagctattgtgtagcaggtgcaagttaaaagatgagtaggtgtaaataagaggggacttaaacgtttgtggaacaatgtaattaaatgataaaaactattaactctgtttttcaacataactccatcaagttcaagacccttttgtaagcaatgatagcagtcatttagaccatccctgaagaactgagggccctggcagtttaaccgtgtcagtgctgtcttttttacattaactgaagaaaaatgggccccctctaaaatttaagattaggaaatgaagtcagaaggagccaaatcaggactgaaaggtggatgcctaatgatttcccattgaaactttgcaaaggtgcccttgtttgatgagaggaatgagcaggagtattgtggttaaggactctctggtgaagctttcccaggcatttttctgctaaagctttcccaggcatttttctgctaaagctttagctttccttctcaaaacactctcataataagcagatgttactgttctttatcccttccaaacaactgttgccatgacctttgctcttgactggtcctcttttgctttgagtggatcccttccacttcttggtagctagtgctttgattgtgatttgtcttctggatcatactggtaaagccatgtgcagttctttgaagaaatgcttcagaatcttgatcccacttgtttaaactttccattgaaagctctatttttgtctgcagatgatgtgggcacacattgagtggaaa

SEQ ID NO: 179271 - DNA, 993 bp, Homo sapiens
aatgaaagaagaaatgattaatgctgactgtgacatttttgttcagaagcaacaaggtgctgtgcaatacatactaatttgggagacagaaaaccaaaattctatttgtctttgccatcaagtaagcaagttattttacttatatgatcttgattgttcatgtgtaaaatgtggatatcatgttatgttttattcaaggtctcagatattctgtgagactctgaaaaaaggtctaaaagtctataagcagctattgtgtagcaggtgcaagttaaaagatgagtaggtgtaaataagaggggacttaaacgtttgtggaacaatgtaattaaatgataaaaactattaactctgtttttcaacataactccatcaagttcaagacccttttgtaagcaatgatagcagtcatttagaccatccctgaagaactgagggccctggcagtttaaccgtgtcagtgctgtcttttttacattaactgaagaaaaatgggccccctctaaaatttaagattaggaaatgaagtcagaaggagccaaatcaggactgaaaggtggatgcctaatgatttcccattgaaactttgcaaaggtgcccttgtttgatgagaggaatgagcaggagtattgtggttaaggactctctggtgaagctttcccaggcatttttctgctaaagctttcccaggcatttttctgctaaagctttagctttccttctcaaaacactctcataataagcagatgttactgttctttatcccttccaaacaactgttgccatgacctttgctcttgactggtctcgaactcctgacctcaggtgatccaccgccttggcctcccaaagtgctgggattacaggcgtgagcctgtgcgcctggccagtgataggttttttaaaaataatgcttttcaaatattaaaatatgaaatattcaatactaaggcacatagatcattcttagttttattgtcaagtttaacccgc

SEQ ID NO: 179272 - DNA, 687 bp, Homo sapiens
gataaaacagacgttaagtcaaaaatagtaataaaagacaaagaaggtctttttataatcataaaaggatcaatgcagcaagaggatataacagttctgaatatgtatgtatccaacattggagcactcagattcataaagcaagtattactacttctaaagaaagagataaactacaatacagtaaaagtgggggacttcaacaccccactctcagcattagatcatcaagacagaaaatgaacaaataaacattgaccttaaactggcctttagatcatgtggacctaacacagaacattctatccagctactgcagaatatacattcctttcatcagcacaaggaccattctccaggatagaccatatgttaggccacaaaaaaaactcaaaaaaattttaagaaatgaaatcatatcaagtatcttctcagaccacaatggaataaaattagaaatcaataccaagaggaactctggaaactatacaaatacgtggaaattaaacaatatgctcctgaatgaccatcatgaaaatgaataaattaagatggaaattttaaaaagatttgaaacaaaagaaaatggaaaagcaacaaatcaaaacttgtaggatacagcaaaagcagcaccaagagggaattttatagaaataaatgcctacatcaaaaagtagaatgattaaa

SEQ ID NO: 179273 - DNA, 280 bp, Homo sapiens
tctaatgctctgtaaatagaagtcagtgcttccatcagactgaactctctgacaagatgtggatgaaattctttaagtaaaattgtttactttgtcatacatttacagatcaaatgttagctcccaaagcaatcatatggcaaagataggtatatcatagtttgcctattagctgctttgtattgctattattataaatagacttcacagttttagacttgcttaggtgaaattgcaattctttttactttcagtcttagataacaagtcttcaattata

SEQ ID NO: 179274 - DNA, 470 bp, Homo sapiens
tctagaggatcccttattcgtgttgcacgacccatcaaatgaaatcactgtaaagaatataaaaattatagttaaataacatttcaaatatgaagctatttaaatgtcaactgtgcaggcaatttttaaatatttctagtcaatcataatcactgctttctcagtctttctattcttcctataagcatttgattaaagttgataacacagaattctcttttaatatgcattctgttggggataccaattaagatttctttaacttgtttattttagaaattgtttataacgccaggcaacagttgtaaagaggataacattcccagtagatggttttgaaaacttctataatatctaattatgtatagatccagactgtttatgtttggcatacaaataattgctgggagttagaatggtttgatcaatacatgcaattaagtgcaacacgaataagtgcaacacgaata

SEQ ID NO: 179275 - DNA, 155 bp, Homo sapiens
taaattcctacacaacttgccacagaacataagtgttaaatatgtgtcagactaaaccatatatccatacatgacaacaaaatactgccaagctggaggatgggactagaagtgtcattcagcaaaaataagaccaactaaaaacaaagacactg

SEQ ID NO: 179276 - DNA, 491 bp, Homo sapiens
atttctggcagtagccaccagagggtgctaaagaacctccttgaaacggctgcagagccctgtgaggttaccagactgtttccacaagacctgtcctgggctggtcttggggtttgtggggaggacagtttgttcaggagtggatgaggaacagaagggccccgagaccacaggttgtgtcagagacagagctgaggccctcgctgggactaccactcagagataagcacaagaatcaggccaaggaggcatcatttgggatcctcattcctcttgcccccctttgagggcaaagggtgttagtatacttaaggatgttgtccacttaatagagagaaagggctagatcagggattttcccctggggcttccagccccactcaagttaagggatatattgagatatttatttgatctttagatttcaaagggagaggctgttatccagatttaaaaaaaaaatgcttgaaaataaaattgattgcctgcca

SEQ ID NO: 179277 - DNA, 416 bp, Homo sapiens
ggaaacaccagatgaagatgattcttgtcttcacctgaccctttagccacaaggccagaaatttggattgtatagagcaaaggtctacaaactttttctgtaaagggcaggattttaggctttgtgtctgtatattccctgttgtgattactcagctctgccattgtagtgttgaagcagcagtagacaataggtagaggaatggacatggctgtgtcacagtaatctttttttaacaaaaacagatagtggaacagatttggtccgtgagctatagcttgcagatccctagtgtagaaaagaggccagcagcaagacctagaattctggaaaatcctcacgttatctctatctaaatctcccttcccctaagctctgaaatgtctcgtgagagtcaagtaagaatttggcaggca

SEQ ID NO: 179278 - DNA, 760 bp, Homo sapiens
gtaatatgaggagtttttgaatctattttatgcccatacacacattaactaattcaaaaaactctataaatagtcatatataaatatccatgcacattaactgtatcttcacttcatccttaaaacataggtggaaattttccaaatcacagaaatatttcacttttctcatgtgataatgattacttgatttaaatggattttaaagaatgaaatggctacttccatcctgtcaagtctaacttatttttacttcaggataagcaaagtaagcacttttagatttaaaactattacagaagagtttgttaattggaaggagtgtctatggttgaacatattcaagggatattacttagtgttttagcgaagaacataattcaaatgttctggacatcatttatgctgatttccaaataaacagcccttcctctttactgtccattctgtgattgggtgggactgtgtgaccaattccgcacaatgaactgtgaacaatgagccttcctcccaagcagaagcatgtgtgtgcccatgtagaccctccacagctattattactttctggcacagtaacccatgatgatggagatactggctactcaactagccttgtttccttactgacagtgatcagtggagcctcctgctgacacacaagaagaaaccttcatgacttttatttacagagaatttggaagtgtttactaacatagcatacttagcttccttagtctatcacaactcctcactataatca

SEQ ID NO: 179279 - DNA, 613 bp, Homo sapiens
  misc_feature (9)..(9): n is a, c, g, or t
tggatcccncgggctgcaggaaaaattaattccagatgcattaaagatctaaacatttaaaataagaaaagctacatgtgtattagaggaaaatggagtgcatgtttaaaatcatgcaatgaagaaaggcttcctaagaaagccaggaatcccccaaatcataaaggaaatgaataggttagaataaatttttaaaagacagtttctgtattacaatgaggcacctaaacaaaatgaaaactcaagccacatacttgactacaatatttgcaatatataatagacaaagtattcctgtgaagaatatataaagagttccagaaaaattaacaagaaaaagaacccgaccggacacggtggctcacgtctgtaatcctagcactttgggaggccaaggcaggcagatcacctgaggtcgagagtttgaggctagcctgaccaacatggagaaactccgtctctactaaaaatacaaaattagccaggcgtggtggcacatgcctgtaattccggctgctctggaggctgaggcaggggaatcgcttgaacctgggaggcgggggttgtggtgagctgaaattgtgccattgcactccagcctgggcaacaagat

SEQ ID NO: 179280 - DNA, 849 bp, Homo sapiens
tggtcaacttggcaaaggctcacagcagctctaacacattcggaaggatcctcaaatgcagcttcccttccctcctgaatcagatggcctccgatcactgttgcctcagggacgcactcagctccatccatccaggcctgcaggtccccaggaacatgtgggctggttcttactgaggctcaaacctatcgccggcaccctgccatgctccactttaggctcacaagggtcaacaagcaatacctcacatcatgacaaaaattaattccagatgcattaaagatctaaacatttaaaataagaaaagctacatgtgtattagaggaaaatggagtgcatgtttaaaatcatgcaatgaagaaaggcttcctaagaaagccaggaatcccccaaatcataaaggaaatgaataggttagaataaatttttaaaagacagtttctgtattacaatgaggcacctaaacaaaatgaaaactcaagccacatacttgactacaatatttgcaatatataatagacaaagtattcctgtgaagaatatataaagagttccagaaaaattaacaagaaaaagaacccgaccggacacggtggctcacgtctgtaatcctagcactttgggaggccaaggcaggcagatcacctgaggtcgagagtttgaggctagcctgaccaacatggagaaactccgtctctactaaaaatacaaaattagccaggcgtggtggcacatgcctgtaattccggctgctctggaggctgaggcaggggaatcgcttgaacctgggaggcgggggttgtggtgagctgaaattgtgccattgcactccagcctgggcaacaagat

SEQ ID NO: 179281 - DNA, 455 bp, Homo sapiens
gtccagattcaagaggagggaactacacaaaggcctgaatatgaggaggtgtggttcattggggatcactaaggtagtagattacccgtataactcaagagcttccactacagcaaatgatcaggttgactttatttaattaactagctgaaggtgaagatgtacacgtattaaatacagctaacttcactgaccatggagaaaagcactaatcttcagccttatccttagtccagaaggcaaatccccacctcgaaataaacttgtgaaatgatactgagttactgaatgttgattcctcccttatctcggttaagccttcacaccttgttggtggattgtttccattacttcctaagtggcctgccccattccagcatttctttgttgtaatctgtcctctaccctgcttccaggctaatctttctagaatggtacttttattgtgtcattct

SEQ ID NO: 179282 - DNA, 117 bp, Homo sapiens
agaccccactatatcaatcgtaacattagatgtgaatggagtgaacaacccaatcaaaagcagacacagacccaactatatcaatcgtaccattagatgtgaatggagtgaacaacc

SEQ ID NO: 179283 - DNA, 702 bp, Homo sapiens
ctagggagaatgctatggattctgactaaacagactggtttgaaagttgtatatcagaatcacttggaatgcatatgctaatttatatagatttgtatacactaaattttgctgctgttaataattacgaagaattagatgcctgcataagcaagagacaaaactaaatataagctgacaaaattttaaaagtcaattaaccttcatattaaatggcaccaggctagattttaaatggtctcaataatcaagtggaatagtttttttactgattagtttcaccttaataatttagactcagataaagtgaaaaactaggattagctcaaatagtgacatggcacttaaacaacaggttaggtgaagccattctgcagagtagttaagaatgagtacagacagacctcagttaagagtctagattctaccactaactagctacataaccatgcccagattacttcacagtactccttgtaaggatcaagtgagctattacagataaaattcttaggctagtatggggcatagagaaagcacttagtaaatattagacactgttaggaaccatgtaaaagcctttgggtttctcctaaagaaagtaatttttctctattgaagagaaaaggaagcatggaaagggtgaagcaatcctaacgtgtgctgtaaatagagatatctatattcacatgtatagatata

SEQ ID NO: 179284 - DNA, 456 bp, Homo sapiens
aggtgggtcttcaggggacatgttttgttgggtctttggagaaggttcagtttgcttcaaataaaatatttataaaaactgcactatgtaccaggcactcaatatcttgattagcaaattagaaaatgttgtgcctaatacattaaaaaaaatcaaaagtttcataattcacatgagttataatggacagtaagtggtcctttgaagagggaaataggatggagacaaccaagaataaaaagaagaagcaggcagggttaaccgtaggcaaaaatgggaaactaacaaattatatctcagtattctcagtcacccttcagtaaccatcctcttctcagcttcttagagaattctttcttaccctcttcaaggattcggtatctttttattgtgaccttcaaaattaagacactgccattgccctggttggaatggattcctggtcccacctaacaa

SEQ ID NO: 179285 - DNA, 1205 bp, Homo sapiens
tcgaatcgacggtttctcacggtcatcttaggctggaatgcagtggtgtgatcacagatccctgtagcttcaacctcaacctcctgagcttaagcgattctcctgcctcatcctcctgagtagctgggactacaggtgcgtgctatcacgcctggctagtttttgtatttttagtgagatggtgtttcactatgatggccaggctggtctcgaactcctgacctcgtgatctgccctcggcctcctaaagtgctgggattacaggcatgtgccaccacacccagctaattttgtaattttagtagagacggggtttctccatgttggtcaggctggtctcgaactcccaacctcggatcatctgtgcactttgggaggccgaggcggatggatcacctgaagtcaggatatatatacacacacacacatacacatacacatacacaaaagccaaacattttgttgatccattcatccatccatggaaaccttaagttgcttctaccttctggctattgtgaataatattgttatgaacatttatatattaatactccagttactgctttcagttcttttggatgtatacccataagtggaatcactggattatatagtaactctgtgttttttgtgtgtgtttttgtctgtgtgtgtttttgttttttgttttttttttgagggactgccatactgtttcccatagagttttcaccattttacattcccacaagtagtgcacaagagttccatttctccacaacctggctaacaattaccattttttttatggtagccattctaatggatatgaagtgataggtcattgtggttccaatttgcatttccctaatgattagtggtgttgagcatctttttatgtgtttattgacactttatatatcttctttggagaaacgtctgttcacatcccttgtcgattttttaaccaggttttttttttttgttattgagttgtaggagttctttatgtattatggatattaagccctcaccagataaatgatttggaaatattttctcctgcaacacagaagtttttttgttttaagtagtggggtcttgctgtgttgcccaagctggcatcgaactcttgggctcaggtgatcctcccacctcagcctcccaagtagctgggactacaggtgtgtgccaccacaccagcttcacaggagtgtttattt

SEQ ID NO: 179286 - DNA, 575 bp, Homo sapiens
tgacccagtcactgtgtgtccctcagcacagctcacggtggcactttttgcctgtgacatgtcaccaggcttcctatctgacttgcagccactctggtctctgagcctcctgctactcagtgtgtcctgtggagcaggagctccagcatcacctgggagcttgtgagaaatgcagcctgggcctctccccagacccgctgcctgggaatctgcattggaacaagatcccctagtgattcctatgcgttcttaagttggagaggcactgaattcttgttaatgcctcagctaaataaaggcttgaggagtgagaacttgaaggaggcagcatgaagccgcggaaagaggtgttggcatctgatagaactgaaatcacatcttgccttttcccctcatccgctgcaagtacttgctgtgtgatcaattactcaacctctctgaacttcattttctctcagtagaaataatatgagctttggtcctcctccaagttgccatatctcagaaggaccagcacagggcaggattcagagcagctgctgtaagtgctgtttgccctccctctgcatacccgg

SEQ ID NO: 179287 - DNA, 553 bp, Homo sapiens
ccacttcctcccagtgcatgtttgcacctcctttctgtgacagggagaatctatctctcatcgtccctcgtatttatactcacttggtcagtctccccatgtatgaccaatctcatttctgctgccacactctctcccttgcacatatgctctccttgcccactcagatgtcattgtccccactcctggatgccctgaatgtccctgctgggccaactctgcctatgaatgtccccctcatctagcttgggctttggccccacacctctacctgcatgccctcctccccttgcctgggctctaaccatttggagtgcagtcagccgccaggactccctggcaccaggctcctggcttgcattgccacacctagtgactctgggactggactgttgaggagtgggagggctggggaagggggagtcatgactttgaatacacttggtaaagcctgctattttcagtgctctttgctatttatttattattgtttttggagatggagtctcactctgtcgccaggctggagtgcggtggcgtaatcttggctcag

SEQ ID NO: 179288 - DNA, 374 bp, Homo sapiens
atgtcctacgacggagtcctgatagtgtggcatgttctggaaatggtacagtatgttcattatggttggaacacacattctaggagaggaagagggactaaattgcactggccctggggaaattgagctaaatggataaaagtaggcattgagagctgttggtgatttatagcccatcagcaccatgatcacactcttcccgcttctcctgctcaccacctttgcaaccaactttcctctcactgtgctgattgtctctggtacagatttatgatttccagcctcagctcagtgctcaggatgacttttctttcccttttttattctttcagacttatttctaatcagctgctttcttcattattagtagtgac

SEQ ID NO: 179289 - DNA, 280 bp, Homo sapiens
cttgttctgcaaataccacaggccccttgagaatccttagatttggttggtaacttaaattctggcaacttcccttgcaacagaactgttctatctgaaatgggcattagcaacagaaaactatgtaaccatatcacattctcctttgtactttttatgaaattcaaatgagttcacatttcaaaattgaagtaaggtagcatttacaacaaatccaagcagacccatgtgccatcatttctgtaactttggagtgtgcaccacattgtctgtaaagctg

SEQ ID NO: 179290 - DNA, 553 bp, Homo sapiens
accgcagggggtttccacacccctgtgatactcttcctaatatccacagggagagaggatgatatgactcccaatatcgcaggtggggtacaaaaccctgtgatattgttcctaatatccagagcgaaagaggatgatatgactctcaatatcgcagagggtgtacacccctcctataatattgttctgaataccctgggagagagaggataaggttacgttgaatatcgcagggaatgtacaccaacccctctgatacccttcctaatgtgcaggggaagagaggaaaatttcactcccaatatcacagaggcagtacaccccacttgtgatgttgttcccaatatgcaagggggagtacaccccacttgtgatgttgttcccaatatgcaagggggagaggatgatactactctcaatatcgcagggctgttcacatccccagtgacattttttcctaatatctaggggagagacaattatatgacagcaaaggtcgcagggtctgtacatcccttcctgatattgttcctaatatccagggggaaagagg

SEQ ID NO: 179291 - DNA, 338 bp, Homo sapiens
ccaacaatgccctattcatggcactaacactgagtgaagggaagaagaaaggtgattatttcccatactgaaaactgaaaagtttgctcttgaaaataacctggcctaaatgacaagacgtgttcattcttagaagtcaggctgtgctctgaacgagtgttacgtgtgggtaagtttttcagtgaaagaaagcctcaacgagtcaataataaacattaaacaattctgctccaagcaggaacttgcaaactcctggtgcaagagcatcaagaagcaatgagatctcgtctcgggcagagtaaatggctgaaatggaacttgctgggtccacaccagtt

SEQ ID NO: 179292 - DNA, 720 bp, Homo sapiens
gccaggagtttgagaccagcctgttcaacatggcaaaaccccgtgtctactaagaatacaaaaattagctggtgcaatggtactcacttataatcccagctacaagggaggctgaggcacatgaacctgggaagcgaagttgcagtgagccgagatggcaccactgcactccagcctagtcaacatagcaagactcttgtctaaaaatacaaaaaaatcccaggcataaaactaaaactagttctctgaaaaaatatctccagcagatctaaagtgtagtccatggatgtatttgtcagaaatgaaacttagagaatttataaggtaaatgtatttcatcaattcatagatgaggggtagatggaagtctctttggagaactggaaatagagatgtggggtggtggtaatgaaaacctgtgcatttgacgtacagagcatgctcagatcgaggctcatcctgctttcacagtcaactgtagtggtagggtgggtaacatcaggacttttctcatagagtagttctggatctacttgggttcacaccgcagagcaggaaggtaacaatctttctcgcgagcatcgctagaaagatctggtcaccaccatctcacaacaggcgttagtataaaataagcacacttaactgctgctgccacagtacctatctagagaaggagacagctccagtaagaaaaagtgagactgacggtatgcccca

SEQ ID NO: 179293 - DNA, 234 bp, Homo sapiens
agaaggtagattcatgggctggacttctgaaatagaaccaccctcttttcttccttggttctccttcacagctcttaccacaattttaaatgcttatttgtatagctgtgtgtttactgtgtgcctcctctgtgagactgcagtgaagacagatggtgtctatcttattcagtgttgtgttcccccagcttagcagtagatttcaaatgtttgttgtcacttaaatacttgaat

SEQ ID NO: 179294 - DNA, 261 bp, Homo sapiens
attaggacttcacagctgggtgtggagaggccggagccacctgcactggtccgtcagctccctcatccctctctctgcagagagggccacatttccaagatgcacgtaagaacatatgagtgcttcaaatcccagagctctagttgcaggaaaaaacattgagggggaaaatgggcagaacccagcatgccaggcaaggcttagtggctgcctgtttaaatcaacgtttagagacccgtgggtttgttcttaattggggcg

SEQ ID NO: 179295 - DNA, 159 bp, Homo sapiens
tttgtgggagtaatgaagaattcaggggattattcccatagttattagaaatatggatttggggcctacaggaaattctttgggatgttgaaactgaggaagcatcactggtagacttctcaagttgattagcaatttcacctttgatctgaaatatgt

SEQ ID NO: 179296 - DNA, 446 bp, Homo sapiens
ggggaaacacagaagggaggatcatgtgcaatgaggatggtggtgagaatgaccccctcctggctcaggtgcaggtgagtccctcttccctcagatgcttcacagcccttcagattggactcaagttctctcctcctggaagcctccactccagctttgatttttcccttctcaagttggctctgactttctagaagatcctaagtaggcttcctgttagggttccagaaccctaattgccaatactattcaaataggcacttattatacactttatcacttatgtgtttcctgtacaaattcttttgactttttagaaaaaaatatcgcataaattctttaggcatggagaatgcctaccctaagatttgctgtgttgttttgttttgtacccttgccctgtgagccttactcagttctacaaataaatggcatttcgatctgca

SEQ ID NO: 179297 - DNA, 121 bp, Homo sapiens
acctcgtaactgtggcagaggtgaaggtctcagcaccttctgtgtgccctcttgcatgtgtgtttgccagcatgcttggggctttcttcaggtgtttctggcctgaggaagtgtcttaccc

SEQ ID NO: 179298 - DNA, 572 bp, Homo sapiens
actagatcatattgggagcaggggccaggaaaatactctcagaagaggtaattctagagtatggtcctgaaagaagagcactgaagcaggagagggagcagcataaatgaaaacaaagagccatccagggggaaatacatctgaggaatcaaagaagtttcatatggctggagcgaaggttgcatatggcaagaacatgcttgctagtgctctctccttcccccatatacaaaatacacagataagacacaataaaaattaaggaaaaacaaaatgtgccaaaggaatgttgaagtttgatttctgccatgctagagtatctgcaaaacctgcattatctttttagaccaatattttgtggaaaaagcacaacctgaaaaataattcaaccttacccccaaacaagcagatgatcagtgttcactgctctgcacaacaggtaaagaaagaatctgcttattctgcttataaagagatggattcctatacaactaataatgcatttattgagtccttatgtgccagcacctttccaaatgcctgtgttttatctcatttcatcctcacaataa

SEQ ID NO: 179299 - DNA, 446 bp, Homo sapiens
ccgtgttcactaagcccctcaaagatgggaaatggatggtcccttcttaatagggtttggatccccgagggctcatatgggtggagtgggtttgggaggagacagaccatccggaatgtggagatgagaagggtagatctggctcttccctccttaatgtctgatgtctggtgttactatagctggattggtggtgcttctgctcagctcaccttagagtaatcatcactgacggaggagactggggaggtcccatccttcccctgggctcagctgggtccccagacctacacctgaaccccacgcctgtctggtgtttacggattgaagctgccaccctttgggacctatcctgttttcatttctgctctcagctctctggtctctgtggacctcacttacaggtttgtacgtgcctgtcacccacggtgcagccccatgaggct

SEQ ID NO: 179300 - DNA, 574 bp, Homo sapiens
acatgcacaattgtcttcagagaaaagctgaagaaagtaccccctcacctccatgccccaatgctccttttctctgacttcaagtgggcctctgatgctgcccacatttccctcaccaggtttctttcctttccaaaacatctgtaaaactttctgcacctttttccttctcccaccactaccagtggatgaccttatagatttctgctccatgagaaacagaagccatttgacagcaccctcagcaagagctaacattttagctcctaacaagagctagtgggcaactgatccaagcagtttacatatgtttatcatgtcatttcgtgttcaacacaatcctattagttataacttgataactaaggtttcataactggcctatggttgcacagcttgcaaaaggcagagtcagaactcagacccagtactgtctaatgtttgagctcttcaacactccatcactgcctgtcatcttccttctaatatatccacaaattcacctgcatctgcacatacagcttttcttcccatcatcttcgcataatggaacaaataaacctcctatccatag

SEQ ID NO: 179301 - DNA, 149 bp, Homo sapiens
atcttggctgcaagaagcagcaacaagttaggctcaaggtggaattgtgaggtcctgagaagagcttgctcttctgggacagaactgtatttttcttctaaactgcccatgttctggggagtcttcccgccttttggcttcagcaggac

SEQ ID NO: 179302 - DNA, 210 bp, Homo sapiens
ttggcctcccaaaatgctgggattataggcgtgagtcaccgcatccggcctgaaaattcacttttaacatttattggattcaagccaataaaatgtaaaattcaatgtttcattctcaatttcccacaactactttatttttctagctaagaatcatcaaatgaggccctcccccactttttgagacacagtctcgctgttgcccaggct

SEQ ID NO: 179303 - DNA, 295 bp, Homo sapiens
tggctgccactgtggctaattggaaaggaagttattgtggtcatcagaaatactgaaggagaaggggatgaaagtacaagtggctgtggcgacttagctatgttactgatagacttggctgttgtgacgaggtgcagaggctccagatgtcatctcataagatttgatcaaatgctttttttcttcctgtcttctggagggtggctcaccttgattgctttctcactttgtgcattttagattgaatcactccatctcactcttgcactcattttatatgaaatataacctaatt

SEQ ID NO: 179304 - DNA, 306 bp, Homo sapiens
cttctgtgagtttaaaatattttgagaggtagatgcaaggatggaaaataagagatcagtaaggaaattacaatagtccaagtaaaagatgatgtttttggtcagatggaagcagtggagaaggaaatacatggataaattagagatgtatgtgagagaggctggggttacacctgtaatcccagcactttgggaggcccaggcgggtggatcatgaggtcaggagtttgagaccagcctggccaagatggtgaaaccctgtctctactaaaattagccggatatggtggccctcctgtagcatgt

SEQ ID NO: 179305 - DNA, 220 bp, Homo sapiens
aggtgcttggacaagtctcaggtgtgtctgcctgtggctgcacaggctctctaatccgaaacctcactttcagagagatgtgggtcctttgtctccaggatccacaccctagattcttaacactgcattctccacatctcctcgaggttttgtggaaaaggagtgcatttctggttaactggaatatgaggttggtgaggttgaggtaggtctaggttaa

SEQ ID NO: 179306 - DNA, 484 bp, Homo sapiens
ccagtggcccaaacccaggagagagctttctaccgacagattctcctcacgctgagctgtttacggaaaccacaagttgaaatccaaaagtataaatgtaaagtccagttttcagttaaaaaaagaaactcattgtgtgagccccaaaggggagcctgcccagaccacagggaagttcactcttggcatatttcacaatacatatgttcaacacataggttgcattaatagaggcaggaggtccagagcaagggaggtgacagtccagcttatgtcttgccgtcacaccacactctctggactgcatgcctagtttgaggtctggtgtaggggcccctccaagggtgctgtggtgcaggttgaggccctgcagtggccagtgtctgaggtgtccggccagggctttctcaggcctggccccacagggctgtggctctgcagacagactcatgctgtctctcctctgtgctgggataacacgcag

SEQ ID NO: 179307 - DNA, 405 bp, Homo sapiens
tccctcggtagatttgatacaaataaaactatactgtgaatttttaacaatttgaggcaaaaatagactaataagagcagacacataagttagcaaatgcccattcagtaagtacaaaaaataacttaatacttcacaataaagtttaaaaaaaaggtaaaactaaaatggaaaaccaaggttaaattcaagtttaaaatcagaaatagagaattaaatagaataactaaaatgaataattggcaaaaagatctgcttctattcctaaatgcttggcctcccaaagtgctgggattacaggcatgagccaccatgcccggccaaaaactccaacttttagaggcctatttacagcacttgtcccatatttgttcacactttttctgtatgtgtgtcgtgaattat

SEQ ID NO: 179308 - DNA, 618 bp, Homo sapiens
atcacttgtctaaggtccccaggagaggaatggatggaataaaaaccaaacccggctgtatgacttcatatccgctgctctgaacatctgggagggctctcatttgggcattactcttcccatccaccctaaagattggcgagaatgattgcagtttagtgatagacattctgcgaagggtgggacctttctgcccatcaaagaatcattctgcccaaatgccaccaatgcccctccttgagaaacagctcaaaactctatgtgtaaacagcatctggcgtagtacttggctgcatcccatgacttgggcaagtgcctggcaagtgtaggggcttaataattgattgaatgagtgactgagtgaaagtcgcagacaagagatttggtcccctcatttgccaagtgaaggtagtaatgttacctcttttatgggtggcggtggtaaagattaaatgagaagttagatgtgaaaatgcattgggaatggatgtaaacctatgtaacaaaactgcatgtcctgcacatgtatcctggaacttaaaattaaataaaattaaattttaagaaaagaaaaaatgaatgtaaaagcagtataaacatgttgttgttatgataaat

SEQ ID NO: 179309 - DNA, 148 bp, Homo sapiens
cgtcacactaaatatatactcaatagaccatttttacagtttagaagacagtagtcaaaatcctctttattttctttatttacatcagccgtttataaaatattgactgataggccgagtgtggtgtctcatgcctataatcccagca

SEQ ID NO: 179310 - DNA, 329 bp, Homo sapiens
caaagcttttggattctatgatgtgataagggtaaaaagaatacccaaggatggaaacaggaagccagatatatcagaaacctcatatttctgaacttaaaaaagaagtgtctttcataagactctaattttcaaagtactttcacagctttcagacaacttttgaggaagaggatgaaagagaagtggcagctccactccgtgtggcaattgaggaaagggaagaagagaaagtggtgccgagtgttggttggggtccagcagccctctccccagcaacaatactcctctaggagtcttcaaagtggtttcctacacgttgcctcctt

SEQ ID NO: 179311 - DNA, 827 bp, Homo sapiens
ctgttcttaacacacccacctttcctattatactctgagttcctcaagggcagggatcatgttttattcatctttttttcccctagtacttggaatactgtctggcatataagaggcaaccagcaaatttttgctaaatgaacaaatgtagaaagtttatttgggtggtagaacactggagatgtttttgaataaaggtagaaccgccattacacaaaatatgtgaattaagcaagtctttaaattcaaatcttggcttagttattcagcacaataatatgtttcagccattcttatttctggccagtcatatctgagtaagactgtggaaaggataaggggaggaaatcatatgaatactactcagtgctccttggagtacactaaaaataaaataaatacctgtttcttaaataattacctttacaaaaataatgctctagtaactctccattctggatttgacaagtatgaaatgatttgtactagatgctttgtatttcctgctggaaatctccaagtttaataaaaatctaaataaaagacattagttttcaattttacatatatatttattgaagaaacatcattgagcactcacgtgtatgttaaatactacacagtttaaactgagttctccttaaaataaacttttgcactgtgaaaaatattgtagtatatggctgatatgggagcatttttctagcatcaaaaaagtaaaaaggccggggttgagtaatgacttaaaagcagccatggcatgtgagaaagaggctgatatcatctcttaagattcagggtcaaggaagatgagcagcaagcatttg

SEQ ID NO: 179312 - DNA, 344 bp, Homo sapiens
cagtaggtgggaagatgaaaatgacaaagaatggtagaggatagtattgctagagggtataagccttaaataagccaaaggtatttacataaaaagggttgagtaatgacttaaaagcagccatggcatgtgagaaagaggctgatatcatctcttaagattcagggtcaaggaagatgagcagcaagcatttgatagggctgcagaggaaacaaattttctgtggaggcccaggtttcaagacagacctaaagcatgtacagttccaacaacatggggccagaatgactcggcttccatgtgaattctcatgaagtttctggggtggtggaaggactatgagc

SEQ ID NO: 179313 - DNA, 522 bp, Homo sapiens
cggctagaagacacgtgccatgcgccgccggctcaacaagcacgaggagaacctgaagaccaagaagcaggaagcggcagaagcaggaagccttcctgcttctgcccctgcttctgctaaccctgactcgtacacacaagtactggtgaaggggtggagcaaaggaaactagtccactctcatcagggccaactcacgcacctggcaatctctactcatactgaacacaagtatgccctatagcccagcaatgccattctggacatacacgtccaaaagaaaagcaggtgcacagacacaagagacacgcgtgaagtgcttcatagcagtggggtttgcggcgtgccactaggatgtgagggtggaacactacacagcagaggaggcaaacacatcacaacgtaagtcaatctcacaaataatgttgaggaaccctgtctctacgaaaagtttaaaaattagccgggcactgtggtgcatgctggcggtctcagctaccagggaggctaaggcaggaggatc

SEQ ID NO: 179314 - DNA, 650 bp, Homo sapiens
ggtagtgaaaccttagcagttatacctatacctacaaaatatgtaggtaataacaaaaataagataggtgacttcttgtttttgctattactggctctctagtatacatggatgtggtattaggacatggctgaacttttataccctatcagaatatcctgaatggagtttcctctggagtacaatgaagtccctcctatcatatctttctggcttaaagattattgaaatcgtatttataaacttgttagcggctgagcgcggtgctttatgcctgtaattcccagcactttgggagccggagtcagtcggatcacctgagttcaggagttcgagaccagcctgcccaacatggcgaaaccctgtctctactaaaaataccaaaaattacccggggcgtgttggcagacgcctataatcccagctacaccaggaggttgaggcaggagaacggcttgaacccgggagacagggtttgcagtgagccgagatcacgccactgcactccagcctgggtgacacagcgagaaatatcaatgttcaatgtgtcttcaaaatgtttatattctttcaaggctcaactcatttacataaccttacctaatcaaagaattccatcccagctcctgtagcacttaaacatgtacccc

SEQ ID NO: 179315 - DNA, 562 bp, Homo sapiens
aaggatcccgatgtgagccacacacccagctactttagtctgttaggtgtgtaaaatgagagatgtgcggccgggcacagtggctcatgcctgtgatcccagcactttggaaggccgaggtgggtgatcacttgaggtcaggagtacgagactagcctggccaacatggtgaaaccccatccctactaaaatacaaaaattagccagacatggtggcagatgcctggaatcccagccccctctcccctgggcagctgggaccacaggcaagtgccaccactctttatttctttctcttgtctgattgctctagctatggcttccagtactatgtttaataacagtggtgatagtgggcatctttgttgtgttccagatctagaggaaagactttcagtttttcccccatcagtatgatactatctgtggttgtcatatatggcttttattatgttgaggtatgcctcttctctccctagttttttgagggttttttttgtcatggtgagacattgaattttgtcaaatgctttttcagcatcagttgaaatgatcttgttgt

SEQ ID NO: 179316 - DNA, 443 bp, Homo sapiens
gacaaggattataatagaatatataaataatctttgtcaaagaccaaccacagcaggaaattatttagagtattttgtgccatttgccctctctacaccttgatcagctgcaggaactgtgaagatcacagggtgcatgcaagattctgaaagcacatgcactactgcaagcaaagttcaccctttggtcctcacccttgccattcttcactgactgttcaagtgctagtgaaaatttagaccaaagatgatcatccaaactctttggctatgtcgtataagtgggacaatttaagaattcttcaattaattcaaaaagaaaagctaatgtaataaagagaaattcttgtaagtgtggtctaaacatattttctaatcattaccagaagtactatgtttcaacataagattactcacaaatccttccttatactcagaggcaa

SEQ ID NO: 179317 - DNA, 433 bp, Homo sapiens
gagtttaatcatgtcacaggtcctctaggcgtcagtttcctcactgtaaagtaacaagagttagattgaggacttcaaaggtcccttacgtctctaacgctcacatatccacgaaacccacacccagggaagcagtgaaccccagaaagtgggaggttaaggttaggttggcattttgcttctgtctgtgaggtggtgctatgtatacctagggtggggggaacagttttagattggagtggggaagcaggctatggaaccatatacctcagtctggccatcaccagaggcttcattatctgaagagtacttcattatttgttgagtatttccaaaactgaaattccaagtataaacatgaaaagattctagaagcaactgtacatgatttggagattatctacccgaaggctctagttccaaaacatcacag

SEQ ID NO: 179318 - DNA, 598 bp, Homo sapiens
gctctcctccaaatccaggggctccccgctttgctctcccttgctggatcctccctctcttcctgttacatggtgaagcaccccaggtttagtcctcaatttttcttctatacttatatccaatttcttgatgatacatccagtctcatggctcaaaaagcttttgatctaatgacaattcttaattctacataattctaggttccactttctcacctaattcctgttataaccaaatgcccattcaacatttgctatcaacttttatactttcaaatccaattttttgactttcctcccaaacctgctcttgtaaaagtgtaaataaatgacaactccaattgcttgaagttatcacatatcatatcacaccaagtctgtcaaaattcctagcagttttaccttcaaaaaaatccatgatcttactacttctcagcaccttcaacactactccaaatcactttaatctctaacttgaactgcaaagacttccttattggaatctctgctttccccactgccctcaaagtctattctcaggccagcagctggaatgatcctttgaaatacaaattacactttgtccctcctttcctca

SEQ ID NO: 179319 - DNA, 440 bp, Homo sapiens
aagattgcacagagagaaagtgagcatccgagagaaaatcaccacaagtgaggcagagggaggccggtctcagcagagttttggaggtcgtgagaagaagaggtaggagataggagagtggttccgagtacttgcctgctgatgttaccttctccacccccaccaggttttccagtgcctggagtcttgggcaggaatgggccactgtaagaaagagctttatcactagggcctcagccaacttttctgtgggatatccctccaaaataattaagagttcagaatgcttcagattttgaagtgaaactggtacatatattaagtgttacttaataacccgatagtttctagggcagctcaccataatcccaagtattagccaccaccctcacccccttcagagtaaaatgtgtttcctgaaggaagttgggaaaatgaag

SEQ ID NO: 179320 - DNA, 649 bp, Homo sapiens
tgagatagagtttcgctctagttgcctagctggagtgcaaggcaagatctcggccactgcactccaacctgggcaacagagtgagactccatctcaaaaaacaaaaataaaaataaaaaaataaaaaataaaaaataaaaattaaaaaaaaaaagaattattttcggtcaggcacatgaatttatttttacaatgtcctttagttaaagttgagatccaagttgggcctagactgaagcatgtccctcaagaagaacagattattgcaacacaccatgaatactatgaaaagagagacatacaagatacagtgggtttccagaagacaaaagtatctgctatatcaagaaagacttcacggaggaagtgacaggaacactgagtccttaagatttaatgagttccaagcagagtatcagttataagaaggtatggggcacactgcatctgactgaagcccagaacgataagagttcataaaagcaaggtctggattacaaaaggattctggcaaaatactgaggcatttttatttttgtctgggagttgttttttgtttgtttgtttttattatactttcagttttagggtacatgtgcacaatgtgcaggtttttacataggtatacacgtgccatgttggtttgctg

SEQ ID NO: 179321 - DNA, 704 bp, Homo sapiens
tgccaaccgaggtggccacaaaaatgagattagtcctaagtttcttttcatctattgtattcaataattctagttataaaagtagctctctaaaaatatgctttaaattcaaattggctcttcttttactatctgggttacctaaaaccatctcttctgtttgtttgttccttaacaaactccacccagttgtttctccaaaaactaagtttttagtctccaagccagattatatgtcactacctgttatgcatcctgcaactccctcaaacattctaggttatgctggcccctgatttttcatggtcctattactacaaaagctttgaccacactacattatgatttgttgaatatatttctgactcactcagctgtgtgcttttgaagacagaaataatgccctttccatattctcagccccagcattaactcagtacttgttttctagtgtgggctttacaaatgctaggtgactaaatggattatcactccttttatttcagtgaaatgacaaaggttatcaatatcaagtccctatatttgttcattctcatctcaacaaaattttgcatctactcctgttatattggactaagtacaaatagaatccagcagcatgttacaagactgtattaatccattcttgcattgctataaagaaatacctgagaatgggtaatttgtaaagaggtttaattggc

SEQ ID NO: 179322 - DNA, 512 bp, Homo sapiens
acaggatcagtgctggggccatctgtgcactgaccaaagcctctgctggcctcaccagaccaaggccagtgagtgcttcagggagccttggatcctccaggctgccaacagaaacaccggccctctcggcagcagccccatccttccacccctgcactgggtcctgaaaagcccattttggggccgttgctatttagccaacctgccctcccttgctctcctgtgatttctcactattccggctgcagctcgctgggagaaacacttgagagtcttttgtgctccacacccatgtacttaaaataccaggcctataggtcatttcaatgagggaatttggctcataacacgtgtgccccgaggcacagatcctacttctgcagatgctggccaagaagggctgtgtcccagccgccatggggtggggccacagagagggcagggccacgtggagggcagagcatgtggctcctgtcaggtgcgcccgttgctgactgcagcccagtatcaag

SEQ ID NO: 179323 - DNA, 190 bp, Homo sapiens
aaaggtgagaggaagggggtcatattacatggctgggcacccaccatgtgccaggcacttccgaaggtgttccacgtgcattgtcttaatcatgacctcaggaagtaggaggcgttatccccctaagataaataaggaaagtgaggttcagggagcttcactttcaataatgtgtctgaggccacgtagc

SEQ ID NO: 179324 - DNA, 218 bp, Homo sapiens
ttaaatttctcaacaaagatctcttcatacaggttatccatcaagtttctaaaaacaatgaaaataaattttgattatttcaaataaggtgtagaattttgctaagtatttagattataaccaacagagtacctggacagaggtttctctttgctctaacgcaagtgccacttcagcatctaaccagaagcaggaatagagaaagcagtcctgatttt

SEQ ID NO: 179325 - DNA, 221 bp, Homo sapiens
ttgccattcactggctttggttgggtcatttgctcatccctgaaccaatcactgtggccaaggacaggggatactctaattggtgaggcctgagtcatgtgcccagtctagcccctgggtggtaaattcagcatggctgaaagtgaggaaggtgtagctccctaaagcaaagccaggtactcttactagaaaaagggagaatacagttctgggtgacataa

SEQ ID NO: 179326 - DNA, 534 bp, Homo sapiens
atcactcgatttggccactgttcctactttttcatcactccttgccattgctgcagttatgtccttgtatgtgccgttatgcatatgtgcaaatatttttataggatacatgtgtgaaagtagacttgctaaatctaaaaatgaacactttaaattgtgcccctcgctttctggcattcaacttgtatcttcatccatggcgcatgacaggggccttttgtgccttttcctttctcatctctgggctgtatctttttaaggaaggcttttcataactcaacacaataaaattattatcttacttttatcctgaatgcatctgcagttttgtttacttttctcgctttttaatctacctgaatttggttttgcatatggtgtatgcgaaggagatggttttcaatgcaagattaaggaagcatacctttactctgtgatcagacaccacaacgcctgtgctgacacacgctcacactgagagtagagctacctctagtctcctaggcccttttctccagtaatgttccatttcta

SEQ ID NO: 179327 - DNA, 197 bp, Homo sapiens
ttattactagcttcatggacttgaaaaattacttatccttaatttgtagagataaaattggctgctttttctgttttcatgtagataaataggatcaaatgagagaaagggatgaaagcatttgtgtttgtttttaaactttttattatgaattttttttttttttggacccgggccaacaaggggagatcccttct

SEQ ID NO: 179328 - DNA, 333 bp, Homo sapiens
tgtgctgtagctatcttgtggtttggatttgtgtttccctaatggctaatgatgttgcgcatcttttcatgtgcttgttggcactcttacttttaacagttttgttaagtcactcggaagaggaaagagtacatagggaagtgcatttactcccaagttgctaaagaccaaaaaacttctagaaccccacctgcactaacgaagactctaaccccccaccagaactgtctaccctccaccgtggcaccatggtgtgcccgggaatgcggctggcgtggccaggcctcactcgcttcatgattctagccgcatccatctttgagtatccctctc

SEQ ID NO: 179329 - DNA, 119 bp, Homo sapiens
cgtcttccttgggcatgttagagacttgagaaatacttgctgtgtgattaggttatttcgtctcttaaaatagggcgaggtggtttacagccctttctgtaatattttgaatctcttgg

SEQ ID NO: 179330 - DNA, 176 bp, Homo sapiens
gaaacctttaacccaatacccagaaaaacagacatttggaggaagagggatcttccagattattcttccattctgccccatcctctacagagaaggaaactaagacacttttcaagaatcacaagataagttaatgatagaaagcagagtagaatcttgagtggaggagtgaaaat

SEQ ID NO: 179331 - DNA, 767 bp, Homo sapiens
gcaataaccctggaagtagatgactccacattctgcagatgaataatttggggcttagcaacactgggtgatttaaatgcccagtgacagtcgtgatgaaatctgaatccagatgtgtcaaaaatctctctccaccacagtgtactttattattttttcagtagtgaagcgcttcttaaaaataagtatgtaaaaaaattagtgaagtacttttaaaagataagatacacctactaaatagatattttacataagtgattactaattcagtttctgctttacattgctaaaatgtaagccagatgagcttatcatagagcctatgtataagaggaggactgaatataaattgcatgctgtaggctaaagaattattttccagtaatatatctatatcaaatcttttgtgctttgtttcttggtaggctgttataatggattagtttatgttctgaaaagtaatagtggagaaaaatactggatgtttactactgaagatgctgtcaaaagctcggcaaccatggatccaaccacaggactcatttacattggatctcatgaccagcacgcatatgctttagatatttatgtaaggattgacctcaaattagctgggcatggtggcgcatgcctgtaatggtagttactccagaggctgaggtgggaggattgcgtgaacctgggaggtggaggttgcagtgagccaagattgtgacagtgtattccaccctgggtgacagagtgagactctatctcaaaaaaaaaaa

SEQ ID NO: 179332 - DNA, 1607 bp, Homo sapiens
tgagattaatgcttttgttgtactgagcagagggagtcaaattttgtctctgaattccactaggtttttaacaaagttaggacattgctcttcagcctgtccttctgactcagtttcacagaccaacattcaaaatttgaaaggcttaaattctccagttcttattgggaagtcaaaagatccatcctgtgttgcaaaagtttctgaagaggggaaacctgcgatagggactcagaaaatggagttacatgtgaggtggaggtcagacacaggcaaatgtgtagatgcttcaccgctggttgtaatacccacttttgataagtcatctacaactgtgtacattggttcccattctcatagaatgaaggcagttgacttttactctgggaaggtaaaatgggaacagattttgggagatcgaattgaatcctcagcatgtgtatctaagtgtggaaactttattgtggtgggctgttataatggattagtttatgttctgaaaagtaatagtggagaaaaatactggatgtttactactgaagatgctgtcaaaagctcggcaaccatggatccaaccacaggactcatttacattggatctcatgaccagcacgcatatgctttagatatttatagaaagaagtgtgtttggaagtcaaaatgtggaggaactgtcttttcctctccgtgtttgaacctgattccacatcatttgtattttgctacattgggaggacttttactggctgtaaatcctgctactgggaacgttatttggaaacattcctgtggaaaaccactcttctcttccccacaatgttgctcacagtatatttgtattggctgtgtagatgggaatttactctgctttactcactttggagaacaggtttggcagttctctaccagtggaccaatcttttcatccccgtgtacctcaccatcagagcaaaaaatattttttggttcccatgattgctttatctactgttgtaacatgaaaggtcacctgcagtggaaatttgaaactacttcaagggtctatgcaacaccgtttgctttccataactacaatggcagcaatgaaatgttgctggcagcagcatctactgatgggaaagtgtggatcttggaatctcagagtggacaattgcaaagtgtttatgaacttcctggagaagtcttctcttctcctgtggtcctggaatcaatgctcattattgggtgtagagataattatgtttattgtctggatttattgggtggcaatcaaaaataatcaaatacagtccttatttgtataacaaatgtgagatatttgaaaatattttaccattatacatcatgtggacttattttatattaaagaagattatattttggctaagaaacggaaacttgtctacacttgattagagaacaactatattttacttcccataggaacgacagaagcttttacaaggagttagagaacaaaacacatcaatataattagtagcacttttgtttaattaggtgtgatggttaactttatttatatgtcagcttgactggctaagggatgctcagatgattgatagctggtaaaacattatttctgggtt

SEQ ID NO: 179333 - DNA, 768 bp, Homo sapiens
tgagattaatgcttttgttgtactgagcagagggagtcaaattttgtctctgaattccactaggtttttaacaaagttaggacattgctcttcagcctgtccttctgactcagtttcacagaccaacattcaaaatttgaaaggcttaaattctccagttcttattgggaagtcaaaagatccatcctgtgttgcaaaagtttctgaagaggggaaacctgcgatagggactcagaaaatggagttacatgtgaggtggaggtcagacacaggcaaatgtgtagatgcttcaccgctggttgtaatacccacttttgataagtcatctacaactgtgtacattggttcccattctcatagaatgaaggcagttgacttttactctgggaaggtaaaatgggaacagattttgggagatcgaattgaatcctcagcatgtgtatctaagtgtggaaactttattgtggtgggtaagtttttgaatttgaggtttgtggagttaaattgaattaccatacaataatcttcataggcccaagttaaattttttaaaaatctaaatatgatgggtttggttgctgtccaaaaattatagttaaccctgtgctgattaatattgtgggccttggggtcaagagtccctggatttgaacctacctgtatagctattatgaactctgtgacctttggcaagttactgaacctcttagaatttcactttccttgtgggtaaaatgggaataataataaaatgtgttgctgtatcac

SEQ ID NO: 179334 - DNA, 1562 bp, Homo sapiens
gcaataaccctggaagtagatgactccacattctgcagatgaataatttggggcttagcaacactgggtgatttaaatgcccagtgacagtcgtgatgaaatctgaatccagatgtgtcaaaaatctctctccaccacagtgtactttattattttttcagtagtgaagcgcttcttaaaaataagtatgtaaaaaaattagtgaagtacttttaaaagataagatacacctactaaatagatattttacataagtgattactaattcagtttctgctttacattgctaaaatgtaagccagatgagcttatcatagagcctatgtataagaggaggactgaatataaattgcatgctgtaggctaaagaattattttccagtaatatatctatatcaaatcttttgtgctttgtttcttggtaggctgttataatggattagtttatgttctgaaaagtaatagtggagaaaaatactggatgtttactactgaagatgctgtcaaaagctcggcaaccatggatccaaccacaggactcatttacattggatctcatgaccagcacgcatatgctttagatatttatagaaagaagtgtgtttggaagtcaaaatgtggaggaactgtcttttcctctccgtgtttgaacctgattccacatcatttgtattttgctacattgggaggacttttactggctgtaaatcctgctactgggaacgttatttggaaacattcctgtggaaaaccactcttctcttccccacaatgttgctcacagtatatttgtattggctgtgtagatgggaatttactctgctttactcactttggagaacaggtttggcagttctctaccagtggaccaatcttttcatccccgtgtacctcaccatcagagcaaaaaatattttttggttcccatgattgctttatctactgttgtaacatgaaaggtcacctgcagtggaaatttgaaactacttcaagggtctatgcaacaccgtttgctttccataactacaatggcagcaatgaaatgttgctggcagcagcatctactgatgggaaagtgtggatcttggaatctcagagtggacaattgcaaagtgtttatgaacttcctggagaagtcttctcttctcctgtggtcctggaatcaatgctcattattgggtgtagagataattatgtttattgtctggatttattgggtggcaatcaaaaataatcaaatacagtccttatttgtataacaaatgtgagatatttgaaaatattttaccattatacatcatgtggacttattttatattaaagaagattatattttggctaagaaacggaaacttgtctacacttgattagagaacaactatattttacttcccataggaacgacagaagcttttacaaggagttagagaacaaaacacatcaatataattagtagcacttttgtttaattaggtgtgatggttaactttatttatatgtcagcttgactggctaagggatgctcagatgattgatagctggtaaaacattatttctgggtt

SEQ ID NO: 179335 - DNA, 364 bp, Homo sapiens
gatggtgctggtcagtgcatgtggaagaaatacttaagataattgtattttaaaactggaggggatacagagatctaaatggaggtaaggtctctacacctcactggaagtggtaaaacattgacaccagtaagctgtgataagttacctatgtgtatggcaatacttagaacaacccctaaggaaactgtgtacaaagcagtgtactcagaaacattataagtaaatcaaaatgcaactctaagaaatgttcaaggccagttgcagtgactcatgcctgtaatcccagtgctctgggaggccaaggcaaaagcattgcttgaggccagatgtgtgaggatgtagtgagctatgatcatgccac

SEQ ID NO: 179336 - DNA, 526 bp, Homo sapiens
gttgtgaactgtgttgaaatgacaaggaatgagaacattatataaacttagttgatacagcagtggcagcatttgagaggactgactgcgatgctgaaaggaggtccactgggatacaggtgggagccacggtgcccagcctgtaaacataacttccatatgcactgggaaaccacgaaatttgtgtgactcgctttattgccgtatctctaccgtagtggtctggaaccacggctgcaggtcctctgaggtgcgcctgtggagaggcccagctgtgctctggaaatgtgcaccagctgctaagagtgaccttcgagggaagcagggcgcatgggaccctgggtgctcagacgctgctttttctggcactattgtaaccttttcaccacacgtacgtggtcactttttaaaccgtcaatagtggagtgagatttgggggcattttggttcttcttaaaactcttgcctggaaataaatagctgtttgtagtttttatagtggaagataaatacacaccttaagaaa

SEQ ID NO: 179337 - DNA, 484 bp, Homo sapiens
aatataaaaaaaaataattataaatataatataaaaataaaaataaaaaaataaataaaaaaaaaaaatagatacaggtgggagccacggtgcccagcctgtaaacataacttccatatgcactgggaaaccacgaaatttgtgtgactcgctttattgccgtatctctaccgtagtggtctggaaccacggctgcaggtcctctgaggtgcgcctgtggagaggcccagctgtgctctggaaatgtgcaccagctgctaagagtgaccttcgagggaagcagggcgcatgggaccctgggtgctcagacgctgctttttctggcactattgtaaccttttcaccacacgtacgtggtcactttttaaaccgtcaatagtggagtgagatttgggggcattttggttcttcttaaaactcttgcctggaaataaatagctgtttgtagtttttatagtggaagataaatacacaccttaagaaa

SEQ ID NO: 179338 - DNA, 490 bp, Homo sapiens
ggatcacttctctgtctcatccagccctcttcaggatactggcctgggcagcagggttggtttttgttgaagcccaaagcacagctaggcaacttcatcatgcagaaaaatgtatgaaaagggcttttgatgtgggtgacagcatgtgtaaagagacggtatccaagtgtgtggactttggagtcagactacctagactctaattcacctccaccacatacagctccctgaccttggcaggttacctgctctctttaagcctcacttcctcaccagtaaaatggggttaaatgtgaggattatgtgagttaattgatggatggaaagggtttagcaagtagtagtgccacgtttactggcacattgtaaatgcccaataaatgtgagctcctcttctgtacatccacacagctatggggcagggtgaagacatgacttctgagtcctaattgcattcattggctgcagaagtctggtgcccttgaactag

SEQ ID NO: 179339 - DNA, 260 bp, Homo sapiens
cttcatactttttaattttgctatggtgttactagcttcttgctagcaaacatatcctttgatttagcaagaaaattctacaaatagcatcataaccaaaagggataattctaaaggtaggaatttggggttattagtcattgaataagggtgataatttcatgtatgtgccaaaatttttcaactctacgttagagcaaacaaatggcttctagaaggattgctggggtgcctatgtgaatcacatacatgagatgtct

SEQ ID NO: 179340 - DNA, 251 bp, Homo sapiens
gataagtgaattatatctcaataaggctgtactggaaaagacagaagagttcaagaaaaatgtttgaaaaacagcccaggtggtatacacatatcaagaaaatcccgaagtgatacaagaatgactggagtttggagtttaaacacggagctcatgcattagctttacctaggttcaaatcccagctccaccacctcctagccgactgaccatgggctaatgacttaagctctctccacctcactttcctc

SEQ ID NO: 179341 - DNA, 775 bp, Homo sapiens
ggtggtggctcatggctgtaatcccagcactttgggagcccaagaagggcgaatcatgaggtcaggagttcgagaccagcctgaccaacgtggtgaaaccccatctctactaaaaatacaaatattagccaggcgtgatggcacgtgcctgtaatcccagctactcaggaggctaaggcaggagaatcacttgaacctgggaggcagaggttgcagtgagccaagatcatgccactgcactccagcctgggtgacagagtgagactctgtctcaaaaaaaaaaatgaaaataaaaaaataaactacaaattcaatatgatttcaaagaaacaccaacaaatacattatagttgttgttgttataattagagttgaaaagacatttttaggctgaaaaaaacaggaaaattctgacaaatgtagtaatgactaatttactaaatattctactaatctacaaaaatacattaaaaacttacagttaaagaaaactaaatttatattggcctgaaacagacaagcatattacaaaatagaataatggaatgaggtaatgatttataaactttacaggcagaatatataatatcttagtttaaaattgaacagcatacataatctaatttacctcaaaataactgatcaaaaggaaaaaattaattctatggatccaagatagaattacttactccaaaagactctaaagaattccacaggagaaaaaaaaaactccttacaactatactccagctaaacatctgttctctaattaata

SEQ ID NO: 179342 - DNA, 253 bp, Homo sapiens
ctcctgggttcacgccattctcctgcctcagactcccgagtagctgggactgcagcaacccgccacaacacccggctaattttttgtatttttactagtgaggctgattttaaaaatcaaaatgtatttaccagtttgtagtttatattttgtgaataaatctgttcacgtcctttgccaaattttctaatggggatgtgtttctttaattgatttctaagatctccttatacagcagcaatattgaccccgt

SEQ ID NO: 179343 - DNA, 523 bp, Homo sapiens
tggtgcgcgcttccagctactcaggaggctgagatgggaggatcgcttaagcccaggagttccaggctgcggtgagctgatgacgccactgcatgatgaatctttagttgttcaaacaacaggaaggatggtgttgcagtcaacagatgaggaaggctgagggtgaagcaggtttaaggggaaagagcaggagtttggttttggacctgttaaactgaaacatgccagcttggcgtccaggtggagagagatgtgtaagtctccaggcaggctgacctctggtgggtggtttaagtttgggagatgtccgggtgtgaattgtaagattgttggagctctaagcctggacacatctcatacgtacatggagtgaggcctgggcctgggcccccactgctaggaggttaggggaaagaggaggaagccacagagactgaggagagaccagtgggtttgcagcaaagggcatgtgttcccaacgtggtggggtcctattctgtgccaggtgtcggcatggggaggg

SEQ ID NO: 179344 - DNA, 252 bp, Homo sapiens
agggagaagtgaagggtaagcttggaatgtgaggttacactgagggcaaatgccaatgtcgatgttgcatttgatctgaagactaagcctggagttactcatagagagaaggggacgaatctgagttttgctttaagcttagatcttaaaggtggctaggatttttacattagttcttcctctgacttctggcataattaaacacaaatttgtctgtagaaaagtactccaaattttacctccaagatattg

SEQ ID NO: 179345 - DNA, 288 bp, Homo sapiens
caccccagagagtttctgagtcagtaggtctggggtggagcctgagaatttgcatttctgacaggttcgcaaggtgatgctgttcttgctggtctagggaccacactttcagagccactgctataaagtatcctagaaattagctaccaggactacttccaaaaatgcagtctctctctgtggaatctggccaataagatacaagcaggatgaaaaagttgtttgctcagcacttaattctgaatgatgctataatagctcttctacaaagggtattaaataaatctg

SEQ ID NO: 179346 - DNA, 471 bp, Homo sapiens
atctctttacagaacattatgtaaaccatccattagacatattgccctcgcatgtcccatgttctggactatgtttcccatcatcttctctgcgcgttcattctgggtacttccttctgacctgttttctggttcactgattttcacttcactgtatatatttcgttattaaacctgtacacactgaattattcttattattattgagagagggtcttgttctgtcacccaggctgggagtgcacttgcacaaagatggcttgacctcctgggctcgagtgatcttcccacctcagcctcccgagtagctgggactacaggtgcccaccaccatgcccggctaattttttgtatttttagtagagacggggtttcaccatgttagccaggatggtcttgatctcctgacctcgtgatccgcccatctcggcctcccaaagtgctgggattacaggcatgagccaccacgcc

SEQ ID NO: 179347 - DNA, 495 bp, Homo sapiens
tatgtcctaagcaatgtcctaggtgttcatgtaaccttcacagcagccctaggaagaaggcattattatacccaatttgtagttgagaaactgaaaggaaggtgagtaaatgatttcttaaatgtcaccaagcttaaatggcttacctggaatttgacctcatatttcctttgcagtaaggtactctgatgtcaagagactaggtaatatgtcatcagcaaagagcagcctctggcagtagaatgcaatattcaaatactggctctgccgagtactacttttctgaccttatccagggagtcattgaattgctctgtgcctaattttccacagctataagttgtttaccctctctggccttttgtctccacatatgataaatgcgatgattttagtctcttactgggatgctgtgaagtttaaatgagatattatgcatataatgtttgaagcacttgacacgtatgaaacaatgaagacatgcccatcattgtt

SEQ ID NO: 179348 - DNA, 157 bp, Homo sapiens
agtgaggcgaggtcgtgccactgcactccagcctgggcgacagagcaagactgtctccaaaaaaaagaaaaatgtatatatattccattccatcaagaagatattttatggacatgttatgattcaacaacatagcttcaaactacttaaaacagga

SEQ ID NO: 179349 - DNA, 241 bp, Homo sapiens
acggtcaggatgagcttttcacgacagcaggtggtggaggccaagtcccccaggattaaacagggaagtatggaagcacaggccctcctgccccagttgtaatcaagaggagggctccttcaagcaatgatgctgctctgaagcagatatatgggaatgcctccttttaataaactgaaattcactttcttgatgtaggtgccaaattcattcaaaaatatataaaactaacctaaacaca

SEQ ID NO: 179350 - DNA, 247 bp, Homo sapiens
cgcttcttatcttcaatcgttacaggtaattctttctaatgtagtgtcatcttctgaaacggttcctctggtagcctctgatctacagatgtggagttaaatcatttagattaaacgaaattagagatttcctatctctaagacaaagatagaggtaaacataaatttagtttttgacatttttgccttgtaacttaactgaccttagttggagataattgttaattaagcttgtggatttgggtct

SEQ ID NO: 179351 - DNA, 250 bp, Homo sapiens
aatgggcagctaatgcattcagttatttccaatgaaataatttccagtgaaacttgtgctaagttgaatatttccaactgtaagtggagtttgtaaatataatttgtcttgtggaattgattcccaaaagttaatttttgaaagctcaattgagaaacttaggaagcaaatacccagggctttgggaacatgcattaactatatgaactgtaatgcagtgttatgagaacaccttttcctctattagcct

SEQ ID NO: 179352 - DNA, 314 bp, Homo sapiens
taaaatagcttcttactctgttttgttgtttatacattgtatgtttggcttcttgaggtctctggctcctcagtttttccttggctcataacatagtatcctcattgatccaagcatgaccctgttttgcttatttttattttacttatactaataatataatgaatatccacaaattcagtgcccaatgaggcaggagaatcgctcgaacccagtaggcagaggctgtggtgagccaagatcacgctactgcattccagcctgggcaacagtgcgagattctgtctcaaaaaaaaaaaaaaaatatatatata

SEQ ID NO: 179353 - DNA, 230 bp, Homo sapiens
tctagaggatcccgccacggtagattgcctcaaatatccaaacttcaccccacagagaccctcccctaggcacccacatcctggcatgttcagacaccctcctcgtgaacatgcacagcccccaaggcaccagatagacattgatttccatctagaagtgtccgtcaaaccctcagcgatatatctctgccgcccaggctagagtgcagtggcacagtctcagctcactg

SEQ ID NO: 179354 - DNA, 543 bp, Homo sapiens
atataaagcagtggcttagacatgtatatccctcctgtgcctgaccaaatggcgtgaactttgagaatgaaagtacttaataaatgcttgcaaattcgagatggagccgcatagcataatggatgaaaacgctgacactagagctaaactaactacattcaatcctggtttggccacttatcatctatgtggtcttggactagtcatgaaacttttttgtgcctcagcatattcatctgtaaactgtcgtctatactagctgggcacggtggctcacgcctgtaatcccagcactttgggaggccaaggagggcagatcacaaggtcaggagatcgagaccgtcctggctaacacagtgaaaccacatctctagtaaaaatacaaaaaaattagccgggcgtggtggcgggcgcctgtagtcccagctactcgggaggctgaggcaggagaatggcgtgaacctgggaggcggagctttgcagtgagccgagatcccaccactgcactccagcctgggagacagagcgagactccgtctcaaa

SEQ ID NO: 179355 - DNA, 337 bp, Homo sapiens
attttattccccatacttatagtgcttgacatctggtaggcactcaatttgaataaataggtgaggggatatacaaactaaaactatcacttctctcctccacctgtcatttcagtttttcttctcgattaatggctttattgttacatttgactggtttaaaatgttggggtcatctctggcttctttgtattactgtgcacactcaggtagagcctgtatgttcatttccctttgacatgttcttctagtctattcctcctccgacttctctaattgagtctcctttgtcagactactgtgataacttcttaatggggttcactggcccccacct

SEQ ID NO: 179356 - DNA, 730 bp, Homo sapiens
aagaccaacctggccaacatagtgaaaccatgtctccattaaaaatataaaaattagccaggcatgatggcccatgcctgtaatcccagctacttgagaggctgaggcacaagaatcacttgaacctgggaggcggaggttgcagtaagccaagattgtgctgctgcactccaacctagggggcaaagcaagactctcaaaaaaacaaaaaaacagggagagttttcctgttgatagtcacctgggctgtttcctgtttggagctttatgaataaggcttctgtgaacattcttgtgcaagtctttttataggcataggtttttatttcatttggatgaatatctaaaggcagaatggctgggtcatatggcatgtgaatgtttaactttataagaacctactgggctcggcgcggtggctcgcgcctgtaatcccagcactttgggaggccgaggcaggcagatcacgagtgtcaggcctctgagcccaagccaagccatcgcatcccctgtgacttgcacgtatacatccagatggcctgaagtaactgaagatccacaaaagaagtaaaaatagccttaactgatgacattccaccattgtgatttgtttctgccccaccctcactgatcaatgtactttgtaatctccaccacccttaagaagattctttataatttcccccacccttaagaaggttctttgtaattctcccaacccttgagaatg

SEQ ID NO: 179357 - DNA, 718 bp, Homo sapiens
ttttcactaaccgccaactggaatttggcatttccttcccttacgagcagacgtgggaaaccacagtggcagtagctggacggtggctttgtcaatcagaaatcctttgtccatgtctctttacagtgtcatagaaagagcattcgtcctcttcctgatttcaaaattaccatagttggctgggcatggtggcttgcgcctgtaatcccagcactttgggaggctgaggagtttgaggccagcctgggcaacatggtgaaccctgtctctaccaaaaatacaaaaaattatctgggtgtggtggtgtgggcctctggtcccagctactcagggagctgaggtgggaggattgcttgggcctgggtggtggaggctgcagtgagccataatcattccactgcactccagcctgggcaacagagtaagtgcctgtttcaaaaataaataaataaacaaaaaccaaaaagcacagctgtcaccatatcaaacattcagctattaaatattttaatgactttagtttaatataatgttttactttaatgctatacaatttcatttataaaggtaaatctaaggctgggcgtggtggctcatgcctataatcccagcactttgggaggctgaggtgggcggatcacgaggtcaggagtttgagactagcctggccaacatggtgaaactccatctctactaaaatttagccaggcatggtggt

SEQ ID NO: 179358 - DNA, 2365 bp, Homo sapiens
aaaaaaacaaaacaaaacaaaaaactctgacagagatgtctggtttgagccatgtctgcgtcttgaaggacattttgaacgaaccccctttgcttgaggctcgcaaccacccgatgatcgatgatcgtctcaggggaaaagaagccttggcgaagagcagaggtttagaggcacaattctgctttccctggaactgtgtcattcaggactctgcaaattccctaaagtaggaggaaaaatgaccatgtccaaggaggcagtgaccttcaaggatgtggcagtggtcttcactgaggaggagctggggctgatggaccttgcccagaggaagctgtatcgagatgtgatgctggagaacttcaggaacctgctgtcagtggggcatcaaccattccaccgagatactttccactttctaagggaggaaaagttttggatgatggatatagcaacccaaagagaagggaattcaggaggcaaagatccaacctgagatgaagacttttccagaagcaggaccacatgaagggtggtcctgccagcagatctgggaagaaattgcaagtgatttaaccaggcctcaagactctaccataaagagctctcagttctttgaacagggtgatgcccactcccaggttgaggaaggaatatctataatgcacacaggacagaaaccttccaattgtgggaagtgtaaacaatccttcagtgatatgtccatctttgatcttcctcagcaaatacgctcagcagagaagtctcattcctgtgatgagtgtggaaaaagcttctgttacatctcagcacttcatattcatcagagagtccacctgggagagaaactctttaagtgtgacgtgtgtggtaaggaattcagtcagagtttacatctgcaaactcatcagagagtccatactggagagaaacctttcaaatgtgaacaatgtgggagaggcttcagatgtagatcagcacttacagttcattgcaaattacacatgggagagaaacattataattgtgaggcatgtgggagggccttcattcatgatttccagcttcagaaacatcagagaattcatactggggagaagccattcaaatgtgaaatatgtggtaagagcttctgtcttaggtcaagtcttaataggcattgcatggtccacacagcagagaaactgtacaaatctgaaaagtatggaagaggtttcattgataggctagatttgcataagcatcagatgattcatatgggacagaaaccatataattgtaaagaatgtgggaagagcttcaaatggtcctcatatcttttggtccatcaacgagtccacactggagaaaagccatacaaatgtgacaagtgtgggaagagctacattactaagtcaggtcttgacttgcaccatagagcccacacaggagagagaccttataactgtgatgactgtgggaagagctttagacaggcctcaagtattttgaatcataagagactccattgccgaaaaaaaccattcaaatgtgaggattgtggaaagaagcttgtataccggtcataccgtaaagaccaacaaaaaaaccacagtggagaaaatccatccaaatgtgaagactgtgggaagcgctacaagaggcgcttgaatcttgatataattttatcattatttttaaatgacacgtaagtgttgtacatatttatggggtacagtgtgatatttaaatatatgtatatgatgtataatgatcaaatcagtgtaattagcacatttatcacctcaattatctcttttttgtgttgagaaaattaaaaattcattgttccagcagtttgaaaataaattgttgtcgatgatagtcacctttagtgctgcagaacagcagaacttcttcctcttatctacctgtacttttgcatccattagccaacctttggccatcccacctatcccttacccttccctgcctctagagccactgttctcactacttctaagaaatcagctttttaagcttccccatgtgattgaggacagtttgaagttagtgtttcagccatagctcagcataccccagtggtcgtgggactgtcagagcagagaatgctgcagggtttctaacagaagtttgacaattagttattattcaggagacaggtcttagtataagagtttgttcacacactttcaaaacactaatgatgaacatgtcaaaattgatgaccactagaatgtcagccacatgtgtctttgtatttttgctgcatccttacattgcttgagtctggaagattgaggctgcactgacctatggtagtgctactgcactccagccagggcaacagagtgagaccctgtctcca

SEQ ID NO: 179359 - DNA, 2139 bp, Homo sapiens
attggctggtcgctcctctctggcgagagcaggctctgttatgcacgccccacagcagtgtccaagcatgttacaacccatgctgtttcagctctgccatctggggatggccaagtgccaatcagctcagtggagcatcagggtagcagcccctgccctcttggcacctgggttcttgtccagcatccaggaagaaccaggtcacatgaactgtgtgaaaggtgatgaacgcagaagactttattgagtggtgaagatccaacctgagatgaagacttttccagaagcaggaccacatgaagggtggtcctgccagcagatctgggaagaaattgcaagtgatttaaccaggcctcaagactctaccataaagagctctcagttctttgaacagggtgatgcccactcccaggttgaggaaggaatatctataatgcacacaggacagaaaccttccaattgtgggaagtgtaaacaatccttcagtgatatgtccatctttgatcttcctcagcaaatacgctcagcagagaagtctcattcctgtgatgagtgtggaaaaagcttctgttacatctcagcacttcatattcatcagagagtccacctgggagagaaactctttaagtgtgacgtgtgtggtaaggaattcagtcagagtttacatctgcaaactcatcagagagtccatactggagagaaacctttcaaatgtgaacaatgtgggagaggcttcagatgtagatcagcacttacagttcattgcaaattacacatgggagagaaacattataattgtgaggcatgtgggagggccttcattcatgatttccagcttcagaaacatcagagaattcatactggggagaagccattcaaatgtgaaatatgtggtaagagcttctgtcttaggtcaagtcttaataggcattgcatggtccacacagcagagaaactgtacaaatctgaaaagtatggaagaggtttcattgataggctagatttgcataagcatcagatgattcatatgggacagaaaccatataattgtaaagaatgtgggaagagcttcaaatggtcctcatatcttttggtccatcaacgagtccacactggagaaaagccatacaaatgtgacaagtgtgggaagagctacattactaagtcaggtcttgacttgcaccatagagcccacacaggagagagaccttataactgtgatgactgtgggaagagctttagacaggcctcaagtattttgaatcataagagactccattgccgaaaaaaaccattcaaatgtgaggattgtggaaagaagcttgtataccggtcataccgtaaagaccaacaaaaaaaccacagtggagaaaatccatccaaatgtgaagactgtgggaagcgctacaagaggcgcttgaatcttgatataattttatcattatttttaaatgacacgtaagtgttgtacatatttatggggtacagtgtgatatttaaatatatgtatatgatgtataatgatcaaatcagtgtaattagcacatttatcacctcaattatctcttttttgtgttgagaaaattaaaaattcattgttccagcagtttgaaaataaattgttgtcgatgatagtcacctttagtgctgcagaacagcagaacttcttcctcttatctacctgtacttttgcatccattagccaacctttggccatcccacctatcccttacccttccctgcctctagagccactgttctcactacttctaagaaatcagctttttaagcttccccatgtgattgaggacagtttgaagttagtgtttcagccatagctcagcataccccagtggtcgtgggactgtcagagcagagaatgctgcagggtttctaacagaagtttgacaattagttattattcaggagacaggtcttagtataagagtttgttcacacactttcaaaacactaatgatgaacatgtcaaaattgatgaccactagaatgtcagccacatgtgtctttgtatttttgctgcatccttacattgcttgagtctggaagattgaggctgcactgacctatggtagtgctactgcactccagccagggcaacagagtgagaccctgtctcca

SEQ ID NO: 179360 - DNA, 2385 bp, Homo sapiens
agcgggcagagaggacacttccggtctcctagtctgaggttcctgctttaatgaccggggtagtttgagccatgtctgcgtcttgaaggacattttgaacgaaccccctttgcttgaggctcgcaaccacccgatgatcgatgatcgtctcaggggaaaagaagccttggcgaagagcagaggtttagaggcacaattctgctttccctggaactgtgtcattcaggactctgcaaattccctaaagtaggaggaaaaatgaccatgtccaaggaggcagtgaccttcaaggatgtggcagtggtcttcactgaggaggagctggggctgatggaccttgcccagaggaagctgtatcgagatgtgatgctggagaacttcaggaacctgctgtcagtggggcatcaaccattccaccgagatactttccactttctaagggaggaaaagttttggatgatggatatagcaacccaaagagaagggaattcaggaggcaaagatccaacctgagatgaagacttttccagaagcaggaccacatgaagggtggtcctgccagcagatctgggaagaaattgcaagtgatttaaccaggcctcaagactctaccataaagagctctcagttctttgaacagggtgatgcccactcccaggttgaggaaggaatatctataatgcacacaggacagaaaccttccaattgtgggaagtgtaaacaatccttcagtgatatgtccatctttgatcttcctcagcaaatacgctcagcagagaagtctcattcctgtgatgagtgtggaaaaagcttctgttacatctcagcacttcatattcatcagagagtccacctgggagagaaactctttaagtgtgacgtgtgtggtaaggaattcagtcagagtttacatctgcaaactcatcagagagtccatactggagagaaacctttcaaatgtgaacaatgtgggagaggcttcagatgtagatcagcacttacagttcattgcaaattacacatgggagagaaacattataattgtgaggcatgtgggagggccttcattcatgatttccagcttcagaaacatcagagaattcatactggggagaagccattcaaatgtgaaatatgtggtaagagcttctgtcttaggtcaagtcttaataggcattgcatggtccacacagcagagaaactgtacaaatctgaaaagtatggaagaggtttcattgataggctagatttgcataagcatcagatgattcatatgggacagaaaccatataattgtaaagaatgtgggaagagcttcaaatggtcctcatatcttttggtccatcaacgagtccacactggagaaaagccatacaaatgtgacaagtgtgggaagagctacattactaagtcaggtcttgacttgcaccatagagcccacacaggagagagaccttataactgtgatgactgtgggaagagctttagacaggcctcaagtattttgaatcataagagactccattgccgaaaaaaaccattcaaatgtgaggattgtggaaagaagcttgtataccggtcataccgtaaagaccaacaaaaaaaccacagtggagaaaatccatccaaatgtgaagactgtgggaagcgctacaagaggcgcttgaatcttgatataattttatcattatttttaaatgacacgtaagtgttgtacatatttatggggtacagtgtgatatttaaatatatgtatatgatgtataatgatcaaatcagtgtaattagcacatttatcacctcaattatctcttttttgtgttgagaaaattaaaaattcattgttccagcagtttgaaaataaattgttgtcgatgatagtcacctttagtgctgcagaacagcagaacttcttcctcttatctacctgtacttttgcatccattagccaacctttggccatcccacctatcccttacccttccctgcctctagagccactgttctcactacttctaagaaatcagctttttaagcttccccatgtgattgaggacagtttgaagttagtgtttcagccatagctcagcataccccagtggtcgtgggactgtcagagcagagaatgctgcagggtttctaacagaagtttgacaattagttattattcaggagacaggtcttagtataagagtttgttcacacactttcaaaacactaatgatgaacatgtcaaaattgatgaccactagaatgtcagccacatgtgtctttgtatttttgctgcatccttacattgcttgagtctggaagattgaggctgcactgacctatggtagtgctactgcactccagccagggcaacagagtgagaccctgtctcca

SEQ ID NO: 179361 - DNA, 485 bp, Homo sapiens
tggacatatatcctactgaatcacctgagattgtcccaatttcaaatattctgtcctactgccgcataaaccaacaaatgccagagttgataaccccgtggtaaccagctcacatctgctcagggcctctgccaggccagaggtgttggctgtctctggggtgtgaagagcaccacctaccctgtgctgagcacccctccctgctgagtcctcaagtctgagacttccaggaatacaagcttgcgtttccacactaagaaacctgggtgcaagtcccagtctacacttatagatggccttgggcaagtcacacaaagcctgttttctcacctggaagtggggacagccctcttcctcagagaacagtagtaaggattccatgtctcagtatgtgaagggccagcactaagccaggttccttagggaacattagatctcatccctttttctagctctcctgcctccttccttccatgcccagggat

SEQ ID NO: 179362 - DNA, 250 bp, Homo sapiens
ttaaaaactcaccaatatacataccaatttttctgcctatctctcaattttcaccatcctttctttcaagctagactctcagctccttcaaattaaaattttccatttggcaatgcaagtttatcttttcttaaagacggaatgaccagccttttgatggaagattttatgactctggtgtcttccaatgacgtgaccagtgatgaggtttgcatctgtgtaaaacctacagattggaattctgctttct

SEQ ID NO: 179363 - DNA, 223 bp, Homo sapiens
tagctgctgtcattatccccatttcatagacaaggaaaccgagatacagagaagttgaattaacttgctcagtgtcacatagctagtaagtggtgctgttgcattcctgtccaggtcattggactccagatttcatgcccttaatcactgtggtattttgtttctcttttaaaaaactgcccaatctgtttatttctaaagaaggaaagaaatgtcagtgata

SEQ ID NO: 179364 - DNA, 220 bp, Homo sapiens
aatcagtttaacaaggagaaacaggtagaaccaggttctcactgcgggagaaagaaggtgaaaaatagttaactcttgaactcttgacctcaggtgatccacctgtctcggcctcccaaggtgttgggattataggtgcctagcccatggtgcctagccctaacctacatttataaactatcacttgctgctgtgtggagactatattgtgagattaaca

SEQ ID NO: 179365 - DNA, 292 bp, Homo sapiens
aaaagaaagcttaaatacaggtaatctgatttttcagcttactgatctactaaggaaaactgcacatcttttcataactaaagcgtttctgaaactgcagcatacattaagcatttcatatgccgcccattaaataactaatatattctatttcacaaacaggaaaagaggttgaacaccattatgtaagtagtaacataggatagtacccctgttctcttatgacacattcttaacagtactggtttttaaggcgagggagaaaagaaccaggaagtggaccagtgggaga

SEQ ID NO: 179366 - DNA, 343 bp, Homo sapiens
cctcttctctccacctccctccccaagtggtgtggttgttccatgaatgctgctgacttgcgcatggaatacgtgacagctctctctcctcttcatgcctttccatttccctcccaatcctgacttttcctttgatcaactcaagtgtggaaacactttctactctacattttcctttcaataactgtttttaaaccttgaaaatttccttttattcttctgttttccacgtgccaagaaataacgcaaagaatgcaaacaaacaatgggaaaacagaaaccattcagttgtcaggaacacacatcctattttatggaatgaaatgttgaccccaattccaga

SEQ ID NO: 179367 - DNA, 222 bp, Homo sapiens
gtcaaagcaaaaaaacagatctaggataaagaactaaagaacaagtggtagcatttgagaaggctaaaatattgattgctcaggcacaagctctagttccccgcttctgggataccagtgtcttttgatatgactgtaaaccctgaagggacaaaacaggtcctctggcacgttcagcatgggaaagcagttcttctaagattctggtcacagctatggaaa

SEQ ID NO: 179368 - DNA, 411 bp, Homo sapiens
ttcatacagattgagtatgtcttatgtgtaaggcttaggactaaaagtgttttggatttctgactgtttttgagttttgaatatttgcaatatacttaccagtttagcaccccaaatctgaaaatacggaatccaaagtgctccagtgagcctttcttttttcttttcttttctttctttttcttttttttgagatggagtctcgctctgttgccaggctggagtgcagtggcacgatctcagctcactgcaacctccacctcccgggttcaagcgattctcctgcctcagcctccaaagtagctgagactgtaggtgcatgccaccacgcccagctaatttttgtatttttagtagagacggggtttcaccatgttggccaggatggtcttgatctcttgactttgtgat

SEQ ID NO: 179369 - DNA, 494 bp, Homo sapiens
  misc_feature (1)..(1): n is a, c, g, or t
nacgagctgtttggtggtctcttcacacagacacgtgtgaaatttggtgccgtgactcggatcgggggacctcccttgggagatcaatccgcgccgtcctcctgctctttgctccatgagaaagatccacctacgacctcaggtcctcagaccgaccagcccaagaaacatctcaccaatttcaaatcagcaccccaaatctgaaaatacggaatccaaagtgctccagtgagcctttcttttttcttttcttttctttctttttcttttttttgagatggagtctcgctctgttgccaggctggagtgcagtggcacgatctcagctcactgcaacctccacctcccgggttcaagcgattctcctgcctcagcctccaaagtagctgagactgtaggtgcatgccaccacgcccagctaatttttgtatttttagtagagacggggtttcaccatgttggccaggatggtcttgatctcttgactttgtgat

SEQ ID NO: 179370 - DNA, 370 bp, Homo sapiens
gtgtgtttgaagaggaaacattggatcataaaatgtgcattggcttacagtataagtgtagctttcatactatagaccattctgcgttgagtgaagctaagtccccaagggcaaaggatcttggtcaagttaatactgaaataaaatgcctgggccagtggttctttcactccacagcactagctgtatttttataatagattagcatgtagaatactgaggcagggtttggaggattactctaagaggatcttttgggccagtggttctttcactccacagcactagctgtatttttataatagattagcatgcagaatactgaggcagggtttggaggattactctaagaggatctttaaggggccag

SEQ ID NO: 179371 - DNA, 723 bp, Homo sapiens
actttttgtgacacattattccttgatgtctgagattctttctagaaatcaatctaataatacctgctgttcgttgctcaggacttctgaagtaatgtctgcagactatgtgagaagaaaaaggttctatcacacaaagtatttttccactcttgatatcagctcattccttgtttatatgattaagtttgaagtagtctgacatttggcaaactctttttttttcccaccagaaactaaaattcatgattaactcactgctcgctatgaatttgtcacaacttcacttaacctaataaatatcccagaaagagcagacttggctggagttgaatcagtacagctttactgatttggccactaagttaagcccatactttttaatctggattgagctaagggggaatgttcagaaatcaaggtctgggtgcattctcccagaaatcactggagctcagctggctttattagcctggtgagaggagggggaggtataaataaatgcatagcagacaccactttttcctctggtatgtgtatagacctttggcggtagtagtagaggggttataataaacaattaatggatgatcaatcttaagtatgatataggagaatttaaagtattctgagttcttaaagactattcactatataatatgtgataacttatattcttttattctgttagattttgctttctaaatgaataatcatatactg

SEQ ID NO: 179372 - DNA, 263 bp, Homo sapiens
agaagacataccagtcaatgggttcttgaaatagtcaaggaatgtggcaattcacgctggatgtggaaggtggaaggaaagacaagtgttagcaaatgcagacctgtctgctgtggaacttgaagaccttgctagtagtcaggctgcttcctggcattccaggcctgagaggcttctattttgactcaaagcaaaaacaaatgctatgttaatgtcttcctatgtgtccccttcataagattttggtgaaatcatattaaaag

SEQ ID NO: 179373 - DNA, 417 bp, Homo sapiens
gtgtgtttgacggtgatggtgggagtagggaatatattgccctattctttcctgagttctggtcaccaattgttgtagttaaattttctgcctgtggatttattttgaactttttgtgtgaatttcagtcactatactttttctcgttagagtgtactctttctagttattaaaaagaaaagttaactgtaaaacagcctcaggcaggtccttccggagctatccagaagaagccattgttatcataggagatgacagctccatgggtgttattgcccctgaagaccttccagtgggacaagatgtggaggtggaagacagtgacactgatgatcctcaccctgtgtaagcttaggctactgtgtgtatttgtgtcttagtttttaacaaaaaggtttaaaaataaaaataaaattt

SEQ ID NO: 179374 - DNA, 411 bp, Homo sapiens
taagttaatacttttaacagggtaaagaaggcgtcagtcatagctcagatgttgcagttccacataggatccgtagagtggaaatggtgaagaaaattcctatttctgtaagagcagtgaagtcctacgtatccccagaaaatctgtatagaaggaaaattgttaaatccaatcccaaatagtgaaaacattttgctgcaactttccctcctcattcagctgtaattttagaggaaataccgtttcctttcaattacaagccaaataaatgttagagtgttatgtaacttaattcattacccaagagcttcacatggcataactttttaaaataaaaacaagaacagggaaaagtgattgttttaataacactgaaactcagtaacaaacaaaaaaactgcccctgcttga

SEQ ID NO: 179375 - DNA, 562 bp, Homo sapiens
taagttaatacttttaacagggtaaagaaggcgtcagtcatagctcagatgttgcagttccacataggatccgtagagtggaaatggtgaagaaaattcctatttctgtaagagcagtgaagtcctacgtatccccagaaaatctgtatagaaggaaaattgttaaatccaatcccaaatagtgaaaacattttgctgcaactttccctcctcattcagctgtaattttagaggaaataccgtttcctttcaattacaagccaaataaatgttagagtgttatgtaacttaattcattacccaagagcttcacatggcataactttttaaaataaaaacaagaacagggaaaagtgattgttttaataacactgaaactcagtttaaattgaatgtaagttccaaaataccccctttcaagcaggggcagttttttgtttgttactgagtgacaatctgctattctttttcttggtgtccatgctctacctaatgctaacctttctccccccaccagaatttttctcaaagtagatttggtgggatgcttctctttgcatat

SEQ ID NO: 179376 - DNA, 381 bp, Homo sapiens
gcaagggtactagtatctctaatacacgaattgtaaaaacagacatgaaaaggcccaacaatgctatgaacagcgttcacagaacaaaaaaaggcaaacggctcttaaacatatgaaacagatgctaaactcactcataaaagaaatgcaggcatatgtaaaaatgctcaaaatcactaatcatcaaagaaatgtaagttgaaatcacaagatagcatctcacatctattaaaatgggtgcagcaaaaaaaacaacaggaagtgttagagaagatatggagaaaagggaacttttgtacactgttgctgggaaggtaaattagtatagccagtatggaaactagtatggagattcctcaaaagttaaaaataggccaggct

SEQ ID NO: 179377 - DNA, 361 bp, Homo sapiens
tcacactcttacacagccccacacatccctctggttgattaaagaagtgagttcaagaacaaataccccttcatgacatgagagttaaaaggagaaatctcaaaatcaatttgccctaatcagaaggaagataaaatgagtagagcaactccagtattatgggacaacaaagcatcccaagtaagtatatttaacagggacctggaatctaccgtaacccaagtgccaatctttattttaaccaatttgtatggaaaaatctatttcacatataccaaaacacaagaataaagggcagggcttgggcatctggcaggcatgagtgtggttctgccatttgtgagctgcgtgaccctagaac

SEQ ID NO: 179378 - DNA, 666 bp, Homo sapiens
tgagacagggtctcactttgtcatccaggctggagtgcagtggtgcaatcttggctcactgtagcctcgacctcccaggtttaaacaatcctcccacctcagcccccccaagtagctgggactacaagcacatgccagcacacccggctaattttttaattttttgtagagatggggttttgccatgttagccaggctggtctcaaactcctgagctcaagcaatccacctgcctcagcctcccaaagtgctaggattacaggcgtgagccactgcacctggccactcatgagtacctcttaatggaaaattccaatcagaatcctgtgcggaggggcgttctggcaaatactgttctgggtttctcttgtatgatgtagaggagatgatagacaagcacactggtgggaagaactgaaaacaaacaattggtatagcctggagccccagaaatgcaggaccacagtgcaaacctggctacagagccctcaaaagtgagtattcacatatgtgtacatgcacatatgtgtatagggagtactgacaggtatgggacagacaggtctcaaggagaaactggggcacagtctgggcattacttacaactggaaaatggcagatttctcaaacttcctccctcatcctttcctacacaatctgagccac

SEQ ID NO: 179379 - DNA, 177 bp, Homo sapiens
taacatctccagcccaactttggaaccagtcaggaggactatacagcagtgttcacaacggtcacaacagcagcagtggcacagggagaagccctgtgtgtctgcaacctaagaggcgaccagcaggagaaaggctttaacaagagacaaaccctggagatgttgaggttcaccagg

SEQ ID NO: 179380 - DNA, 378 bp, Homo sapiens
ccttgacctcctgggctcaatgcaatcctcccacctcaccctcccaagtagctgggagcacagatgcacgccaccatgcctaatttttgtatttttgtagagaagggatttcaccatgttgtcctggctggtctaaaactcctgagctcaagcgatctacctgcctcagcctcccaaaatgctgggattacatgcatgagccattgtgcccagcgtgaaatattgtatacttatccagccagttccttcccagggattgctgtttttctccctgcccattcaatgaatgcaacttgtcaatatttttgtcatcattcctcagattttacaccatggtcccagagccatagccaatagaaggatattttaaaataaata

SEQ ID NO: 179381 - DNA, 153 bp, Homo sapiens
gccactgtgcccggcctagtggtgactcactttgttactttcacttcggtggtttattgagtttgaatctgtaagtaaatgtttcgtcattaaattttggaagattttattcctatttcttcagatgtttcttttctgtgccttttttttttt

SEQ ID NO: 179382 - DNA, 576 bp, Homo sapiens
gatggaatcaggacaagggtgttggaaggactgattgtttaataaggtacagatagcctaatacactcatgtccacaatggggacagtaacagcaacaggactgtacacctgacgaccaggagctaaggacttccttcctccagtctaaatcccataatgaaatcaggtcaactttttgctcagaattattatatatccctcacatatagtggtccttagtgcttgctgaatgagtgatgtgatgggtagcaccattttggcccatagtctttttcctatttttccatagctgaacgatttccattctgccaacagggttgcagttaagttttttttgtgtgtgtgacagtctcactctgtcatccaggatggagtgcagtggcacaatgatggctcactgcagccttgactttctgggctcaagcgatcctcccacctcagcctcctgggtagctgggactacagacatgcgccactgtgcccggctaatttgtttttattgtttttgtagagacaagcgtttcgccacgttgcccaggctggtcttgaactcctgagttcaagcaatctgccca

SEQ ID NO: 179383 - DNA, 212 bp, Homo sapiens
ggaaacaactggcattgtggaaaatgtctgtgcaccctggctaagcaactcactattgcttggattatattaatatacacaccataaagctaaggaagaacttaaatttgagcctctgcatttctgtgctgagtaagctgtagttctttcgacttatcgccttcatacttgcctgtccaaacaaaaagatctcaagaattccactgaaatag

SEQ ID NO: 179384 - DNA, 255 bp, Homo sapiens
agaatagtcaaacataggacatagtaagaataactacttgaggtaggaaagctcatgacgtgtttaggaacagtgagtagttgggcatggatggcatagaggctgcactctgagagatggaacagacaagtgggaagcagtattgcaagatgctgaaaggcacagaatctagagcctggatctgaatcccagctgagccacttactagctgttgtgaccttggcaagtcacttaacctcccctctatagctttgt

SEQ ID NO: 179385 - DNA, 339 bp, Homo sapiens
ctgagatcctgcagtgcactccagccttggcgacagagtgaaaccctgtctcacacacacacacaaaaagaatatggtaggttctctagtcccaaagtcagagtggagggtagtacttactttctaagcttgtgtattttttcattagttcctctctttctctgtcaattggtcaagaaagattgctgagcaagttctctgaagtcagattgaagtagggctctgatcagttgatcacatgatacacactcctcttcatctgtttacttttcctctaagattaagcccatttctttagcctaccaactaaaatgataagatctgcactgcagccaccat

SEQ ID NO: 179386 - DNA, 155 bp, Homo sapiens
gttcttcaagatagttcccccatgtgacaaaaaacatcaaaatatcaacctaaaatatggaaacaaaaatacttaaactggtttggccacatttaaggaaccattaatgatacttcacttgagaagcatcaataccctattgaaaaaaattggaa

SEQ ID NO: 179387 - DNA, 496 bp, Homo sapiens
aacaaaatgtaaggtggctataaagtataaaagaacattcacacacttaaagagaacataattaacagcaagctagtcagacaaacaaacacaaatattttcacattttctatgtttgtttttaactttgcttcatgaagccacttataattgaggcttctttcaagtacaggatttctaatatgaaaaatagtattttctacatagctctataaagaaatgaaaagccacaagctgcattgtttgccataaattcatacaccaaagagtaaaacacaatccaactaaatttatacatgtttccctcttctccaacaactgcttcagatgtttttctatgtactttcaaaatatttttattaaagtcagttcaaattcatttatgcagattaggaaaaaatgatccatagtgaattatttttaaaattaccttctgtatacttctatccctccaccaaaccaaccaccaaatctattgctaaagtgaactataatg

SEQ ID NO: 179388 - DNA, 741 bp, Homo sapiens
tctggtctcgaacacctgagctcatgatccgcctgcctcggcctcccaaagggctggaattataggcacgagccaccgcgcctggctggaactaacagattcagatgatgtcactcctattttgagaattaaaatgtattttcttaggtcaggcgtggtagctcacacttgcagtctcagcactttgggaggctgaggcgagtggattgcttgagcccaggagttcgagcctggcctgggctgaagcaaaccccgccaacccccaacaaaaaatacaaaaattagctcagcatggtggtgcgtgcctgtagtcccagctattctggaggctgaggcggtaggattgcctgaacctgggaggcagaggttgcagtgagccgagatcatgccactgcactccagcctgggtgacagagccagaccctgtctcaaagaaacagaagtattttctttaatgatggtgataatagatcgtaggtatgttctccatgcccttagggagcgtaaatttaaagctgcaactctttatgggaacctggctttcacttgttttctggctttgtttttctgtcaaatccagaaatctggaaccactggttaaaaagaagtctgagagccaaaatacacacagccagctgtgagttactacctgccttacccaggaaaaggacatgagctgcccaagcacacacctctttgccatctatgccagcatttttaccttcaaggccgatgttctca

SEQ ID NO: 179389 - DNA, 669 bp, Homo sapiens
aggaaatggggcagccaggagtgctcgagaacagatggggccaggcaccatggcccacacttgtaatcccagcactttgggaggccaaggcaggcagatcacttgagcctccccagggatatgaggcggcttgtgaggtcctctggagtcagaagatgccaccaccccagaggatgtgagcccacctgtggaggtcttgatccccaccactaggatggggcagccccaaggtgggtgactacatgaactccctgtggtgaggggtgagtagaagcccatggaagcctccccactgccatgcaaccccatcgcatctccactgaactccgagcagaaaacggctgcctgatgggaactgtcatttaggttcccaggctactttggtggatctgagaataaatccctcaagacaaggtccttgctctgcccttctccagggtgggacccagagttactggcccctccatcccatggagccgattctgcaaccctcacttcctaagcacagaaatctggaaccactggttaaaaagaagtctgagagccaaaatacacacagccagctgtgagttactacctgccttacccaggaaaaggacatgagctgcccaagcacacacctctttgccatctatgccagcatttttaccttcaaggccgatgttctca

SEQ ID NO: 179390 - DNA, 600 bp, Homo sapiens
acacaggatccaactgaaaagagttcccaatggccaaatccagaaagataaaaagaacaacaaaataaaacaaaagctggagtaataaaataaataatataatatcagatcccaatggccaaatctggaacaataaataaaaaggagagcaaaataaaataaaagctggaataataaaataaataatgtaatatcagattctaacccaaagtataaaataagtatgtatgagtctatgctgatgtagataaatgattgcataaataaataagtggggagactaaacaaatctcccacacagaaaaattccaggtaacttatgtagatactacacccatagtgtgagccacgcatagtgacttctttccaaagagtacaatatagatgaggggaatagtaacttcggagtggagaaccctgatgaagaccacctgagccaggtgatcaaggtcaacatcaacagtgattagtcatgttgataatatttacccttgatgtgatatgaagagaatggcactccccatctgtgaccttcccaaaacccaggaacccggtgtcatcatgagaaaaacatcggaaaaatcccagttgacaaacatt

SEQ ID NO: 179391 - DNA, 507 bp, Homo sapiens
gcaatgattgtcttctgtaaaaatatgtagatttccccatagtagatattctttatgggaaaataactcaaattgatggcttcagagtgactggaattcatcaagcattgtttatgcgcagttagaaaagaaattgcttgcattcaatgatgtgattttgaatattatgtcccactttattgtctataaataccgacaataaagggagataaagtaattttaagaataaatggatgaggagtgtggggcaaaggaaaaatgctagtagaaagaggatatcaaaccaataatgaatataacaaggatgatgcacaaaatgtgtatcataagattctgtgaatttcttgaagtaggccacaacttctggctctaagcttgtaatagccaatgtagaaaggaacactgcattaaccgtgaaatttgcagtgcccattaggcaacagaaaccagttgtaaatgagaagcaccatgatttctggttctagagccagaaagaaaattcaccag

SEQ ID NO: 179392 - DNA, 367 bp, Homo sapiens
tgttggttggttttttttccccattttaataaatattttcttagaatagttttaagatatctacatattagatatttgaatattagaacagttttagcacagaattcctacatacccggcatccagtttacccatttagcaatatgtttggttttaaagaaattctcctttggggaaaaagtgtcctcttttaattttattcccttttccccattattaacatgttacattactatactacatttgtcacaactaaggaaatgtcctgctactattaactacgctccacactttatttggatttcactagtttttccctcatgtgccttttctgatccaggacaccacgtcacagttagtcatcatg

SEQ ID NO: 179393 - DNA, 343 bp, Homo sapiens
tctaacacctcttgcatttaagcaagtccacatgattagttctggccaacaggcttagaaaaaaggtaacgtgtcatttctgggccgaaatagcaaaaacctcatatccttctctgcagctgcacctctactatgacagcaaccaaagagggtgcagtttttaaaagcgaaaactcaaaaagcctaggaccctgaataactctgtgaagcagcgatgtcccctgaccaatccataaaatatgaataagaaataaattgtaattgtgttaaaaccactggaactttgtcatcaatttgttactgtaatacaacctagccaaacctaattaatatttgttaagcg

SEQ ID NO: 179394 - DNA, 192 bp, Homo sapiens
ttccctttctagacgcgatcatgaatcatggagctacagctatgggaatctttgttgaggcgtggatgtcagctgtgatttaaaataggtaggaatcggcaggcagaatgaagcttcattttcatagaaaacatatattatggcatcctgaatcgaggcactgagaaagggtggctgatgtccaagcaggtg

SEQ ID NO: 179395 - DNA, 166 bp, Homo sapiens
tccaggtgattttgatgagcatgcaagtttgagaagcccgttatagggtgtttgtggcagatagtggcagaaaagacttgggacttactacaaatgcactaatgcactagtctcatgggaagataagacagacacaataaagggctatagcaaagtggtgccccgg

SEQ ID NO: 179396 - DNA, 473 bp, Homo sapiens
gaatttgtcagtttctttagctttgtacaagttactttgataatattagcaaattagaacagtaggcaattgatcagtgtgttaaattagccaggttacagaaaggactagcagttgtcaacactatttcctggaggaagaaatggaacatttttataggataacctcaaccacagatacttcttcaagatacggttttatgaggggagttgtttgagtttaacacaaaggtgttcaggttagagtgacttttaaaggctttgcggagttttctgtgatctctggacttcaaattccacatggttatgttgaaggcttaccacgttccacatttatgtgaggacagtttacatcactgtttcttagtgggaaagggggagaagatggcagtctgttgcccctcatttgagaatccccagtacagggagccactgttactgacagtgtattgtatccttcaggtgtgtgggcag

SEQ ID NO: 179397 - DNA, 642 bp, Homo sapiens
attaaagacggtaatatggtttggctgtgcccctaccccaaatctcatcttgaactgtaactcccacaattcccacctgctgtgggaatgacctggtgggaggtaactgaatcatgggggcaggtctttcccaggctattctcataatagtgaatatgtctcacgagatctgatggtttcaaaaaggggagtttccccgcacaagctctcgtcttgtctgctgccatgtgagatgtgcctttcaccttccaccatgattgtgaggcctccccagccacgtggaactctaagtctaataaacctctttcttttgtaaattgcccagtctcggttatgtctttatcagcagcatgaaaacagactaatacaggcggctagagaaaaccaagcacataaatccatttcttccattctcagaagtattctctgtatttggcaattagataatttataatactttcttaaaacttcaaggactaactttgattgtgaaacaatgtctcatcgaaacgaagtttagttaaggaataaagtcaagccccctccatgtctctctttgcttccacagcagtacagaaacatgtagaacatgccacacacagcacaagtccccattctccactgaatggcattgagggtctt

SEQ ID NO: 179398 - DNA, 463 bp, Homo sapiens
aatagctagtacgagccggtgttaatcggccgaggtgcatttaagcttagctaccatatgtaaattgctactgctgcatccagcaatttgttgtccattgttgacagtactgccatggtaaagaaacaggaactatagaaagaattagattcctcctcccacctcccagctctcaccacagtaggaagctgtttggggagcagagaggaaatacgggggatttgagagttacacccagtgtgtgggcatttggggaggaaataggaaaagagattttttaaattattttattttttgaaacaaggtcttgctctgtcagccagactggagtgcagtggcacgatcatggctcactgcagcctcaaatttctggactcaagcaatcttcctacctcagcatccaaattagggctacaggcgtgcactgccatgcctgtctgattttttttttttttttttttgt

SEQ ID NO: 179399 - DNA, 687 bp, Homo sapiens
  misc_feature (3)..(3): n is a, c, g, or t
  misc_feature (10)..(10): n is a, c, g, or t
  misc_feature (12)..(12): n is a, c, g, or t
  misc_feature (14)..(16): n is a, c, g, or t
  misc_feature (23)..(23): n is a, c, g, or t
  misc_feature (73)..(73): n is a, c, g, or t
  misc_feature (105)..(105): n is a, c, g, or t
  misc_feature (675)..(676): n is a, c, g, or t
  misc_feature (678)..(678): n is a, c, g, or t
  misc_feature (681)..(681): n is a, c, g, or t
  misc_feature (684)..(685): n is a, c, g, or t
ttnaccctcncnannngctgggnatacaggcatccaccaccacgcccggttaatttcgtatttttaatagagntggggtttctccatgttggtcaggctggtctngaactcccgacctcagctgatttgcccgccttggcctcccaaagtgctggaattacaggcgtgagccaccacacccagccccccaagttttcttttctttgtagagatgggggtctcgctgtgttgcccaggtaggtctcaaactcctggcctcaagtaatcctcctgccttggcctcccaaagtgttgagattacaggcatgagccaccatgcccagcctccctgttttcaattcccctgttttaccattatgagctaaagaactctgactgcctgggtaaaacaaggacaatagtgtctactacataggatagtcatgaagatagaatgcactaaagctataaagcatgtcgcatacagtaggtgctaaattaatgctattttctctcacctcttccactaaaacccagagagttaatgacttagtgcttaactagtagaacttccggcaacagccaacttctctgctttgcacagacattacgaatgtctcagcatttagacacttactggcttaaagaaaaagcacctcagaggaattgaaacccagctgccggccatccccagtnngnganggnnaa

SEQ ID NO: 179400 - DNA, 246 bp, Homo sapiens
ggattaagacctgtctacctcacactcattcctataggtctccacaatttggccctgctcagcaagggcgcagctttagcacactttagcctcaaatctgaggaggcaaaataggccagactcttatgagtagaaaaaagggaatatagcagggaacctagttttggacagagccaccctgccaagccctcccagggtaacttgcagcaagtcccttcgcccgtctgcaccacagcttcctctttg

SEQ ID NO: 179401 - DNA, 252 bp, Homo sapiens
gggtttcaccatgttggccaggctggtctcgaactcctgacctcgagtgatctgcccacctcaggctcccaaagtggtgggattacaagcatgagccattgtgcctggccgggtctgtactcttaacccgcacactctacctgcgcatttttttcctcgagtctcatctattaaatggaaataaaaacgcaagcatggaagaagactgctgctgttccgtctgcccttcccccactgtctagggaacccccc

SEQ ID NO: 179402 - DNA, 347 bp, Homo sapiens
gacacatgcatgtaatgcccctgacctccaggacccccatctatggacagcaaggagctctttttgcaatcaaaagagagggaccaaaacagatcattatgtattgcgccataatgaggcaaatttatttctcttatttgtaagttcctatgggaatgactcccccattagatcacagtattgacgataagcatgaataagctaatttgggtagaaaagtcacttcatgtagtagaatgtaatgttgactgttaagatatctcatacatcatgaaattaaataagatttcccttttatttcatttgttcagccactcagtaaatattgaagacctattaagtataaa

SEQ ID NO: 179403 - DNA, 389 bp, Homo sapiens
taaactaatgtaaaacaccctaacaacatcagtttaaagtctaagaaaaacctctcatgctttccttaaaatgtaatctatctgcagccttctccatctgtttttgggaattctatcctttcagttgcttggaatacaaatcttggagtcatcctctatctcctttttctctcataccctacttccaactgttaagcaaatggagagatacagaatctacttactttttaccatcttcattgttaactccctggcccataaagctatcatcatttcacatatatggattactgcatcacctgcttaatatcccctgcttctaccatcattccctacaggccattctctacagagagctagaatgttggctccttgaatagacatgtaca

SEQ ID NO: 179404 - DNA, 452 bp, Homo sapiens
tcagcagagaagggagttaatcagcaaacagcttaaggaaggataactctctgcccctgctgagggccacctgtgcccctcctctgtgtgccatggctcgatgggccagcaaaccctattgaaacaaacagcaaagaaacaagccgaagcaatctggggtgccatgtttggtcccagtgtaagacgccaggaacagggggttacctggagatttcaaagcgaggcagacagtctgagaaggaccaatggaagggcttgtgttgggttcctctgtttagtcaaagcaagaaataggttgtgtgatacagcacttaatggtagaccctgagatcaggcctgaatttacattctagcctgcctggcctgaggaccagtgaaaaccagaatatatgacagaccgttttgctgctatttcatttgttctgacctgataataaaaatcagaatcatta

SEQ ID NO: 179405 - DNA, 406 bp, Homo sapiens
gttcttaaaaaatgtcaggataataaattctgtgatggcagcatgtaaaatgtcaccacttgggcaatgctcatcaatggatggtaaagctacacaagttcaaagcatcctcttctagatgacgtattaatatcaaaaggaaaatggccttctgagaccttgtgggcaccatgttagctaagggatcaaccaatcacctgtaggaccacctgctgttatgcctcctggggagaagcaagaattcatcagcctgaatccaccacaagcaaacagacaaggccagagtttgatacattctacaagatactggcctggactcttcaaaaattcaaaataataatacaaagggcagctttcatagctgcttggaagctctatgcacatactggggcttctcatctgggag

SEQ ID NO: 179406 - DNA, 354 bp, Homo sapiens
gtctctgagcctgccagggcagagcagaagcaaatgcatgaaggcccctcccccaggggctgctcttagccagtgactgatgaaaatgggtgtataaacagcttagccacatgaccccacacaggtgggacaaccatgggtttccacattctgtactgcctcccagaggtccccaccaggtttaagctcaattgcccacactggtaactggtaacttccttgataacactcacttcttttttcattcttttggtgtttttttagatggagttttgctcttgtcacccaagctggagtgcagtggtgcgatctcagctcactgcaacctctgcctcccaggttcaaggattctcc

SEQ ID NO: 179407 - DNA, 700 bp, Homo sapiens
gattattacacattgcatgctgtatcaaaatatctcatgtaacccataaatatatacacctactctgttggcacaaaaattaaaaatgaaaaaaagaaagaaagaggcctgacttatttggagtcgtaggatttttgaaatagaaagaaggtcttagacatcatcttttgtaacccattgccctgtaacctgagacccaggagttccagagtggttggagtgagatggtcaagatcacaaaataaagaagtgacaaaaatagggctggatctcaagtcaccgttcccaagaccagacccttgtctctatgcagtgccatttcagcctgttctctgcttttgttctcacccctctggatcttatgaggtttgtcttcttgattgatttagaaaaacactatctatttgactatctatttgacttctcttagccatcttttgtggtacctgagtccagccagctttcgctaatcctctagaaagcaggacaactctcttttctggattatcttactaaaagagaaccagaaatcctgtagttaggccagagctgattaattggaaatgcatgagcctggactaaaaataaatggattttaaactaaccagatttagattatccagtattttttatggaaggagaataggccatcatgtcaactgaaaaatagcagctgtttcaaattatgagatactttgaa

SEQ ID NO: 179408 - DNA, 171 bp, Homo sapiens
ctgatggatttttaaaactatgaatgctatgctaaaataaactgtagggaagaagacgtaagaagcctgctcttgatacgagagcagtgagataagagggaaatctctcttctgcccattcgtcttgcacacaccacttcaaactttggttgatatccgctctgagatttg

SEQ ID NO: 179409 - DNA, 669 bp, Homo sapiens
gattgtttgtttctataacaaaatctagccaatcctgtctagtacacacagtttaagtgacaaaacctaagtttctttgatttctaagccttgggcacagaagaaagatagtggcatagagtaggcactccataaacatatgttgaaggaaggaatgtatggtggttgcccagcattgaacacaatacttcagatgtgatccgatccacataagagttattaggagtacaaacactctttttacactgaacatctgttaatgaaggcttagagtgcattagcttttttgtcaactgtacttatttctttaacaaaaaaattattgtctacctaacatgtacaaggcacagagtgaggtgtcatggctgatacaaaaacaaaacataaaaatgattgtcttccagctgttcataatttcatgagtgagagtcgcacattcacaaccagctgtgtcacaaggcaatgaatagagttggacagtgtgttttgttgactgtagattgagtatggaacgaggcagtcatgagtttcagtcattcattccacaaaaacacattgagcatcaacaatgagttgagtgctatgttcactcctgcagatacaggttaaaaaaaaaaaatacagtcccggtctcaaaggtctcacaagctagtgtgagagacagattag

SEQ ID NO: 179410 - DNA, 1046 bp, Homo sapiens
ttatacttctcaacgctttatacttctcaacgctttatacttcattagctctagaggtccatgcatacttaatattatacttgaattcaatacggaagtataaagcgttgagctcaacgctttatacttcaatgtaatacatgtgtgaaagtcttaaggaaattttcaaattcaaatagacttaggagaagacatactggagagaaacctttcaaatgtaaagaatgtggccaattctttcacaggttctcacacctaagacaacatcagataattcatactgaagagaaaccctaccaatgtgaagaatatggcaaagattttaagcagtcttcaggtcttactatacatgggagaattcatactaaagagagaccctacaaatgtgaagaatgtgacaaagcctttaaacaatcttcaagactgaataaacataagaaaatttatactggagatacaacctacaaatgtgaagaaatagtcttcaaacctgactatacataagattattcatatgggagagaaaccctacaaatgtgatgaatgtggcaaagcctttagaaaatcctcaaaactgaaagaacataaaagaattcatacttgagagaaaccctataaatgtgaagaatgtggcaaagctttttactattcctcaggccttactcaacataacatagttcatactggagacaaaccctacaaatgtaaagattgtggcaaaatttttaagtggtcttcgaaccttactatacatcagatcattcatagtggagagaaaccctacaaatgtgaagaatgtggcaaagcctttaaacaatcctcaaaactgaatgaacatatgagagctcatgctggagagaaattctacaaatgtgaagaatgtggcaaagcttttaagcaaccttcaggccttactctacataagagaattcatactggagagaacccttacaaattcgaagaatatggtaaagccttttattggtttttaagctttactaaacatatgataattcataggggagagaaaccctacaaatgtcaag

SEQ ID NO: 179411 - DNA, 373 bp, Homo sapiens
atctatatctatatatcccacctctgcatcagcagtctcagccaccaacacagctgcgttttagtaagagtggtcaaatttaagatatttgttgaaaacactgattggtttctattccttatgagataaacatttttaacccaaaggagtctgaatagtggaacttcaggcaagtgcttgtgccatcaggtcaggcagcctatgagggaggtactggggcaacaggcctgcctcctgggcatgaaagagaccattccctctagcagatcagatttctcatggctgatgctttttttcccagagcagcattttggtgtctcccttaggtttaagctacatttcttggaacccaggagtaacggaatagggagca

SEQ ID NO: 179412 - DNA, 542 bp, Homo sapiens
atctatatctatatatcccacctctgcatcagcagtctcagccaccaacacagctgcgttttagtaagagtggtcaaatttaagatatttgttgaaaacactgattggtttctattccttatgagataaacatttttaacccaaaggagtctgaatagtggaacttcaggcaagtgcttgtgccatcaggtcaggcagcctatgagggaggtactggggcaacaggcctgcctcctgggcatgaaagagaccattccctctagcagatcagatttctcatggctgatgctttttttcaaggttgttaaccaggggttcctggcttctgtttatgtggaggacaaggggtagagattggtctttgttggaagatgctgattgtatttaagatcctaactaaatgtgactttataagttggaggctgcttatatattgccattctttatacaacatcataataaccatggacacatgtaatcagaatctataaagcagatgcttctgaaacttccacctcttgaaataagtgcatctaccttag

SEQ ID NO: 179413 - DNA, 231 bp, Homo sapiens
gaggatcccgtgtaaaggttagacattttacttttaccataaagcagacctttcaggcagaattctaccaccctgaaatgtaaccaccctccccttcctaagcgccactctctatctccttcttttgaaggcaacactgatagagcaatctccagggcaaaactggatccccaagctctcaacagaatttgttcttgttaatgtcactactgccttcctaactaccaagtc

SEQ ID NO: 179414 - DNA, 258 bp, Homo sapiens
tgtaggagggacctggtgggagatacttgattcatgggggcagtttcccccatagtgttcatgtggtagtgaataagtgtggtagtgaattcatgtggtagtgaataagtctcatgagatccaacgattttataaggggaaaccccttttgcctcacttctctcttgcctgccaccatgtaagatatgcctttcaccttctcccatgattgtgaggcttccccagccacgtgtaactgtgagtccattaaacctcttt

SEQ ID NO: 179415 - DNA, 356 bp, Homo sapiens
gaccctgtctcaaagaaaaagaaaaaagaaaaagaaaaatgagtctgcattaccctttcccaatcctattccctgacagtgatgggtttgaacagatgtgcatttgtggacttatatatagtcataggagggtatgtggcggttttttggttgttgtcttaaaaatgttttttaggcccggtggctcatgcctataatcccagcactttgggaggccgaggaaggtggatcacttgaggtcaggagttcaaaaccagcctgggccaagatagtgaaatcctgtctctactaaaaatacaaaaattaggtgtggtggtgtgtgcctgtagtcccagctactcaggaggctgaggcag

SEQ ID NO: 179416 - DNA, 178 bp, Homo sapiens
ctgggaagactcaaaggcagggggtgacttgacagctagggctggaatcctcaagaggcatcttcactcccatgctggtagttgatgtggaacacctctacctggtgtctctgtgggctagttggcactttctacacatgtggtatctagattctgggcatgatcatcctgagagagg

SEQ ID NO: 179417 - DNA, 596 bp, Homo sapiens
attatgaatgatgttgctgtgaacactcaggtgtacatttttgtgtggacaagtgttttcatttatcttaggtatagacctgggggaggaatggctgggtcatacggtaactctaggtttaacttttcgaggaagtgccagactatcttcccaagtggctgcaccagtgtctccacgttcctcaccaacacttgccacgaccgtccaagagcacgtgcggtgggggctcaagggtgatctgcatttccctaaaaagtaatgacattaggcatcttttcatgtatttactggccatttttatattttctggagaaatgtctatttagagtcttagcccatttttattttttacttattttatttttcagacgaggtcttgttctgttatccaggctagagtggagtgacgtgataacggctcactgcaacctcaaactcctgggctcaagaggtcctcccacctcagcctcccaggtagctgggactacaggtgtgccccactgtgcccagctaatttttaaaagtttttgtagaggtggggtctcactatgttgatcaggcaggtcttgagatgctggcctcaagtgatcctcctg

SEQ ID NO: 179418 - DNA, 756 bp, Homo sapiens
  misc_feature (674)..(674): n is a, c, g, or t
  misc_feature (721)..(721): n is a, c, g, or t
gaggaaattgaagctcacagaaagtgtgactcctcaaagagcacaccactgatagtagaacagggagaagaaagactaagctatgcattttagatacagcatctcagttactgcatctctgacaggcaaagatgcccagcctctcccttctgagatccaggtggatttctgattaggtagaacttttaccctggaaaactatttttccacaaagctttaaaattataaacagtgattgccatggcctgaatgtttgtacccccaaaatacccagtttccaatgtgatggttaggaggtggggctgtcaggaggtaattaggtcataatggtggggccctagagactggattagtgcccttaaaagagaggccccatagagttgcctgaccctttctaccatgtgaggatacaggaagaagttggcagtctgacactcagaaaatgcaccctcccagacaatgaatctgctggtgccatgaatttggacttcccagcctcaagaactgtgagaaacaaacaattgttgtttgtaagctgctcaggtattttgttatagcagtctaaacaatgtttttttttttgcttttattcaaatcaagttttaacatatatacagtaaaacaaatcttaaatatacaacttaaagaatttttacgggccaggcatggtggcnatcgcacgcctgtaatcccagcattttgggaggccaaggcaggcagnatcacctgaggtcaagaccaggctggtttgagacc

SEQ ID NO: 179419 - DNA, 177 bp, Homo sapiens
cacaagaaaataaagtctttatttacatcaggaaaataaatgacaaaatcactgtgaaagagtatacagactactatctaaatatgttgcagcaaggctgttcagattgtatttcctgcacttgtatctaacctacaatttctcacatttcccactgacctcactatctggaagcct

SEQ ID NO: 179420 - DNA, 146 bp, Homo sapiens
atataccacattcttatccactcatctgttcatgggcattagaattgtttctactttttggctactgtgaacagagctgctacaagcatttgtgtactattcacttgtttttaattctttttttctagacagagtcttgctcttgt

SEQ ID NO: 179421 - DNA, 183 bp, Homo sapiens
tggaaacccccacaaaggcctttccagtgcagttacaatgccgtgcttcatgacttcctgggccttatttgaaggtctctttggcttcccgtgtgcccatagctgcctcctctgaactttgttgttcaccactgcacctgtctcacaagccaaggactcagtttcccttaattcactacacct

SEQ ID NO: 179422 - DNA, 248 bp, Homo sapiens
atgagaacgacaaaactgaagtgcacttcaacatcctgcagccaaaggggtaaaaaggagaaagaagcgcagaccagtcacataaatgccacagtgacatgcacaaaaacgtgaggggcacactccagggacagagtctgacaacatgacaagctacatggcatcaaactctttcatgtgacaggcagcttttcacatgtgcatcttaagactggaacttgctatagataaaccttaagtagttaata

SEQ ID NO: 179423 - DNA, 102 bp, Homo sapiens
gctgtgcctcagtttcttcttctgtaaagcctacttaactcatagggtcattagagaattgagtgagttattaaatgaaatgatgtacttaaaactggacct

SEQ ID NO: 179424 - DNA, 137 bp, Homo sapiens
ctgtaaaatgggaataagctcaaatgggagtaaatatcaatatttatcaataatagatattgataaagtctaaaggtattctgaaggaggtaacatgtttgtaacaatggttcttaaaagagaaactaaagctctgg

SEQ ID NO: 179425 - DNA, 372 bp, Homo sapiens
agcctggtgacctgccctatctgtcatgctccttacgtagaagaggacctactaatccagtgccgccactgtgaacggtggatgcatgcaggctgtgagagcctcttcacagaggacgatgtggagcaggcagccgatgaaggctttgactgtgtctcctgccagccctacgtggtaaagcctgtggcgcctgttgcacctccagagctggtgcccatgaaggtgaaagagccagagccccagtactttcgcttcgaaggtgtgtggctgacagatacatggcatggccctgctgcgtaacctgaccatgtcaccatctgcacaagcggcgccaacaggcgaggacggcttggcctcaccagtgcgatggtc

SEQ ID NO: 179426 - DNA, 218 bp, Homo sapiens
agcctggtgacctgccctatctgtcatgctccttacgtagaagaggacctactaatccagtgccgccactgtgaacggtggatgcatgcaggctgtgagagcctcttcacagaggacgatgtggagcaggcagccgatgaaggctttgactgtgtctcctgccagccctacgtggtaaagcctgtgggtgagtaccagctgctgggtagggggaggag

SEQ ID NO: 179427 - DNA, 527 bp, Homo sapiens
ttcaaactctgctccacagagtctcctcatggctggtggaggaggaggaagaaggtgagtaccctattttcttcccttcaatcagagtaactctggtgaaatatcatttgaatatcatctcaaacaagatgtgatgttccaacttgtttgaaaatcaccggaccagcagcctctcaggcctcatccatttgcagagtccctagagtctccaatctaccatcagttcctcacgaaggggcacacttattggcaccaccgattagctctctctgaaacagctctcaacaaaatgccagagctgaagggaacgtcagggttcatgtagttcaagtgccttaatctgaatttgcagaggagagggaaacaaagagaggttaagccatgaggtcaaggttcacagccagttaaaatctttaaggttaatatcctcagcttaatatgcaactgttctactcatacagaggccttccaattttgaaagtgatttcacagtgtgttcctgtgtcttgcttggtgggcatagtgaa

SEQ ID NO: 179428 - DNA, 314 bp, Homo sapiens
ttgatttctccaactagaagtcacacctttctttagaaccatggttagaacaggacttagcttattgtgtataaaatttaacaagtactgctttctcttccagtaggaattacctcccttccttgaaggaagggactgtatcctctgtaactttgtgcttcttagtatggcataatacatttatgtattaaatatttgatagcactactcactgtatattaaagtagaagcccagtgtaacaaaatgccaacctctcccctctctgtgacccatgatctccctgcggtgttctctcctcattccaggtctctca

SEQ ID NO: 179429 - DNA, 435 bp, Homo sapiens
tcagtccagcctgagagggactgtcaggcttagtccacattcatcatgatggtgcctgaaattccaccattattgcttcacttctttggcttaagacttcatcctggttaaaatacagagagcccagaaaagggtcacccatccagtcttctgtcatttatccctagtgtaaaggagtttgttagctgtttttctgagagcaggtatgggaagggcaagcatgccctccctccaggccctcccctcctctgcttagaccctcaggacttctgctgcctgctgaggggagtcccggctccccagcctggcctgcagcccatatggggtctggtcccccacgtgcctcttgtgcgcattctcaacaggcacacttgctcccatggccagcctagatttctccttcccactcatttgggctttctggccctggtgcct

SEQ ID NO: 179430 - DNA, 309 bp, Homo sapiens
cttctggctatgactgagagcctgtggcagaccagagatccctcagagaaacaactccaacagccagagaaaattaaaaaaaaaaaaattttttttttcaaagtctgaagactttggagaactgtggaagctactatgacttgaagagacacaatccggaagggtaaaccctttaggagcaagccaatatgccacaactgctttgcccctcagggaatctgccaatgctaggtgccaggaaggaggctgaggaaacagaaaagcagcctgggaacatgaccagagccactattcacaggcagagaaacc

SEQ ID NO: 179431 - DNA, 434 bp, Homo sapiens
atatcctctcaacgtccagccgcttgtgtcttcttctgccggtgtgttcctcttgatgtccagccacttgtgtgttcctgcactgatgtgctcctcttcacatccagccacctgtgtgtctgcctgctagggtgttggggatttttataggcacaggatgggggtgtggcaggccagggtgttcttgggaaatgcaccatttggacaggaaaacaaaaatgcctgttctcacctaggtccatgggcacaagcccagggatggagccctagccagggaccacgcccttcccttccccacttccgtatcatttaaatggaccatgccgttccctttccagcacttgtgtatcatttcccccctctgaagaggtacatctaactaccgctagaatatggtttagctgcttcctgctgacagcggatgttgttttggg

SEQ ID NO: 179432 - DNA, 411 bp, Homo sapiens
agagactgacattcaggtgagaggcacacagcaaggcagacacaatggcgtgtgacacacatggagacaaacacaataggcaacacacacacaccccagatctccaactcagaagatagagacaagacaagagagacaaacctagggacagagatgatgtgttcacagtatggcagagagtccctggcaccctggcccaccactgttgcacacacatcagagatgctcccagggacaccaagccgaagccttagaggtacacaccatctcaccaggaacacacacatgtgggacctggcaacagattgggtagatctgggcagactgacacattcacagacatggtctggccagacagtcacacccagtgcagagaggcacagacaggccacagtgggacattcataaaca

SEQ ID NO: 179433 - DNA, 163 bp, Homo sapiens
tgaacttccctcagcagttcccaagcaagtttagcagcagaatcatagacaaattgtcttcctatgccttgcagtgtgggtgcttgtttactatttgagggaaaagtgtttaggcaaacaggtatcctgagggtgaccagctgtgcaaggattaggctactga

SEQ ID NO: 179434 - DNA, 636 bp, Homo sapiens
ggcgggcgcccccagacggggcggcggcagcgagctgcggcggccggaggcagcaagggctgagccccgggacgcgcggaccaactggcccgacgagccgccccggagacggagacgcagatcaagcgctgcagctgccagatggagttcgaggagggcatcctggcaggggcgcactcgcggcgagggagctggccgccatgggcaagcaggcgagcttctcgggcagcgtggaggtcatcgagatgtcctgacccctccgctgcccttagctccgctgcccacagccagacccgttataaatatatattatatataatgcaaagaaaggtaaatggttttacttttatttttattgagaagtaaatatttctattttttatttatttaagctattcattctggcaatgatttggcaacagtgcaggtggtcctcgagctctatttttactgtctggtatttaaactgaaacatacctttctaagcaatacgaggccaccttcagtcgcaaggtgggtgccaggcctggtgcccctcccagttcccccaccccaggaaacactgctgacacttgcaaaggctgccgagcttttgtgcactttttacataagaaaaaggattaaaaaaggaaaaaa

SEQ ID NO: 179435 - DNA, 366 bp, Homo sapiens
gggtgatttatttttcccaatctatgttcaaatctgtgagctgaaaaggaggcatctggactcagcacagtggctcacacatgtaattaatcccaaccctttgggaggccgaggcaggaggatcccttgagttcaggagttcaaggccagcctggacaatatagtgagatcccatctctacaaaaaataaaacattagctggacatggtaatgcatgcctgtggtcccagctacttgggaggctaagatgggaggatcgcttaagccaagccagggagatcaaggctgcagtaagctgtgattgtgctactgcactccagcgtaggtgacatagcaagaccctgtctcaaaaaaataagaaaagaa

SEQ ID NO: 179436 - DNA, 430 bp, Homo sapiens
tgagagcttgagcacaagtatttagctaccacatataacttacttccacccaaaatatcgtcgatggttcacctaaaatttttaggcatttctcttgaaatgcctgtaatttactaagtcatcaagaagtaggaatgtggaatggaatttcagtctatcacagttaatttttaacaacaataagacagacatatgttacctatttatacttaaatgtttgatttcatggctattctgtctttgtaaaactatattggaggctcaaacgtggtgcattgttttggatttgaaaggtgttcattttgttttcttcttttcttcctttctctctcacccctcatcgctccagagcatgctgggctgccccgtgcactgttatgcttatttaattctgctatttttctcatttcatgtctccccaatattacta

SEQ ID NO: 179437 - DNA, 273 bp, Homo sapiens
aatagcttctctgccttgcatctgactgactgagtgactgactgacgagaggtcacagtgtgttggactgctaaagtagccagccttttcttgttttcccaccctatttgtcagtgtaaagtgttctaagctgatggcttctctttcctttttttctactttcttccttggactccagtgaaatgaccctctccaagttacctctaccctcgtggctgcttttctgcttcttcattagtgcctaagctgagtgtattgctcatggttctagcc

SEQ ID NO: 179438 - DNA, 332 bp, Homo sapiens
attttggggttacaaatacattttaacaagtaggtgaattcacaaatatggaatctgtgagaatcaattctacaagttttctgaaagacaagatggcaaggctcatggaagggcttaaagatattcatatcctttactcctgtaattgttattctagagataatcagtattcattatgggtcacttacgatgaggatgtggaagatacagagaagtacaaggcatttaacatccaactgggtaatgggctaacaggcataaattgaaggaaaagtgaaagatgtaaacactgaaacactaggaaaaacaaattttttttttgggaggaagtg

SEQ ID NO: 179439 - DNA, 249 bp, Homo sapiens
agcaggaacgtgggtacttccttaatattagtcagtaaactatacatatgtacactcttttgtatgtgtaatgtatttcccagtattttttttcattctttcaattgtagtaaggtacatttaacataaaatacataaaatttctcactttaacctttttttttttttttttttgagatggagtttcactcttgtcgcccaggctgatgttacattttctagaagttctcagtgatgggcatttaaagg

SEQ ID NO: 179440 - DNA, 269 bp, Homo sapiens
gagattctgcatttccagtagtctccgaggtggtgctggatctctggactgccagaagcagctggaatacctgcttttggaagaactgggaaccagccaaaaccagcaaactagggcctagaattcagtgcagaggcccaggaaggctaccaagttaacagcttaggattcaaagtaaaaatggggtgagctgtaaggctgactgatgcagtgctattcagaactggggctctcagtgccctgtgtgtccctgacgcgaggaaaaatgg

SEQ ID NO: 179441 - DNA, 562 bp, Homo sapiens
aaagctccctcatgcagagggaggcggttctgagtggatgtcctggtttgtagtaagaggtggttggttttatagatgagtttgaagagatggtgtctaatttacatagggtgcaaaggattggttggaccaggtgtgccatttacattgtgccctaatctttcaccaccctaatcctttattatgcagataggttctctacctggccagcaccatgttgcctgcttctttactgcatacatagtgacaaagaaaagggaagatggagcctccgtgttgaacatacctggcttccaggtatcccttttctatttgcacagctgccggcatttacctatgcagcttccagcttgcttacctgtctgcagcttgatttttcaggctgctgtttgttagaaaagaaatgattttggggctgatttttattaaaaggcaaatcttgctgaggactctcttaccctcactatctgcctaaataatttttttctagctcctgtatcaatagaatcagataagccaggagagagtactagaaacaatacattttttttcccattgaaat

SEQ ID NO: 179442 - DNA, 563 bp, Homo sapiens
tatatcacacaaactggttggcgtcctgttgaacacaaacaagagaaatgtattctctcacagttctggaggccagaaatccaaaatcaatgtgttggtagggtcactctccctccaaagtctctggaggaaggatccttccacgcattttcctggtttctggaagttgctggcaatccttggcgttcctaggctcatagctgcatcactttagtctctgcctctgccttcacatgggctgtcttccccctgtctgtgtcttcccatggtgctctctgtgtgggtccccagtcacaatggattagggcctattctactctactgtgacctcatctaaacttatatcttaattagatctgcaaagaccctctttccaaagaaggttacatcacaggtaccaggggtaggctggagtgcaatggtgccatctcggctcaccggaacctctgcctcctgggttcaagtgattctcctgcctcagcctcctgcgtagctgggattacaggcatgtgccaccaaacccaggtaattttttctattttcagtagagatggggtttcacc

SEQ ID NO: 179443 - DNA, 502 bp, Homo sapiens
cacagttaagtgccaggttctatgcacccctatgtgggggtacaaaaacactgaatacaacccagtccctgctcagaaagaaatcacagcccaatctggaaatacagatgtagacaaatagttttattatgataaaggaagtgctaatggcaagtactaatatgctgctaatggatgctgtgggcaggcagggaagcagtccttagcctaaccttggggggaaaagaaagcttccttgaggaaatgatgttacagctgagccttaaagtataaataatgttagccaagtaaaggtgggtgaggacatcccaagtaggactactacaaggaataaaacaaaaatatgcgtgcatatacctgtactacaatagaacctgtgtacacaggcaggaagacaagatggttccatatgttccatgtaccaacattttcacatatgtctttgcacatgctcccaccagtttcaaggttcgttgtgttcactaattaactcaaccacaaa

SEQ ID NO: 179444 - DNA, 174 bp, Homo sapiens
catgtccttctctttcagttgaaacaattgattttttttcctgcacctgaacacactgggctgtacaaaaggagagcattaaaacgctcccctggaggtaaacattgcagttgagctcactagaattctgacgacatcagagggtttgtcctgtgctacttgtaattgacccag

SEQ ID NO: 179445 - DNA, 423 bp, Homo sapiens
gttctattttgagaagtagtggaaaatacttaaggtggaaccgagtaaaacaagctatttgttagaagagttaagaatttgaattttatctgaaagtatataaaaggaatatatggtcagttttttctggttttttttttttttttttgaggcagagtcttgctctgtcacccaggctggagtgcagtggcatgatctcagcttacggcaacctccacctcctgtgttcaagccattctcctgcctcagcctccccagtagctgggattataggagcgtaccaccgtgcccagctaatttttgtatttttagtagagacggggtttcaccatgttggccaggctggtcttgaactcctgacctcaaatgatctgcctgcctcagcctcccaaagcggtgagattacagcgtgagccagcacgc

SEQ ID NO: 179446 - DNA, 240 bp, Homo sapiens
aaaattagccaggtatcgtggcacacgtctgtagtctcaactccttgggaggctgaggtaggaggactgcttgcacccaaaaggtcggggctacagtgagtcatgatcacgctgccactgcactctagcctgggtgacagtgagaccctgtttcctagaaaaaaaaaaaagaaaagtaaaaagaagaaatgccctcaacatgctaaacatgtaaatctatacagtcagaaagcaggttag

SEQ ID NO: 179447 - DNA, 650 bp, Homo sapiens
  misc_feature (618)..(618): n is a, c, g, or t
cctctctcatggatgatagctagcatttaggagtgcttgctctgagctgtgtgtactatattcattgttttagattcattttcccatttctttcaaacctacttaaaaaatacctactacgtgctaggtactgttctaggcactaggaataaaaacaaaaatgtccttgtctagaaagagtttatattgtagtgaaatgtaatctttataacatttaatcctcattacacctctataaggtaggaactgctattatttctactttacagataaagaaactgaggctgttcgggcaccatggctcacgcctgtaatgccagcactttgggaggccgaggtgggtggatcacaaggtcaggagtttgagaccagcctggccaatatggtgaaactctgtctctactaaaaatacaaaaattagctgggcgtggtggcacatgcctatagtcccagctactcaggaagctgaggcaggagaatcacctgagcccaggaggcggaggttgcagtgagccgagatcaagccactgcattccagcctgggcaacagagggagactccgtctcaaataaaaaaattcactacctaaaatggagaacagcttgcagcaggtacgtnaggaagggccctgggatcccacctaagaagaa

SEQ ID NO: 179448 - DNA, 515 bp, Homo sapiens
gtagggtggatgaggggctgccaagttagcaatgaatgtttcccatttcttcttagtttatggactttccataaactcaggatggcagtttggttggttggagaaggatatggtgatggcgggagttacaatacattacttataggggaagataggcttttgaaaggttaaagcttaaaagtgagaatggaaaagggatgaatgaatgaacatgatgaggtgagagggaagaggtaaagggaaaaggagaacaagcaactcttctctgcgtggcacctgggatgaatggtttctggggacatccctgatggcagttttgtggagaggtgcaaagctttatgtgttaagaaatgagctgtaggctcagtgcagtggctcacgcctgtagtcccagttactcaggaggctgaggcatgagaatcgcttaaacctcggaggcggaggctgcaatgagctgagatggtgccactgcactccagcctgggtgacagagctgggtggtggctcaagatatg

SEQ ID NO: 179449 - DNA, 354 bp, Homo sapiens
ccaacgctgctcacaggcctcactgcaatttgatatgcctgctgatcagagtctcttgggcattttatattttgcatctctgatatatcaaggagaattgtgttagtcacatgatgattttgttttacttttttaatgcatttattattttattaattggactaaatgatgagaccagaccagtgtctacatattttcattgttagaaaaatctacaaaagtctaccctttctacagtgatgactttaaacaaaaaaaagcagcataaatattagcctgcaagagcagtcctaaacagtcacaattaaactatactacacaagaagactgttgtgagagcgttggcctccccca

SEQ ID NO: 179450 - DNA, 312 bp, Homo sapiens
attcaaatttatagacactattgaggagtaatactctctgatatatcaaggagaattgtgttagtcacatgatgattttgttttacttttttaatgcatttattattttattaattggactaaatgatgagaccagaccagtgtctacatattttcattgttagaaaaatctacaaaagtctaccctttctacagtgatgactttaaacaaaaaaaagcagcataaatattagcctgcaagagcagtcctaaacagtcacaattaaactatactacacaagaagactgttgtgagagcgttggcctccccca

SEQ ID NO: 179451 - DNA, 260 bp, Homo sapiens
atgaacagagtcctggagtgagctagtcaccccttagcccagtgggccacaatggcttatagatcaaggtctccatgtaatagctgcctccgtgcaaatgctgtccaatagtgagtgaactgggctcttctcagctacaaaagtgaagccttgagatcatcaatcttgactcccccacctgtggagaaagtatcctccctatcattatttgaaccattgggactttgaatacctttaggtcgtatttttccagccctctt

SEQ ID NO: 179452 - DNA, 563 bp, Homo sapiens
tgtgtagagacagggttttgctatgttgcccaggctggtctcaaactcctgggctcaagcaatcctcccacctctgccccacaaagtgctgggattacaagcatgagccatcatgcccagtctgctgtaacaaattattttacatggtggtggtgatgatggtagtgttttaatcttaaaatgtctttatttgccttcattcttgaaggatattttcactgaaaaaagaattctggatactagtttctttcaggacttacatgttatttcattctcctctgtctccatgatttctaacgaaaaatcagccgtcagtaaaattccctatatataatgtgttgttttcctctgctcctaccaagatgtgctctttacctttgtcttgatttgggcttctttgtgtttattcctcttggtgttttgaggggcattctgcatctataaatttctttttttttaattaattatttttttagagacagagtcttgctctgtcgtccaggctggagtgcagtggcgtgatcttgactcactgcaagctccgcctcccaggttcacgccat

SEQ ID NO: 179453 - DNA, 384 bp, Homo sapiens
ttttaaacaactgatcaaatatataataagcatatctatctatctatctatctatctatctatctatctatctatctacaggatctcactctatcacccaggctacagaacagaggcatggttgcagctcactgctgccttcaactcctgggtgactcacctcaccctcctgagcagctgggactacaggcatgatccactgtacccggctaatttataaagtttttttaaagatggggtcttactattatactgcgcagcctggcctcaaacttctggcctcaagcaatcctcctgcctcagcctcccgaagtgctggtattacaggcatgagccaccatgcctggccaacttttcctatttttaagccttttcttataaata

SEQ ID NO: 179454 - DNA, 669 bp, Homo sapiens
tcccccaggtagactgaaccgggtagtttagcgtcgtctcaggttaagaagcatgcgcgactattcggcagtgaggaggagggaggttacggagagagaaaagaagtctctttcacttactgaggtgtcagtgcgggagggactttcgcatcatttcttctcggaagttggcgattcgctggttttcgctagagaacgttagagcttcacaggctggcttgtaaaagcaacctggagtgctgttaggtctacctggccaggtagacctaacccaggtctggaggaaatgggagtggacttcattgtgagtcaaaatccgtatcccaggcccctgaagggaaaaggcatttccaggagatggagaaagaaagaagccacaacagtaggtctagtaaacccaagtcaggaaaagggatagaggactatagatggggttctctatctttctagccaaatgatcattaggtttcagaactagaaagaagtgtttggttgtgctgttgtttatgacatacctgggtctgtattgttgttagttcctgaaaaaattaaatagagtggataaaatagcaggctttttgagaaaggaaaattcgctttattggaaagacaacattttaattttggtttgtattttggcttaagacacagaaattgcaaatggctctg

SEQ ID NO: 179455 - DNA, 443 bp, Homo sapiens
ttccttcaccgaagttcctcctcagcagtgaggatcctactgttgccaggtctggaggaaatgggagtggacttcattgtgagtcaaaatccgtatcccaggcccctgaagggaaaaggcatttccaggagatggagaaagaaagaagccacaacagtaggtctagtaaacccaagtcaggaaaagggatagaggactatagatggggttctctatctttctagccaaatgatcattaggtttcagaactagaaagaagtgtttggttgtgctgttgtttatgacatacctgggtctgtattgttgttagttcctgaaaaaattaaatagagtggataaaatagcaggctttttgagaaaggaaaattcgctttattggaaagacaacattttaattttggtttgtattttggcttaagacacagaaattgcaaatggctctg

SEQ ID NO: 179456 - DNA, 463 bp, Homo sapiens
tgtcacagagtcaattccctggaataatcacattttctggccggctccctcctcctcgccaacacgattccaggaaaccccaatcagccaggccccaggaggcttctccagagcttcaggaggcttggggggaagggcccacacccagagctttctgggggccagacaacacagttcctggaaggggcagtgaaagggtgaaagaaaagagggaggtttagtgaccatgtctacattcagttggaactgaattttggcctctgctgtccctaccagaccaatcccccaagctttgctgtcatacctgagaaccccagccatccttaacccagttcctgaagagacagcacagattctcccttggagaggttcagggagaaggcccaaaggaagggatcggtccatggtgcggcttacagtggcaccaggcatatttggagagattgactcacgcagaaaggct

SEQ ID NO: 179457 - DNA, 726 bp, Homo sapiens
aggaaacagtagtgtccaccatggtctgcgtctccccaccacggattgtcttggctccggatttgagacatggcagggccagatgaggacaacttgatgacagtttacagagatggaggcagggtgccaggaagccacgggggagcccccagggcactcagcagtccaggcagggctgggcgtcctggcaaggagcagggaccttctgcccaggggtgtggccagcctgtgggtgctgtgtgcaggaccccaggaaccaaggccgcagtctcttccctcgctccagcatcctcccaaggccacccttggctgcactcagccagagagctggggcacagggaccccacaggtttccctggaggctgtcaggggctccggtgggggcggggggtgagcccgctgggttcactgcacctcccaaagcccatgtgccctgcctgccccaaccaaagtgggcctccaaggtgctggggtgggacagagacccacgagggaccctcccctcactcctggacctgggtgttgtggcttttggcaaaaatagccacatacactccaagtttccccctcagctgggattcctggtgtgagcctggtcaccagggtggtaggacagaccctcctctggaggcaaagtgacggtcagcagggggttctgagtgccccacagcgctggcaccagtcttggctgaatggcaaagctgcatctgtctccttccccatgag

SEQ ID NO: 179458 - DNA, 325 bp, Homo sapiens
cctcctctggctgaggaccaggctgacgtgagcccagaggaactcgacccccgcccgtgggtgttgtctgcgccactccctgccccgggtttcatcctgcctgccttccgctctgtccgcatggggctgcccggggggtaccgggtcaccctcaggaacgccaggctctggcagaggaaggggtggcggctgcagccagtggctagggagcgcattctaggcctggcctatctcagtcaggaagctggcgtctggcgggggactgaggcccagggaccttgggggacccagctgatttgctccaggctcctcaccatgcccggag

SEQ ID NO: 179459 - DNA, 488 bp, Homo sapiens
ctcaaatcaaacccctcttagtggtcctcctgtgtttaattaaccaaataagtgtattcagtagattactcctttatcggctgaatattctcgatgtcaacagtatgagcaacagaaaataaaaacttggaattcagtgacagctttttatgtaactgcctcagttttcttagggtaatcaagccaaagagaaaatcagagatgccaaggatagagtggttgagagaggcccatattgaaataggcacacgattgtcaccatttctcactttacaagctgtataatcagtaagctgattctttttatacttcaaattatatgaacttgacctcatatttggctgcaaataccctgatgattctcaaatctaatgctacatcttagcttattccctcgagctccagacaatgtgtctaaccaaatgtttgcatttgaatgtcccacaggcatttaaatttagcttgtttaaaatctttttctgaaaaaa

SEQ ID NO: 179460 - DNA, 556 bp, Homo sapiens
ctttactctatgttctcgatcgttatctgtatattattttgtgtactccaggtacataagttcctaatctgtgaaaaatgacatttgtgtttcatcctctcctatcacccacctacccatccattttttacctccttaccactctgctgaggacttccaatatgttggtagatagaagtgggcaagtggatggacactattaatcttacatcagaaggaacattccagtgtttcaccattaaatgtaataactggtataggttttagatactacccttaataaagttgaagttcttttataaacttttattttaggtccaggggtacatgtacaggttacacaggtaaactacgtgtctcaggagtttggtgtactgattattttgtcacccaggtaataaagatagttcccaataggtagttttttttattctctcccttctctgtctccacccttaagtaatccccagtgtatgttgtttccctctttgggtccatgtgttctcatcacttagctcccactaacgatgagaacatagaagtatgtggttttctg

SEQ ID NO: 179461 - DNA, 735 bp, Homo sapiens
gtggcggcagaaaagggagtgagccacacaggaccacatttgtgcaaatgcgtgggtgggagaaacaatggcacgtttggaacccacaggtggttcggcatcagtaccaagtccaccagatgagggagggacactggccagagaccagatgacaaagggccactgatccctgcgaatgaggtcaacatgttctgaaaggtactcggggttccgtagcagggttctcaggccttaaccaggagagctggtgaaggcacaggcggctgggcctgcccgcgtattttctgattcagcaggtctggagtagacccgagaatctgtacttttaatttatttattactgaaacagggtctcgctctgtcacccaggctggagtgcagtggcgcaatcacggctcactgcagctccaaccttccaggtctcaagcaatcctcaagtctactgagtagctgggaatacaggcatatgccaccacgcctagctaatttttgtatttttttttgtagagacggggtctcgctatgctgcccaggctggtcttgaactcctcaaacaatccttccaccttggcctctcaaagtattgggattataggtgtgagccactacgcctggtcagaatctgcaattctaacaagtccccaggtcctgtgatgctgctggcctgggccacaccttgacagccactgctctacaggacaggagttcaaatgggcctgattgtctttttagata

SEQ ID NO: 179462 - DNA, 652 bp, Homo sapiens
gtggcggcagaaaagggagtgagccacacaggaccacatttgtgcaaatgcgtgggtgggagaaacaatggcacgtttggaacccacaggtggttcggcatcagtaccaagtccaccagatgagggagggacactggccagagaccagatgacaaagggccactgatccctgcgaatgaggtcaacatgttctgaaaggtactcggggttccgtagcagggttctcaggccttaaccaggagagctggtgaaggcacaggcggctgggcctgcccgcgtattttctgattcagcaggtctggagtagacccgagaatctgtacttttaatttatttattactgaaacagggtctcgctctgtcacccaggctggagtgcagtggcgcaatcacggctcactgcagtcttgaattcctgagctccagtgagcctccctccctcagccttctgagtagctaggactataggtgcacaccaccattcccgactaattctttatttttttgtagagacaaggtctcactgttgcccgggctagtctcaaactcctggcctcaagtaatcctcctgtgttggcctgccaaagtgctgagatataggtgtgagtgaccatgcccaacctcatttttttttttgttgttgttgtttttt

SEQ ID NO: 179463 - DNA, 321 bp, Homo sapiens
gacgttagaggattcctcgaaatcgactgtttctccttatctaagtgcatgtttgtttttatttgacacaagcctatgatatagaaacaacgataagccccattttgcataaaagtaaagtgaggcttagaaaaaataaataactttcccagggtcccataaacagcaaataggaaattcaggatccaaagccaaataaatggtctgactgagggtgagtccactccctccaccactgagctagatatctcaccaattctaaaatcatctaggaaggaatgcttggattcctacatagaactgaaaataataaaaagtgtt

SEQ ID NO: 179464 - DNA, 779 bp, Homo sapiens
  misc_feature (779)..(779): n is a, c, g, or t
ctcataatacggcagtttacttttttacttttatcttccctaattcactttttatcttccatttatttgtccaattctcattctcttaaggaagaaagagtgttttgctcaaggctagttattttacttgtgttcctaatttcacctcatctaacttaaaagttgcaactttacattttttctctccctaaattttatattatttggcaacaaccaacaagttatccctcttttataaatcccaaaccctcaataaatattctcattgtcaatcagaaaaaaaaaaaaaaaaaaaaaaaaaaaaaaaaaaaaaaaaaaaaaaaaaaaaaaaaaaaaaaaaaaaaaaaaaaaaaaaaaaaaaaaaaaaaaaaaaaaaaaaaaaaaaaaaaaaaaaaaagagggggggggggcaggaaacaaaactacgccgggcgggcaacaagaaaacgcacgacacacacacagatgtagggacagaggggggggcaacaataaggggaggaaataaacaaggaagaggagcagagagacaggataaaaaaacgagagacgagagaacacaacagaccaaagagagagcaaagagaagaaaaacacacccacggggggaggcaacaaacagcaaaacaacacagcgcaggaagaaaaacacaacgcggagaaccaaaacaaaatacgcaggtaaagaagagaaaaaaaaagcggagacacagcggacgaaagacaaccggagaagaggaaacaagaagaaaatatacacggggcgcacagagagaggn

SEQ ID NO: 179465 - DNA, 307 bp, Homo sapiens
  misc_feature (290)..(290): n is a, c, g, or t
tagtcttcagcctgtcttggcagaccacattccaggtgacagctctgatgctgaggaacaattacataagaagcaacgactgaatctcgtctcttcatcatctgatggcacctgtgtggcagcccggacacgtcctgtactgagctgtaagaagcggaggcttgttcgacccaacagcatcgttcctctttccaagaaggttcaccggaacagcacaatccgcctggctgtgatgtgaatccctcctgcgcactgtgtggttcaggcagcatccagcatctccgctttgnaaggtccggctcatctc

SEQ ID NO: 179466 - DNA, 569 bp, Homo sapiens
  misc_feature (19)..(19): n is a, c, g, or t
ccatagctgactctagagnataaaaacatgacacttagaatgtaagtcacagtatggcggccacatgtaggtgtctacagataaacaattaactgtaataccaagtcaatggcatgattgtcaaccaaggtaaatgcaatatgctttggggactcaggggccagtgcaaataatgttgatgaaagtgtcaagaaagtctttatagaggaggcataatttgaaatttgcagaataaataagatttttttccccaggataaaaagaggcataaaggcattctagttagaggctggagacctaagaataaaaacccacagaagcagaaaggaattcagcatagaagctgcctttctagagtgaggtaaagctggaatggcagtctgggccagatggcagagccctgaaggctattgctggatttgggttttattccataaacagtggagaagccattaacagatttctgatgagaagagggatgtgattgatccttcaagtgttttagaacatagctggtgtattgctggcagtgtataaagtggattggatgttttcactaaaaaaaatgt

SEQ ID NO: 179467 - DNA, 643 bp, Homo sapiens
ctagcagatccctaagaggctgatggtgaggctgaacttgagcaggaagcagagcaggaagtagtgctgggtcttcttgggaatggactggaggtttttccccgttgccatagacatgatggagctatgggggggcttccccagcagagagatgctgagcagagggtagcaaaagcaggacagccacaggatgtcggtggtactcaggagtggcggcagctggaccaggcaagaaaggaactagaccaggaaagaagccaagagccacagttcaattcaggcaaataataagggcataggagcccccgagctcccttgccctgggcccagatagatgctcacatcctgccagagggaacaggggccggagggaatactcttctgccaatgagggtcagctcaaaaagcccaggggcttcacagaggctctggggggaccccttgactgtactgctaaccccagcctccttcctcagattttcagctggcccctgagtgaaggggtgagtggcacgggggcgatgcctgtgcgggccccacctcacctggctaatatctatatatcctttaaatccttttgttctgtcttggatgtcactgtcttcaggaaaccatccttgattttcccacctctcagtctgtg

SEQ ID NO: 179468 - DNA, 757 bp, Homo sapiens
ttttttaaatggcatgtgagaaataaaaaggaaatcccctgttcaggcagctctggagttccctaattgcacaagagcaaaggacacccccacggaacatgtatgccttctgaagccattgctcaacctacactcattgtgcaatttcaatcttccaaagttttttgctgcacatatgcaaaccacgttttcctctgcattctagaattaagaacagtttatcattattctcttcactttagagaggggtgtatgcatgagccaaaaaagaaaaaaaaaagtattgctagataagcattcactacaaatgaggttttatattatttcatctggttatttctgagtttactggtagttaagaaacacttgaattcactcttaggcagctaaagattcatttttcctgtcactgacaataatgatatcacaaaaaatagcccacgaaaacatcaaaccttcaaaagcctttgtcctaaatgatggcaattctagagtatttgaaacagttaaaagtggaagtccctactgtgtagtcaaaattccaccggaaggctaagcgccgtggctcatgcctataatcccagcactttgggattacaggactgagccactgcgcccggcctcctttttttccttttttcttttttttttttttggaaatggagtctcgcgttttgtgccccaggctgaattgcatgggcacaatctctgttcaaaaaaacctctgttccccgcaaccaggtttcctcaaaagcca

SEQ ID NO: 179469 - DNA, 628 bp, Homo sapiens
acagagcctaggaaaggtcgccacacgtcctcatcccagctccagggggggcaactctgggctcagggatgtcacttcccacagtcaacatgctgggattgaggctcataccctgaaagtggcctccccatcatcactgaccccgcccaggtagcagaggaacgtcgggttctggatccacagctcggaaagtctgctttgtgactggagagagtcaccgtcgaggagtggccattatcctgagcctgtcttttatcgccacgttgatattttacccgtaaccatgaaaatagatggcgactggattttgttccttgcggtatgtcctttgcaggtaaatttaggaaacctaatagggtaaaaggctcaaggaatagggctattaaaacggggagactcctccccgcatgtgaaaaattgagttgtctcccaccactacctgaggggtctaccccacccctttgggtggtggcttaggcctccatgtctgtatcaccacatctcacagacgagactgtcctggccccagaaggtaggaactgagtcttttcaattccccgagagcccatgatggggtctggcctcatgtaagaggaacatgaggaaagccagagatggcactgtcatt

SEQ ID NO: 179470 - DNA, 385 bp, Homo sapiens
  misc_feature (75)..(75): n is a, c, g, or t
ggagtacaccagtatggaggccgaacttagtgcggacacccgatcgaatagcgcactacagcccagaactcctgnactcaagcgatcctccagcctcagcctcccgagtagctgggattacaggcgcacaccatcaatgcctggctaatttttttgtattttaagtagagatggggagggggtgggtgggtggtgtgtgcttcaccatgttggccagagtgatttcgaactgacctcaggtgatctgcccaactaggcctcccaaagtgctgggattacaggtgtgtgccaccacacccagctgcacccaattgttagatctaattttaatctaatctcaaaaatggtcttttaattggtgatttttgccttttaattggaggtt

SEQ ID NO: 179471 - DNA, 1532 bp, Homo sapiens
aagagagccaacagacaaaagagaaaggccagctagacagggaccgagagcccactggatgtagtaattaggggccactagaccctcatcaagaacagtttcctgtgagagatggggcagaggaaaatgaaagggcaaggaaagcaggcagcatggccacctctcagggaaagctgctagagtaacagtttgggccaggggacaatttctgagctggctctggactgagatgacctaaggatagatgtgatagaagcagtccagaaggctatcacctagagtcctcccacctgtctgagtcagaggcaggagcaaagggcgagggtgggcaaggaaggaaaatgtgcatagctggcatcaagtaggaaagtgtatgtacctgtaccggttgggagctcaccaaagaagggtgagcatctcaacagggatagatgaagaaccagagatgcactcaaagaaggacaaggccagaaacgagttcgtgacattttaggaatgggtacaggaagagagtcctgctgaggagactgagaaggaggggccagaggagaagaccaaaaacatggggttcctagaagccagaggacagtttccaaaaggacagagtggccactggtgggccacatgcacagaggtcagtggaggctcaggcatctcctagacctggcctttggggacttttgtcacagcaactttggggcacggggcagaagctcctcttggtgtggggggaatgaactgggtctggctgagaaaggagggagggggagttggagcaggcagtgggtccaggaaggagctaattcttccaggagacatgggagggaggaagcagtacaagcccagttggaagggcagggcggggcagtgagaggggccctggagctctgggattaagtgtagaggtgaagggattagcagtgttggtgaaaagggacaaaagtaaattatgtacattttagcaagtaacctgatctccatgttctttgggaggccttttctctgccctctgggtactgactccagctctaattagcacgggtttgtctgcctcgtggctagggccatgtctttctcattttcttgtacctttcagcacctagcaacaggcagccagctaggtaggggcagaataattattttctgcttgaaatccagtgtctgaaatagagattcagaaatttttctttgtatcaaaaagactttgtgacaatatccagggagcaatgaaataggtaaggtccaggtcacaggcttgaatgggacattcagggtctcagtagcagttctatttgttggtattgcctagacatcaaagaattctatttcttcgctatttggacagaagtcaaagtccagagagaggcttggtttagctggctgagcttgggccttgtgccatccccgataggacctgggtggtaagaggcaggacctggaggaggggcctccatagcttccatgtgagagaacggcccaggtcccaccacagccacataagatagaaaatttccctaaaagtaataaggggc

SEQ ID NO: 179472 - DNA, 266 bp, Homo sapiens
cggggtccagctccacttctacccagtctccttgctcccatgcccccatctgaaagctggggtgacgcagcaacagccctgtttcatgggtgccatgagcagctcacaggcctgcccagagccagtcctcagcacacagaagtcactaccctgaagggactcatagggtcattctcaaggagcagttttccttttaggaggaatggccgggacctgcccatggcctcctttcagcccctaaaccggcctgcaccctgagactggat

SEQ ID NO: 179473 - DNA, 417 bp, Homo sapiens
gttgggcataaagatgggaacaacagacacaggggaatacaagaggggaggaagggaggagggcaaaggttgaaaaactacctattgggtattatgctcactacataagtgacagatccattcgtataccaaaccccagcatcatgaaatatacctttgtaacaaacctgcacatgtaccccaattctaaaataaaagatgaaaaacaaaaaaccagaaaaccccaaagtaaatacagaagtaaataaataaaaagaaatatgtaaaatgttatgtcattccaaaggaaaccacttgtattaagggacagtggttaaaacaatgagaggactttggtaataaggagccttgtgttaaaccacaaatgatggatatgactttaataggtagatgtggtagggaagaccttccaagcaa

SEQ ID NO: 179474 - DNA, 536 bp, Homo sapiens
cttgagtgtggctagaggctactgtatgcagtcagtcaactgtttaatgacaagtttttgtcagattcatctttgtaacccccatattgccttacacatttccctcaaaacagtagttgatcaaaaatgtatcaaagaatatcataacaatatattgttatatactatttttcatggcaaattcagactttcaacttattggagggtgaaataagtcttggtgaagtaacttgagattataatcattttaagtgtattataacagtgctttgcccataagagaggtgtgcaatgaatagttgtggttctcgtgtgttgctgagttgagtacttttctacattgtaaataatagatttaccattgaactttaggaaatacataagttgaaggttttctgtatcatattctctagaataactttctcctccctgtaaaactgccaaacctgcacttctataagagtcatccaggatcaaaagtttctccagaaatatataccatggagagtgcctactcccactacagatttcatttt

SEQ ID NO: 179475 - DNA, 367 bp, Homo sapiens
tctacatatgtttacctttatggtttgtagtttatcaagtggggaagatcatagtgacacaagataaatttactgattacaggcgtgagccactgcacccaggaccaggtcattcctcatacctccaattcttaagagttattgtcagtctcaagtaggcacattggaagtatcttttgcttgagtgatctgaaacctgaaaatttattatttttttttcttttttagacagagtctcactgtcacccacgctggggtacagtggcatgatctcgactcactgcaaccttctcctcctgggttaaagtgattctcatatctcagcctccaagtagctgagacaggcatgtgccaccacacccggtaa

SEQ ID NO: 179476 - DNA, 310 bp, Homo sapiens
caggtgttcaagaccagcctggacaacatagtgataccctgtctctacaaaaaataaaaaatgaaaaattagctgggtgtggtggtgcacgcctacagtcccagctactcaggaggctgaggtgggagaaccacttgagcccaagaagtcgaggctgcagtgagttatgattgcagcactgtactccagcctgggcaacagcagaagatcctatttcaacacaaacaaacaaagaataatatctgcaatgtattgaaacatagaggatatgtcaaaatccaagcatttatagtgatattttaaaagcttt

SEQ ID NO: 179477 - DNA, 633 bp, Homo sapiens
ccctctgttggccaagcccatgggtggtccaggagcagctgtcacattttgactgccaagcattttggagtggaagttgaccgaggcatcttccttctcactaggggccttgcgtgtgttttgggggtgaggggttggcttcctgcctgggcctctgtggagcttctcctttcttgcccagccttcaggacttcagtgtaggctctgcagcaaccccattgtctgctcaaggagggactggagagatgggattttccctcctgctactgcactgtttggagcgatgggaagtggaaagagctctccctctctgtccagacaggccagtggggagctgcctggcaagctgctctctagctgtgggctctaggctgatctcttaatccttggcaggaaggcagaacttgataccctggagagggaaggactgaagcccagtttattcaggtcccagaatatccacactcaggaggatgtgtgttgggggtgaatttgggatccctagagttccagatttagccactgtctcagtgtgtggaagtcaatttgtgtgctttgggatgtattgtttctatgtctgttaacttaaacacacaagttcagggaagcgtccatgacagctataaatatctt

SEQ ID NO: 179478 - DNA, 641 bp, Homo sapiens
ctcacagagcagtggtgggagctaattgaggttggcgggggaggcttcaccccaatctacagcatttcaagcctttgccaacctcacagagcagtggtgggagctaagtgagataatgtacaggaaagcactgggtaaattgcaaagccttttacaaagataggaagcattatgaagacattttccaaatggcctcaagaaactgatttggttgtgcaacataaacataccactgggaggccgcagttaccagagtctctatcagagacttttcaaaataaatgcagtgactcaaatgtgtttccagatgatgctttgaggattactaacagagcagctattacaaagcagtcagacccaccggctcatgcatgccctaatcctattataagacagaccagataccacttattttgctatgtcaaccttcctttgactgatagtaacaattgttaggcctgttataaaaggcaggctgaacagtgggaaggcatttcacagtgagtcagcaattatagccttgcaaattctaattgtctacaccttcagggtgtagacagttgtgtcactttctatgtatatcctgaaatgagtgaaataaaactgaaaacctaagtgatataggaatacacaggtacaga

SEQ ID NO: 179479 - DNA, 151 bp, Homo sapiens
ttttccattttgatgctttttgccttcttttctactttatttgatttagggggaactctcatttacctacttatttttgcgcatccctttactttcatttctctgtaattccgttttaggtatgtgctatgatctgaatgtgtcccccaga

SEQ ID NO: 179480 - DNA, 122 bp, Homo sapiens
tccctctttacacgccactaggtcaccaaactgtccctgaaatttccacccaacttggatatttactcctccaagatgcttccctacccctccactccaaaattaatcaccctcttttctat

SEQ ID NO: 179481 - DNA, 379 bp, Homo sapiens
cttgtaaaataaggtgactggatacagtcatgactaatgacgactcccttcttgataaaaatttagacaggcttctctgggccctccctttgaggatgcctcatccttgtgctccgttctcaatctggttagcctagttttagcaggcatcctgataaatcagtccggagagaatccaccccacctttgctatctgcaagttcctcatcccccacctttgatacataagtccttagctacaattagcagctacccttaatgtctcttcttggtaatttctcatccactgaccacatcactctgctccttggctgtaaatcccaagttctctttgttgtatccagagttgagcctaatctctcttcactatggcaatagt

SEQ ID NO: 179482 - DNA, 530 bp, Homo sapiens
ggtggcggtggtggtggttgttggtagtggtgtgtgtatgcatctgaattggttgttcatgtttgaaactccagattttacattatgatagggcagtgtgacaatactgaatggtggttcctccatgacagccatcagttggaggtgagtagcagctgccttttttggataaggtgtgagctttcagctggacacaggtcacagctgacctcatcattcatttaagcttcctctctgccctctgtgggcattagggtttctgccccatggtccaagggactgagaatggaagaaggagaaatgagtgtttaaggtgtgagtgggagaagaggagctagagacagagtgactgtggagatagaagtatttggagaagccaagcaggaatcaagttctaagaagtcagggataatccacagaatcactctttgccagagttgagtcagactgagcagtgagacatttttattgacctttgagagaacagtgttattggagtataaggacaggaacagactgaggaacgagta

SEQ ID NO: 179483 - DNA, 506 bp, Homo sapiens
ttacgcttcaaatctgcctaccaggttttccatttccaggcagtcttttctaattttttccacctggaagaaactttcttttctctgagttcgtaatcttataataagtacctatttttctcttcttctagcgtatataaaatgtattatctgacgtgtcaagtgagttaatgcatttaaagagcctaggaatggtacctagaacatagtaagtactcaataaatattgttattatggtgatgattgatgatgattaagatgaggtgacctttgctttctgctttcttgtgatggcaaaaatgatttgttgtctgtctttggacactagggaagcaaagtcttttactttgcttatgtatataaaagtacaaaagtgaaattattcttgagctgtaggtgagagatatacaaagctagacaagcccttaaatattgacgattttgttaagcttcaccacagctgtttgaggtaggcggtatattagtccctttttaaaaatgggta

SEQ ID NO: 179484 - DNA, 544 bp, Homo sapiens
gttaacggtactcaagagatatcaagatgtctggaacgagaaaataaggactgaatattaagactcacccagttcaattttcttatagtatgctttaccaaataaggcataacctcagcctacaagcccttccttctactccagcttctaagtcttcttcatggtttacctgtgccttaagctaagtgtgtttcgattaattcttgtatgtaattgagtttggttcaaagtcaaacgtgagggtaattaactccagaacatgatcaaaatattttttagccatcgacaaactcattagtgagaaaggtcttttttttgtttgtttgagacagagtaagactctgccttaaaaaagaaaggaaagaaaagcaggcaggcaggaaggaagaagtgaaagtattgcattaattcttaattcttgagggttttggtgcctcttaaattttgcacccaaggtaagtggctcacctgcctcaccctagttcctaccctggcctcccaccatgcccagctcatttttgtatttttggtggagacgaggttt

SEQ ID NO: 179485 - DNA, 267 bp, Homo sapiens
  misc_feature (267)..(267): n is a, c, g, or t
atatgtgcacaatttctgcttgaaaatacctgtaagagacaccactgagagtgaagctgtcatttgaggatgccttctacctgttgtaccttttgaacaaagcaagtgtgaaagcatgtaatttgaattagggcaggtaataaagcttctgctaatttacgatgacactgcacagcttctaagtcttcttcatggtttacctgtgccttaagctaagtgtgtcatcgtaaattagcagaagctttattggggatactctagagtggn

SEQ ID NO: 179486 - DNA, 439 bp, Homo sapiens
gagtaaggtaagctttgtgccctcaaggaatttaaggcctagaattagaaactcaaagaaatcaagtgcctaaagtcacttaatattaactaataacttacttgcagtagtaatgtgaaaacacttttaggaaagcctagaaaatatagaggttaattttgcctaatgataaatgaaagctttatagaagaagtgatgtttggatagaatcttgaggaatgagtataaattttctaagtagagataaggaggaagatcaggaaggggaagttaaactgtactacctatagtttttatagatgatttgatagatggtgtggagatgcacacattaggagagaccatagaaggaagagggatacaatttgaaggagatgatgaatttcattttggatatgtttattctgaagagcctgggaaacactggggtgaatatgtt

SEQ ID NO: 179487 - DNA, 465 bp, Homo sapiens
gcgactctagcaggacctccaggtagacctaaccttttttctttaaactggtcacttgccttcaacacaacctgacccttttttcttttttatgttttgcttaatttatttccctctgcctgtccctcaattatcagagggtctctgaccatcttctcttctcctactaaaaattctcaaaggatgatcttaagcatttccttcacctacttatgctacactgctcatcagctcatacaagtctcctgatagctctccaaatggcttccacaaatctccaccctaggcccctcaaactaacatgcccacaattgaactcatcttggaaaacaataacacagtgtctttgaaagtgtagcacatgtaatgagttttgttttgttggaagtagggcttattccacattttgataaacactggtatccatctggtcttcccagacaaatatctgggtgtctttcttga

SEQ ID NO: 179488 - DNA, 393 bp, Homo sapiens
catgtgactgacaggtgaccaatgaagtaaggtagaagtcatgctatgtgacttaagactggctcactctttcctggtatgctggcactggggacttagtcatcacactgtgaggaagcctaggcggtgtgaagatgttacacaactccagctaaggtctcaagctgacagtgaataggccttcagatgattccaaccgctggcttttgagttttccagttgagtaggcatgaggagcagatagctgttccagctgagatctgtcagaattcttgatgcaaagaaactgtgagagctagtaccttacgctattgttcttctaagctgctaagttttgaggaatttattacagagcagtaaataactaatgcacaggttaaacagtattacaag

SEQ ID NO: 179489 - DNA, 445 bp, Homo sapiens
atgtgttcaggaaatgctgagtaaacatgaatgacctgtttccttagggttgatttatttatggagctaagagaatatgctttgcctatgagcaaggatacttcctttctcacaaatatagatcaactttttccagtgaaaacatcaaagcataaaatacatttttagtttcaaggatgacattaatcatagaattcatgattatgtaagcttttcttcctaccataagcattaaattaactttggcctttaaccctaaaatgtataaaatcaatcataaattaggctttattcctatcctgggatatggaattaagcacattagaattgtagagatacatgtggttatgtctaacctactgaacaaaatagaatatgtttaaaaactactcattgcttgctatgtcctggcaatggaaaatttcatggtagaaacatagggaga

SEQ ID NO: 179490 - DNA, 717 bp, Homo sapiens
tccaagggaggagcctctgttctgcacttagcaaagtctgaggaaaactttctcattatttggctgagactcttcccttcacatggcttcagtgttattgagaaggatttacccagattaagtttcaagttgcagattctccttgggtccaacagaatcaaaaagcactgatcccccacagcacattctttccagatttaattttaattttctctcataaccttgaatgttccagctttaattctgaaatagccataatcttatccctccagttcacttgaccacaggaagtctagctctttaccaacctcccctctccaaatacttctggaaatgctcaaggaatgcttacatggtctacaaatctttcctggtgtttgctctgccagttttctggctccagacactgttgattggaagaccacctctcagtgccaggaaaacagcattccttagacattccccactcttgcatttactttgctcccagcacagacacaggcccttcctagagtgtcccaaaacacaattaaacccaggctgagagctccataagccaagaccttcatagggacccaaccctacactctataactgttagtctgttgccatattgcaagacctagttttcttctaacaaaaagagttcccttggcaatacattccccaaattcaagttctccattatttgaggttcagagaacagaagattcaaca

SEQ ID NO: 179491 - DNA, 299 bp, Homo sapiens
gcaggagaatcgcttgaacctgggaggcggaggttgcagtgagcccagatcacgccactgcactccagcctgggaaatagagggagactctgtctcaaaaaaaaaaaaaaaatctgtccccgctaattactgtgggagtctaagtcctttccttctgccccttggaggggctgactcctggagcagcaccccctccaatccatctatccagtaacccatactgttaagttcacttagacagggtctcgctatgttgttcaggctgccctcaaactcctggactgaaacgatcctctcat

SEQ ID NO: 179492 - DNA, 372 bp, Homo sapiens
atgaaatgttagggagtcggagttgtcttcttgcactcagtgagttcctggctgggggccacaagatcagatgagccagttcattgatctgtgtggggccgccggatccatcaagtgcagggtctgcaaaataccataagcaaactttctcccaaagttaattcagcctatgcccggggaggaacaaggacggcttggagatgacaagcaagatggagtcagcaaagctagatctcgttcaccgtctcagtcataattttgcaaaggcggtttcgtttgcacctccctgaccccacccccatcgctggatgctgcattaaggcgagaacattcctaattcatacacatggtcaacactgactccaggaaaac

SEQ ID NO: 179493 - DNA, 252 bp, Homo sapiens
gcatttggtccaagaacctttcagccacagttgatgagctgattgtgggttttgtcgtgagcctggtctttagtgtcagctgggtttcattctaagatccccctggagaatttctattctgataattgcttctcttaacaactgatacgtttttattttatgagctggatgggcacctggtaaatattttttttcccttttttgcttttgttgctggggagcccagagccaagttgctatcctgctataact

SEQ ID NO: 179494 - DNA, 109 bp, Homo sapiens
tacaccctgaaaaatgctactaattggatctttttgagtgagcagctttttttgtagttatttggttattccatgtttggatgcttccttctcatctgtgctttctaaa

SEQ ID NO: 179495 - DNA, 468 bp, Homo sapiens
ggggtggggcatcaaaaattcagtgggagtaaagttgaatttggttgataatcttattgcagtagtggcttcattttcaaattgggtcctccagtccctgcgtgaccacccctttccctaccaccctcatctattctgggagtaaacattctagacccttactgatttgcatttggctgaaacacagttgctgggtcaaagcaatttaattggttgagatactggataaaagtggttgagagttgctctctggggaagtaacaggttgaagtgaaccccaagcaatttgtggataataactagaagaaacttccccctggcttaggagacctaagacctattgcttagtcttggctatgtcactagttagctgtgtgatcctgatcaagtcacttaagttctctgtgcctcggtttcctgatttgtaaaataaaatattgtgctagtttattcttaaataccttttta

SEQ ID NO: 179496 - DNA, 143 bp, Homo sapiens
cacacagaaagttctccagcatagatggcatgttaggccacaaaacaaaccttaacgaatttaaggagactgaaatcatattcagtattttttctttttttttttttaatggagtctccctctgtcatccaggttagagtgca

SEQ ID NO: 179497 - DNA, 111 bp, Homo sapiens
aggtcttccaggtcatgctgtagctgtcactgccatgcagcccttttttttactccggacagctcatgtactgaagcgtcatgaaagaaaggctgtggtctgagcccttct

SEQ ID NO: 179498 - DNA, 431 bp, Homo sapiens
cagagggaagggaggatgtggaccctcctcaggaacccccagctgccgcctggaggccaagttgtagcccctggtgtaaggcagagaaaggtctggccctaagcccctttccaagacagggtgccctgagaccccgcccagcaggagcctaccaggaacccactggcttggaagcacgctggccagctcgctgagctccgcaactgagggggactgggtcccatttcacacagcaggagggtgaggcctgggtgctggcaggctgagctgtcctggcgtgtcagcactggaccccagggctcggaggaggggcacggctgaacaccattggtccctggggtcacactgcagaggtttggttctgtctcctgacccctcatggcacaagcgcctggacttctctgtgcctcagtttctttcttttttttttt

SEQ ID NO: 179499 - DNA, 1033 bp, Homo sapiens
cttcaccgcatacctctcgttccacagcccaggccagcacaggagtagggaggagacacctgaggggaggccggagaagcccagcagggccgtggggccagggaggtgcgcagccagcgctgatggcccccagggacagagccctagggaaccggagcaggagatgagagtgtctgctctgggacaggtgctctgcactggctcgggatggggaccagaggctgctaatccatcatcattaacgaatagagtgggtgacagtccctgataactgggaacaggttgcagagcttagccacaggatcacgctccaggctgttggccagcaggaccaggctcgatgctgagtcaaagatcaacttaggaggaaatttgagttttgggtgagagcgactccctggtggcctcagccctgtgacactcacatccaggacagttcccggtgccaagcgctggttatgtgtggggggcttgactccctggtcccaacgaggtctcagtgtgttgcccaggctggtcttgaactcctgagttcaagcaatcgtctcagcccagcctcccaaagtggtaggattacaggcgagagccactgcgcccggcccctggtcccagttctcaccacagcccctgcagtaagcagtcgggtatgtcactgacagagcagaagctcaggggactaaaactccccgcctgagttccctggtgaatggatggtggggccgagttccattccaggctggatggagcccagagctgtgggtctcctaccctcccatcccctcattccagcttgatcttccttaagagactcatacgccccaaccccttggtctgagtatcttagattgttctcgtggttcctccgtccttcaccactgaaggctgctgttcattctctctccgtctctgtcccttattgctctcacgtctgtctctgtcatcttttcactccttgtccctcttactccgttctttggcccccaatgaaagctgagtcagagacagacgcttcccctcagttcccagtgcctcc

SEQ ID NO: 179500 - DNA, 151 bp, Homo sapiens
cattcagccccatgaaaagcacctttcttgctgattgaattgatatttatttctttcaaaacaccaactcactttaccattaatgtaatcaaagtgtgatcagaaaggtaagtttcataatgcaaggtaattattttaataggtgactgtg

SEQ ID NO: 179501 - DNA, 370 bp, Homo sapiens
gaaatggtcatttctgaatgtaccacgtgtaatgccaaaggaacccaagatccctgcccatgcctaataactgccaaacactgacaggcttcactgagctgctgaggccaaaaaaataggttcctaaactagtttatgttttcattcattcaacaaatatttactaagcagccactaagggtaaggcaataagtatcagccacgttcccggatacactgcagtgaacaaagcccttgcttcagtgctatgattctcaataggagaaagtacagaactaaagagggtgataggaaaacttcagaggctggggagccttttcggctacctgcttcattacaccctttaagggagtcctcctgaatatttaca

SEQ ID NO: 179502 - DNA, 391 bp, Homo sapiens
aaacattataccaaggggaagaaactactcacaaaagattacctatgatatgattacatgcaaactgatgatatgattacatgcaaactgtacaactctgtgaatatactcaaaactattgaattgcatatttgtatgatatgtgaattatatctcaataaagctgttaaaaaattatttctatagccaagcatggtggctcatgcctggcaaaaaaaaaaaaaatccatttcagaaaattagactcagtgcatcaaataattgtttgtatgtttatattatcttttcttagtgtcattcatgtatagagcattattagaatttgaaaccaaaaatctttttttcctcattgaattttggtgaggaaatatgtaagtggaaaaaataaaat

SEQ ID NO: 179503 - DNA, 806 bp, Homo sapiens
agatgaactcttaagtgtaggtggtatccttgttttctttttcataatctctttaactcgtcttagtaccttatttatttatttgttctgggaaccacatttgagctttgagaggcaggaggacagtgcttgatgtgttggcagctagtaacccctagtttaactgagttgaggacagtagtaatactatggtggcaatagcaagatttttatctctgcagccttatagtacaactgtcttggtttaaaactggattttattttaactaaattctgttttaaaccaagatagttctatataagaatgtctttggattggaagccttggttttagtttattcttgaattgtcaatatcagaagtttagaaatagtaattcaatggcaaagtattattacataataacaaaagatttattgtgaaatactggggccaacatggaggaatggcaagtatacgagctttgaccatagacagaccaggattttgaatcctagttctaactcttactaactctgtgaccaaatgtagatactcatcctgagatttcctcattgataaaatgacatatcatctcagcggagttgcaagtggtgttttacttttatctccatgtaaattaaagataaatgaaacttatgaaaaagtgtttatatagataaatgatatgtaaaatattttctaagttggaataactttgaaaaactatagagtttaatatgaatatgcagtatgtaccattttagcagaataactagtacctcatgtttgtgattgattaaagtatttatttcctcttaaatacc

SEQ ID NO: 179504 - DNA, 387 bp, Homo sapiens
tgaggggacacataccaaggtgacagtgctttaggtaaattttgtttattccttatttatcttcttattcaagaggtatttctaatattttaggcaggagctgcattttcaacacaggaataaagtttgtagatatttattgcagcttcctgttgctgctatctctacagtaatcatcatagcttcttccctacgtgtccggccagtggccggacacgtaccccataaatatatacacctactatgtacgcacaaaaattaaaaattgggcagacacagtggttcatgcctgtaatgccagcactttggaaggccaagacaggtgtatcacttgagctcaggagttcgagaccagcctgggatacatggtgaaaccccatctctacc

SEQ ID NO: 179505 - DNA, 346 bp, Homo sapiens
cctggattgtttacacggtgctgctggcatgccagatcattcctcagttctacctggattttttaccctcacttctgcttagagtagcagcaaaagaaagccttgttgaggaaactgaatgtctataaaaagcatcttgggttaaacttcccctctggtcctgacaccactccgcgcagtaagttctctgacttggcaagagcacgtctcaggttgtgtcctactggctcctcgcccctcaaatcctccattggttgttttgcccattttggatttgatcatatgtgtaattctttgaggtagagaaataaaagaggtaaattatacgtaaattgtgaaatgggag

SEQ ID NO: 179506 - DNA, 369 bp, Homo sapiens
gagagggacttaaatagagacagagatacttagtccatctagagatgctagaacttagaagtcaggtggagcagaagcttgggctcggctcctggaactgctggagctggactacggaggggagagtagagggattgtgcagccccttacccttggttcctggctttaatggatgttggctctctataaagcccttgggatctgagagacattcactatctgcttccattgagctttccttctggggttgtgtcattgagagtgggtttctgtttctcacattcaaatatttcctaactctgctatagaactatgagtggtgtagtcatatatgagtagtgtgcgggctcaattgtaaaccccatcaga

SEQ ID NO: 179507 - DNA, 508 bp, Homo sapiens
aggaaaagccccgagggccaacagttaagcactgacttaatgtcacaaaaaggggaaaagaaatccggatagagagagtggacagttagtttaaaggctctaagcctggcatatctgagatgaaagaaggcctctgtgactagagtatggtagggtgagaggaaaacagctgtagaagtagaaaagtcaactagggttagacttacaagtcagataatgaactttggattttattctaagtgctatggaaagccactggaagacattgacaagatctgaattacatttttatattttaagaaaatgaatctagctagtgtggagaatggattgtaaagggtcaagagcggagaagcaggggaaaagcaaagaggctgccacagttgtctgagtgaaagatgatggtggcaaagacgagaggtgtggcagagatggagagaagtgagcagatttgggatacgttttggaggggaggaagtgtcaacagggctcactgatgacagactgg

SEQ ID NO: 179508 - DNA, 179 bp, Homo sapiens
aaaattctacactcgaagcagtttggaaatattctcatcgttagtggggatgttaatttggcagagagtgatttggcatatacccgggccatcatgggcagtggcgaagaagattacactggcaaagatgtactcattctgggaggtggagatggaggcatattgtgtgaaatagtcaa

SEQ ID NO: 179509 - DNA, 511 bp, Homo sapiens
tcacacatccatgctctctctctctctctcactcactctctcaatgtgtgggcatgttccatgcatcactggagactagtgcttctaactgataaaaagtccctactgacagtttaccaaaacccatgaaataacagtgcccaacagacaggaattctccatttggaatataaagtgttgttaagtggaacagttattgtggtggacacactctcaggaggcccccatgacccatcctcctgatggtcacacctttgtggaatcccctgccttaaatatagacagaagctgctccttgctcctaaccaactgaatatggcagtggttccggatgtcactcctgtgaatacattgtgttatccatgatgtctccatctcgctagcaagctcactctagaacactccttgttagctagaggaagaaggtgaccatgttgggaaagcccactgtcagaggtctgggggaggaccctggaacctggggggccctctaggacctgtgggtagccta

SEQ ID NO: 179510 - DNA, 1063 bp, Homo sapiens
gaatagtttgtaaggagacaagagaagaagcagagaaaccagttaggaggttgttttaataatcccattgacttggactaggctacagtgaggaggcggggagaacggattagtttctggatgtacttttgaaggtaaaaccacgagattttgctgatggattgattgtggggatgaggaaaggacaataatcaaggaaaacaagttttgacctgtggagttgccatttgctgtgacaggcatgactgaaggaggagcaggttttgaggggaaaatcaggacatggctgaatatgaaatacctattaggtgtctaagcagagatccaaatgaggtccaagtaaagtggatagttagacatataagtctggagtgtaggaaaaagatctgggttaaagatatagaatttgctatatagaaaaaaggttagaatacttctttttaaaaacagaattgaattgcaaggttaagattttcaaaatctatgtatcaactcccttgattttaccctggtggatacagagatccaactaatttgaaaatcactttacttctctgctatgtaaccaagctctagtcaggagggtttagctcaggtgatctcacagccattatggcatgtttacttaaagattctttaaagttctgctgaagtttatgcttgatcctgtcaatatgagtttgattactctccctatcctctactcccagcctcctttttgtaggaagtaatttttattcagcagataaatgtatagtgtgtggctgggtgcgatggctcacgcttgtgatctcaacactttgggagtccagggcgggtggatcacttgaggtcaggaattcgagaccagcctgggcaacatgctgaaaccctgtctctattgaaaatgcaaaaattagcctggagtggtggtgcacacctataatctcagctattctggaggctgaggtagaaaaatcgcttgaacctgggaagcagaggttgcagcgagcctagatcatgccactgcactcccacctgggtgacagagcaagaccccgtctggaaaaaaaagaaagaagag

SEQ ID NO: 179511 - DNA, 369 bp, Homo sapiens
gataaatagtatattatcattacagtttaatggcctcatatgctttattgaatcattcccttaattggcgattccttcctgtcctccatctctccaccctgccattgtacataacactgcagtgaacatctttgccttccattgtggatgatttttgctgtgatctgaatactgagtctccccaaaattcacattgttgaagcataattttcagtgtgatagtagtgaaaggtgggtcgtttggggaatgtgattaggtcatgagggctccatcgtcatgaatggaatgagtgccctcctaaaagaggctgaagggatgccgtgtgaggatgcagcaagaaggtgccatttttgaagcagagctcaagc

SEQ ID NO: 179512 - DNA, 427 bp, Homo sapiens
accacttacagagattatataaaaggatccaaatatcaaagaagggttagttgagctactcagtgatttctaaaccccggtccttagtgaatttttcattgacccatgcaaaagaaaaaagtgtctgtgtggggatagatataaatccacgagtggggtaattttaacacagctcctctctggataggaagaactctcctttaagtctgacagcatacatattcttccccctttccccaccttttctcttttttggtacatcaaaaggattttgacgaaatgcattgacaataggtagtaactgctgttgtcaattttaaacacacttatgtagcaacattaaatgctgacatatctgacaatccctaatatttgcttttttttttttttttcattttacaggtagacgaaaacaaaaggtatagga

SEQ ID NO: 179513 - DNA, 457 bp, Homo sapiens
attaaggggagggttttcctttacagattggagatggataaagtgcctgccaaggggctgagggtgttgtgagcatttaaaagggctcagctctatgtaagcttcccaggaagataggtgagaggtcctctatctaagagcctcaaatttacaggatggatatgatcaaaagagaatcaagccatgtccaaaccatgggtgcatctgaggacagataggccttgctaattatgtgtgtcttccactaaggtgaaaatttgcttcatttcctaaatacataatagacactatgagggaatgtggttcagaaaatatgcatgagggcttgcgagaagaagaatgaaaagctgttttcaaagctacaaaaggaaagctcagtttctttcttctacatttaaagtaggtggcctaaaactgaaccaataaaagataattgcaaatatatttcttattgaaa

SEQ ID NO: 179514 - DNA, 344 bp, Homo sapiens
gagacaaatggtaggcctgcccgtcacactactagtgtcaatatttatctaaggcctgggtattcacgatggtataaaccaggcaccttttcaattcagttattcacgtaattcgccactacaaagccccaaaacagagattctttacagcttgatttcttttcttccatttccatacacagggggctggctgcaggacccatggtctatgtcagcaataatccctgcagcctgggaataaagcgtacaatgtatttcagaactacctatatcaaatggcattgcaactgaggacaatgaagaggtggggaagggagacagagcacctgctttcttccttccca

SEQ ID NO: 179515 - DNA, 655 bp, Homo sapiens
gagaagaaagaagaaaggtagagctgatgttgaaaggaacctaagtcctcatctattgtaagaaatcactagaaaatgtctcaagctgataaatgaagaaataattttataagcctatgaatcctatcagtaaaaacaagcattacaaaagggaactctggagacctgaacaatggaattgagatttataaaaccttttgtaaaactggttttttaaaatctgtatgtatgtattactttgatagacttcaaaaattattttaaaagaaatatgaaatctagtaaaacaaatatgacattaggaaatttaaaaccgcaagaaaggaaggatatgatcgaaatatactaacggtatagtattttaagtcatgtggtgttagtacagaaatagacaaatagatcaatggtacatgaaggaaggtccagagatacttaggtttatataggagaatagttcattgtccaggtgtcacttccagtcatgaggaaagtatatactcactggtagatggattggcagcaatatgggaggtctgtccctacaggggaaataaagctgtatctgcaaatcaaagtcaactagatggaattaagtatatagtaacaatttttagatcgaatgatctagagttctggtggtcccttcaatgaggtg

SEQ ID NO: 179516 - DNA, 327 bp, Homo sapiens
atttactcagtctctttgaataaaactttgtgaaatacaaatattttacttttctagtttttctccagaatttttgtttcctgtaagtttattggggcactttcaagttctccaatagatgtacaaaaaaaaaaaaaaaacagctttataatcaaagctgtttattgtgtatgccaatattgtccctgatacttcacaagtagattggtctattttaagtgagtagccggaaacaggaaagcattgaggaaaggctgatagagatgtttctactacaattctaacattgtatactttattatgattactattattattattttaaag

SEQ ID NO: 179517 - DNA, 621 bp, Homo sapiens
agttttctccaagttgatctatagatttgatgcagttgttatccatggggagggagtggcaattttgctcccagaggacatctggcaatttgtggagacattttggcatgtctttacaacttgagaagtgctactggcatccagtgagtgaagaccaggtctagtactgaacatcctacaataaacagcacagcggctctccctaacaacaaagaattgtctggccccaaatttcaatagtgccaggttgagaaactgtggtttaatggaatcataatgcaaatctcaagtgttttttagaaactgacaagctcatttagtgttaaatggaaatacaaattatctagaatcgacaaaacaatatttaagaatcaaaacttggaggaattatattctcagagtccagaacattctacaaactataataagtaagaccatgtggaataggtgcacaagtaaacaaggaaacctaagaagcagaatagagtttagaaatacatatacacacacacatttccattataggtgctactatagtggggaaaggatgctctttctaatatatggtgctagagtaattggatactcatatggggggaaaacaaaccttgacatctatct

SEQ ID NO: 179518 - DNA, 501 bp, Homo sapiens
tcccgttccttttccccttctgcagaaagtgtggctgtagaaaatgttgggtagtgacttttggcttttcttctatagctttatgtggtactgatggcagcttttatattgggctgtgtggtttgatctagaagtaaatagattgcgtttatgggtaagagctggctgtggtcaaactggctgggtatatacttggtttctgtttacagagagaagttatatgttgcctcagacaatgagctgatccatggagtgcacaggggttggaactctctactcagccccagggtgctcagggacaagtttagcagggctgcaccagacggacctgcctatgggtcccccaatggcacacacaagcaccagcactgaggcagaatccagtgggaaaataccaagcacctagatgtgtgcctttgtgggcagatgggaaacctccttggccccaagttatctgcatgggtttggagggtggcctaaactcctaatacaggagagtgg

SEQ ID NO: 179519 - DNA, 299 bp, Homo sapiens
aaaagcaaacttgattctatctgtccacctaaaaaaagaaaaatcagaagttccccattatctgcagaaacaaatccacactcctcagcatcaagtacaaagctccttcattgtctgggctccactgatttatcctttcccattgcctgccacttcttcacactgacattgcgctttggtcttaagaaaccatttgcagttccctgaacttgtatgctttttcaaacctgtctttttatctcacccaaaattcctttccccacttttaaagtttgccatttgaacattgtagtaaaatc

SEQ ID NO: 179520 - DNA, 399 bp, Homo sapiens
tgggggggagaagattctccaacatcttcatgccaccaccttcagaaagtcaaactttctgatttataaagagaacatttcttcttgtaaaatagttaaataatagaggcataaagaataaaaatcaattcccctgtatctcagcatccagttacaacccctgttaacttcaatgtgaatatcctttcagactttctcgatgtattaccatagaattttatattaagaagattacacattacagaatgttttacaacctgctttttccattcaataatacagtaaataaacatttcaatgtcagtattaatagacttacatcattcatattgatgcctgcaaaggatgttattttatgacatagttattcaaaaattcattacccattccttcttgagg

SEQ ID NO: 179521 - DNA, 201 bp, Homo sapiens
aacctggcttaacttgaataaaaatgtcagagtcaggaaatgagagtcctatagtgtgatttgctgcaggtcattagtactcattttcaccaaccgataaattcttatgcagaagcatcacagcccggaatttggaagtaagtaggcttcagtcttgctatgtttcattgattctaagatacttttttcccccacatcact

SEQ ID NO: 179522 - DNA, 341 bp, Homo sapiens
gatgggcctgtgatggttaattttatatgtcacttgattgggccacagcatgcccagaatgctggctaaacattatttctgagtgtatccataagggcgttttcacaaaagactaccattgaattggtatactgagtagagcacatggctctccccagtgtgggtgagtattatccaatctgttgcagtgcaggcacggatagaataaaaaggcagaggaaaatggaattttctctctgcctgactgcttgaactgtgacatagatctccagcccttggcactttaggttcttaagtcttcatatccaaactggaatctataccattgccactctaactct

SEQ ID NO: 179523 - DNA, 444 bp, Homo sapiens
tggtagttcccacatttcaactaaaaattttaaaacaaaatgacacacctcccaaattgtttaatctaagctagtaaaaaaacaatacactttgaaatgctattccagggagactgctgggacactggtgtaatcatacattcattacggcactgtaaactgatacaactcttttggaaatcaatgggtaatatgtgtcaaaaaccataaatgtgtttatacctttgacctaaaaacttctaccctgggaatttatcataaggaaataatataaaagaaaaacatgtgcaaagatatttgatgcaacattgtaatattttaaaatattaaaaatgcccaacaataagcgattggctaagtaactaatggcatattcttttaaaaataggaaatacaaaaaatacacaggaacaaggaaaacataacaaatgatacgttaaaaaa

SEQ ID NO: 179524 - DNA, 299 bp, Homo sapiens
  misc_feature (12)..(12): n is a, c, g, or t
gctgagggttanggtggctggggcaatttcttaagataagacaacagtgaggtttgccacatcaattgactcttcctttccaaaagatagatacactcctttctttctttctttctttctttctttctttctttctttctttctttctttccttctttccttctttctttccttctttctttctttctttctttctttctttctttctttctttctttctttctatcttctttctttctttctttctttctttctttctttctttctttctttctttcttcctttcctctatctctgta

SEQ ID NO: 179525 - DNA, 366 bp, Homo sapiens
aagaccaatgcacatttgccttgcaggaagggctttagatctctgtgtcacaaacaatcaagaaatcatttcttgctgtacaaatgtagcagcttattgtagcaccagtgaatgggcacgggagtgaaggatattgctaattgtactgagcctggctgcattgcaagtgtcagatgatttgataggactgacatgcagctaaatggaataggaaaagacactgcagtggactgttggtccattagtttgctcgggcatcttgttttactaaggagccctctaatggtttctcggcaataattactatctctcttcttcatgctattcaacatgacaggcacttgctgaagtcgcagctaatatatt

SEQ ID NO: 179526 - DNA, 1255 bp, Homo sapiens
  misc_feature (397)..(397): n is a, c, g, or t
  misc_feature (421)..(421): n is a, c, g, or t
  misc_feature (425)..(425): n is a, c, g, or t
  misc_feature (431)..(431): n is a, c, g, or t
  misc_feature (451)..(451): n is a, c, g, or t
  misc_feature (466)..(466): n is a, c, g, or t
  misc_feature (519)..(519): n is a, c, g, or t
cgcctggcctgggcttggaggcgccgggccctggatccgccggacgtggatcgccgagatcggtgtcgtaccttgaccatcgacgacgcgttcattgcagccggcgagagactcagactccaggaccccgccgacgaccccgcgcttcccaggaggttcatctgctccttccctgactgcagcgccaattacatgcaaagcctggaagcttgacgcgcacctgtgcaagcacacgggggagagaccatttgtttgtgactatgaagggtgtggcaaggccttcatcagggactaccatctgagccgccacattctgactcacacaggagaaaagccgtttgtgtagtgcagccaatggctgtgatcaaaaattcaacacaaaatcaaacttgaaganacattttgaacgcaaacatgaaantcancaaaancaatatatatgcagttttgnagactgtaagaaganctttaagaaacatcagcagctgaaaatccatcagtgccagcataccaatgaanctctattcaagtgtacccaggaaggatgtgggaaacactttgcatcacccagcaagctgaaacgacatgccaaggcccacgagggctatgtatgtcaacaaggatgttccttgtggcaaaaaaatggacggaacttctgcaaacatgtgagagaaacccataacagaggaaatacctatgtgacgtatgccggaacacatttaaccgcaagattaccttaagcaaccacatgaaaaactcatgccccaagaaaagggatgtatgtcgctgtccaagagaaggctgtgggaaagaactatacaatgtgtttaaatctccaaaagccatatcctctacttcatgaggaagacgcactttgtgtgtgacactgctggctgttgcatcacattgcaatgacccaaggtctcactaggcattgctgtgtaactgctccctgacaggaagcaagatgaaggctcacagtacaaaaatctcgtggaaaaacaggagttgggccatcatctaaggtgattttcctccagaggaccaggcacgtatttgagcaaacgcagttacaaaggtggagacacaggcacaagtacagattaccagatacggcgctgtaagcgtggaaagggagtcatacagaatataattgtgaaaagcaataatggggccacactagcaacactgtaagctatatcaaccacacaagaatagactacataacatcacgatacacccagatactaccact

SEQ ID NO: 179527 - DNA, 636 bp, Homo sapiens
  misc_feature (251)..(251): n is a, c, g, or t
  misc_feature (256)..(256): n is a, c, g, or t
  misc_feature (273)..(273): n is a, c, g, or t
atgttaagtaacgggaatttatagtacttaaatttatctgcaaaaggaaaacatgataaacactagcatggttttctatcatttaaatcctaaattcacaggatggaacattcaactcctgattttccagaaaatctactcttatgaatcctgaagttatcttgaaaggcaggctttgtatttttccagtgaatatattgctgtttcttatcaatgttgcacttgattttttttttttttttttttttttngaganggagttttgctcttgtngcccaggctggagtgcaatggcgtaatctgggctgaccgcaacctctgcctcccgggttcaagcgattctcctgcctcagcgtcctgagtagctgggatgacaggcatgtgcgaccatgcctggctaattttttgtatttttagcagagacagggtttcaccgtattagccaggacgttctcgatctcctgacctcgtgatccacctgcctcggcctcccaaagtgctgggattacaggcgtgagccactgcacccggcctgaggagtccttttatactggagttaattaagttcctagaagttttcttgattggttggttggtttttggaagcattttgattagttatgtaatcaagaatga

SEQ ID NO: 179528 - DNA, 357 bp, Homo sapiens
ctggtctccaactcctggacttaagcgatcctcctgcctcagcccatgtgcatttcgaataccctagtaatatataatgagatgctatgtttggaaaagtaaataattcccaactctacaaaggctgcattgaagatggagacttttatacactgttggtagggtaacctttctggaaagctgttcatgcatgtattcagtttatcaaagcctgaaaaaaactgttcatactttgactccatttttagaatattgtgttaaggaaacagatttaaacagaaatttttgtataaagaccctgtcacttgggtttatctaatagtctagtggaaagactctaataagagtcagatacta

SEQ ID NO: 179529 - DNA, 691 bp, Homo sapiens
  misc_feature (1)..(2): n is a, c, g, or t
  misc_feature (4)..(4): n is a, c, g, or t
  misc_feature (6)..(6): n is a, c, g, or t
  misc_feature (27)..(27): n is a, c, g, or t
nnananatgcatgtatgtatacatatntgtgtatatatacgtatgtatgtatacatatgtgtgtatatatacgtatgtatgtatacatatgtgtgtatatatacgtatgtatgtatacatatgtgtgtatatatacgtatgtatgtatacatatatgtgtatatatacgtgtgtatgtatacatatatgtgtatatatacgtgtgtatgtatacatatatgtgtatatatacgtgtgtatgtatacatatatgtgtatatatacgtgtgtatgtatacatatatgtgtatatatacgtgtgtatgtatacatatgtgtgtatatatacgtgtgtatatatatacacatatatacgtatatatgtatatatatatacacagttgaatcagtgggattaatacctataatctctggttttcaaaggtaatatggaatatttgacacttggtaaaaggtgaactacctttgtagtgaatcttttcctcttggtagcatcaacactggggataaatcagaaccattctgtggaatgaaatgtttctcaagagcctataatatagtagatagtgcatattaagatgtctggctgggcatggtggctcatgcctgtaatcccagcactttgggaggctgaggcgggaggatcacttgagcctagaagttggagactaacctggcgagaccctgtctc

SEQ ID NO: 179530 - DNA, 386 bp, Homo sapiens
tggaactgcctagataaatttggcctctgtacagggcccgggatgcctttctcagcagccccacgtggagaggtaatcctcctcctatatgaacagccaggggtgaagctcccagtggtatttgacagatgctatcagggccctgggcccttccagctggggctcagacttgtttggtaggaatgtggtgaaattacataggaacttacggctcacgcatatttgtctacacctggagcccgtatgaaaaggagtgtacagtcacccgtgccaagacattagctcaaactatgtggctccatggtgggagccaggagaccacatggcagaaatagcactagactcagaagccctgggttctagtccaggtcctatcaaaagacgac

SEQ ID NO: 179531 - DNA, 587 bp, Homo sapiens
gaaaccctaatcccaaatgtgatagtatttagaggtggggctttgggaggcaattaaatcttaagaatggtaccctcattaacaggatggaaccattataagatacatgagagacatgacctctctccctccctgccctgtgaagacacagcaaggaggtggttgtctatagaccaggaaggggactctcaccagaaaaatgaacctgcaagcaccttgatcttggacttctcacttgccagaatggtgagaaatatttgtttaagccacctggtttatgggatttgttacagtagcttaagatgaggaagacaacagttaaccttaaatatgggaccactttaagcaacttataatatactgaaactcagagttctcatggagtgactgctcacgtaacttcaatatctactggaccatatcttcaacatccaattgaccatactggagcccaaaacttggtcaccgaaacactgatctcacactctggccttctctcttctcctcactctttggacgagccacttctcaaccctaacacacaactactgatgtttttttctgcacctgtgcccaaggtttaaaaa

SEQ ID NO: 179532 - DNA, 411 bp, Homo sapiens
cctccccttcaacccccagatacactcaagtctcccttcctgaaatggtctttccccagtctgaatgctccctagccaccactgcatttcttcctctcttcataccaccatgcttctgtgtttgccacttccaatttttcactcccgtttctcatcaagtctttgcgattggccttcttcaccctctcctctaccgaaagtgttcctttaaggccaacagtgacctcccctttcccgtatccagtggcctcccctcatgctactttgactgcagcatcccattctcctgaccaccttctctctgatttggcatgcttgagtcctagatgtcttcttcaccctctcctctaccgaaagtgttcctttaaggccaacagtgacctcccctttcccgtatccagtggcctcccc

SEQ ID NO: 179533 - DNA, 378 bp, Homo sapiens
tctaagggaagcctggagataacagagagccagtctgcagatgctgaacctccacctcctcctaagccagacctgagccgttacacagggttgcgaacacacctcggcctggctactaatgaggatagtagcttattggccaaggacagccccccgacacctaccatgtacaagtatcggccgggttacagtagcagcagtacgtcagctgccatgccgcattcctccagcgccaagatgagtcgtggggacagcttgaaggagccaacctcaattgcagagagcagccgtcacctcagttaccgctcagagcccagcattggtacacagagagcttccgttctcctacctttggcataatgttttcactacgatgca

SEQ ID NO: 179534 - DNA, 226 bp, Homo sapiens
catattcgctcttcacaatttagtccagataaaacccctttttaagcatctttccttgattctacattacataaaagtataaggcatatatttctaattcttcatatttctattagaagagattattatccacatattcagaaattctgtctatatccttaaaaaaaaaagggtattcaactttaactcttttcttttcttttttttttttttgagtctgggtctc

SEQ ID NO: 179535 - DNA, 414 bp, Homo sapiens
gttctgtctccttgctctgtccatttccaaaaggccaatcactaagtcaccaaaaagcctccagagactttgtaaattgtctttccatatggttttcagtgatggccaagttggaagtcatttgcctgcagtagatgccaatctacagtgttaatttgggagctggcagctctacctctgccccactggataatccaataacagaacccaataaaacttctatttgagctgcaaactctagttaggtcaagtggccttaaaaatctctattaagccatatccctggattcaatgaagctctcatattcacactagtttcttttcttttccttgtttttttttttttcttttttttttgacagagtctcgctctgtagcccaggctgaagtgcagtggcgtgatcttggctcact

SEQ ID NO: 179536 - DNA, 776 bp, Homo sapiens
tgctgggagtgcaggggcggccttgggtgtggagaaccctggctgcacagtccctttgacgatagtccaccggccacccaggcctgtctggggacatgtaggatgggctcttaccccagggagggcggcaggctccacttcggcgagaggttcgtccatgcagaggtgggcaagaactggggtctccgacaggtgtggctatttctttgagttctctggcactgtcaaaagcagccaacccaccccccagtccacatggtcaccactgctgctaccagctgctcagtgcagtggccactgtgtctcctaaggtgctcgcttcagtcagcacttcatctcaggcaaccacaggtgacagttaaacatgatgaaaccgcatgctatggctttctagtgtctcatattctgttggcaagaagctcagcactgcattcctgaccgaggtcagaaccagatcaatctcagaatctcacctgtgtaggtctgtttcatgggacttttcttttttgggggagggggcagggtttcactctgtcacccaggctggagtgcagtggtgcaatcactgtttattgcagccgcgacttcttaggctcaggtgatcctcccacctcagcctcccaagcagctgggatgacagacttgcgtcactacacctggctaattttaaaattttttgtaaggacagtgtctcaccatgttgcctaggcgggtctcaaaactcctgggctcaagtgatcctcctgcctcagcctcccaaagcgttgggattatag

SEQ ID NO: 179537 - DNA, 448 bp, Homo sapiens
agcacccagagccgtatcacctcccaaagttcctacctcctaataccgccacaatggcaaccaaatttcaacatgagctttggaggggactaacattcaaactgtagcagtccttatataggagccacaacccaaaccttagaaaattttgagctccctggagcaaatggaagagcagaggagaatgtccttgaggactacagggaacaagtagatgagtagggtcaagtagaaactttcacaaggttaaggacacctgtgtatgtttgaaggtagagttggagaaaccaagggaggtaatccaaaatgtgattatacccacaggcccttttccacagaaaggtactgagagtcccctgttgccatcagtgaaactttacactattatgtagtattaaagttatttagtgcagtagtagtcaagaatttggcagctgaaatgagctaa

SEQ ID NO: 179538 - DNA, 467 bp, Homo sapiens
tggtggttcttgtgtggcgtgtggttctttgctggacaaaagcgcctccatcagacaaaacagggcagcaggcccccaggaggcccgtagggttcagcgacgccgtctctagaatgccgtgatggccccaggacccttcctcacgcagaacttgggtttgggtcacttcggcaaagactgtggggtgttgacggcgcgcaccagccccgagtgagtggatgcttcagggatgagaaactagagttcatcccagtctcacctcccaccgcctccacacaggctctcctgcaagggcttctgagctactccctggtaaagaaccaagcaggaggggaggcctccaaggcatctcccttgcctgcccccaggatcaatcagccctgaggaggagctggaggagggcggaggctaaatccgagtgactcatacttgtgactcatcttccacatctgttggagatttagcct

SEQ ID NO: 179539 - DNA, 739 bp, Homo sapiens
tggtggttcttgtgtggcgtgtggttctttgctggacaaaagcgcctccatcagacaaaacagggcagcaggcccccaggaggcccgtagggttcagcgacgccgtctctagaatgccgtgatggccccaggacccttcctcacgcagaacttgggtttgggtcacttcggcaaagactgtggggtgttgacggcgcgcaccagccccgagtgagtggatgcttcagggatgagaaactagagttcatcccagtctcacctcccaccgcctccacacaggctctcctgcaagggcttctgagctactccctggtaaagaaccaagcaggaggggaggcctccaaggcatctcccttgcctgcccccaggatcaatcagccctgaggaggagctggaggagggcggaggctaaatctccaacagatgtggaagatgagtcacaagtatgagtcactcggatttagcccacctgccttgctccctccccgacaagctggccccagctcctgtagtccttctattaggttggtgcaaaaaatgactgcaaaacacaaatacttttagactaacctaaatagaagataatgcatctatttgggcccagaggccccattccagactccacttgcccattcaaacccctgcctcagaccaccaaggggagacaggcctggaggaatggttccattgcaacctcaaattccttgaaccatatatgccataaaaggtccttagtaaa

SEQ ID NO: 179540 - DNA, 478 bp, Homo sapiens
cacacggcctataatacaataacacaatgaaaagacaactatctgggtaacaattaacatgatgaagagaacaatacctcacatctcaatattcatgttgagtgtaaatgctccacttcaaagatacgggatggcaaaatggacaaaaacaacacatccaaatatctgctgtcttttagaggctaacacagaaatactcatataaactccagataaaggggtaggaaaatgtattccatgcagatagaaaccaaaggcagcagggatagctattcttgtatcagaaaaaccaactccaaatacaattagttatacaaaaagacaaagatggtcactatgtaatgataaaacgatcaacaagaagatactacaatcataaatttatatgcaccaaacactggagcttttagattcaaaaaacaattactactagacctaagaaatgagatagacagcaaaacaatggtgtaaacggatg

SEQ ID NO: 179541 - DNA, 705 bp, Homo sapiens
aaacatgcccgggctaacatagtgaaaccccgtctctactaaaaatacaaaaaaatattagctgggcttggttttgggcttaataggaagcttttaaaagttctgaggaagggaatgccatgatttgtagtttttatctagaaagataaatctgggcaagacagggactagaatagagcccaagaggccaactgcgctattgccactagaacagtagcactggagatctccgaaaggtgcaaatactggaaccatccttgagacttgctaatgatttagaagtgaagagatgaaagatggaagggaaaatgttatagaagccaggggaaagaaaagtgcaagattatcaagtgtcaggtacagtaggaaactaataaaatcctgctgcatataataactggaaagaaacacaaagaggatagcagtgtcaaatgaagggtactctaaatgggagacatatgagcatatgtataagccaatatgaaaaaaatcagcagattgaatattattcaagagatgaaggctactctagaaaactgtgacaatgttacagcaatacaaattatcttgccacttcattttttatttaaatatgtgatagtttaagcagtagtgcctaagataatgctctactcagtagacactcatatgtgtgattattggatgaacaacaactctgagcttggaaagcctggttgaagctgc

SEQ ID NO: 179542 - DNA, 450 bp, Homo sapiens
tgtgtatatatacaggcacaagcattcacttaaaaaataatggggaacacgtgttattttatgacctgatggtttcatacattgtgggtacatttctttattaataaacacgcaccttgcttaacttcaatcagtctctcctgtctgcaactcaaatggccacagaagacaggatttacacacagctctgcccagagagaccctgaaagatgcagacacaacatagtggcacatgggacaggaggcggtggaaccagatgggattcattggagccagatgggattcgaggaccacccatttcagggaggaaagtaatactgggacttaactgttaccaaacaagaaagaaggaggaaatgtatatttcactttttccactccgaagcttcctcgcatagctttatccctccaccctgaacttagttttataaatagttatttcttttgag

SEQ ID NO: 179543 - DNA, 409 bp, Homo sapiens
tgcagcccctcttcccgggatgctgtaggagaggctgaaagccagccaccggcccacccacctacctgccgcagcgcctccatctcctcattggccgccttcttctcagatgtgctgctcttgagcttggactcggccagctccacttcggtctgcagcttgtccagctcagagatgacctggtcacgctcactcatgatgagcttgtactcgctgtacacagcgtcccgctcctccctgtatttctccgactcctttgctgtcttcacctgcgtggttctcagctcggtcagctctgactgcagcagctccatctcccactgcaggtccttgttctgcgccgtggccttgttcagctcatggtggatcgcctcaaacctggcaagagaggtggcgagatgtgggaagg

SEQ ID NO: 179544 - DNA, 461 bp, Homo sapiens
ataacagcagataatatttatctgatactatgtgccagatattatcgaacacactttacatttattaattaatttaatcatcacaaaatccaatcaatcagtcagacacaaagtagttaaatagcttccccaaagttggccaacaagtaagaaacaaggatgggattttagcacagtctgtacccagagcctatattcttagttactatgtaatatagcatcacatgtatcaataaatggttacacacataaattaatgaattttatagtttcagtttcttctggtcctaagctgcttttacccttttccttttttttttgagacagggtttcactctgttgcccagattggagtgcccaggcatggtcacagcttactgcagcctctgcccccaggctcaagtgatacacctcagcctccaaagtagctggcacagtaggccactactggctaatttctc

SEQ ID NO: 179545 - DNA, 341 bp, Homo sapiens
gaaacatgtgatctgttagtgggtctgagaaaatcatatttattaagcaaaaaagtcaatatgtgcttgtgttttgcttatgaatttactcgaataaaatgtctgaaggtcttgaaacttcttaaaagaaaatggttcttacttcattttggtgtgtttacattaaggggagccatgtgacctcttatgagagttactgtcaaatttcaagtgcatgggcattgcctggaggacttgttcaaacacagattgctggaaagcccaagaatttgcatttgtaacaagtttacaggtgatcatgatgccgctttccctgggtgactcactttgagaaccactgt

SEQ ID NO: 179546 - DNA, 725 bp, Homo sapiens
atccaccatgactggtgccgttataagaggatattaggggcctggcaccatggctcacacctagaatcccagcactttgggatgccgaggcaggaagaccacttgagtccaggagtttaagaccagcatgggcatcatggcaagacccctcatctcaattaagaaactgtatatatagagagaggatattaagatagaaacaaacacagagggaagacaacgtgaagacgtagggagaagacggctatctacaagccaagaacagagaaaatggaagaaaccaatccagctgacaccttgatcttggactcagcctccagaatcatgagaaaataaacttctgttgtttaagccacccagcctgtggtactttggttatggcagtcctagcaaactgatacacctatttgtatatttaatatacaactcaatggtttaatctgttcaagttgtataaccactgccacaatttatattttgaacatgttatcacctcagaaagaaaccccatacccactggaagccattctctatatcctcccaaccctcattcctcccccagccctgggcaaccactaatctgtgttctgtctgtggtgttgcttatattgtggatgcttattttaaatggaatcatgtaatacgggttttgatttttttgtgattggcttcttagcatacttagcataaggttttcagggttcatccatgttgtagcatatgcc

SEQ ID NO: 179547 - DNA, 493 bp, Homo sapiens
gaggccgaggcgggcggatcatgaggtcaggagtacactaacatggtgaaaccccatctatactaaaaatatgaaaattagctgggcgtggtggcgtgcgtctgtaatcccagctactagggaggctgaggcaggaaaattgcttgaacctgggaggcagaggttgcagtgagccaagatcacgccactgcactccagcctgggcaacagagccagactctgtctcaacaagtttttttcagataattttcccaactggttttaactaagtttaaaaaaacagagcttcagaatacagttcattgcaatttcatcaaagcagcctcctctacatgacctacctttccttcacaggtaggtctatcatagaatacatttacataccttatatttaataaaaagttattatttttgaggctaagtgttaattcatcttcttaaccactccctgaaaagttgccttcttcctgttttactcctttgcatattccaa

SEQ ID NO: 179548 - DNA, 678 bp, Homo sapiens
tctgtacatgcttcttctctccaagaaatgcttttttgtttgtttgtttgtttttgagacagagtctgtcgcccaggctggagtgcagtggcgtgatctccactcactgcaagctctgcctcccgggttcacgccattctcctgcctcagcctcccgagtagctgggactacaggcgcccaccaccacgtccggctagttttttgtatttttagtagagatggggtttcaccatgttagccaggatggtctcgatctcttgatctcgtgatccacccatctcagcctccaaaagtgctgggattacaggcgtgagccaccacacctggccaaaatgctttttaataacgacactgtgcggggtcctaggccagatgggttgggcgtgcggagattaaaatgaaatcattttcttgtgttcaaggaactcttggtccaagcccacatttacctactagatgaccatgtgctgagctcctcctatgagtcaggtactggtccaggcacagcacagataagaaaatgtagttacatccccattttacagatgaagaaactaaggcttggaggttacagcttgttggataggagccagctctagaatcctggctttccctttacagtttttactcttgaacaggtcctggggaggggacagggtacaggtgtgtgtgtgtgt

SEQ ID NO: 179549 - DNA, 445 bp, Homo sapiens
cccaggaccttactctgtggggtggaggtgaggtcccagatcccgattctgtgggatggaggcgaggttccaggatggagatgtccacactgagtagtacaggacagcaagattggcaaggctaagtggggagtggggaatgagaaaggaggcttgagtctgggcttaggggccaggtcaagagggccttgtgagcccttctctgaagccaaattctttccctgaagtggtgaattgaaaggatttaaacacaagaaggtggtgtcaaggttaagatgaagaaggatattagttataatttggaggaggtagggatgacgatcgtaaacagaaaggtggtgatgtttctgcatgaaaaaaatgaacttgaactaaggcttttgtagtgagaatggagtggagaggatgacataaatttataggattggatggccaactggatgag

SEQ ID NO: 179550 - DNA, 361 bp, Homo sapiens
gttccgtacaagagtcttgtaaagagattctaccattggacagctcaggtttttctgtggagcccagatctcttagccttgtttgttatttcttttttatataacggcccaaataaatgggctactttgtccacatgatagccctttagatatttggcaagattaccttcaggttaaatattcctaacttttgtatccattcctcatcacattgtttgtgaagtatttagaatagtccctgaaacatagtgaatactatatgtgtgttaaataagtaaatgaaaatcttcatcatcatcgtttagtagaacttgtttgttaattcttcccttagaagatggtgcccagaactaaccttatt

SEQ ID NO: 179551 - DNA, 572 bp, Homo sapiens
ttgaagaccatggttccagatttaaatcagcttcaagctgtggaaaatgcaacaggaatcagagagagaagaacacacgtaggcatctgtgttcttcaaattaagtacttagcaatagaatgtatttttatatattttgatggtgaaaaaatattcctgccatttgtttgaatatcttataaatacagagtttagtccttcattttctcaattggtatataccctagagtccatatatttcctggtagataccattcacctaatttagagagtacagactgatagatataacataaattattgtgcttgtcagttgtggattggcaatgaccatatagacttagcaaggaaggtgtttctttatacagatgctccttgacttgcaatggggttatgtcctgttaaacccattgtaagttgaaaatatcaagttgaaaattcatttaatacacctaacttacaaaacatcatagcttagcctagcctccttaaacattttcagataacttacgttagcctacagttgggcaaaattatctaacagaaagtctattttataaaaaaaaaaagtg

SEQ ID NO: 179552 - DNA, 696 bp, Homo sapiens
agccccagctcagagcacagttgacgcgaccactgcccagtgctgcctgggaatgagggcaggggagccgccactttctcctgcgatgccctctcctcccggctcccggtgcctcctcaccctcagtaggttttgtttgcttttgagaaatgaggtggaagtggggattaggaaggaagaaatgcaagaagggcaggcaagccccctctcctatcatgcaggatcctctttcttctgtagccggcggttcccccacagtgggaggatgggtggtcccaagaatgaggccaattgcctgagcccatctgcacccaagagttcccagccactcacatgcccaggacgagcttgggcccagcctgaccaggaaggctgccttcgatttgctccctgactgcacctggatgccaggaagccccctgcaggccgaacacgcaggaggtaacccagcagtgcagtggggcacacggagtctgatccctgttcctcccctagactgtaggtctcacccgtcccctacattggcccgcttttgctgtaataattagcaaatgggttgcaacggggacctggaggcaacggcagcccactgaacttgcatcatgtccacacgccacttcctgtacaagcggccaagagcatcatgtatcatgctgtcttcagtgagatgggggagctgccaagaggtcagttacc

SEQ ID NO: 179553 - DNA, 268 bp, Homo sapiens
acatatctgttaaaggtcttatatttagaatatataaagaactccaatactcaatagaaggaaaacaatcaacccaacttttaaaaatgggcaaaagacctgaacagttcttcacagatgtacaggtggcaaattagcatgtgataaaatgctcaatatcattaggcattatggaaatgccaattaaaaccacggtaagataatacattgtctgttagaatgattaaaaaagactaatcatactaatgatggaggagtaggaactctc

SEQ ID NO: 179554 - DNA, 298 bp, Homo sapiens
tttgctttgctgcttttacatattaaactgccatgaatacgcagatactttttgatgctgatagaataagggtgaaacataaaaggacacagacaaatctgttttaaaaattaccaagtatcaaagggataagagctggagtgaagtacagagatttttaaatatattttctttttctgccactcttccacttcaaaacttgcagtgatgacacattgtccgtagcatcaaacccaaactcttcagtcccaatgtcaaggcatccttcacctggtcctgtcattcaccaagtacctcc

SEQ ID NO: 179555 - DNA, 214 bp, Homo sapiens
tcaaaccttagcaagcactataacatactgagggaccataaataggagacgaacatatagagataggaagctatgtttttttgagacaaagttgataaaacagaggggaggcaggaagaaaggaaggcaggtgggcaggactgggtcaggcagctggatacagtagtgtgtcaggcagatactgagaagatacctctgcactaacagcctccca

SEQ ID NO: 179556 - DNA, 425 bp, Homo sapiens
cctggtacataggaagggcttgaaaaacatccgccattgtcattatcacataacttgcataccctttgttatgaatcctgcatcctggagcttcacataagcttgatctcctgataaagccaaggatttggagtcaacccatgtaaaggggctggtgcaaggcctggcagagtcagggtccggacccagcagcaccctttgcccccgctactcgcagagggccccaatccctgaaggtggtgagtgccatccttcctccacaaacctcctatttctcataactctgcaccccaatgacccacaagtttgtcaacatctcttccaatgtgtactcctcaatttctcccaaattttcagttgtcgtaacgctacttttagaactttaaaatattcttccaaaacaactttagtttctaatttaacca

SEQ ID NO: 179557 - DNA, 295 bp, Homo sapiens
  misc_feature (35)..(35): n is a, c, g, or t
  misc_feature (71)..(71): n is a, c, g, or t
gtatttttagtagggacgaggtttcaccatgttanccatgatggtctcgatctcctgacctcgtgatccanccgcataccattaggcagcaattccacctcaggctattagtctttcctgtccaccttcccaaactaaccatgatcccattttgatcacttgaattctttcctctatatcatgatttcttcacgtaggtattatgagagtcatctggctagatgtggagatgtatatttctgggcttaaactactccccttttaaaaatctttataacatttcaacaatatacat

SEQ ID NO: 179558 - DNA, 369 bp, Homo sapiens
gccccctgctttcctgaacagtcagtggaggaggtcctgggagctcaggtgagcacctgaacggtagggcagagcctgagggtcttggtggagacaggcaagaaggttgcaggaacctagtctggcccagtgcctgggagaacgggagggaacacggaggcagggaggcagaggggttggcaggacctggactggactgtgcgtcgcagctacccacagcttgaccccactgccttgaagtgagtgatgcaccctcactagtgttcagcgtccaatttcatcctggccctgagtgtgtaacggctttgcccttgcggggccccctgggatgaggggtgagccctgtcccttcctggtcactgtctgcca

SEQ ID NO: 179559 - DNA, 301 bp, Homo sapiens
ggttgttgtctctttcaaaactccacctacccatcccacaggaacttcaataggtccaaaaccaaaccaaatatacttccttccacatgcctctcaaactcagaatttctatgccccctacctaggttaatgaacaaaaatacataatggaaagagtacaggcattccctggaatttctgctctggtatttaattatgtatgtggccttacgcaagcttcttaatatctctgagcattaaggttcctcatcagcataacagacaaaatacctatcttaataaagggttggaggccagatgc

SEQ ID NO: 179560 - DNA, 469 bp, Homo sapiens
ctgttctgtgacttattaaaatcctatatatccttcaagggcaagttcatatgctacctcttccatgaagaatctcttcttcttcatctgaaatgccccaaatatctcgtttgtatctatgtgtggtaattttcaccttttgctttatattcttttttttttaataaacagagatggggtcttgctatgttgcccagactggtctcaaacttctggcctcaagtgatcttcctgccttggcctcccaaagtgctgagattacaggtgtgagccaccatgcctggctccaattatgctctttttcaatgaaatttttcaagatttttcaatgtacgattaaattattttttactatagtcactctgttgtgctagcaaatactaggtcttattcattctttgtaactattttttatacctattaaccatccccacttcccccataactactcctcgctactacttttacc

SEQ ID NO: 179561 - DNA, 3597 bp, Homo sapiens
  misc_feature (3113)..(3113): n is a, c, g, or t
  misc_feature (3154)..(3154): n is a, c, g, or t
  misc_feature (3333)..(3333): n is a, c, g, or t
  misc_feature (3381)..(3381): n is a, c, g, or t
  misc_feature (3432)..(3432): n is a, c, g, or t
  misc_feature (3444)..(3444): n is a, c, g, or t
  misc_feature (3477)..(3477): n is a, c, g, or t
  misc_feature (3492)..(3492): n is a, c, g, or t
  misc_feature (3510)..(3510): n is a, c, g, or t
  misc_feature (3519)..(3519): n is a, c, g, or t
agttggtactttcaaaataagtgacatccaaatagtaacttaatattccaaatatggctgcaaaacaaattgtcgattatggatgactactactgccatctctccataccagtccatcttctgccaggctgtttggtcttgatttgtcgaccttttaggtttctccccatgtattccacatgaccttcaccaaccccacttctatctccaaacgtctttctgagttgtggggatgcagatgtattctgccaccatcacaagggctaaccgagccctggctgcggatcttcattgttgttcacattatttccattcttacaccctacttcatgtttgtacactattttcttacatttgctgtctcttctaaacattctttgctgcatccactttttctctatttgtgctctaggtgctgcagaggctaatgctgggtttcctttcattcctccttgcactcagcacctcccttctcaattccttttgccatgtctccactttaaatcttaacctactccagatagtcttttccttcacactattggcatctgtgcttgggttgctttcagtctattctctgatctatgatttctttgcatgatcaagaaggtgccatgaaaggatcccttaagaaagcctgtcatttagccagaacgaactagcttcatgatagcaccaggaagactgatatctcccaggaaacaaaccactcatggtggtgctctttttgccttcactatgaagtgtttgtctgcctgtatgtgaaaacgagagggtttaattgtaaggatgcagcacagattgggactggcatcagaaagccattggggactgaggtagctctagagaccgctttctgtctccagtgctctccctcctgggtgacatgttttctgtctcctggcatctctgcttctctctatgggcttctttattatttgcagcttgcaatggtaccccaaagtcctagctcatggctcctctctgcatatatgctttctgttcctacccacaaagctctttctattcttctagtttaaattttcaagagaagaaatctgatttttttttaacctggtcatgtcaaagaccactgaccacatatgagctggttgccctgtgtcaagtgcccccttctcccaccctcttcccctccccatctggtctgtcataactgaatgatggagtgggaaattgaaattgccatgggaattccatgataagctatctaaacagttttatctataagtggtagacagagtcacttagaagggagtcccaggtgagacaggcacctgtcaactccaaactggcacacattctaaggtctgcaacaccccagagagagcactgattttgtagtggcctgtactggggcggtaggctggagaatgggagaaatagccacttcagaatcccccagcccaaatgcatcaagctcactatagactctgcagccacgattcagctggcttctgctcagatcaacagaaaacattcttagtgaatgatgcttgtggcacatatctcaaggctaccagggtcatttcttcccatttactttttctctgatctatcctctccaggacactagcgtcagaagataatcttccgtcgttttcaggtacactatttgggtactgagtcactttcaaagcctctttctgggtttggatttccagagcagcctgtgctgtaaagcaagacagaaagcttccctgccattcatgcctgccagggatagaatgacagtactcctgaggctctccctccccacccctcccctgctggacagctgatctgctggactcagccagagccagcaggcaccccctctttatcctaggagctgcaaacttgatgcctttccaggaaatccccagaagctggagtatcctcatctacatgtggcacagtgtatggttgtgtcaggtgctcatgtcccattgcataggactggggtggaaaatagggaccgtccttttgtgtcagctccagtcaatgagtagtggccatccagggggccatcttggaaaggacttgtgaggctgtatctgcgctcagttgtagatgtgagaagaaaaggccaaatatctgccaatcctagtcctgggattcaagatagaaagaactgcatggagtgaagaaactaggagtctccatttcactgagatgcataagaatgaaattattgtcactatttcttcaatactgggccaatcctaataagaaaaccctttttgagtctctcttttctttatcctacatataacacagaagctttttctattccctggatgaacccacagggacagaaattcttgttggacaggtgaagcagataatttctttatcagactagaatcttccagaagcactgctaacctagtgagttttgtactctagacaggtggttctcaagccagctccccaccgcaggcctttttcatggtctgcccctccctgtggaacccatgttttaggttattagctgataattggatttctattttttctcataaaatacagcaaaagatagctagtgatattatgatgagttaatgtaattatagccaaagcagagagaaacaacattttaattaacctgtgtggactgctggaagaatataaactttctattttgggggttgagtagagacagaaatgaacacagccaagggctgactgtcagaggacatttaactgatgtaaaatgctttgaaattattgggcactcattgtttaaagttgtttttgatgatggtaactccgtaaggggatcagaacatgctggaaagaatgggcacagctttggttacctgggccttaccactgttattcaggcctctgagaaagcttactattgttgttatgtttcttacataataaaacttctaatatttgtatgaaaacatagaattccacttttaaagatgtaaggattttgtcataccattagggttactatgatcacttgattctaggtctaagaaatattaagtaatttacccgcgaacacagagttttaagggtaagtatcaaaaccttgatcttctaataccacatattctcactcatatgtgggagctaaaaatattgagctcaaaaaggtngagagtagaattgtagttattagaggatgcgaaggaggatngggagaggttggttaatggatacaatgtgaagttatgtaagaggagtaagttctagtgttttgtagcactgtagggtgaatatggttaacagtaatttagtgtatatttaaaaaaaaatagacaggattctgaatattcacaaagaaatgataaatattcagctgggcgtggttgctcncgcctatattcccagcattttgggaggccgaggtggatggatcacctnaggtcaggagtttgagatcagcctggacaacatggtgaaaccccgtctctnctataaatacanaaaattagctgggcatggtggcgcacacctgtngtcctagctacttangaggctgaggcaggagantcgcttgancctgggaggcagaggttgcagtgagccgagatcacgccactgcactccagcctgggtgacagagtgacactctgtctc

SEQ ID NO: 179562 - DNA, 640 bp, Homo sapiens
tgtaaactaaacaaccctggctgcaagaagctcacagcctggtagaaagacggcactcttcaccctttagaggtgtctttgtaatagagtggcgcaggcactggggcttgggcccccaggaccaggacggcaagtcagctgaagcaaggatgattgcggtggaagagccctgtgagggagagccaggagtttggctttagacgtgtgcattaggcatgcaggggagacgtcaagttatcaagtaggcagctgcgtatgtgagtctaaagtttgagaaggagggacctggagctgcgcattcgggaggtgcaggtacagggacagtagttaaagccagagacccaatgagatccccaacagaggataggtagggatgagaaccaagaactgagctgcatgtctcccccccattagctgaccttcctccttttacagaaaggaacacacaagtgcagagaggaccagtgttttgccccaagtcacagcacagctgctgcaatgcggagggaaaattccagtgtaagatcagcaggctccagagcccacactcttcccattgcttctgttttgtttgtttgtttgcttgttttttgagacaagagtcctgttttgtcgcccaagctggagtgcagtggcgtga

SEQ ID NO: 179563 - DNA, 644 bp, Homo sapiens
tcaggctcccgagtagctgggaccacaggcgcccccaccatgtccggctaatttttttgtatttttagtagagagggggtttcaccgtgttagccaggatggtctcgatcccctgatctcgtgatctgcccgcctcgacctcccaaggtgctgagattacaggcgtgagccaccgtgcctggccgatgtcacccacgtttcttaggaaagacgttagcatcctctaaatcctcaccgactgtgcctggcgcagcattattttgcagttttctgggatttacagttggcatcatttgcacagcggcagcgtgatgtggctgtggagagcacggaagctctgtccccacggaagtgggctcttctggttgcaacatggtggaggccagcccggccgcaggtgagggaagatgccacagcaaacctctgagcaaccaagatgacaagcacctgcttggaaaaggtgacaagccacaaggccataggcccagttataaggatgaattgtgttacacgaatggttataaacctgaccgacctcagaaggtatatggaggaggcaattatcaagccccttgatggtctgtggctggatgcaccatactttgccaacggtgtgagcatggcagagaatgtaggtgtgtata

SEQ ID NO: 179564 - DNA, 582 bp, Homo sapiens
aattttagttcgatatttgtgggagagatgggaatcttcagagtggtggtagccaacttctgcctccatggttcaattaaaagcaagtcccctagttaatagaagtaaggggtctctaggcttgcaagtttcttcagatgctaaaattatgcctttgtgtaaaatcagactttctgttatatgagtagacgtaggaattctctgtatactttaaaggagaagcaaatagaaataaagagagagggtgataaaatctagattcatagaattgtggaaaccttacttcattttaagagtgaagaacccagtctgattaaaggaagttccgtgtttaaggcaacatgttgcttgtggcagatctagactcaaaactgagattcctgcctctgtccagtgcttttttcacttcattacattacgagccatcttaactccattcatgcaattctggggtaaggggttttgtcagaattccacctgaccttccctagagcagggtttggacaggatgagagaccccaatctctcagatttgaggcttcttttcaagatatctgtttttcccttttccttaaaaaaaaa

SEQ ID NO: 179565 - DNA, 304 bp, Homo sapiens
cactggctcatacttgacctggcagtgctgtccaggtgtcctggcacctgtgggacattggtctggggacaaagtacatccccacagcagctggtaagagaagggtgctgcctacgttatgtaggcaaatggatttccaactaaatttcacaaagcaatgatggtgtcttgacaaaaaatgagcgctgggcagggtggcttacacttgtaatcccagcactttgagaggttgaagtaggaggaccgcttgaagccaggagttcaagactagcccaggcaacataatgagactcccatctctacg

SEQ ID NO: 179566 - DNA, 329 bp, Homo sapiens
tgatatgattctgctcattgaggagaacagtgttcattcactcatttgttgaccaaaatgcttaatgaaggtggactgtaaaccaaacactggttcttcaatggtgagcacaagagagacagcctctgccctcagggtgggtgcttgcagtgtagtgcaggaaacaaatgtgacattgatataagccatctatcttgttcagacctccccattttactcataatcacttttgtatatatgtgttttcagttctgtgcagacttaatcacatgtaaagtcatactattttcaccaccacagtcaagatacagacagttccatcaccacaa

SEQ ID NO: 179567 - DNA, 202 bp, Homo sapiens
ctaaaagaatgcatcccaccaggagagcccaggaaagcatggattgatttatccagcatttactgagcacctttgatgtacctgcgagctttaatgctcaaacacactggtcagggcctggaaggagcacagagtcggtggttcacacaacttggggcacatgagcacatttttgagacagaaaaaggaacagcatggaccc

SEQ ID NO: 179568 - DNA, 171 bp, Homo sapiens
gatagagagaatttggaaaacgagcagggttccaaagtactgagcaattttcaggaggagtataaaagcctaggggataattcctatgcatctgcatagggaatttatttgatagctatattttcaggacctgttgacattttattcatccttaaaggcctctttcagttg

SEQ ID NO: 179569 - DNA, 603 bp, Homo sapiens
aatgttctgtttctgactgattatgaagcaacaaagataccattaaaattcctagctcacattggcccttcatcttccatttttcaaggcataaaattgtccatatattagattggccaaaatcctccacaaatacaaatataccctacaaatgtacaagagagatccttttcagttctcttattcatagaggcataagcaaggaaaaatagagagatcagagtctcataatagcagagaagtcttgatctgtgatactgggacaaagcgtccactttaaggttgtcatttgcttgtggggagaagcatctctagttagctttactttaagatctctgatgggtgtacagttccaagagtctcaagggacccttctgagttgtgatattatgaacccaaggcccaaggtcccaacgtttttctgctgtgtggatggcaaagacagtctttctctgatgttgttctcaaaagatacaatctctaagttctagattatgaagggtttgattattctcagtcaatagaacatgagaagctttctttacctggtaaaaatataccttggcataatgtattaaagcattgcagcatttagctctatca

SEQ ID NO: 179570 - DNA, 346 bp, Homo sapiens
caggttctgcaaaaacgaaacagctctattccaagttaaaaagtatgcccctattccaagttaaaagaaaaaaaagttgtattccttgttcatttattgagtaaggaattgagagatgggtgctgagttattacagattctaactgctcgccacacatggagctagaaatacatttaacagcctttcaggaaaacgcctaaagctttagaatttcaagctagccaggttgcaatctagagctctagtttgttgctgaagtttgggagaggatggcctctacctgtgcacacatcgagttaattttccagagtcttttgaagttaatagggagcggcttttctgttt

SEQ ID NO: 179571 - DNA, 1271 bp, Homo sapiens
agaaacatagaactgagtgtaaaggaaaatacgacatcaaaatatgtggaatgtggctaaagcagtcctgagacggaaatctgttgcactaaaaactgaaagaaagatggtttcaagtcataacctaaggtctaaactcaagaaactagataggaaaaaaaggcagaataaatgcaaagtaagaagaaggaaaaacataaaaataagagatcagtgcaattgaaaacaaaaacgatagagaaaattaatgatacagaaatctggttcttacccaaaaattcagcaaaattaataaacctctagtgagactaataaagaaaaagaagacacagttgcatatcaggaataaaaagaattattgatacagattgccaaaatcaaaaacgcaaatactatgaataaatctccatatgtaagtttgacaacttggatgcttgtcgcccaggctggacagtgcagtgatgccaactcagctcactgcaacctccacctcctgggttcaagtgattctcatgcctcagcctcccgagtagctgggattccaggtgtgccacaccacgcctgatgaatttttgtatttttttgtagagacggggtttcaccctgttggccagtctggtctcaaactcctggcctcaagtggtctggccttctttggcctcccaaaatgctgggattacaggtttgagccactgttcctggcctgaagtgaaccctgtttctaaaaaacacaaactactacaactcacacaatatcaaacagataattttaatggccctataattattaaggagatgaatttgtaatttaaaatctctgaactaatctccaggcccagtttcactggagaattcttaccagaattaacaccagttgtacacagactcttccagaaaatagaagaggaaggaacatttcactcattttatgtggttattaacctgctaccaaaaccagataaagacagtattaacaaaaaagataggctgggcacggtggcttatgcctgtaatctcagcactttgggaggccaaggcgggtgggtcacctgaggtcaggagttggagaccagcctggccaacatggtgaaacaccatctctactaaaaatacaaaaattagccaagcctggtggcgggcgcctgtaatctcagcctactcgggaggctgaggcaggagaattgctgtaacctgggaggcagaggttgcagtgagctgagatcgtgccattgcactccagcccaggccgacaacagcgagactctgtctca

SEQ ID NO: 179572 - DNA, 436 bp, Homo sapiens
aattgtttttcactttttgtgaatctcaaggaaaaacatttttgtgctgtgaatatatttttcaacatttcaacctatagtgctcaactgtgacttttacatgcacaattcaatgctttaaaaactgaagtcttatgcctacatgcctactctcaggtgagatgttctaatgtgcacatctgagacagataattaagatagttggattatccattagaactttagtttgttagatgcatgtggttattgactaaagctataacttcataatgaaaaatatcagccatgttttcagcacagatggttgtggaaattgatattttaacatggtaataagttcaataccctgcatgttgcagatttctacatttttccctcaaagtgtatgcttatatccaatggaggagttctttaaacatgaataattttaaattga

SEQ ID NO: 179573 - DNA, 111 bp, Homo sapiens
ccatttctccaattttaggttttctcattggagcaaaatgaatatatagttcatcctatatgggtgtttatttccagctctagatttgtaaggaaagagagactagctaca

SEQ ID NO: 179574 - DNA, 181 bp, Homo sapiens
tttatataacaataacacaaatcccccagtcactatttcatctgaccctcagtagtccaatcagtttatatttagactagaaggtccccaagggtgagggctgtttttcactgttacatccttaacccttagcaccaatgactggcaaacaaatagccccggaagtatttactgagttcat

SEQ ID NO: 179575 - DNA, 116 bp, Homo sapiens
cctaatcgctaaccctactcgctaataaagaaaaaaaaagaaaattaagcctcagagaagttaggagactttctcaaggtctcaaggatctagaactagaaataccatttgaccca

SEQ ID NO: 179576 - DNA, 329 bp, Homo sapiens
ctcctacattccttctacattatcccccaatgttctgttcttcctccacccaaagataaaaccaaaatagatattgtagaagtaaatgacctaaaacaaactttagcaattgaaacaggatatcaagatgcaaatgcctggatggaatggattaaatattccgtccacactttaaacaaaagcaattgttatgcttgtgcgcacagcaggccagaggcccagattgtcccctttccactcagatggtcctcccgtcgaccaagcatgggctgtatggtagctctcttccaggattctacagcttggggcaatatatcatgccaagctct

SEQ ID NO: 179577 - DNA, 501 bp, Homo sapiens
aaaccatccatgtgctttagaaagattactccagcacacttaagcatgatgaagaaagaaagacaggaaggtaaaaagatttacccagagaccagatttcttttcctataaaggacatgtataccaacgaggtgcccttgcttcaccactcacatttgtcccggtttttaaagacaatcatatacacagataaaggaatgctgaaatggacactcacatgttgacaaacgtcaactgttaaaatagctgggcaatatgcatgaaaaatcttgttgattcttgtcttaggaatgaatatgatctctgtcatatgttgtgattctatcttaggaatttatttctggaaaataaaccaaccatttttcagttaaaaaaaagtatacaactattatcaaaaatcattgtttatgacagccaacatattgttaatactataaatgcaatattcttgaatttattacaagcaaaatgtgttttttattttaacttttaggttcaggg

SEQ ID NO: 179578 - DNA, 160 bp, Homo sapiens
attgccaagctgctttcctcccggctgggtcaatgtcagccccaccagtggtgtataacaggaccctctgaatgtatattcccaccaacccttcttactgtcaatctggaatggggactgggaaatagaaaaataaatactgattttaatcattattgga

SEQ ID NO: 179579 - DNA, 156 bp, Homo sapiens
actaaatactacacactgaagggacggttagagtttctagacaatagacaaatataggcccagaaactcatctccagcactattttatacttaaaagtgtctccagtaaaaacacaactaaatcataacatagcttaatgcttagagtagtacttg

SEQ ID NO: 179580 - DNA, 155 bp, Homo sapiens
aaggttattactgttagcttggaagcaaaaatacaaatcaatatcttacttctatcccaacaatttccttacttaaactgcaggcttactaggttttctgtccacagagttcatgctgcagggccatgtttatatatatattttttgtaaccatg

SEQ ID NO: 179581 - DNA, 268 bp, Homo sapiens
caggtctccggggagctttgagagaatatggaatatctatttagaaatataagaatctttccagactctctggagtcttccaccagatgatgcataaagaacatccctagtaaataggaacccaagaaaatagctgaaggccaatactgatctgtgactcctgcattaggagatggacttccagagtagaaagtgctccagatctcttttccttagtagctcgccattgccatcatatctccaaccctccttcctccccaaccaccgc

SEQ ID NO: 179582 - DNA, 520 bp, Homo sapiens
gggcgtgatagccatagcgaggttggtaaacacctttctgagaagctcccaaggcacatgtgttatcggagggaacatatggaacccaccatggacgcaaacggggtgcctgggactacttggatatacagttttgttaattttccagtcttgttgaaggattcaccttcattctgattaactttcttaaatgtttacgttctaatacaaacattttgtcattgtcctatgaaaacaaccatgttaaaatatgaagactactagcgctaccattatgtagtaaataccgagcatttactacatgccaggcactgggcagagctttatatttatatttactcattctcacaacaacctacctggctacatattatccctctcttacaatccaggcttacagatgacgggcagttatgataagcaagcaggagaaatgagatttaaagccagttcttttttcaaagcctgtgccctgcccatggaagggataactcaggaacctacagaaaaacatatttga

SEQ ID NO: 179583 - DNA, 366 bp, Homo sapiens
acattttaacattttgccctatttgtttcagatctccagatttttgttttttaataaataaaacatagatattggtggggaccgttgtacaaccaattaagagcaatttggcgatatcttacataaagatacgcatgctctatcacctagcagttcctttcattaaaattttttctagtatttattgcacaaagatggcatggtctgtctctctctctctctggctttttctgaaaatctgtagaaaagttgaaaaactaaaataataccctttacttttcacctatagttaccaattaatattttacatttgctttatttttcatatgcaaattgttatttttgctgaactgtgtgaaagttgca

SEQ ID NO: 179584 - DNA, 998 bp, Homo sapiens
tccccggatcgagataagcacggtggatgtgctcaacagaagaacgggaggacagaagaaagaatccgtgaactgaaacacagaatagaaatgacctgattggaaccacagggaaaatagactgaaactgaaccagagagaaaatagactgcaggaggggaaaaaaaacagtttcagggacctgtgggactacaagaaagatgtaatatgtcactggcatctcaaaaggtgagaagagcacatgagacgggctgtatggtggtggccgtctggaaaatatcatcagctacatccatgttaatgtatggagctatagttttctgttccactataatatagtattctattgtgtgactgaaccacaattcatttattcactctactgtaatgggtacttgggctattttgtttttgatctaataaacagtgctctgtgactattccatccatatctccaggagtagaactgctgggtctcagggtgtgtgaatgttcacttttaccaaataatgtaaaacttttcttcaaagtgagtgtactcacctctagtcccactgcagtttaatagttacatttcaccagcattttgtcagtcttctaatttttttccaaactagtgggcatgaaatgaaaatttgtggttttatttacatttcccctttttactaatgaaggtgagtatattttcatatatttaatgggccatttgtgttttctgtgaaatacctgtttatggtttgttttgttttggtttggtttggttttttgagacagtgtctcactccgtcgcccaggctggagtgcagtggtgtgatctcagctcattgcaacctccacctcctgggttcaagtgattctcctacctcagcctcctgagtagctatgattacagaggactgccaccacgcccggctaacttttgtatttttagtagagatggggtttcaccatgttggccagggctggtttcgaaatcttcatgtgtcgtgatccgcccg

SEQ ID NO: 179585 - DNA, 447 bp, Homo sapiens
gaatattaaatgtgaaaatatacgtaaagcatgtgacacataacctagaagttgacacttgtaaatactacttccctttattaccataattattctataaggttggaaggtcaaatattactatatgggatgaatcacttaagaccttactactagataccagaagtacagtttaattatattaaatatgtaaggtaagtttatgcctgccagaggttcatttctatattacacacacatatatatatatattcatttccatattatcacatcaagaagaattaactgcaattctgaggaaatatagaaaaataagtagggcattactgcatggccagtgttctgggctgtgtcctttttctcttctgggtacacttaaagccagcccactgttaggtcgccagaagatattactgcagtatttcttttctatcaaagaagaatgag

SEQ ID NO: 179586 - DNA, 180 bp, Homo sapiens
gctttaagtcagggaaactagaggttccaggttgcccattgtggtcaacagagaaggaagtggacagcctgcctggcctctcgctgacagaggccatgtcctcctagctggaccctggggaggtgggcctctcactttctgcagcagctggagccatgactgggcttggtggctcaggag

SEQ ID NO: 179587 - DNA, 430 bp, Homo sapiens
gatggctggagaaatccacagctatccacctcaggagcatcaacaaagaggacaaagattgtgaataggagccaagggtcaatcccaagtccctagcttggtggatggtggtgccattaatcaagttaggaaatatgggaagagggccacagtctagggggaaaatgatcttggttgtcctctaagtactgaatctacagtatggccttagacctcagaaattagggatgtggatgtggttagtctctctacaagagggaaaaccatgggaatgaatgtgacaatttaaggacagagtagtcagggaagaaagaaaaggaccatggatggaatgctagggagtaataaaagttaagaagcagataaagaaagcaaagctaggcaggtgaatgatacagttaatgaggcacaatggtctattgagaaatca

SEQ ID NO: 179588 - DNA, 423 bp, Homo sapiens
ttggcctcccgaaggtattacaggcatgagccacccacgcctggcaagatctggtttttgacatgttgagcctaaggtttttgacatgttgagctatcaaggcattccaaaaatgttattaaataggcaatgggttgggcatggtagctcacacctgtaatccaacactttgggaggctgaggcgggaggagcacttgaagccaggagtttgataccagcctgggcaacaaagtgagacaccttgtctctacaaaaaataaaaaaataagcttggcatggtggcatgtgcctgtagtcttagctactcaggaggctgagagtcaggaggatcacttaagcctaggagtttgaggatgcagtgaggtatgattgcaccactgtacttcagcctgggcaacatcgcaagaccctgtctctaaaaa

SEQ ID NO: 179589 - DNA, 198 bp, Homo sapiens
ctcttctccaggtagactaactagatcagaaatagatgacccagacgtatatttggtccataataaatattctttcttctcttactatattgagaaaaaatatcacagacagtcccctacctcctcttgctctcctaaaacctaactatattctcatcattttctttcagtgtgtgtgtgtgtgttaggtctacctgg

SEQ ID NO: 179590 - DNA, 621 bp, Homo sapiens
aacttacggctaggtagcgagcgctcggtgtgactgcctttccacgttgcacaagcccagcgcacggtacccactggatatgcccgaggcctccagaggaaaggaaaggaggaaaagggacagaagaaatgttcacaggaactgcatatgggcctgctacttgtgtcaaaatgtgactgaactctcttccagcagaccaaatatctatggatacaaaaagttcagcatgacaagatctactgttctcccacataatttttcatgattcatagtcctaaaaggaccaagttccatgcagatctgcagaacaagaggctatttcactgaactgaagcagtcaaaagagaatgctcatgagatcccatcaccaccactttaccgaactacttccatatgtgactatttactctttcttcttttctattattattgatgaactggccatgtacctagctaaggtggatcctgccacttagatattagatcttatctaccctttctcactctgaaatattgttccaagaattcttttcttgtatcattacttttccctgtttactagtgtaataagtatagaaatatgctgttattttcccatattaaaaattctcttgagtagga

SEQ ID NO: 179591 - DNA, 542 bp, Homo sapiens
ccatttcttaatattgtatttactgagttgtgtttcaccttaactctgtttaaatatttgtttttttaaaaacataaacacttgtgtaaagcattctcctgtatgctggtaggtatagaaatacatttagctgtgtattttctcttaaggaaggttccagagtacagatgaggcagtaggatgatacttgagtgagtgatctttggaacctggtagacctgagttcaaatcttgctcctgtcatttattaagtctctgactttggctaagttcccttacctcttaatgccttgtttcttatttggagatgaggatattcttaatacatgtctcatagggattttgtgaggagtgaataagataatgcatatcaacatttaacgcagtgctagcataagaaatatgcaaaacaacagcatgaaaaataaaaatggtaaattttgtgaaatagttttagttgaagtgcagtgggaggagtttagttttgggatgatgggagaaaactttgtggacttgatataatttaagttggtctacgtggt

SEQ ID NO: 179592 - DNA, 823 bp, Homo sapiens
atagggaagtccctctggtaaataggtaaggatggatggagatactcgggctggagtggacttggaagaacaccaaccttgccactcacttcctgtgcccctctaaggagcctgggattctctacagcacagctggaaaccctggagcatatggtggacaaatgccctttcagctacaagatttcatggtccagtcatcactggtaacaactcctctttaagaagagagaccacttcaggcatccatctccccttgtcaacagcaggaaaagccagacaacccagtcatgaattgggatttttctaattggaaaatagttgtaatactgcactcttacagaagataacctaagaggaggataatactcattattgatgaggtttatctaaagatagatgtatttttacatctttcccccacagatacaacccacctccatctgaattgtggaaaaggcctaaactgggtgacccaagatcatcctggtgacaggtgtgtccctagcttcctacacaaattaatgaatgtctcattggtgaacttcttgatcctgattgatccttgagaggaaggtgtgacgagtgcagcatgagctgctgattactagacctgcatgcaaggaagaccccagtgaaggcccaacacgaatgctgagtacacctgtgggcactctggagttgccatcttacctatgcaagagggggagcagcgctttggggtgtaaacctaacagagaagtggaacccaagagtggctattttccaaaacagtaccattgcatgcaaaccctaaataaggaggaactgtccacatttacagtcc

SEQ ID NO: 179593 - DNA, 175 bp, Homo sapiens
ttgaattactttctggattcagttgctttcagcttaaataactctctttggtatttcttgtagtgtaggtctgctagaaacaaatttttctcactttatctggaaaagtttattttaccttcaattttaaagttagctttgctgaatatatgacttttgtttaatgaatggtttc

SEQ ID NO: 179594 - DNA, 510 bp, Homo sapiens
atctcattgattgtatagttctcatgaattgcattatgatttttttgtccacttcagttattgaaagaagtatctctcctgatgatggtaaatttgccaatttctgctttcagtcttgacaatttttgctttatatctaagttaggttaatagtttcctgatgtttgaatattttaacaatacattgtgaacctctttacaactagatgtgctttttaaggggtattttttctttgtatttgtcccacttattcagcatgcatgtttgcacgtttcttttttaaattcaaaaaagtcttctttttgattaaaccatgtttacattttattccattttccccttctactatcttggaaattatatagttatatttttagcgaatactgatatatttaagcatacatattaaattaaaattgaaagtgaacaaatacctttatccttctcctaaataataaaagcatataaacttagagttagtatctaaggctctagtatatttaggagaa

SEQ ID NO: 179595 - DNA, 487 bp, Homo sapiens
atctcattgattgtatagttctcatgaattgcattatgatttttttgtccacttcagttattgaaagaagtatctctcctgatgatggtaaatttgccaatttctgctttcagtcttgacaatttttgctttatatctaagttaggttaatagtttcctgatgtttgaatattttaacaatacattgtgaacctctttacaactagatgtgctttttaaggggtattttttctttgtatttgtcccacttattcagcatgcatgtttgcacgtttcttttttaaattcaaaaaagtcttctttttgattaaaccatgtttacattttattccattttccccttctactatcttggaaattatatagttatatttttagcgaatactgatatatttaagcatacatattaaattaaaattgaaagtgaacaaatacctttatccttctcctaaataatactagagccttagattactaactctaagtt

SEQ ID NO: 179596 - DNA, 238 bp, Homo sapiens
ctcccaaagtgctgagattacaggcgtgagccaccacacccagccagaaaaagcaatagtttcttgaaagtcaggtgcagtgtagaatccgcagctgtagaactgcagcccgaatggatcctgtctcccatgtgttttgtccatcatgcaccaggcatttggaacacactagctcacagagttacacgggccttccagcagtgacacatttaatcacacagatcatcaaaacatccca

SEQ ID NO: 179597 - DNA, 294 bp, Homo sapiens
cagctttctactgcgttgtccagcagaacacgttgaagcttggggcctgcaactcgtgtagagatgattgcatttaggaggctgaggtagattttttccctcttaagtgtgtgctcactgctttttggcgaagtcttgacccgagacatacacagcttgatctgtgaggattttaacatcgagatggttctgttatttgagttaggcatggctaggctaccaaggcattgcttttcagtccaaacatttggtcatttcaatttattgttagtgaggtttttgcgatttgttaga

SEQ ID NO: 179598 - DNA, 553 bp, Homo sapiens
gcaccaagattgaaccctaaggtaactatgggctttgggtgattatgatgtctcaatgtaggcttatcatcaattgcagtcaatgtatcactctggaggaggctgttgataatgagggaggctgttcatgtgtggggtcagggtgtacatgggaaatctctgtaccttcctctcgattttgctgtgaacctaaaactgctctaaaaaaacttaaaaaaagaaacattttctgggcagcacaagggcttcttgtgaaatggtttgaatattttagatatgtgggttctgttatttaataaaattacaataagatgcattcatcaatagattactagtgcattgcttattagattactgaacaactagtgcttctctgaatggattcactgaatacagacatttatttgatctgccctttgtaacccttgataatactccaaggttttgctgctacgtgtgagaacccaagataagcctcaaacttggattctctctgaaggtataatgagctaccaccccagccatttggcacatcacccatgtttgttagaaa

SEQ ID NO: 179599 - DNA, 188 bp, Homo sapiens
ttaaagcgtctcccactgcaccctgcagccctgacaccacaaagtgggggccatttggctgcagaagtttgttacctgctgtgtctgccaacagctgtgttagctggctggaaagactggggttggctggtacctggagaaatatgatcaaggaagcattctctcacccacctggggtgtggagctga

SEQ ID NO: 179600 - DNA, 519 bp, Homo sapiens
caattctcctgcttcagcctcccaagtagctgcaattacaggcgtgtgccaccacacccagctaatttttgtatttttagtagagacggggtttcaccatgttggccagggcagtctcgaactcctgacctcaagtgatgtgcctgcctctgcctcccaaagtgccagaattacaggtgtgagccaccacactcggcccaatttcctcttctgactgtaatttctgtgaaattagagactttgtttcatgctagtatcccagcacctacagaagtgccggggtgtatagttaagaggtcaaaaaatatttattaaatgaacaaatctagcatatataaagacttatacaaatcaacaaggaaaattgttaacatggacaaaccacagaaaaggaaatatgtatacatggctaataattactggaaataaactcaacctcactatcccaaaaggaagcaaattaaaacaaaagactacttttgaccctcaaattgccaagaatttaagacaaaggaaaca

SEQ ID NO: 179601 - DNA, 730 bp, Homo sapiens
cagtaaacggcaaggtaaccccatggtaattttcagtggaaacccaatattgattctaacaattgtacaggctgagcactgttagctatttactaagcactgttctcctttaagacatttgattctcacaaccctgtgaggtagtcatcattatcctctctaacactcgagagttggcccatggttgtgcagctaattaaatctgctggaccctgaaatcagcttttttctcttatacagactctgccttctaaggaaaactggagagacgccttccggtgtctattttgcaggtagtaaaagtgagtcacagaatcatggaaattgttcaaggcaacagcagagctgcagatcctctgccctaatcccaataatgcctttctgttatatgtagagctttagagctctcaagattatctcatctattgctcacagcgggtctttgtgatgattatatctatttatagatgagaaaattgagacatgaaaaggttaaatggcatttctcaaggtcaccaattactatattgaagaacaagaaataaaatccgtttctaattctctgctgccttactagatgtggtgctttaaaaatatttcatccacttatctgtttcagaatgtatcagatacattaggtaccatatattatgtgtggttgacaagattttcaggattaactttaattcaccagagataaactttatatctaatgagatcatctttatgg

SEQ ID NO: 179602 - DNA, 583 bp, Homo sapiens
tgggaggccaaagtggaagaatcgcttgagtccaggaggtagaagttacagtgagccaagatcatgtcactgtactccaaccactccaacctgggctacagagtgagaccttatctcaaaagaaaacccccccaaaaacaaacaaaaaaattggatacagtttaactatatagtgtattatatactgtttatacagttaacactgtatagtgtttaactgataccattttagtttgggaagatgtaaagttctggaaatggatagtggtgatgactgcacaacaacgtaatgtacttaatggcactcaactgtatgctttaaaatgattaaaatggtaaattttatgttatgtatgttttcgcacaatttgcaaaaaaaaaggttatccaaactaattatttaaactagtttttataggaaaacattgtgccagttttacaccctaaaaaaaaataataataatcaggttgagtcgagttccatttatagtgatgcaagtctactcctgagaatcctttaggaatcactgttctctgctcctttctggctttatgtcagcctcccctctggactcccatttgc

SEQ ID NO: 179603 - DNA, 241 bp, Homo sapiens
acaacacatatagaaaagtttctagaaattaattcaaccaaaaatactcaaaaactttatggagaaaatctgaagattaataaatggttttgattataatacgaaaaaatggagaattgtttcatgttcttgaatgaaatgtcaactcacctcaataaattttcaattgcacttttgttgcatttaataaatgtatttaaaatttatgtggaagaataaatgcacacaaatatcaaaatca

SEQ ID NO: 179604 - DNA, 364 bp, Homo sapiens
tcatcctcgccttcatattgagtaggctgaggaggagtaagaagaaggagggcttgatcttgctgtctaaggtggtaggggaggaagaaaatccacttcatggacctgtgcagttcaaacttgtgttgttcaagggtcaactgtatgttatgaaactgtaaacttagaaatatccttaactttttactatatctaatattataaattatttaagtactataaattcacagcagtacatcaccaacgaagtctcatctgcaggcttttagtcacttaaattactagtaaaacacacataaggatatggatgattctgtagtgcatatttgcctaaaggttgttgattaaaatattacaggccaat

SEQ ID NO: 179605 - DNA, 422 bp, Homo sapiens
taacagtaaaatcccatctctactaaaaaatacaaaaattagctgggtgtagtcgtgcacacctgttaatcccagctactctggaggctgaggcatgtgaatcacttgaacctgggagctggaggttgcagtaagccagggccaggccattgcactctagcctgggtgacggcaagacactgtctcaaaaaaaaaaagttaaattataccattcttctcatgaaatatttcattgtttgggaaaatgtttttcataagagatttttaatattttaaaaatgtctcccttttagtttatataactgttaatgtcaatgcctataactcatataaacaaaagctcttgggcttcctcgataattttgagactgtaaagagctcccgagaccaaaaagcttgaggtgactgtcatagagtattgc

SEQ ID NO: 179606 - DNA, 584 bp, Homo sapiens
ccatcttagttgtcaagtctcagctcactgtccttagaaaagcctctttctccctcccttcctccctccctctgtcagccacaagccatcatgaccctcttttgtcttctagatattgtattctctatctgtaatttctttccttttcttttctttttttttttctttttttttttttttgagatggagttttgctctggttgcccaggctggagtgcaatggcgtaggctcggctcactgcaacctctgcctccccggttcaagcgattctcctgcctcagccgtccaagtagctgggattacaggcacccaccaccacacccgactaatttttgtacttttagtagagatgagtttcaccacgttggccaggctggtctcgaacccctgacttcaagtgattcacctgcctcagcctcacaaagtgctgagattacaggcgtgagccaccgccccaggcctctgtaatttttcttaacccttcctttcttcttaaattttttcctgtgggggcattgtgacctgagctggggtccacgcttgccgggttctgtgttcatcacattccctgcccgcacaggac

SEQ ID NO: 179607 - DNA, 506 bp, Homo sapiens
taacattacaagaatggattaatgggttgggaatgctgggttttggccttcattctggtgctgtggtcctgtttcctcatttgtaaaatgaagggggttgtaaagatatattctctaaaacccctaatgctatggctgtggcattaagtcaaactattatttcttactgctttgtaccggacatcactttcacattagtaaaacttttcatcagtgtagtttctcccaagcttgattattgagaaagatagtgccttgtttttaacatcctgtatcctagttccaccgcagtgtttggtacacagtagatgtttaaaagaagcttattaaatcaaatggtggccaggctcatggggctcacgcctttaatcccagcatttggtaggctgaggtgggcagatcacttgaggacaagagttcgagaccagcgtgggcaacatagcgaaaccccatctctaaaaaaaccccacaaaaaccaaaacaaatgaaaataaaataaatcaaat

SEQ ID NO: 179608 - DNA, 135 bp, Homo sapiens
tcagaggatggagtgaccaggctggttccaatgacagttatacggccatggggagtagacatggagtctaattcagtgcttgaggctaagaatgaagttgtatgcattgtggaaattgttccaggagatcttgca

SEQ ID NO: 179609 - DNA, 529 bp, Homo sapiens
aatctcagctacttgggaggctgaggcaggagaatcacttgaacccaggaggcggggaagttgcagtgagctgagattgcgccactgcactccagcctgggcaacagagctagtctccaactcaaaaaaaaaaaaaaaacaaaactaaccatgctctaaaagtgcacatgcacatggttcatagcttcttagtgctgcctgtcagtccttgatatgcatccaccacttacccatttcctatcagctcctcatccataaattattccagggtgaatatccttgtacatttccacaggagctagtgctagaatttctctgagacatgtaactgggagagggatcactggatcctagagtttacacctacctctgttccatcagattactttccagaaaagctgttcttgtctgccaccttctcaccgtcactgggttttttaccattctaatatttgtcattctgccaggtgtgaaagcggtatcttgttttaatctgtgtgtccctgattcctggcaggtttgggcattt

SEQ ID NO: 179610 - DNA, 537 bp, Homo sapiens
acacaactgtagtccccgctaccttggaggctattattggaggatcacctgagcccccgaggttgagaccaccatgagccccgattgcgccactgcactccagcctgggcaacagagctagtctccaactcaaaaaaaaaaaaaaaacaaaactaaccatgctctaaaagtgcacatgcacatggttcatagcttcttagtgctgcctgtcagtccttgatatgcatccaccacttacccatttcctatcagctcctcatccataaattattccagggtgaatatccttgtacatttccacaggagctagtgctagaatttctctgagacatgtaactgggagagggatcactggatcctagagtttacacctacctctgttccatcagattactttccagaaaagctgttcttgtctgccaccttctcaccgtcactgggttttttaccattctaatatttgtcattctgccaggtgtgaaagcggtatcttgttttaatctgtgtgtccctgattcctggcaggtttgggcattt

SEQ ID NO: 179611 - DNA, 279 bp, Homo sapiens
ctggggggctgcagtgcaagtggttggattctcaatcaatctaaagttggatccaacaagttttgataacttggatgtgatttgtgacaaacagcagtcaaaaaggagccttgaggctgggtgtggtggctcatgcctgtaatcaaaacactttgggaggccaaggcaggaggatcgcttagggtcaggagtttgagaccagcctgggcaacactgggagcccctatctctacaacaaaacaaaacagaacaaaaacaaattaaccaggtgtagtggtg

SEQ ID NO: 179612 - DNA, 294 bp, Homo sapiens
tcaaagtaatggctgggcacagcagctcacgcctgcaatcccaatgctttgggaagctatgtgggatgatctttgaactcctgggctcaagtgatccccctgagtagttggaactatggacatataccaccgtgcctgcctagataggcatatattggaaaagatacatattattctgtgtcaggcattttcaggtaacaacctaagtatttttcctgtgtttctaaataaccttcatagttgttattgggtatttgtgtcaatatatttgtgtttgtgtgtgtgcgcgcttgt

SEQ ID NO: 179613 - DNA, 543 bp, Homo sapiens
tgcttaggattgtgttacactcttttttggttccatatgaattttataatagttttttttctaattctgtgtaaaatgattttggtaggtgatatactatagaatagtatgcagccataaaaaatgaatcatatgctttgcagcaacatggatgcaggaacagaaaaccaaatactacattttctcacttataagtaggagctaaacatatggacataaagataggaacaatagaaactagggactaatagacagggttaagaaggtgaggacaagggctgaaaacgacctgttggatactatgcttaccacctgggtgttgggatcataagtaccccaaacttcagcatcaggcaatatacccatgtaacaaacctgcacatattcaccttgaatctgaaacaaaagtggaaataataaaaaggaagataaataaattacagtttggtaacaaggtttacaactcatcgtcaaattaactttttattagatcactttgtatagtttatgcatttccaaaattagacaaaatgaaacttgtgg

SEQ ID NO: 179614 - DNA, 443 bp, Homo sapiens
aactcttgcatgcttttctggagatggggttcacctcaacaaattccaggcactgcacccagcccttggtttagtttaggatgcctttaactgaataccattaattctataaattctggaaattacagggaggtacgattgatagactatattaacataagaagcatcaaaatttatcttgccagaatatgcagtattggaaacaaaatattgtcgagagaataaagaagttggtaaatcatgatattggtgcaagccatactcagtaatccagtctggcccagcctgctatctacaaacttacgagaaagcctgtggaatttcagaaatcttacaaccttgtaaataatgcatcttgttttgtgagaatcatgcagtgaataatacatcagacacaggggatctgaaattcagaacaaagaatgggactggggagaatttca

SEQ ID NO: 179615 - DNA, 348 bp, Homo sapiens
ggagctaagactagggcccagagtcacccactgaactggtggcccaaaagtgttctggtatttcctgtcactaggccgtgcttctatcctttcttttttcacccctacctcatacttccttatccctcctcaagaaatccctagaagggaactgacaaacttagtgcctgacatgtaccaggctcatttcatgagatcctgcagctgtgaggggaaccaggctcagaggcagggggtggttcccccagcaaatgggggcaggatgggattgaagcaggtcccacgcactccagagcgccttctccttggctaacctcctgcaggttttgggctttttgctccccttca

SEQ ID NO: 179616 - DNA, 276 bp, Homo sapiens
tatagggtggcaactcaatttatgtgtgggatgcataattgagagatgttattttgagtccctttttttgtgagctctgctgtgaactgcaaactgtgtgcatgtgtataaaaggttaagagcccgggtagctgagtggggtgccatgctgttagcagacgatgagggcagtattactcaccaggtgcatgctgtcagctctgtagaagattccatcttcatggagtcatctcatggtccactttttcttgaagccaggtaacatttccaatgggt

SEQ ID NO: 179617 - DNA, 467 bp, Homo sapiens
atgccgcaggacaacacaggcaggaactggagtgatgaggctgcaagctgaggaacatcaacgactgctggtgacaccagacactacgaagaggcaaggaaggattctcccctacaggtttcagaggaagcacgacactgccaacacgttgatcttgaacttctggcctccaaactgtgagacaatacatttcttttttttttttggagacagagtctcactctgtcacccaggctgggagtgcagtgatgtgacctcggctcactgcaacctccacctcccaggttcaagcgattctcctgcctcagcctcccgaggggctgggattacaggcacccgccattacgcccagctaattttggtatttttagtagagatggggtttcactatgttagctaggctgatctcgaactcctgatcttaggtaatccgcctgcctcgtatgtcagtttccgtgggattatag

SEQ ID NO: 179618 - DNA, 314 bp, Homo sapiens
ggcagggttttattttcctaaactcaggggcttcctttgatgacccagttagagctcagttacatttcagtgggttaatactgtattacaaaaaatcttcgctgagttccttcccagcaagaacatgactttgctaatgagcttggattatctgtcttccattgtctgtctgacccctatagggatttaacttcacaacccagacctagcccaattttgtattttaccaagggggaaactgagacacagagaggactgctctgtagcaagaacatggctttgctaatgagctcagattttgcatgtggaaagat

SEQ ID NO: 179619 - DNA, 237 bp, Homo sapiens
agtagtctacattgtgatgtttcttaacattttaagatgcctacacattaaaattatttcatctgaaggacagtagcacaaggcagaagctattaaatatgaggggataatatagaaaatgagatagtaaagagataggattgatagactgcttgaaagagagtggagagttagagggtctagaacagtgctgtccagtggaaagatcatacctggtgtttctgctttctagtagct

SEQ ID NO: 179620 - DNA, 301 bp, Homo sapiens
gtttccttgtctataaaatgggaataacagcacttgtcttgtgataccgtcctaaggacagcattgaggtaatccaaggaaggctcccagcaaggtgcctgacacacacccatgtgcttaggtgtgtcaattttcttccctcctttcatcagtcagtcttacatccagaaagtgcgtttgtaagacagcagctcagggagagaagcatgggatctggactcaaggaaagtccagcagctccccacttaccaccaaccccaggctaaccagcaaatcccctacgtcaccaattttagacacc

SEQ ID NO: 179621 - DNA, 573 bp, Homo sapiens
taatagtcctgctgttgattgagggccaggatctgttaaggtccatgggtcccagggttcctagttagtctttcagtttttgcttataaacttctctctatacagcctctatgaggctgtgttagggaaaaatttgagacagcttcttctctggacaatattcattctctcattgcacaccaactctgcagtaggccctcttctagccatcgggcctagagtagaaataaaaaagaagtccctgatgtgaaacctcctttctggtcaatgagagaaaagatgataaataagcaaacaaagcaataagtaagatcattttagataataaatgccacagagaaaaatgttaaagcatgaaggagtatctttttataagagatatgaggtagggagagcatcagttcagataagatgatctgagaaggtctctctgaggagggaactttgattagaggcacaaatcaccatcccctttggagatctaagattggttatcatgcccggttgctcctgtcttcctaaagaatcccttccccaaagaatccttaatttataacaatcttttggcaagcc

SEQ ID NO: 179622 - DNA, 254 bp, Homo sapiens
gatattgtttataccatgtagacctctcctaaaacaaggtctgagctgaagcattgctcagttttaaaaatatccaagttaggccaggcacagtggctcacaccaacactctgggaagccaaagtgggaggatggcttgaggccaagagttcaaccagcctgggcaacatagcaagaccccgtctctaccaaaaaacttaaaaaacagctgagagtggtagaacactgtagtctcagtgactaaggaggctgag

SEQ ID NO: 179623 - DNA, 562 bp, Homo sapiens
gctaaattgaagagctagaatttgaaaccaggtctttttactccagggccaaagcttttaaaacaatacagtatggggtagtggttgagagtaacccatttgttaatggatctcaggtatgtgtctttctgcctcatcaaaaaaatactcgttttgaggggtggtgactaaaatgtataccagctagaatagcccagaacagttgataaatacgtgaaatctcagtttatactttatgtctaataaccaaatgtgtaattcccacttatgacttgatcattgaaagtatcacaaagtcttatctttagcttctgcagtaggatacccagactttttaaatccttaggcagttttacctaacagtctgatagccactgatcaaagcatgactccttatgattatagcaatatctcgtttatttaatgtataagtggaataatttcattaagctgctgattgttcttctctgttactggcattctggtctttatccagaaaacagtactccagtagcacccaactcatgtccatttccaccttttaaaagacaaagggtgcatt

SEQ ID NO: 179624 - DNA, 939 bp, Homo sapiens
tgaaaatgtggatgatcaggaccaagttattctcccgtaaggccacagtctgctggagggaatgacatctccagccagctcttctccagagaaccctgtttcctctctcctgcttactcttcaagacttccctttgatgtcacctggtctgtgagacagcctttcctgggacccccccacggagagagaacccactcataagactccaaaatgccaaggcgcccagcttctcatgcccacctctgagctgtgaggcagaggcctgtttattttgggttgatgagtaaatcatgtggaacagaatcaaaagctctgctgaagtcaacacagatgacatctgtcacttcctctttctctcatgcactggtgaaggaaaacaatgaattttcaccctattgtttatcttagaagggtcaggttttgaggtcaaacatcagtgtaaaattttgtcttaaaaaatgcacatgcattctaactgctaatagctcatatgcccatctttgaaatcaatgttcttgtttctttacgaatgtgcccactgcaaggatatcaaagcattggcagacattaagtcagtggctttgcctaagccaggctttctctcattgaaaagggagggatctatttggggagagagtctctgggggccgtgatttatccagtttgattacatggaacactggtctctgtttatttgctgcaacatggcatctgccttgggaggagatgctccacagtcgactagagcctctgccagctgtggccacttgtcttcaggctgcacctgtgtgagtcccttactcggctcactgagcatgactccttctgacctcagggaatgaatggcctgtttcccaggcacaggacagatcctgaatgtccccaaccctgagagtgtgtgcgtgcaccctcctctcttgcctgatctcgtcctggcct

SEQ ID NO: 179625 - DNA, 687 bp, Homo sapiens
gaggctgaggcaggagaatcacttgaaactgggaagcagaggttgcagtgagctgagattgtgccactgcactccagcctgggcagcagagcaagactctgtctcaacaacaacaacaacaaaagcagcaactgggagagcacggtgcaggaaaatgatcaacggagaaaaaagtttttcctcagaattaggagacacagtcccttccctcacgacaccccagtctctcaagaccattcaacacaatacaggctctaatgaagatgtgtacagtattggatgggggtgggagaggagacaaagcttgcaccaagaatgtgatgctacacatttgcaagatggaaaatgtggggaaaagaattgcagacagaaggaatagaatatgcaaaggtatggcatgccctactcgtttggggaattacaagtcgtttgttagaaccaaaccatgaagtgctgggagagtgatatggtttggctctgtgtccccacctaaatctcatctcaaattgtaatccccacctgtcaaaggagggacctggtaggaggtgattggatcatgaggcagttcccccatgctgttctcatgagactgtgttctcacgagacctgatggttttataagtggtgatttcccctgtgctttttctctctctcttgtttgccgccttctgaagaaagtccttgctt

SEQ ID NO: 179626 - DNA, 480 bp, Homo sapiens
gctgtgtatgtgtatgtgtgtatggggcaggtgttgatttttaaaagtcctttgttaaggttctacaaagaagtattttttgttttgttattttctggttggctgaagaattttgcttcagcatggaatagagtggtagttggggatcagggtaaaggatggttgggataaagattttggtttttaacaggaaattggtttgagccttccaaaaaaaagagagaatcaatcaactctgaacaaaaggagtaaatagttggtctacagggattaatgtttctttattttacaaataatctgaaaaacaggcccatagatctggaaaacagccacaactgcgtagataatactacacaaattggtaaacggatgagagtaaattaaaatacaggtttataagcatgtgaaaatagccagaaaaatatcaactaaaataaagtgttgatgcataaatgcccttgaggaaaaataacctaaact

SEQ ID NO: 179627 - DNA, 738 bp, Homo sapiens
gagagaggagaggtgagggcaggaggcagaaggcgggcacggtcacccctggcccatttgtgaacctgtaaagtgctgccttccccagctatggtgaggaaactaggtgcagggaggttaggagtggcccaagatcacccagccagcgagagtgagcatcaggaattgaactcgggtctgtctgaagccaagggtgtcttcctgaaacttcattatctacacgtcctatcagagaagagatgcagagagaaggaagctagagcttaaggggtgtgtgtgtgtgtgtgtgtgtgtgtgtgtgtcaggtgggtggggtggaggggagcatgaggaagatgagacaaggtcatcagaaaggagaaggatgccaggcacggtggctcacacctgtaatcccagcactttgggaggccgaagcaggtgggtcatttgaggtcaggcatttgagaccagtcctggccaacatgatgaaaccctgtctctactgaaaatacaaaaattagctgggcatggtgatgcgtgcctgtggtcccagctactcgggaggctaaggcgagagaatcacttgaacctgggaggcagaggttgcagagagccgagatcgtgccactgcactccagcctgggccacagagtgagactccatctcaaaagaaagatggagttgctgagggaaggggaatgaggttgagggaaagagaaaagaaagacttttggaagcataaacctcaatgccaga

SEQ ID NO: 179628 - DNA, 456 bp, Homo sapiens
cactgtgtccacagatcttaggcaaggattgttataaactcttgataagtttacacaacattcgtctactttttacttttataggttgtgtcattttctccaagagtcttctattagagttctgtcacggtgctttggcaaagactgagattatccttcacaatgtatttttctcactttccatttgcaaagcatgttgcttgtctacagatagaatgtattgaaaacacagtatgttaactgaagaaataggtaggaaagggattttaagaaatacctgcattaaggcttgcttctcttcttgatttttcaaatttaataagatccaactccagaaagcttgaatacagagatttagtttagaattcatgaaggaacagggcaggagtttgcatataaaatacagcattttaaatattccactttcccaccatctcagggttttagttacagact

SEQ ID NO: 179629 - DNA, 509 bp, Homo sapiens
tggattttcctacttccttcgtgccgttacagatctccctaaaaatcacctccactttgattctctcttcagccagagggctttcccagaacactgcactgcagtggtcaagccttcttccaaactcccagtgaaacatctctgaacacctaaatccttaagatagccccagtgctttgctttgtttatgcacaggtctggactccactcagtacatggcaggcagctcagtaagtgtctaaatgaatgacatctatatagtactttacctttaacaaaacacgttgataaaacttctcatttgaccctccaaacaatcctaagagctgctgctctagtttaaaaaacaactgtaaagaccactgaagttaagtgattttccataatcacacagctatgaagcagcagagccaggacccaaatctgggtattgagacatctctttgagattttgtatacaacatatttatgttttgaatcctttgtgacaaatagcaaatactagataa

SEQ ID NO: 179630 - DNA, 303 bp, Homo sapiens
atggatgaagagggagaaggggacatcagcaccaagctcacctgagggtataggaacaggtcagagaagtcctgattttctaagctaagccctgagggaagatacgcaaagtcctaagccttcaaaagtggatgatgcttttaggaaattcaggtaggtgggaaataaagagagtctaagttaaggtgctaagagtagagagatgacaagtaaatgggttcacaggaataacaagaaggtttctaactactgactgaaaatggaggatgagggagaggagtcaaggatgggtcctcatctatg

SEQ ID NO: 179631 - DNA, 263 bp, Homo sapiens
acaattcattgctgtggcagaattatccttaagttcagatctggtggctaaaataggaatttgttcatccaataagtgaggaacttctcctcacagggttgtagggacagggcagcatgagcactgtctggggagagcaggaccatgagacaggctccagaaagcacaagtagtatagcaagtactgtccaagggggcagggccaaatataaagttaacctgggaggcaggtcatgaaagacccctgtacaccttgctgaaga

SEQ ID NO: 179632 - DNA, 407 bp, Homo sapiens
gttgagaaacccaacaaatgtgtagtatttaccactgaaaccaatgtgcctagactttgtttcatgggaagatactcagttattaattcagttttttttacttgttacaggtctattcaggttttctttttcttcttgagtgagttttggtaatttctttctagaaatttgtccattttatctagtgctttaatttgttggcataaagtcgttcatggttttcccttttaatactttgatttctgtaaagtcaattgtgatgttccctctttcctttctaatattaataatttgtgtcctgccctttttgtattggtcaattcagctaaaggtttgttaactttgttgatcttttcaaataatcaacttttggttttcattgattttctctatttttctgtattctg

SEQ ID NO: 179633 - DNA, 1006 bp, Homo sapiens
  misc_feature (750)..(750): n is a, c, g, or t
  misc_feature (780)..(780): n is a, c, g, or t
  misc_feature (799)..(799): n is a, c, g, or t
  misc_feature (804)..(804): n is a, c, g, or t
  misc_feature (841)..(841): n is a, c, g, or t
  misc_feature (850)..(850): n is a, c, g, or t
  misc_feature (895)..(895): n is a, c, g, or t
  misc_feature (897)..(897): n is a, c, g, or t
  misc_feature (901)..(901): n is a, c, g, or t
atgctgcttcggatgctccaaaaaacctcactctactcgctgaaacagcagatgctagaggaaggagcggctcttcaagtagaacaaacttcaccattttgcctgttgggtactcactggagatagcaacagctctgacttcccagagtggcaacttagcctcggaaagtcttcacctgccatccagcagttcagagttcgatgaaagaattgccgcttttcaaacaaagagtggaacagcctcggagatgggaacagagagggcgatggggctgtcagaagaatggactgtgcacagccaagaggccaccacttcggcttggagcccttcctttcttcctgctttggagatgggagagctgaccacgccttctaggaagagaaattcctcaggaccagatctctcctggctgcatttctacaggacagcagcttcctctcctctcttagacctttcctcatcttctgaaagtacagagaagcttaacaactccactggcctccagagctcctcagtcagtcaaacaaagacaatgcatgttgccaccgtgttcactgatggtggcccgagaacgctgcgatctttgacggtcagtctgggacctgtgagcaagacagaaggcttccccaaggactccagaatgccacgacttcatcctcagtccttctttcaccctctgcagtggaatcgagaagaaacagtagagtaactgggaatccagggatgaggaattcattgaaccatccacngaaaatgaattggacttacgtctttgcgtnggcaaaatgattccccaanctttnggagaacatcagcttgccagcagctctgaggtgcaanatggaagtnccatgtctcagactgagactgtgtctaggtcagtcgccccatgananggtnggaggattcactgcacacgggttctgaccaacggccaacttctgcgatgtgacggaagccgggtccaatccgagggggaagctcgggggccagccgaccacggag

SEQ ID NO: 179634 - DNA, 636 bp, Homo sapiens
gcaggctgatggaaacatgatggaaaatggaaatatttcagatgagagagagtgagggtttcactgagtcgaggagtgcaggctgatggaaacatggaaaatggaaatatttcagatgagagggagggagggtttcactgagtcgaggagtgcaggctgatgggaacatgatggaaaatggaaatatttcagatgagagagtgtgagggtttcactgagtcataaagttgtggagaggaagcagtgagtagaagaatacttaagaagtagaattaataaaactttgtgccagaacaggtgtgatgggtctgggagagagctatacctggaacagtggatcagagtctctgatccagttacacagtcgtgattagaatttatctgatggttttgtattataacttgtaagacctgccagaatgctagtcccgagagtgtcagacaaggaagaagtccctgggcctcttccccttacccggcccttagatttcatggagcagccacttagcattgaattgcactaccctgagctaaacgtgtctgtgctttctaagataagagcttgatccctttcttctatcttaagacagcactcctgaaaagaatcgaagtgcacaactctcaattatttttaat

SEQ ID NO: 179635 - DNA, 280 bp, Homo sapiens
ggtttcacctgttagccaggatggtctcaatctcctgacctcgtgatccgcccacgttggcctcccaaagtgctgggattacaggcgtgagccaccacgccctgccctgttcttcttattttagtgactcatctcccttccgcacagttccagaggtcaccggtgctatctgttcctgagcctttggaggatccactggttgttcctaactttcctgctcctcactgaggattcagcttcctttgtctgttaattctatcactgcttctccatctgcttt

SEQ ID NO: 179636 - DNA, 601 bp, Homo sapiens
tgcagggtcctcactgtcactggcccgcagacacattgcggggtcctcactgtcactggcccgcagacacattgcggggtcctcattgtcactggcccgcagacacattgcggggtcctcattgtcactggcccgcagacaggaaaggaaaagtaaatccccgctgaggcaggggcagtgggatggacgatggcttcccttttcaaaactccctttcatgttgctttaatgatgtgtcgttttaaacggtactttaaccataaacagaaatcaagtaaatgagggagcgagggccgcgtggtggctgagctgcgtaaaggcagacagtgggggtcccaggcgacagattgcaaactgcaggccttggggggtccaggaggtgagtgagaccaagaccagacctggggtccttgaggcccctccagggcaggcagccccaaacccacgcctgtgccttccttcgaggctcctcccgggcaggtggcctccctaaacccacatctgtcccctcctttgacgcccctcctgtacaggaaggttgtaagggggtacgaggtcgattcgtatctggtctactgtctctttaaaaaaagtattatga

SEQ ID NO: 179637 - DNA, 621 bp, Homo sapiens
cgaaagtataatcaaagaaagaatatatacttgcgacatgttcaagatctgagaagctgggttgggggaatgacattattaccagaaggaaacatatcaccccactggtggtcagtacaataatgagcaaatacaaagaactcttgtcccaaaatatataaagatatctcaaaactccacagtaaggacaagcaagttaatttaaatgggaaaaagacctgaacacacatttgaccaaagaggatatgtagacagcaaataagcacatgagttgttattgaaatgtaaattaaacctatggtgaagattactgcacacctattagaacagctaaaataaaaaaccagtgacagcaagtgtgagcagcgttggccaacgctgctcacaaccgcctgtttctttcgcccacgcagggagtcatatagcccagaaaaaacttcccgggacttttagcctgtcccaaggaaaaaaaaattggaaacatacccacatgcaaacagctggaagagctaaaatcagaaaccactaaccgccgcgggagcgcagtgcacgaaagggtttagttcagtttatttcaagacacttcatttagtagctctttggcgtgtcgtatatttgcta

SEQ ID NO: 179638 - DNA, 289 bp, Homo sapiens
ccccttccctccctcttttactttttctttctcttctctcatgctcacattcacacttatggcctaccacagagctctggataagggaagtcccttgtaatctgtgtaatctgcttttatcacaaaatatgttccagattgggttggagacatgaggagcataaaatacaaatttaaatgtataaacacattttgcaaagtcttatccatatcttcattgtaagactatagaatttagacaattgtaggtttgttttattgtgattgcttgaatctagattaaaatttg

SEQ ID NO: 179639 - DNA, 388 bp, Homo sapiens
catgactatcaaagcatgattaatttcagccacattcataaaatagaataaaactacattagatttacaaatattaaaaattaacccattctgtaggcaagggtgagggcaaagagagactcctatataacatggacggaagtgtacactactaccatttctttggagagtaatttggaaataactgaaaaatatctttggctcagaacatctccttccaggatttttcttccaggcatgttctcatatgtgaacatgaatattgcagagttgtttctaacagcaacagactggacacaatttaaatggtcaccaagagggagatggatatataaagtgtgacatattcatacagcagaacactaaccagttattaaagcaagagagg

SEQ ID NO: 179640 - DNA, 333 bp, Homo sapiens
gtggcaaaacctgtctctaccaaaaaatacaaaaattagctgggcatggtggtgtatgccttgtaatcccagctgctggggaggctgaggcaagaaaattgcttgagcctgggaggcggaggttgcaatgagttgagatcgtgcaactgccctccagcctgggcggcagagcaagactgtctatgtatatatatatgtaaacagtttttaagaattttaagaacagttaaagctgttcttagatatttaagaacagccttaacagaaaatatgagaaactcttatgaataaagtttaggaacgttaagtataaatttataaatactaatggag

SEQ ID NO: 179641 - DNA, 693 bp, Homo sapiens
atatcacatggaagaaagctattacaaagtgcttttcaatcaatgagatgttattatgagccatagatccaatttcttttgatcaatgggtgtttttactacatttactaagagatattctatggaattcttataggatattcttccccaggctaaaggtcatgcttccctttttattcagattctatcataatgtctagttttactcctattaaaatatactttttacttttcacaatttttttatctaaagatttattgaacactatgctttaagaaattatttgaataccaactatgtgctaggaagtgaactagggtggggtattaaaattccaaactctcgaagacgttacagaattatggagaaacaaacattctcatccagcgtcattctataccacactttgattatcttttctctggaagtgagtaattcattcttctgggacaagggtgggtgcaatctacaggaagccaggagggtggagggccaggaatacctcaagagaaggcaaactttgccagattttgtcaggtttaaaaacggccaaaacatcccacacagggcacccctatgaatgatagaaaagcatacattttatttatcttggtttcccaggtctgcaagattgatatcctttatggtcttctgataatgcatcattgactctcctttgcctaagcttcaaa

SEQ ID NO: 179642 - DNA, 330 bp, Homo sapiens
aaggtgctgactttctgaattttgttaaatgccttttctgccttgttgatgtgaccacatggctcttcagccagttaatatgatatcagattagtgcaaaagtaattacggtttttgtgattactttcaatggcaaaaccacaattactttcgcagcaacctaaatagattttgttaacaattctgaaatgtcagccttggattcctggaataaatcttacttgatcttggtgtagaattctctttatataccgataaatcctatttgctgaagtttggttgaggatctgtgtgtatattcatggggaatatagtcccagtttccctttc

SEQ ID NO: 179643 - DNA, 204 bp, Homo sapiens
ccaagcgtgtttgagctgtgccgccctggagtgtggagaggtcgaggacctgagatagggagtccggagtgtgctgttcttttgcactagagtgaccttgagaaagacactgattaatccgatctgctgccttagttcacccatctgtaaagcaggcatgaaactttgcttggagctaagaaagttcttggacctttcacactt

SEQ ID NO: 179644 - DNA, 253 bp, Homo sapiens
ataagctgttttaagtcagatgttgcttgggacttaggaccttgaaaatatcttactctgagtacatacaaatctttatccccaaatgtacactctaatcccttagctctacctccctacagaagaacttttcctgactccctacagaagaacttttcttgaatttttaattatggtttccaactaaacataactaaaatcaaactttgtcttccttctcaaatgttctttccaaccaactccctatttctat

SEQ ID NO: 179645 - DNA, 169 bp, Homo sapiens
aactgtctgaatttagatcctagctctaccacttaaaaataataagcaaggtatttaacatctcaaggtctcagggactccatctggaaaaagcttaataagagcacctaccctcacaggattatggtgaagactaaatccatgtaatgcacatagtgtagcgcctggc

SEQ ID NO: 179646 - DNA, 310 bp, Homo sapiens
ttgtcagtgacaactgaacaagaacttttagaagcagttggctgtccattaatggcagatttcaaggctatgcaaattgtgccagttcagccctgcattttttcgatattatcatatcaattgagtcagttcagagtagacaaagcaaggttatgggaaccacctagagcatcatgcaccatttaacatcaatgcagcatacatgaacatctgcaacttcgatcttattaacagaggatagaatggaaggcagtaaacagctttcttcatcacttaattgcaaaatagtatttcctaatgtttgcattgt

SEQ ID NO: 179647 - DNA, 555 bp, Homo sapiens
tgagggtgaggagaagtgaggtcaggtgaggctgggtttccaggcccttcagcagcacatggccgtttgaagtgcatctcaggaggcaagggatccttccctgggttcaagcaggagaaacctggggttcgattagcagctgttaggacctccatgttgtcatattggtcattcggggcctgttgttgaacaggaacagctgcattgctggtgggggctgtaccatggaggagagggggagctgtcaatcaaccaccattgcagactctgcagcacccgagtggcgacagagatggtgtggtgagaggttggtgggactgctgaggtgcccaggaccagaggggctcagcacagaggggtccaggccgggtctgtccccccaggacagagacgcagtttgggtctaggtgggggtctgtccatcagccttgggcttgtggctggggatggctgagatttgactgttgtttctttgcagtcttggggtttgggagtagattttgaatttgagcaggtctagagacaagaagttttcaagagtttcagaaaaaggag

SEQ ID NO: 179648 - DNA, 324 bp, Homo sapiens
tgtgcaggctgacagcacgagtccctccctgcacctctcagctctttttgttgccagggcctccctgagcacttgaagttgctgctgcaagagctgtgagggttagatcaggccctgtagctccctgagcttcctcaggcagggcctcccactgttcttggttcccttcctgggcctgaggactccccttaccccttccacacccactgctgcacctgccacaccctcctcctggcctagcctgtgttcttctctatgggggtccaggactactttctccatggtggtggctcatagccagggctgcgtaaatgacctctaagg

SEQ ID NO: 179649 - DNA, 808 bp, Homo sapiens
gtggtgaaggggcaggaaacttggaggaaaagcagaaggattaaatcattattttttacagttgcttcttacccaagccccaagctgtattctgacccagcagcagatacttccagccaccatgtacacatcctggaagagaagcttcctatatttaaggattctctattttgatttttttttggtttgttttcattgttgtaatttttagctagcttcagaaagctgtatttccctccatagtttatgcaggtgttgtttgaagaacagaacctgtgtctttttgccatcttggcacaggtggctgtggaaggagcccttgctcagtcattgcaacctaagatccattttctttgtgccttttcagtgacttaagtggcatctccaaacaactatgcttttatcactcatatttctttgaaaggattatgtgagaatttctaagtcccacctgctaaaatatgaatcacaacccttgctacagctgtacaaatgattgtgctgtatgtgaacttccctggagcacaggaatcccaggaggattatatgccttcatggcctcatgcacctaaacacactacgcagccatttattcttgggtgtcactatcgtctgtaaatacagttgtctgtctaactactttcctagtgactccccagatgagtatagtcttgttccactgatcatagggtttcccaaagattttctctatggtatacgctctatattcattgagatttaaaacaaacaggctattcttatcattgattttttttttctgttctgtacacctaaagcaagaaacaca

SEQ ID NO: 179650 - DNA, 239 bp, Homo sapiens
tttttcaagttgattgttttgtatttccttaggtagatgtatgtatgtactgagtgcctacaaactccctggatgatttacctttatgacaagggaggcaggaggcctggaaggatgggaggtcaggcgggactttccgaaactgccccagtcatttacatcaatgtgtggattaaatccataacttaaagtgagaagaaagtcaatgtaaaaatattgtgaaataatttatataaata

SEQ ID NO: 179651 - DNA, 187 bp, Homo sapiens
tgccaaatcacatgaaaacctcaataataaggtgttgactacattgcaatggaagttgtcttagaaacttgcttttcaagatgagaacattctatacttataggttcatttttttaatcttatttttgttatacacacacatccaaacttttgtttcttacaattcctttttaggaaaaatctatct

SEQ ID NO: 179652 - DNA, 757 bp, Homo sapiens
caaagcaattattttagaatgcagtgttagaatagctcttatattctggcacttagtttataataatatgatgtttgtcttagagaaaatattgttttgtgacctggatatattagaagagatgttatatgaatagccatctttgcatgctgtaaagatggcgagtgtaagagttaccaagaaaagaaacaacaaatgcccaacaaatacatactacattttaaaataatgtagtaatctgactctgttctgggtttgaggaagtcatttaaaaaaataaaacataagtagcaaaggtataacaataaaaaatgattcatcatatttagctttactccattttacattaataaaaaaggttcccaggttgaatggaattagtctaccaaactgggtttcgcatcctttataatagtctgattccatttttattcagattaaataaggtacaattttgggtccagtactcaggagccatgaaggtcagctaatacaattttaggatgtctggtttgtataacactaatatatactatgtaataaatgttaaaaacacctatttgtcttcagctatgtacccaacaacctatagaattctggaagaatgaaagaagagaaatacctgtatctgacttaaaattgtgtagtataagttgagggagatattgatggaaatgacagctagaagagacgaaataaaatgaggctataagtgatctgagaccatagaagaaaaatcttctaggtcattctagaa

SEQ ID NO: 179653 - DNA, 645 bp, Homo sapiens
gctgggtgtggaagagtggaggttggcataagaaaggctgtccaggcaacgtttagcacatgcagtatacctggcatagtcaaggaaccaaagataattcaaagtagaaacgggtctggcaagtgaggcaagggccatgtctaatggtcttccaggagatttgacttcgtgaaggtgatggggaaccagaaaataccatgtagcaactaaaattccttcatagataagggcactaagactttgatgcccatggtaatacagtagcttgggtagaacgggggttagaacgtaggtctcccttggactccggaactcacatctctcctaactaggattgcctcagccaggaaatgaggaggggaagaagtgagagaaggcaaagagtttaactttgggtgcgtttgagataaaagagaagacagaagcagcaaccagcagagtcataaagtctatgggaggagttttaaaatggacagagaagttaacgataaatgccgaggtgagggcgagattaaaacagctgccagtcgtatttagtaacaagcccttcataattgtagccagtgagctcttcctgggctgttgtaggtagaggcctcagcactggaggtggatggacatcgtgtgtgtagcccgcattgagta

SEQ ID NO: 179654 - DNA, 621 bp, Homo sapiens
tccaagtgtttgcatgtgtatgtgtgagagtttgtatgtgagtgggggtgggtgtgaatgtgtgtacatgcgtgagggagtggggtggctgtgaagagtgtgagagtgcatgtgtgttgtgcgtgcacacacgcttcaggaggatggtttccactgagagagtctggggatgagtggagagaaagttccggtgggatcagaaggttcctgcctctcagactgcaagtttcagccctgtgtatttaatacatttcacttcctgtatgaaatacacacacattcgtgataaatagctgaacaacctctgctggtggacggctcccgggtttgggggatttttaaaatcagaaactgaggctcggctgggcgcggtggctcacatctgtaatcccagcactttgggaggccgaggcagatggattccgaggtcaggagttcgagaccagcctgaccaacatggtgaaaccccgtctctactaaaaatacaaaaattagctgggcgtggtggcacgcacctgtaatcaagcaggagaatcgcgtgaacccgggaggtagaggttgcagtgagccaagattacgccattgcactccagcctgggcaacagagcgagactccgtctc

SEQ ID NO: 179655 - DNA, 732 bp, Homo sapiens
cctttttgtgtggtgtgtttttttatgttttgttttgttttttaactaagcttgaaccaaagtcaatttttagcaagctgctgtactaatggactagttgataacgtgcagttcagacacatcgaggagatagatgctactgacaatttctttttcatttgtctttattaattttatatgaaagttgctgcttgtttttaatcttttatgttggtaaattgtgatatcctctgggcagacattaacttgatgtttaactagtttattaggttggtgtgtaaatagaatgacaatgtcaattactaatttctctcctctccattcactttttctctgttgtagttaaatttaatcttctatcctgacttgacatctctacctttagtctgtggaaatgattttagggctatcagtaatgctgtagctgcccataataatgagtccctcccttgggagtggtgaaacttagaaggaaggattcagggagggaaatgctggtacccagtatactggattagaagttatagcattaatttctcaaaattgctaccaaaggaagtgtggagtcccaagggactcaagctcagtgaggtaagacaaagggcaaggaaaggctgtttgggtggtttttttttccccacatatggtttagaaaatgatccctttcccaaacaaaactcaccaacagactttaatattagaaaagatactaagctttaaatgtcaatacag

SEQ ID NO: 179656 - DNA, 1026 bp, Homo sapiens
cctgtgctctggggaccgctgcatcctcaggctgtggactaggaagctgagggtcacccagacaagaggaggtgctggaggtcacacagtgaatatgcctcgctggccttcctgtctggcgtgtcttcctctgcccccatccagggaggatcacctgagcccaggaggtcaaggcttcagtgagctgcgatctcactgtcaggcctctgagcccaagctaagccatggcatccccggtgacttgcacgtatacgcccagatggcctgaagtaactgaagaatcacaaaagaagtgaaaatgccctgccccgccttaactgatgacattccaccacaaaagaagtgaaaatggccggtccttgccttaactgatgacattgtcttgtgaaattccttctcctggctcaaaaagctcctccactgagcaccttgtgaccccccactcctgcccgccagagaacaatccctttgtaattttcctttacctacccaaatcctataaaacggccccacccttacctcccttcgctgactctcttttcggactcagcccgcctgcacccaggtgattaaaagctttactgctcacacaaagcctgtttggtggtctcttgtgagctgcgatctcaccactgcactccagcctgggcagcagagcaagaccctgtctctaataaatcaataaacatcctctcagcagttctatgagtgggtgctacttttatccccacttcacagatggagacactgagctcatgcaggagagactcctggcagcaagttaggggcaaggcataaaccaagatctcagccccatcagcgggtaaggactggcgcaggaggcagtcctggcattttcaggcccactcccttcagaaagtcaagtgtgggctcctaccaattgacaatgccagggcctagtaggaaagaatacatgggccaggaactgaacgttgcgaggaagaaaatacagaaggcgctgggcgtggtggctcacacctgtaatcccaagagtttgggaggcca

SEQ ID NO: 179657 - DNA, 507 bp, Homo sapiens
cccgaacatgtagaggctaatttttttcgtatttttagtagagacagggtttcaccatgttggttatgctgatctcgaactcctgacctcgtgatccacctgcctagggctcccaatgtgctgggattacagatgtgtgtcaccacgcctggctagtttttatatttttagtagtgatgggctttccccatgttggccaggttggtcttgaactcctgacttcaagtcatccacctgcctcggcctcccagagtgctgggattacaggtgtgagccaccgcgttgccagttatttacattctaagtgtcttttctccattacatcaggctttatttatcctctttttcctgtaatgcttagcacattgagtggataattagtaaaaaattttttaaaggagagtggccagattcattcaacaaatgtttattaaatgtcacaatgttcacagcatgattctaggccctagaattggaaggtcgcctcaaaaacatgaaacagcaggt

SEQ ID NO: 179658 - DNA, 523 bp, Homo sapiens
actacataaaaaaacaagttacaaaatagtatgtgttatataatcttatttacgtaaaaacataaatatgggttttttaaatcaattacttaaattttaaatttttttaggagacagattcttgctctgccatccaggctggagtgctgtggcacaatcatagctcatacagcctcaactcctgggctcaagtgatcatcctccctcaacctcccaagtagctgggactacaggcacatgccaccacacccagctaattttttttttttttttttaagtttttgcgacagtctccactgtattgtctaggctggtcttaaactcctggcctcaagtgatcctcccaccttggcctcccaaaatgctgggattgcaggtgtgagccaccatgttcagccatcagttagttttctaaacaaacaaacaaaaaacctcagcagcaacaacaacagatttccttgtagtttactttgttcatttataacttatgctgcccctatcatccaaggctgttattaaaaaa

SEQ ID NO: 179659 - DNA, 396 bp, Homo sapiens
agataggttatgcattttcacattcatttcattcactgtttgaaacgaaagaaattgatctataatgaattcttcctgatttatttatagaaaagacaattctgctacactctttaggagcataatattcctagtgatagagcatttcatgttaaaatgaattatttttgaccaagtgaggtacatttctattgatacaagtcatgcccctaaaagatagatgttatacagagtagcagtgaattaagaaatgtttcctctaaaagataaatataaaatttccaccatttgataccctaaacagtttaattttaattatagaatgttcatctacaaagtatctagaggaggcttttgctttattccatttctgccaaacaagagaaaatgtactga

SEQ ID NO: 179660 - DNA, 610 bp, Homo sapiens
ctcctcgaatcgacggtttctctctctttcttttgaattgagacagagtctcactctgtcatccaggccagatggagtgcagtggcatgatctcggatcactgcaacctctgcctcctgggttcaagcaattctcctgcctcagcctcctgagtagctgggatcacaggtgcctgccaccacacccagcaatttctgtatttttagtagagatggggtctcaccatgttggccaggctggtctcaaactcctgacctcatgatccgtccgcctcggcctcaaaaagtgctgggattacaggcatgagccaccgtgccagcccataactgcctgtttagaaaattaactttgctacttcattcaacctcaggggacaagaactacaaagagatcagtagagcttaaaccccattaatggagtctctctgaatctattctggttgggggatggaaggagtgtctgattcaaagtaataatttaaaagacaccttaacaagagagattactgaaagagaggaagaaatggatccccaggagccttgtgagatgggaacaaggctactattcacttatctctgaaatgctacacaacactgagaaggacctggg

SEQ ID NO: 179661 - DNA, 663 bp, Homo sapiens
agggcagagtgagccgtgtctctgtttgtcacgctctgcagggctggcaggatctacgcattgtgtatctttcagtgttctcactttcagtatttgagtaaatgagatggagttactgctctgttctgattgggtagtgcctgctgggaagaactgcccctgaagccatcggggcctgggtgtgccttggggaagaggtggcacctccataatttgtcgttggcccaattctacgtcaagcagcccaggtgccgactccagatcagcggcttagttttcctgagggacagaccgcagccatatcagctaccaaacaaagaaaatctaaaatatgaaacaatactctcaaattaagtaagttgtcttcagaacagccatgtgtgagctcgccactgtacacaaagcaggtggcttttcttcctctgagaaactccatggagggctgatcttagtgttcagtcacctgatggtgatatccccgggtatacaaggccgcagcttcccagacagatcatgaaatttgaatgcaaaaattaacaaaacattcaagtatgtaaatcagcgtatgattcatggggatgccagcgctcctccgctgaagtatttcagagcttacgttctcgatgatcacgtgttgctctctcccttgttctccttgcttcc

SEQ ID NO: 179662 - DNA, 235 bp, Homo sapiens
aatcagatacttaaatctagggtttcttttggaaagactcagggagaagtttgggacttgaaggtgagaacacattaactgtaatttcaaaccattaatgcttatgtttagttagtcaaatatgaattttacttatagttctggatgcttctaaaatatggtatttataaagtcaaatttgtttattactgcagtttactggggaaggatttcaacatttcacaaatgagtatgg

SEQ ID NO: 179663 - DNA, 362 bp, Homo sapiens
aaacttcctctcactcccatggattgagaaacagtatgattagattatagttattattttccttatgaaagacagaaagggggctgggtacgggggctcacacctgtaatcccagcactttggggggctgaggtgggcaaatcatgaggtcaggagtttgagaccagactggccaacatggtgaaaccccatctctactaaaaatacaaaaaactagccgggtgtggtggcgtgagcctgtaatcccagctactagggaggctgaggcaggagaatcgcttgaacacaggaagcagaggttgcagtgagccaagatcgagccatggcactccagctcgggtgacagtgcgagactccgtctc

SEQ ID NO: 179664 - DNA, 552 bp, Homo sapiens
cgaacatctcgtggctttgaatgcagccactctatctgccaacttgaacacagttttgttctcccctgaggtgacagattgaatatgtcacacaagtaagcaagtttttttttttttttcgagagagtctcgctctcttgcccaggctggagtgcagtgaaaaatacagataaaaaagaagcagagctgggcacagtggctcatgcctgtaattctagctactcaggaggctggcaggagaatcacttgaacccggagggcagaggttgaagtgagccgagttcacaccactgcactccagcctgggtgacagaaactctgtctcaaaaaaaaaaaaaaaagaaatcatagtttactttagggaattctagagattcttatgaaatatttgtttttatgtatgtagagtttaaacatgtaaattacattaaagatagtatactccacccttatcccagtgaaatgatttcatatttttcttattatggaaacaattattacatttctttgctcctaaagaaaataaacacttgagaccacataccccacata

SEQ ID NO: 179665 - DNA, 302 bp, Homo sapiens
gaggcatctgctcagtccgggtatgggaaggtggagaatctggcttgagacctttctgaagaaaggagaaacaagtattacaccaagaatcttagctggcatgacagattgcaacagtaaaaactgaacccaaaacatagagctgattcttcctagctgctgattgtccccatgggacttttgctgagtttccagaagaagcagtacaggaagctggaggtggggttagaaaggcagagagagatttccattaactcctggtgcttaaaatccaaagtcaagctagaagaaaaagcctataa

SEQ ID NO: 179666 - DNA, 910 bp, Homo sapiens
  misc_feature (3)..(3): n is a, c, g, or t
  misc_feature (7)..(8): n is a, c, g, or t
ggnacannatcatcaactgggcacaaagtaagggactctgtgtttctgaatcagaagctaccactacatgccagatttgtgacctctgccaaaagttagcctatttgtctcatggtgaaagaggccatattgcactgagtgttgactggctgcagagtgttgactggctcctggtaaattggtgacatcagacctttgacctcttccaagctattccactggtatctcattcctgttgactttttctcaggtaatggttttgctgttctagtctgatcagccaattgtggccacatcattgtggcccttgaaactaatctgtgtcatgattttggctttctggatggtgataatactgcattttttagtgcaaaaactcatcaacaatgggcttatagtcaaagtatttggtagccaattcattatcttcagactggtggtaccattgagagatggaataaacttttaattaaaaaacagcttaattgagatgtaattcacatatcataaaattcaccctttggaaggtttttagtttattcacagagttgtgcaaccatcctacagtatgtagtctttgtggctggcttccttcacttagcaaaatgttttcaaagtttatccatgtgggccgggcgcggtggctcacacctgtagtcccagcactgtgggaggccgaggtgggcagatcatgaggtcaggagatcaagaccatcctggctagcgtggtgaaaccccatctctactaaaaatacaaaaaattagccgggcatggtggtgggtgcctgtagtcccagctacttgggaggctgaggcaggagaatggggtgaacccaggaggcagagctttcagtgagctgagatcgcgccattgtactccagcctgggcaacagagcgagactctgtatc

SEQ ID NO: 179667 - DNA, 501 bp, Homo sapiens
tgctttagaaggccaagacaggtttctatgtatttgtggtgcttggggaagttgtcagctgacctcttctatgttcccatcatccatggcacctaacacattggcttgtacatagttggtcctaattaaatattaataaatggctgactggcaatcaataaaagttatacacagctctatttgattcattacacatagtcagtggattctttcccatttattgctttttattttgtaagatcaaaaggatctgtaatctgagacactgtaagcagttgtgttgcttttcatcttcaggcctgcacttcctataaagccagatgctgtgaatattgacccttttcacagctatgcttagaaactgatatatatatacagtttgcatgtgcagaaataatgttctacttcaaaagacagcaaagaagtgcctttctggtccatatttagtttgttttgttttctctgtagttgttgaggcttactccttcccccgacagttga

SEQ ID NO: 179668 - DNA, 274 bp, Homo sapiens
gtttcctacctgtgctgactggtcagtgaaccagacctgcagatgaaagaaggatgaacccgtaactgatgtcaaagccctcttggaggttttttcttccagcatttgagtcaattcagccagccctcgctactctcttggcaaatgaactctacctgcacattagtagatacataaaagaaagagaaaaaagatagggagggaagctacagactcatctatgttagctgaacattttcaaaggaccttagcacaagatacaaaacaaaaatgc

SEQ ID NO: 179669 - DNA, 387 bp, Homo sapiens
cgctgcatggtacagggtttcctgagaaaaggcgcccatgtctgccccgtctcaggcaccacccaaaagtttggaactctcagggatctctgagcagggcctcagagattgattggggttggatcagtttagcccagttagcgatgcagacgttcctggaatctggcctccagggtgacaaaggagagcttttggcctggctcccagcggccgccttccttctgagtcatcccctaggacaagagtcagtttccgacaaagctgcggctctgacaaggggcccatctcctgttgactccaaagccgctgacccacacccctggagggaattgtcccagaggttaaggactcacagtgaggacacaacagtatgctcacaggtcctat

SEQ ID NO: 179670 - DNA, 307 bp, Homo sapiens
acaggaaaatgcacaaattataaatgtacagcttaatgaatgtttacaaatttaacacccatgtaatcgccaaccagaataagaaatagatcactggaaccgtagaaacaagcgtgagtttctttccccactgccttacaccctcgaaagtaatcattattctggcttctaacatcatatattagttttgcctgttattgtgctttataaaatggaatcatatagcatgtactgttttgtatatagcttgttttgtgtaactttgtgtcagtgagatacatgttgcaacgtgtatggtatgttctca

SEQ ID NO: 179671 - DNA, 717 bp, Homo sapiens
tgtatgaatatgtgtgtgtacacacatatactaaacattctgtcaatcagatttttcatgaattcagactagcctactcttccaatccattatttttaaaatgcatgttcagaatacattgtttcattttttgttttagtttgatttcctcacagcttggtgtaagtgaatggcacacaaagcatcctgccttccagagacctattattatcaaacatctgcattgtcatactaaattttagtaagttctaaaccaaaaagcattcaaggatagattcaaatggggatctaacttagatgcagaagtgggctgaatggtatgtgtctctgtgtaggtcataattaggctgaaaaaataatcagtagagttaactaggcaaagagagagagagagagaaataaatgtctaggcagaggcaaaagcatgtgaataccctgaggtgagaaagatattggactgttcaaaaaaccaaagaacacaggtgtgcaggagtgaagcatgatgagaacgcagaggtgggcaggaaccagctgaacttgtgggcctggctgtttatgttaagatacttggattttattcaagaaaaatcattctggctgctgtgaagatactgaattagaggaaatcaattgggaataccagttaagatataaaattatcatagttcaaacaagagatgatggtggcttaaataagggtggtggcagtggagagga

SEQ ID NO: 179672 - DNA, 316 bp, Homo sapiens
ggcagataggatccatacgttataatccaagattaatgatagctggactatgagaaagtgaaggtagacatagttaattaagaagagtaacatccatagcattatatttgacatagttacagttgatagatttatagacttctagagttcaaggaaccgaaaattaatctaattcttttctccccaactaggtgaggaaagtctgctggttcatcatgactattccttggcaattaagagctgagtatataaccaacgaaatccatagatccaaacaagttccctaaccatttagcatcccctatcaaaagtataa

SEQ ID NO: 179673 - DNA, 435 bp, Homo sapiens
caacccccttttccttacagtcaatcactgtccagcccccagatcccagcctcaaaatctctcccttaaatccatccatggctgcaaggctagtatgggagacagctttgaacctgactcctatcgccttgcttggctgcctggcaataaactttctcactgcaaaaacacagtgctttggtgtttggctttccattgcttgtgtgcagacagacacagtttggtttggtcacaacgtgttagtaattttcagcactttattctttgccctttcccatattttaactctatactttccatgagctacttcccaggggtatgctcatccaattgccaaacttaactgctctaactattctatctcctgcatgctaatggatctcaactctgcatttctcaggctctaagctacagcttcaatcaccttctcaatat

SEQ ID NO: 179674 - DNA, 688 bp, Homo sapiens
  misc_feature (382)..(382): n is a, c, g, or t
  misc_feature (395)..(395): n is a, c, g, or t
  misc_feature (483)..(483): n is a, c, g, or t
  misc_feature (528)..(528): n is a, c, g, or t
  misc_feature (545)..(545): n is a, c, g, or t
  misc_feature (603)..(603): n is a, c, g, or t
  misc_feature (648)..(648): n is a, c, g, or t
  misc_feature (650)..(650): n is a, c, g, or t
  misc_feature (653)..(653): n is a, c, g, or t
  misc_feature (663)..(663): n is a, c, g, or t
cagcagcagcggcgtggtcagagcgagcttcggagaagcagtggtgggttccatgtgatggtggagtaggaggcaggtctccgcggtcatttaccatgctgtcctccaggttcaacagtatggctccaaatgatgaaatttcattctgattttctggctgaagactattctctttgtgtatgtccaccacagttactttatcccttcatctgtggatgggcagtctcgctgttttgcccaggctggagtgcagtggcatgatctcagctcacagcaagctctgcttcctgggttcacgccattctcctgcctcagcctcctgagtagctgggattacaggcacccgccaccatgcccaggaaagaaaaaagaagaaaaaaanctccatacgagantgggtctaaaggaacttcccaaactccatgattttgcaggaaacaagataaagctggttggtggagaatttgaactggagatgaactntattatccaggatgctgagagtataatacgcatgacagagctttnagagcactgtgatgtancatgtcaagcagaaatagggagcatgttacaggcattctatgaaaaaagtgtttggantgtacagactagcaacagaaggttgggctaatttaaacaagtatngntgnaaatgagtgntgtaatgacatgagaagaggtatgg

SEQ ID NO: 179675 - DNA, 905 bp, Homo sapiens
  misc_feature (599)..(599): n is a, c, g, or t
  misc_feature (612)..(612): n is a, c, g, or t
  misc_feature (700)..(700): n is a, c, g, or t
  misc_feature (745)..(745): n is a, c, g, or t
  misc_feature (762)..(762): n is a, c, g, or t
  misc_feature (820)..(820): n is a, c, g, or t
  misc_feature (865)..(865): n is a, c, g, or t
  misc_feature (867)..(867): n is a, c, g, or t
  misc_feature (870)..(870): n is a, c, g, or t
  misc_feature (880)..(880): n is a, c, g, or t
cagcagcagcggcgtggtcagagcgagcttcggagaagcagtggtgggttccatgtgatggtggagtaggaggcaggtctccgcggtcatttaccatgctgtcctccaggttcaacagtatggctccaaatgatgaaatttcattctgattttctggctgaagactattctctttgtgtatgtccaccacagttactttatcccttcatctgtggatgggcaggtaagtttattccttatcttggcgaatgtgaatagtgctgcagtccacataggatggctgatacctcttgcataaactgatttctttggcactgaaagtatacttagtagtagaattgttagatgaagtggtagttgtaggtttaatttttggaggaacctcccactggtttctgtagtatgtatactaattaacattcttttttttttggatggagtctcgctgttttgcccaggctggagtgcagtggcatgatctcagctcacagcaagctctgcttcctgggttcacgccattctcctgcctcagcctcctgagtagctgggattacaggcacccgccaccatgcccaggaaagaaaaaagaagaaaaaaanctccatacgagantgggtctaaaggaacttcccaaactccatgattttgcaggaaacaagataaagctggttggtggagaatttgaactggagatgaactntattatccaggatgctgagagtataatacgcatgacagagctttnagagcactgtgatgtancatgtcaagcagaaatagggagcatgttacaggcattctatgaaaaaagtgtttggantgtacagactagcaacagaaggttgggctaatttaaacaagtatngntgnaaatgagtgntgtaatgacatgagaagaggtatgg

SEQ ID NO: 179676 - DNA, 684 bp, Homo sapiens
gctcctgctgcctcgtttccccagagacccagtccaagctcttgcaagagtgctctctggggttcatgttttataaacgcagagtgaaccccaggtctagcgccagtgtgcccattctgtcctgagatcatttatttctagtcaccgaagcgttcccgcctcgttcctttattcactcactcattcagcaaccctgaacaccgccagtgcactgagccccaagctggatgcgggaactcagcggtgaaacatgattcccttgccttgcggcagccccgtgctcacagagaggacttgagtttcgggtgccagttgtctctgccaagttaggagtcagggactgacctctgtgacccccacaagctgcagccctggctgtgttttccacactggcctggggcccatgttcattggctgaggaacctcttggacctcatctctgaggagcaccgcctggggccctgggtgtgtgtcccgcagcatggcgcggggtgtgcacgtgcgtgtgtgcgctcacacgagcaccggctgccgcctccccgcctgtctccaggtgccatgtgtggaggggagaggctgggcgtcgctgcctgcagcactggctctgagccgttggccaagcctctccattttccttccccatcactctgtagaccctcctcactctttctgttcctgttctgt

SEQ ID NO: 179677 - DNA, 261 bp, Homo sapiens
ttccccagtggcatagagaagatatactgttcaacctaagctttgtaatgaacaaggtaatattttacaccaacccttggagtgcattactaacagtaaacaaaacaaaatcattcacttcttttttggtaaagaatgtgcactgtggttaaattcacaggcatcccacagcttcatgcttcagggttgcaccctaaacatggaatcatacaaataagaagaaacaattgtcactgtgaaaaattcaatcttcaatataca

SEQ ID NO: 179678 - DNA, 871 bp, Homo sapiens
ctggagccctgtgcagtgaagtagcaggcagtcaaggatattgaaaggtgtgcaggctgtcccagaccccacgcccagaaggccattcagagaccaaagaacatgactaactccaaaatgaagataaaaactacagttcagctatgaatgttttccgtctaaacactcaacaccatactactactttgtgctgtttacaatttcctagcctgctattaaataaaaggttccataaaagggggcaacagcccagaaaacaaaccatattgttgaagttgaacctctgcccatcccagaaaaccagcttgctggagaaacctgtgccatgtcccactgcagcctgggggtgccacggtgtgtgtctggtgtctatgcatactgtatccctagcacctcatggcactgggcatctaacaagagcccagggactagagacaggttcccgcatctctctcacggatgcacttgctgttgctagctcatgtggcctcctgaccctcgatttcttctatcaatacactaggctttctctgccgggaataccttgttctccaagacactccatctggctaaaatctttccttcaaaaggctttccgtgtgtcctccatttttgctaatttcaagcctgccttgggtggctttcccaactgttgctgtggccagaatttgccttatcacaatcacagggtatctacttaatgctgagaaactagatgctttccccctgcatctggaacaagacaagcatattcttactactctttttcaatcatacttcaagtccgaactaatgtaataagacaagaaaaggaaatgagagaggcacagattgggaaggaagaaataaaactgcctttgtgggggctgcg

SEQ ID NO: 179679 - DNA, 572 bp, Homo sapiens
ctggagccctgtgcagtgaagtagcaggcagtcaaggatattgaaaggtgtgcaggctgtcccagaccccacgcccagaaggccattcagagaccaaagaacatgactaactccaaaatgaagataaaaactacagttcagctatgaatgttttccgtctaaacactcaacaccatactactactttgtgctgtttacaatttcctagcctgctattaaataaaaggttccataaaagggggcaacagcccagaaaacaaaccatattgttgaagttgaacctctgcccatcccagaaaaccagcttgctggagaaacctgtgccatgtcccactgcagcctgggggtgccacggtgtgtgtctggtgtctatgcatactgtatccctagcacctcatggcactgggcatctaacaagagcccagggactagagacaggttcccgcatctctctcacggatgcacttgctgttgctagctcatgtggccactcaatacctgtgtagacacagttaatgtttctggttatgacagataagtttgctcaaaaaatgtggatgaaccggtaccgg

SEQ ID NO: 179680 - DNA, 381 bp, Homo sapiens
gggaagcaggcacacttggtgtaactttacagaaatacatcataatttctgtctgacatttttgctttttcattcctctaaaaatatttccagagcaggatgcagtggcacacctgtaatcccagcttcttgagaggatcactcgagttctggagttcgaggctgcactttgctgtggttgtgcctttgactagccagtgccctccagcctgggaaacatagcaagaccccatctcttttaagaaagtgtttctggccaggtgtggtggctcatgcctgtaatcccagcactttgggaggccgaggtgggcagatcacctgaggtcagcagttcaagaacatcagggctaacatggcaaaactccttctctactaaaaata

SEQ ID NO: 179681 - DNA, 166 bp, Homo sapiens
ttcctcagcaggtctctgagtggagtaggcagggccatggattggtactcccaccaagtgaaaggaagagcaaagggcagggcagttcccaaatggaaaaaaatcttgggcagacagaataaatgacagatatctgctaaaagagaaaccagtttccaatatggaa

SEQ ID NO: 179682 - DNA, 283 bp, Homo sapiens
gaagtctgagccagtgtttcatcatcgttcttgctctgcctcggtctgtacatctgtgaaatgggactccctctctgttgtggaggccctggggacagctgggaggactggaggggtggtggggaggttgtggtccttattagacattcagatacccaggtcccaaatctggtccagccctggtaatcctgatgcagagggtccacaaccacatttgggaaatgttgacctaatgcacagcaggaaagcactttcatttgctaagaagtttccatatgaaggg

SEQ ID NO: 179683 - DNA, 221 bp, Homo sapiens
tggcctgacctagagttaccacgtagcccacctggacatgggggtctcactatgtgttgcccaggctggtcttgaactcctggcctcaagtgattctcccacctcggccttccaaagttctgggattataggtgtgagccactcactgcgcctgagctgttttgctttcgggaaaattttctctgatgcaaccgaaatcttcatgagagcaggggacactt

SEQ ID NO: 179684 - DNA, 136 bp, Homo sapiens
aaaccacctcttctctgagctaccgtaacactgccttctgggtggtcatgtcatccacatgggtacccatgtcgtccactctctgtttcaggtaacagatctagttgtcctgaccacctaacagtcacctaccttg

SEQ ID NO: 179685 - DNA, 443 bp, Homo sapiens
tctaaaaagcaatctacagcatttcaagtatgtgggatgctttttcatgtttaattcgtaaggaagaattagcatgtaaataggtaattaagaaaaggcataaaaggctatgattgaaactaatacatttagaataaaaataaaagttttttcctatttcttgcagcatagagaaataactaggatagaacatttatatatctgagaaagaaatcctgaggctgtgaatttgtaagttgtgtttccttacagcttacaatttcccctttaaaacacaggaagaaaattaaatgatcccttcaaaatctcagtaagactgaatgtacatctgatgtgtagcaaatgtcattacattgataggcagatacatgtgactggctgtgctcattcattccatacaggacttgctttcttccataccagttttgcaggacctgtgattc

SEQ ID NO: 179686 - DNA, 555 bp, Homo sapiens
tgtcaccaagccactctttggggatctgctccatgacctaaacacctcccacttcaggactcacctctaacactgggaatcaagtttcaacatgagatttggaggggactattatccaaactatatcagtggtgtagcttaaaaatccatgctgtcttagacttaaagaatcacaactacctagaaaaaagggtaattaggagaaatcagagtaattacttatgattgggaaattataaaagattccatagagtggacatttaattgtccctcaaagatgcagaggaatatgaagcacattgtaagtattaataaatgagattcccacagaacctctggtcagtaaaaacaaacatcagccaaagagcatcggtaaatgccaataagaactcctgcataagaattgatttgcaagtttagaatcctattaatcaaaagaccaagaagccacttacctaaattactgtttttatagattgtttctttgcatcctgtttgttgtgtcaacaaaacttttctcccagcctggcacgatggtccacacctgtaatccct

SEQ ID NO: 179687 - DNA, 467 bp, Homo sapiens
ggacagtgccagggagatttacacaaagctacatccagccctaccacgaagatcacgggcacacggtcacaatcgctcctgtgctcatacttgacctgcgctttggaggaactcaagataatttactggggatatattttactttcagaggcatctggtcatctctaagagttgccttccttaaaatgtcctcttctggaatacggggcgaggtgcttggtgcttacaagctgaggtcagcatttttttgggagatggaacctgaggtcaatttaggagcaggggtctcatcctctgctaaccagctccatgacttcggataaccctcttacctttcctgagcctcagtttcttctgtaaagagacaggtgctaatcacctaacagctcataggttctgtactcatatccaaagatggtaaaggtgaaactgttttgtaaagaaagaggatattcagaatgttagtt

SEQ ID NO: 179688 - DNA, 247 bp, Homo sapiens
gtcattctccactaaaaggaaccagggatccctaaatggctgattacagaaccaaggcatggaaagtacaagatgagccaggaacaggttcttgtgccaaaaagtacaaagttgttctcaaagagtgatggggatgtaccataagaacacagaagccagcttgtacaactctcattggccatataaagaacaatttgaacatcaaaataaataatgctatagtctgaatgtgtatgtcccctcccaa

SEQ ID NO: 179689 - DNA, 233 bp, Homo sapiens
gcctatctatagtaggagaaggctgtggtaatggtaatttttaatgttactgccttttaataaaattctttccttaaaaatatctcacagacttatttttctgaaaaagcttgactcaaatacatttgtgttatgataaaatttataaaccaataatctttttttttcttttttttgagatggagtcttgctctgtcacccaggctggagtgcagtggctcaatctctgctca

SEQ ID NO: 179690 - DNA, 147 bp, Homo sapiens
gcagactctcctccctcctctgaggagcacacctcagctgccctacatattctctgctacaactcttctcctcatcatgtaattaagtctccattaattcaaacactctgtaagggtttggcattcacttgtttgtaacttcacata

SEQ ID NO: 179691 - DNA, 364 bp, Homo sapiens
tggtgatcctagtaaaagacagcaacattgatgggggagagcggcacttctgttaagaagtatagtgcagcaatgtgaggaggcatctaagagaaataaaaaacaacaacaacaaaaatgcctacattccactgaactacaaatattattcaagagaaaacttgacagtctttgcctcataaataattagcaattttgtcacccatttttgcatgttatcattaattaggtattgtggattgaatgtctgtgttcccccaaaattaatatggtgaaatcttaaccccctatggtttttggagatgaggatttgggaaggaaattaggggttatatggggtcataagggtggatccctcatgatg

SEQ ID NO: 179692 - DNA, 372 bp, Homo sapiens
cacacacacacacacacacacacacacacacacacatatatatggagagagagagagcgagagggagagagagataagtaaagcattcagaacaatcctggccagagtagatgcttaagatttagttgttatttgctgttctacattaggcctgagctggtgggaatgtcacattcctcatctttggtctgattctctgtggcaggcacttgccttcccaggaagcactaagcatttggctttgcagagattttacctcctatctctggagaaggcgccgccttggattctgggccacctggattgctaaagcctggggttaggtgctggagaggagaataaacatttatggagcagctaccaggaggcaga

SEQ ID NO: 179693 - DNA, 603 bp, Homo sapiens
  misc_feature (568)..(568): n is a, c, g, or t
tacacatttataaaataacaaaattattttcaagctttgtataatttctttttgctatagtcaaaattgattccatatttctaagaagtcatgtaatctaataatgtataattactattcagatcaagtatattatcaaatagcaaacagcagttcatagattttaactgcatttggggaagggaacttttttttttaacattaactgttggctacagattttaaaatgcaggtcaatttccaattatctagataaatttggaaataaattacatgaagtgtaaacacaaataattcttacactttaattcatgtactggcttttttttttttcccccctgagacagagtttcgctcttgttgcccaggctggagtgcaatggcgcgatctcagctcactgcaacctccgcctctcaggttcaagcgattgtcctgcctcagcctcccaagtagctgggactacgggcgcccgccaccatgcccggctgattttttgcatctctttcaaaggaaatcccctgttctttcaatgatgtgcaaggccctaccttctctagcccctatccntatccctaccccttaactttctgacctcagcatca

SEQ ID NO: 179694 - DNA, 648 bp, Homo sapiens
ccagatgacttgcatgtttagctagatccagggtcccttctcattctgcatcttaacgtcacctggcaacggagttagacagagttgatcgctttgcctcctccttgaaacatttcctcctcttagcttccaggataccacatcatcttggtgtcttactacctaactggtcattcctttttagcatcctttcctgggtcctcctcttcagcctgagagtgcccaaggtggaattcagtgatctctcatcactgtctgtaaatagcatctctgtgctgatacttacatctccagccagacctctctctggagcttcaagctcctgtaatgcagctgctcactcagtagctccgctggcatatcttaaaagacatttcaaacataacgtgtccagaaccgaacagctgatcttcctgcacaaccccgccccaaccatcgttttcctcacctcagctgatggcagctccatcctcactctgacaacccacattgactccatcctgaaatcagactgtgccacttctcaaaaccttcccgttttaccatgaatacaagccaaggtggccatgccttgccactgcaagctctgtgttctcctcacttcctcctggctccctccacccttcccgggtccttgctgccactgga

SEQ ID NO: 179695 - DNA, 556 bp, Homo sapiens
attttccggggcttcaaagcaggcagtctttgtgtgagtaaatattgagccaatgctaagagtaaaatgagctattaagttctatttgctactttcatccccaggctcataacagagcgtaagctaaacaaagaaaaacagcactccgctggacagaatgatattcagcaggtagactcatttctgtaggcacttctcacatcagtgatttgcttctccaacattggcaaatatttgccacttacgtctttcatgtaatgtgaagaaagtacattccactgtcttccaaagctatcttaactgccttataaaaacaggcaatttactggcgatgttttctcttgctactaaatacaaatgcagtcatcgtttaactttgaaagctctgcatttagctttttggttttagatttgatatttacatagaattataaagaaagaaaaaaacccacagtcccctcaacctaacaaaatacttgatttttacgtgctaaaatctagccctacatactcccatcttcctacaagtcttgaaagctttacttttaagtgtgat

SEQ ID NO: 179696 - DNA, 254 bp, Homo sapiens
ctccctattcgcaataatctgcttgtgataaattctcaaaaaccttgttaatgaaataatctgatgatcaaaggcaatctcatccaattgtgtaaactgtatcatcaatcacaaaaacatctaaatgctatcaaaaagagctggaaataaatgtaagctagcagagaaaaaatgcttgaaataaatacgggatgtatgacaaatgttacactttaacagatatatttcattttaatgtatatgtatcttctttt

SEQ ID NO: 179697 - DNA, 302 bp, Homo sapiens
gactttagccaagtccgggaggacctgcctttcaggggctgctaaagaatggtggagacatacatggtaagactgaaagcatttggattttcttcacaattcaacacaattctcctatagtagtcattaaactctgaccaggttaccagattggtagttttcagcacactgaaattcttagttgctgagatttatgaaagccatattgaaagacattgaggtatggatttgcctatagagcaattattaatatatggagatttctcttatagtaggcctgagtcctcttctgacgcacagag

SEQ ID NO: 179698 - DNA, 4308 bp, Homo sapiens
  misc_feature (1571)..(1571): n is a, c, g, or t
  misc_feature (1699)..(1699): n is a, c, g, or t
  misc_feature (1978)..(1978): n is a, c, g, or t
  misc_feature (2010)..(2010): n is a, c, g, or t
  misc_feature (2154)..(2154): n is a, c, g, or t
  misc_feature (2313)..(2313): n is a, c, g, or t
  misc_feature (2458)..(2458): n is a, c, g, or t
  misc_feature (2926)..(2926): n is a, c, g, or t
  misc_feature (2961)..(2961): n is a, c, g, or t
ctaaagcaggagttctggacactgggggagagtggggtgacatgagtgactccaaggaaccaagactgcagcagctgggcctcctggaggaggaacagctgagaggccttggattccgacagactcgaggatacaagagcttagcagggtgtcttggccatggtcccctggtgctgcaactcctctccttcacgctcttggctgggctccttgtccaagtgtccaaggtccccagctccataagtcaggaacaatccaggcaagacgcgatctaccagaacctgacccagcttaaagctgcagtgggtgagctctcagagaaatccaagctgcaggagatctaccaggagctgacccagctgaaggctgcagtgggtgagcttccagagaaatctaagctgcaggagatctaccaggagctgacccggctgaaggctgcagtgggtgagcttccagagaaatctaagctgcaggagatctaccaggagctgacctggctgaaggctgcagtgggtgagcttccagagaaatctaagatgcaggagatctaccaggagctgactcggctgaaggctgcagtgggtgagcttccagagaaatctaagcagcaggagatctaccaggagctgacccggctgaaggctgcagtgggtgagcttccagagaaatctaagcagcaggagatctaccaggagctgacccggctgaaggctgcagtgggtgagcttccagagaaatctaagcagcaggagatctaccaggagctgacccagctgaaggctgcagtggaacgcctgtgccacccctgtccctgggaatggacattcttccaaggaaactgttacttcatgtctaactcccagcggaactggcacgactccatcaccgcctgcaaagaagtgggggcccagctcgtcgtaatcaaaagtgctgaggagcagaacttcctacagctgcagtcttccagaagtaaccgcttcacctggatgggactttcagatctaaatcaggaaggcacgtggcaatgggtggacggctcacctctgttgcccagcttcaagcagtattggaacagaggagagcccaacaacgttggggaggaagactgcgcggaatttagtggcaatggctggaacgacgacaaatgtaatcttgccaaattctggatctgcaaaaagtccgcagcctcctgctccagggatgaagaacagtttctttctccagcccctgccaccccaaacccccctcctgcgtagcagaacttcacccccttttaagctacagttccttctctccatccttcgaccttcacaaaatctctgggactgttctttgtcagattcttcctcctttagaaggctgggtcccattctgtccttcttgtcatgcctccaatttcccctggtgtagagcttgtttttctggcccatccttggagctttatgagtgagctggtgtgggatgcctttgggggtggacttgtgttccaagaatccactctctcttccttttggagattaggatatttgggttgccatgtgtagctgctatgtcccctggggcgttatctnatacatgcaaacctaccatctgttcaacttccacctaccacctcctgcacccctttgatcggggacttactggttgcaagagctcattttgcaggctggaagcaccagggaattaattcccccagtcnaccaatggcacccagagagggcatggaggctccacgcaaccccttccacccccacatcttcctttgtcttatacatggcttccatttggctgtttctaagttgtattctttattttattattattattactatttttcgagatggagtttcactcttgtcgctcaggctggagtgccatggcgcgatcttggctcactgcaacctctgcctcccgggttcaagtgattctcctgcctcagcctcacgagtagctggaattacaggcaggcgccaccagncccggctaattttttgtatttttagtacaganggggtttctccgtgttggtcaggctggtcttgaactcccgacctcagatgatctgcccgcctcggcctcccaaaattgctgggattacaggtgtgagccaccgcgcctggcctattattttttgtaagaataaaacaggtttantgggatttgggactctgaacagttctgtctctactacctgatctcctcctaccacgactttgggatctagaggagctttggctccggctgtgacggctccggccgttctcactgcggctgcaccggcccccgctgcggtcactatttcttcctctgctnggtgaattgtgcctctcctggctctttgacatgtgctagtgagatttcttccttttcctttcggattccccatttcttttgtaggaatggtctggactagggttctccttccccgcagcctgtagtattcatcgtggtggcccancctctctctccccttggagctcttgccaaaggaggagacaagcagaggtctctattggatttctcaacacctgaagaaagttgcagtgttttcctcttggacattgttgtatttcaaataaaccacaaatcatcattttccaccgagccactgggcagaattcacactgaagctgtcgtcctgcgtacataccatcgtccgttaaacagagaaagagctgcttggcattcttcttccgactggtactgaacatatatacttgcccctcaggtgaggttccaagttgcaactgaccttgaactgaatcactctccccacgttattttttaattactatttttttttaaagatggggtcttgctctgtcgccaggctggagtgcagtggcgcgatctaggctcactgcaacttccgcctcccgggttcaagcgattctcctgcctcagcctcccgagtagctgggactcnactaaaagtacaaaaattagctggcgtgcaccacngcgcccagctaattcttgtatttttggtagagacggggtttcaacatgttgaccaggatggtctcgatctcttgacctcgtgattcgcccgccgcgtcctcccaaagtgctgggattacaggcctgagccaccgcgcccagtctctccccacgttcttgaactcgggcagcacatcctcacagaaatctaggaactgttggtaggtttcttcctcgctgtactccaggcttgcttcggagtcatagtcatccctcctgcactgctcctttccaaacactgtaaacatgcttttaataagaagggtaggactggatgttgggaaatcatgtgaacatctatctccaaatctgcaagctcctgttttactgtagaagggacaattaactccatccttctccatgactctgaaatccaagggggggttccgggttttgccatgtggcgccattttccaactcattttcagcctgatccagcatcttctggacagcttccggtttttgtttcttctgtcgtttctgttcctcctcctctctctctttcctctgctgttcttcccattgttcctttaactttcgctcttgttcttgccgttttctagccacctcttccttttccttctttattctgaattcttcttgtgccttctgctctctcagcaaccactcctcatgtaatctttgcctctctcttccccatagcttttctagttgttgtttttcaataaaagtgtcctcctctttctgtgagagtcctgagtccctcagtggagcaagttcctgctggcgtttctttcgtttctccttcttcagggcggccctgtactttttgtggcttggtttctctggaaatgtcaccttttcgggcgcagccatcttgccggcaccgccccgcccctctagttgtatcctttataataaactggtaaacattgtaaccgcagattcagcccaatctggttcaactttgtgtaataaaatggcgagttgtttttcagttgtcgtggacccccaggttgcaagttacataccctgggcatgtccagatgaacgaagcgtgcaaatccacgtggaacctaagtgctcagactgaggaacagggactgagttaagaagtggacaccacgtggcatgatccttgatccaatcagattgagccctggcgtgatccagtcagatcaagcctcctgaatcccctcattacaagatccaatcatatcatgcctcactaccctctgtatataaaatctgccccagcctccaacttggagagacagatttgggccagactcctgtgtccttgcttggctgccttgcaataaatttttctctctacaaaaaaaaaaa

SEQ ID NO: 179699 - DNA, 4336 bp, Homo sapiens
  misc_feature (1599)..(1599): n is a, c, g, or t
  misc_feature (1727)..(1727): n is a, c, g, or t
  misc_feature (2006)..(2006): n is a, c, g, or t
  misc_feature (2038)..(2038): n is a, c, g, or t
  misc_feature (2182)..(2182): n is a, c, g, or t
  misc_feature (2341)..(2341): n is a, c, g, or t
  misc_feature (2486)..(2486): n is a, c, g, or t
  misc_feature (2954)..(2954): n is a, c, g, or t
  misc_feature (2989)..(2989): n is a, c, g, or t
ctaaagcaggagttctggacactgggggagagtggggtgacatgagtgactccaaggaaccaagactgcagcagctgggcctcctgggtgaggctgggttgggacgctgggattctgggaagggggaagggatggccagccatggcctcagcctgcccaggctctgatttcacgtctatccattcagaggaggaacagctgagaggccttggattccgacagactcgaggatacaagagcttagcagtgtccaaggtccccagctccataagtcaggaacaatccaggcaagacgcgatctaccagaacctgacccagcttaaagctgcagtgggtgagctctcagagaaatccaagctgcaggagatctaccaggagctgacccagctgaaggctgcagtgggtgagcttccagagaaatctaagctgcaggagatctaccaggagctgacccggctgaaggctgcagtgggtgagcttccagagaaatctaagctgcaggagatctaccaggagctgacctggctgaaggctgcagtgggtgagcttccagagaaatctaagatgcaggagatctaccaggagctgactcggctgaaggctgcagtgggtgagcttccagagaaatctaagcagcaggagatctaccaggagctgacccggctgaaggctgcagtgggtgagcttccagagaaatctaagcagcaggagatctaccaggagctgacccggctgaaggctgcagtgggtgagcttccagagaaatctaagcagcaggagatctaccaggagctgacccagctgaaggctgcagtggaacgcctgtgccacccctgtccctgggaatggacattcttccaaggaaactgttacttcatgtctaactcccagcggaactggcacgactccatcaccgcctgcaaagaagtgggggcccagctcgtcgtaatcaaaagtgctgaggagcagaacttcctacagctgcagtcttccagaagtaaccgcttcacctggatgggactttcagatctaaatcaggaaggcacgtggcaatgggtggacggctcacctctgttgcccagcttcaagcagtattggaacagaggagagcccaacaacgttggggaggaagactgcgcggaatttagtggcaatggctggaacgacgacaaatgtaatcttgccaaattctggatctgcaaaaagtccgcagcctcctgctccagggatgaagaacagtttctttctccagcccctgccaccccaaacccccctcctgcgtagcagaacttcacccccttttaagctacagttccttctctccatccttcgaccttcacaaaatctctgggactgttctttgtcagattcttcctcctttagaaggctgggtcccattctgtccttcttgtcatgcctccaatttcccctggtgtagagcttgtttttctggcccatccttggagctttatgagtgagctggtgtgggatgcctttgggggtggacttgtgttccaagaatccactctctcttccttttggagattaggatatttgggttgccatgtgtagctgctatgtcccctggggcgttatctnatacatgcaaacctaccatctgttcaacttccacctaccacctcctgcacccctttgatcggggacttactggttgcaagagctcattttgcaggctggaagcaccagggaattaattcccccagtcnaccaatggcacccagagagggcatggaggctccacgcaaccccttccacccccacatcttcctttgtcttatacatggcttccatttggctgtttctaagttgtattctttattttattattattattactatttttcgagatggagtttcactcttgtcgctcaggctggagtgccatggcgcgatcttggctcactgcaacctctgcctcccgggttcaagtgattctcctgcctcagcctcacgagtagctggaattacaggcaggcgccaccagncccggctaattttttgtatttttagtacaganggggtttctccgtgttggtcaggctggtcttgaactcccgacctcagatgatctgcccgcctcggcctcccaaaattgctgggattacaggtgtgagccaccgcgcctggcctattattttttgtaagaataaaacaggtttantgggatttgggactctgaacagttctgtctctactacctgatctcctcctaccacgactttgggatctagaggagctttggctccggctgtgacggctccggccgttctcactgcggctgcaccggcccccgctgcggtcactatttcttcctctgctnggtgaattgtgcctctcctggctctttgacatgtgctagtgagatttcttccttttcctttcggattccccatttcttttgtaggaatggtctggactagggttctccttccccgcagcctgtagtattcatcgtggtggcccancctctctctccccttggagctcttgccaaaggaggagacaagcagaggtctctattggatttctcaacacctgaagaaagttgcagtgttttcctcttggacattgttgtatttcaaataaaccacaaatcatcattttccaccgagccactgggcagaattcacactgaagctgtcgtcctgcgtacataccatcgtccgttaaacagagaaagagctgcttggcattcttcttccgactggtactgaacatatatacttgcccctcaggtgaggttccaagttgcaactgaccttgaactgaatcactctccccacgttattttttaattactatttttttttaaagatggggtcttgctctgtcgccaggctggagtgcagtggcgcgatctaggctcactgcaacttccgcctcccgggttcaagcgattctcctgcctcagcctcccgagtagctgggactcnactaaaagtacaaaaattagctggcgtgcaccacngcgcccagctaattcttgtatttttggtagagacggggtttcaacatgttgaccaggatggtctcgatctcttgacctcgtgattcgcccgccgcgtcctcccaaagtgctgggattacaggcctgagccaccgcgcccagtctctccccacgttcttgaactcgggcagcacatcctcacagaaatctaggaactgttggtaggtttcttcctcgctgtactccaggcttgcttcggagtcatagtcatccctcctgcactgctcctttccaaacactgtaaacatgcttttaataagaagggtaggactggatgttgggaaatcatgtgaacatctatctccaaatctgcaagctcctgttttactgtagaagggacaattaactccatccttctccatgactctgaaatccaagggggggttccgggttttgccatgtggcgccattttccaactcattttcagcctgatccagcatcttctggacagcttccggtttttgtttcttctgtcgtttctgttcctcctcctctctctctttcctctgctgttcttcccattgttcctttaactttcgctcttgttcttgccgttttctagccacctcttccttttccttctttattctgaattcttcttgtgccttctgctctctcagcaaccactcctcatgtaatctttgcctctctcttccccatagcttttctagttgttgtttttcaataaaagtgtcctcctctttctgtgagagtcctgagtccctcagtggagcaagttcctgctggcgtttctttcgtttctccttcttcagggcggccctgtactttttgtggcttggtttctctggaaatgtcaccttttcgggcgcagccatcttgccggcaccgccccgcccctctagttgtatcctttataataaactggtaaacattgtaaccgcagattcagcccaatctggttcaactttgtgtaataaaatggcgagttgtttttcagttgtcgtggacccccaggttgcaagttacataccctgggcatgtccagatgaacgaagcgtgcaaatccacgtggaacctaagtgctcagactgaggaacagggactgagttaagaagtggacaccacgtggcatgatccttgatccaatcagattgagccctggcgtgatccagtcagatcaagcctcctgaatcccctcattacaagatccaatcatatcatgcctcactaccctctgtatataaaatctgccccagcctccaacttggagagacagatttgggccagactcctgtgtccttgcttggctgccttgcaataaatttttctctctacaaaaaaaaaaa

SEQ ID NO: 179700 - DNA, 4198 bp, Homo sapiens
  misc_feature (1461)..(1461): n is a, c, g, or t
  misc_feature (1589)..(1589): n is a, c, g, or t
  misc_feature (1868)..(1868): n is a, c, g, or t
  misc_feature (1900)..(1900): n is a, c, g, or t
  misc_feature (2044)..(2044): n is a, c, g, or t
  misc_feature (2203)..(2203): n is a, c, g, or t
  misc_feature (2348)..(2348): n is a, c, g, or t
  misc_feature (2816)..(2816): n is a, c, g, or t
  misc_feature (2851)..(2851): n is a, c, g, or t
ctaaagcaggagttctggacactgggggagagtggggtgacatgagtgactccaaggaaccaagactgcagcagctgggcctcctgggtgaggctgggttgggacgctgggattctgggaagggggaagggatggccagccatggcctcagcctgcccaggctctgatttcacgtctatccattcagaggaggaacagctgagaggccttggattccgacagactcgaggatacaagagcttagcagtgtccaaggtccccagctccataagtcaggaacaatccaggcaagacgcgatctaccagaacctgacccagcttaaagctgcagtgggtgagctctcagagaaatccaagctgcaggagatctaccaggagctgacccagctgaaggctgcagtgggtgagcttccagagaaatctaagctgcaggagatctaccaggagctgacccggctgaaggctgcagtgggtgagcttccagagaaatctaagctgcaggagatctaccaggagctgacctggctgaaggctgcagtgggtgagcttccagagaaatctaagatgcaggagatctaccaggagctgactcggctgaaggctgcagtgggtgagcttccagagaaatctaagcagcaggagatctaccaggagctgacccggctgaaggctgcagtggaacgcctgtgccacccctgtccctgggaatggacattcttccaaggaaactgttacttcatgtctaactcccagcggaactggcacgactccatcaccgcctgcaaagaagtgggggcccagctcgtcgtaatcaaaagtgctgaggagcagaacttcctacagctgcagtcttccagaagtaaccgcttcacctggatgggactttcagatctaaatcaggaaggcacgtggcaatgggtggacggctcacctctgttgcccagcttcaagcagtattggaacagaggagagcccaacaacgttggggaggaagactgcgcggaatttagtggcaatggctggaacgacgacaaatgtaatcttgccaaattctggatctgcaaaaagtccgcagcctcctgctccagggatgaagaacagtttctttctccagcccctgccaccccaaacccccctcctgcgtagcagaacttcacccccttttaagctacagttccttctctccatccttcgaccttcacaaaatctctgggactgttctttgtcagattcttcctcctttagaaggctgggtcccattctgtccttcttgtcatgcctccaatttcccctggtgtagagcttgtttttctggcccatccttggagctttatgagtgagctggtgtgggatgcctttgggggtggacttgtgttccaagaatccactctctcttccttttggagattaggatatttgggttgccatgtgtagctgctatgtcccctggggcgttatctnatacatgcaaacctaccatctgttcaacttccacctaccacctcctgcacccctttgatcggggacttactggttgcaagagctcattttgcaggctggaagcaccagggaattaattcccccagtcnaccaatggcacccagagagggcatggaggctccacgcaaccccttccacccccacatcttcctttgtcttatacatggcttccatttggctgtttctaagttgtattctttattttattattattattactatttttcgagatggagtttcactcttgtcgctcaggctggagtgccatggcgcgatcttggctcactgcaacctctgcctcccgggttcaagtgattctcctgcctcagcctcacgagtagctggaattacaggcaggcgccaccagncccggctaattttttgtatttttagtacaganggggtttctccgtgttggtcaggctggtcttgaactcccgacctcagatgatctgcccgcctcggcctcccaaaattgctgggattacaggtgtgagccaccgcgcctggcctattattttttgtaagaataaaacaggtttantgggatttgggactctgaacagttctgtctctactacctgatctcctcctaccacgactttgggatctagaggagctttggctccggctgtgacggctccggccgttctcactgcggctgcaccggcccccgctgcggtcactatttcttcctctgctnggtgaattgtgcctctcctggctctttgacatgtgctagtgagatttcttccttttcctttcggattccccatttcttttgtaggaatggtctggactagggttctccttccccgcagcctgtagtattcatcgtggtggcccancctctctctccccttggagctcttgccaaaggaggagacaagcagaggtctctattggatttctcaacacctgaagaaagttgcagtgttttcctcttggacattgttgtatttcaaataaaccacaaatcatcattttccaccgagccactgggcagaattcacactgaagctgtcgtcctgcgtacataccatcgtccgttaaacagagaaagagctgcttggcattcttcttccgactggtactgaacatatatacttgcccctcaggtgaggttccaagttgcaactgaccttgaactgaatcactctccccacgttattttttaattactatttttttttaaagatggggtcttgctctgtcgccaggctggagtgcagtggcgcgatctaggctcactgcaacttccgcctcccgggttcaagcgattctcctgcctcagcctcccgagtagctgggactcnactaaaagtacaaaaattagctggcgtgcaccacngcgcccagctaattcttgtatttttggtagagacggggtttcaacatgttgaccaggatggtctcgatctcttgacctcgtgattcgcccgccgcgtcctcccaaagtgctgggattacaggcctgagccaccgcgcccagtctctccccacgttcttgaactcgggcagcacatcctcacagaaatctaggaactgttggtaggtttcttcctcgctgtactccaggcttgcttcggagtcatagtcatccctcctgcactgctcctttccaaacactgtaaacatgcttttaataagaagggtaggactggatgttgggaaatcatgtgaacatctatctccaaatctgcaagctcctgttttactgtagaagggacaattaactccatccttctccatgactctgaaatccaagggggggttccgggttttgccatgtggcgccattttccaactcattttcagcctgatccagcatcttctggacagcttccggtttttgtttcttctgtcgtttctgttcctcctcctctctctctttcctctgctgttcttcccattgttcctttaactttcgctcttgttcttgccgttttctagccacctcttccttttccttctttattctgaattcttcttgtgccttctgctctctcagcaaccactcctcatgtaatctttgcctctctcttccccatagcttttctagttgttgtttttcaataaaagtgtcctcctctttctgtgagagtcctgagtccctcagtggagcaagttcctgctggcgtttctttcgtttctccttcttcagggcggccctgtactttttgtggcttggtttctctggaaatgtcaccttttcgggcgcagccatcttgccggcaccgccccgcccctctagttgtatcctttataataaactggtaaacattgtaaccgcagattcagcccaatctggttcaactttgtgtaataaaatggcgagttgtttttcagttgtcgtggacccccaggttgcaagttacataccctgggcatgtccagatgaacgaagcgtgcaaatccacgtggaacctaagtgctcagactgaggaacagggactgagttaagaagtggacaccacgtggcatgatccttgatccaatcagattgagccctggcgtgatccagtcagatcaagcctcctgaatcccctcattacaagatccaatcatatcatgcctcactaccctctgtatataaaatctgccccagcctccaacttggagagacagatttgggccagactcctgtgtccttgcttggctgccttgcaataaatttttctctctacaaaaaaaaaaa

SEQ ID NO: 179701 - DNA, 4223 bp, Homo sapiens
  misc_feature (1486)..(1486): n is a, c, g, or t
  misc_feature (1614)..(1614): n is a, c, g, or t
  misc_feature (1893)..(1893): n is a, c, g, or t
  misc_feature (1925)..(1925): n is a, c, g, or t
  misc_feature (2069)..(2069): n is a, c, g, or t
  misc_feature (2228)..(2228): n is a, c, g, or t
  misc_feature (2373)..(2373): n is a, c, g, or t
  misc_feature (2841)..(2841): n is a, c, g, or t
  misc_feature (2876)..(2876): n is a, c, g, or t
ctaaagcaggagttctggacactgggggagagtggggtgacatgagtgactccaaggaaccaagactgcagcagctgggcctcctgggtgaggctgggttgggacgctgggattctgggaagggggaagggatggccagccatggcctcagcctgcccaggctctgatttcacgtctatccattcagaggaggaacagctgagaggccttggattccgacagactcgaggatacaagagcttagcagtgtccaaggtccccagctccataagtcaggaacaatccaggcaagacgcgatctaccagaacctgacccagcttaaagctgcagtgggtgagctctcagagaaatccaagctgcaggagatctaccaggagctgacccagctgaaggctgcagtgggtgagcttccagagaaatctaagctgcaggagatctaccaggagctgacccggctgaaggctgcagtgggtgagcttccagagaaatctaagctgcaggagatctaccaggagctgacctggctgaaggctgcagtgggtgagcttccagagaaatctaagatgcaggagatctaccaggagctgactcggctgaaggctgcagtgggtgagcttccagagaaatctaagcagcaggagatctaccaggagctgacccggctgaaggctgcagtgggtgagcttccagagaaatctaagcagcaggagatctaccaggagctgacccggctgaaggctgcagtgggtgagcttccagagaaatctaagcagcaggagatctaccaggagctgacccagctgaaggctgcagtggaacgcctgtgccacccctgtccctgggaatggacattcttccaaggaaactgttacttcatgtctaactcccagcggaactggcacgactccatcaccgcctgcaaagaagtgggggcccagctcgtcgtaatcaaaagtgctgaggagcagcttcaagcagtattggaacagaggagagcccaacaacgttggggaggaagactgcgcggaatttagtggcaatggctggaacgacgacaaatgtaatcttgccaaattctggatctgcaaaaagtccgcagcctcctgctccagggatgaagaacagtttctttctccagcccctgccaccccaaacccccctcctgcgtagcagaacttcacccccttttaagctacagttccttctctccatccttcgaccttcacaaaatctctgggactgttctttgtcagattcttcctcctttagaaggctgggtcccattctgtccttcttgtcatgcctccaatttcccctggtgtagagcttgtttttctggcccatccttggagctttatgagtgagctggtgtgggatgcctttgggggtggacttgtgttccaagaatccactctctcttccttttggagattaggatatttgggttgccatgtgtagctgctatgtcccctggggcgttatctnatacatgcaaacctaccatctgttcaacttccacctaccacctcctgcacccctttgatcggggacttactggttgcaagagctcattttgcaggctggaagcaccagggaattaattcccccagtcnaccaatggcacccagagagggcatggaggctccacgcaaccccttccacccccacatcttcctttgtcttatacatggcttccatttggctgtttctaagttgtattctttattttattattattattactatttttcgagatggagtttcactcttgtcgctcaggctggagtgccatggcgcgatcttggctcactgcaacctctgcctcccgggttcaagtgattctcctgcctcagcctcacgagtagctggaattacaggcaggcgccaccagncccggctaattttttgtatttttagtacaganggggtttctccgtgttggtcaggctggtcttgaactcccgacctcagatgatctgcccgcctcggcctcccaaaattgctgggattacaggtgtgagccaccgcgcctggcctattattttttgtaagaataaaacaggtttantgggatttgggactctgaacagttctgtctctactacctgatctcctcctaccacgactttgggatctagaggagctttggctccggctgtgacggctccggccgttctcactgcggctgcaccggcccccgctgcggtcactatttcttcctctgctnggtgaattgtgcctctcctggctctttgacatgtgctagtgagatttcttccttttcctttcggattccccatttcttttgtaggaatggtctggactagggttctccttccccgcagcctgtagtattcatcgtggtggcccancctctctctccccttggagctcttgccaaaggaggagacaagcagaggtctctattggatttctcaacacctgaagaaagttgcagtgttttcctcttggacattgttgtatttcaaataaaccacaaatcatcattttccaccgagccactgggcagaattcacactgaagctgtcgtcctgcgtacataccatcgtccgttaaacagagaaagagctgcttggcattcttcttccgactggtactgaacatatatacttgcccctcaggtgaggttccaagttgcaactgaccttgaactgaatcactctccccacgttattttttaattactatttttttttaaagatggggtcttgctctgtcgccaggctggagtgcagtggcgcgatctaggctcactgcaacttccgcctcccgggttcaagcgattctcctgcctcagcctcccgagtagctgggactcnactaaaagtacaaaaattagctggcgtgcaccacngcgcccagctaattcttgtatttttggtagagacggggtttcaacatgttgaccaggatggtctcgatctcttgacctcgtgattcgcccgccgcgtcctcccaaagtgctgggattacaggcctgagccaccgcgcccagtctctccccacgttcttgaactcgggcagcacatcctcacagaaatctaggaactgttggtaggtttcttcctcgctgtactccaggcttgcttcggagtcatagtcatccctcctgcactgctcctttccaaacactgtaaacatgcttttaataagaagggtaggactggatgttgggaaatcatgtgaacatctatctccaaatctgcaagctcctgttttactgtagaagggacaattaactccatccttctccatgactctgaaatccaagggggggttccgggttttgccatgtggcgccattttccaactcattttcagcctgatccagcatcttctggacagcttccggtttttgtttcttctgtcgtttctgttcctcctcctctctctctttcctctgctgttcttcccattgttcctttaactttcgctcttgttcttgccgttttctagccacctcttccttttccttctttattctgaattcttcttgtgccttctgctctctcagcaaccactcctcatgtaatctttgcctctctcttccccatagcttttctagttgttgtttttcaataaaagtgtcctcctctttctgtgagagtcctgagtccctcagtggagcaagttcctgctggcgtttctttcgtttctccttcttcagggcggccctgtactttttgtggcttggtttctctggaaatgtcaccttttcgggcgcagccatcttgccggcaccgccccgcccctctagttgtatcctttataataaactggtaaacattgtaaccgcagattcagcccaatctggttcaactttgtgtaataaaatggcgagttgtttttcagttgtcgtggacccccaggttgcaagttacataccctgggcatgtccagatgaacgaagcgtgcaaatccacgtggaacctaagtgctcagactgaggaacagggactgagttaagaagtggacaccacgtggcatgatccttgatccaatcagattgagccctggcgtgatccagtcagatcaagcctcctgaatcccctcattacaagatccaatcatatcatgcctcactaccctctgtatataaaatctgccccagcctccaacttggagagacagatttgggccagactcctgtgtccttgcttggctgccttgcaataaatttttctctctacaaaaaaaaaaa

SEQ ID NO: 179702 - DNA, 4408 bp, Homo sapiens
  misc_feature (1671)..(1671): n is a, c, g, or t
  misc_feature (1799)..(1799): n is a, c, g, or t
  misc_feature (2078)..(2078): n is a, c, g, or t
  misc_feature (2110)..(2110): n is a, c, g, or t
  misc_feature (2254)..(2254): n is a, c, g, or t
  misc_feature (2413)..(2413): n is a, c, g, or t
  misc_feature (2558)..(2558): n is a, c, g, or t
  misc_feature (3026)..(3026): n is a, c, g, or t
  misc_feature (3061)..(3061): n is a, c, g, or t
ctaaagcaggagttctggacactgggggagagtggggtgacatgagtgactccaaggaaccaagactgcagcagctgggcctcctgggtgaggctgggttgggacgctgggattctgggaagggggaagggatggccagccatggcctcagcctgcccaggctctgatttcacgtctatccattcagaggaggaacagctgagaggccttggattccgacagactcgaggatacaagagcttagcagggtgtcttggccatggtcccctggtgctgcaactcctctccttcacgctcttggctgggctccttgtccaagtgtccaaggtccccagctccataagtcaggaacaatccaggcaagacgcgatctaccagaacctgacccagcttaaagctgcagtgggtgagctctcagagaaatccaagctgcaggagatctaccaggagctgacccagctgaaggctgcagtgggtgagcttccagagaaatctaagctgcaggagatctaccaggagctgacccggctgaaggctgcagtgggtgagcttccagagaaatctaagctgcaggagatctaccaggagctgacctggctgaaggctgcagtgggtgagcttccagagaaatctaagatgcaggagatctaccaggagctgactcggctgaaggctgcagtgggtgagcttccagagaaatctaagcagcaggagatctaccaggagctgacccggctgaaggctgcagtgggtgagcttccagagaaatctaagcagcaggagatctaccaggagctgacccggctgaaggctgcagtgggtgagcttccagagaaatctaagcagcaggagatctaccaggagctgacccagctgaaggctgcagtggaacgcctgtgccacccctgtccctgggaatggacattcttccaaggaaactgttacttcatgtctaactcccagcggaactggcacgactccatcaccgcctgcaaagaagtgggggcccagctcgtcgtaatcaaaagtgctgaggagcagaacttcctacagctgcagtcttccagaagtaaccgcttcacctggatgggactttcagatctaaatcaggaaggcacgtggcaatgggtggacggctcacctctgttgcccagcttcaagcagtattggaacagaggagagcccaacaacgttggggaggaagactgcgcggaatttagtggcaatggctggaacgacgacaaatgtaatcttgccaaattctggatctgcaaaaagtccgcagcctcctgctccagggatgaagaacagtttctttctccagcccctgccaccccaaacccccctcctgcgtagcagaacttcacccccttttaagctacagttccttctctccatccttcgaccttcacaaaatctctgggactgttctttgtcagattcttcctcctttagaaggctgggtcccattctgtccttcttgtcatgcctccaatttcccctggtgtagagcttgtttttctggcccatccttggagctttatgagtgagctggtgtgggatgcctttgggggtggacttgtgttccaagaatccactctctcttccttttggagattaggatatttgggttgccatgtgtagctgctatgtcccctggggcgttatctnatacatgcaaacctaccatctgttcaacttccacctaccacctcctgcacccctttgatcggggacttactggttgcaagagctcattttgcaggctggaagcaccagggaattaattcccccagtcnaccaatggcacccagagagggcatggaggctccacgcaaccccttccacccccacatcttcctttgtcttatacatggcttccatttggctgtttctaagttgtattctttattttattattattattactatttttcgagatggagtttcactcttgtcgctcaggctggagtgccatggcgcgatcttggctcactgcaacctctgcctcccgggttcaagtgattctcctgcctcagcctcacgagtagctggaattacaggcaggcgccaccagncccggctaattttttgtatttttagtacaganggggtttctccgtgttggtcaggctggtcttgaactcccgacctcagatgatctgcccgcctcggcctcccaaaattgctgggattacaggtgtgagccaccgcgcctggcctattattttttgtaagaataaaacaggtttantgggatttgggactctgaacagttctgtctctactacctgatctcctcctaccacgactttgggatctagaggagctttggctccggctgtgacggctccggccgttctcactgcggctgcaccggcccccgctgcggtcactatttcttcctctgctnggtgaattgtgcctctcctggctctttgacatgtgctagtgagatttcttccttttcctttcggattccccatttcttttgtaggaatggtctggactagggttctccttccccgcagcctgtagtattcatcgtggtggcccancctctctctccccttggagctcttgccaaaggaggagacaagcagaggtctctattggatttctcaacacctgaagaaagttgcagtgttttcctcttggacattgttgtatttcaaataaaccacaaatcatcattttccaccgagccactgggcagaattcacactgaagctgtcgtcctgcgtacataccatcgtccgttaaacagagaaagagctgcttggcattcttcttccgactggtactgaacatatatacttgcccctcaggtgaggttccaagttgcaactgaccttgaactgaatcactctccccacgttattttttaattactatttttttttaaagatggggtcttgctctgtcgccaggctggagtgcagtggcgcgatctaggctcactgcaacttccgcctcccgggttcaagcgattctcctgcctcagcctcccgagtagctgggactcnactaaaagtacaaaaattagctggcgtgcaccacngcgcccagctaattcttgtatttttggtagagacggggtttcaacatgttgaccaggatggtctcgatctcttgacctcgtgattcgcccgccgcgtcctcccaaagtgctgggattacaggcctgagccaccgcgcccagtctctccccacgttcttgaactcgggcagcacatcctcacagaaatctaggaactgttggtaggtttcttcctcgctgtactccaggcttgcttcggagtcatagtcatccctcctgcactgctcctttccaaacactgtaaacatgcttttaataagaagggtaggactggatgttgggaaatcatgtgaacatctatctccaaatctgcaagctcctgttttactgtagaagggacaattaactccatccttctccatgactctgaaatccaagggggggttccgggttttgccatgtggcgccattttccaactcattttcagcctgatccagcatcttctggacagcttccggtttttgtttcttctgtcgtttctgttcctcctcctctctctctttcctctgctgttcttcccattgttcctttaactttcgctcttgttcttgccgttttctagccacctcttccttttccttctttattctgaattcttcttgtgccttctgctctctcagcaaccactcctcatgtaatctttgcctctctcttccccatagcttttctagttgttgtttttcaataaaagtgtcctcctctttctgtgagagtcctgagtccctcagtggagcaagttcctgctggcgtttctttcgtttctccttcttcagggcggccctgtactttttgtggcttggtttctctggaaatgtcaccttttcgggcgcagccatcttgccggcaccgccccgcccctctagttgtatcctttataataaactggtaaacattgtaaccgcagattcagcccaatctggttcaactttgtgtaataaaatggcgagttgtttttcagttgtcgtggacccccaggttgcaagttacataccctgggcatgtccagatgaacgaagcgtgcaaatccacgtggaacctaagtgctcagactgaggaacagggactgagttaagaagtggacaccacgtggcatgatccttgatccaatcagattgagccctggcgtgatccagtcagatcaagcctcctgaatcccctcattacaagatccaatcatatcatgcctcactaccctctgtatataaaatctgccccagcctccaacttggagagacagatttgggccagactcctgtgtccttgcttggctgccttgcaataaatttttctctctacaaaaaaaaaaa

SEQ ID NO: 179703 - DNA, 4176 bp, Homo sapiens
  misc_feature (1439)..(1439): n is a, c, g, or t
  misc_feature (1567)..(1567): n is a, c, g, or t
  misc_feature (1846)..(1846): n is a, c, g, or t
  misc_feature (1878)..(1878): n is a, c, g, or t
  misc_feature (2022)..(2022): n is a, c, g, or t
  misc_feature (2181)..(2181): n is a, c, g, or t
  misc_feature (2326)..(2326): n is a, c, g, or t
  misc_feature (2794)..(2794): n is a, c, g, or t
  misc_feature (2829)..(2829): n is a, c, g, or t
ctaaagcaggagttctggacactgggggagagtggggtgacatgagtgactccaaggaaccaagactgcagcagctgggcctcctggtgtccaaggtccccagctccataagtcaggaacaatccaggcaagacgcgatctaccagaacctgacccagcttaaagctgcagtgggtgagctctcagagaaatccaagctgcaggagatctaccaggagctgacccagctgaaggctgcagtgggtgagcttccagagaaatctaagctgcaggagatctaccaggagctgacccggctgaaggctgcagtgggtgagcttccagagaaatctaagctgcaggagatctaccaggagctgacctggctgaaggctgcagtgggtgagcttccagagaaatctaagatgcaggagatctaccaggagctgactcggctgaaggctgcagtgggtgagcttccagagaaatctaagcagcaggagatctaccaggagctgacccggctgaaggctgcagtgggtgagcttccagagaaatctaagcagcaggagatctaccaggagctgacccggctgaaggctgcagtgggtgagcttccagagaaatctaagcagcaggagatctaccaggagctgacccagctgaaggctgcagtggaacgcctgtgccacccctgtccctgggaatggacattcttccaaggaaactgttacttcatgtctaactcccagcggaactggcacgactccatcaccgcctgcaaagaagtgggggcccagctcgtcgtaatcaaaagtgctgaggagcagaacttcctacagctgcagtcttccagaagtaaccgcttcacctggatgggactttcagatctaaatcaggaaggcacgtggcaatgggtggacggctcacctctgttgcccagcttcaagcagtattggaacagaggagagcccaacaacgttggggaggaagactgcgcggaatttagtggcaatggctggaacgacgacaaatgtaatcttgccaaattctggatctgcaaaaagtccgcagcctcctgctccagggatgaagaacagtttctttctccagcccctgccaccccaaacccccctcctgcgtagcagaacttcacccccttttaagctacagttccttctctccatccttcgaccttcacaaaatctctgggactgttctttgtcagattcttcctcctttagaaggctgggtcccattctgtccttcttgtcatgcctccaatttcccctggtgtagagcttgtttttctggcccatccttggagctttatgagtgagctggtgtgggatgcctttgggggtggacttgtgttccaagaatccactctctcttccttttggagattaggatatttgggttgccatgtgtagctgctatgtcccctggggcgttatctnatacatgcaaacctaccatctgttcaacttccacctaccacctcctgcacccctttgatcggggacttactggttgcaagagctcattttgcaggctggaagcaccagggaattaattcccccagtcnaccaatggcacccagagagggcatggaggctccacgcaaccccttccacccccacatcttcctttgtcttatacatggcttccatttggctgtttctaagttgtattctttattttattattattattactatttttcgagatggagtttcactcttgtcgctcaggctggagtgccatggcgcgatcttggctcactgcaacctctgcctcccgggttcaagtgattctcctgcctcagcctcacgagtagctggaattacaggcaggcgccaccagncccggctaattttttgtatttttagtacaganggggtttctccgtgttggtcaggctggtcttgaactcccgacctcagatgatctgcccgcctcggcctcccaaaattgctgggattacaggtgtgagccaccgcgcctggcctattattttttgtaagaataaaacaggtttantgggatttgggactctgaacagttctgtctctactacctgatctcctcctaccacgactttgggatctagaggagctttggctccggctgtgacggctccggccgttctcactgcggctgcaccggcccccgctgcggtcactatttcttcctctgctnggtgaattgtgcctctcctggctctttgacatgtgctagtgagatttcttccttttcctttcggattccccatttcttttgtaggaatggtctggactagggttctccttccccgcagcctgtagtattcatcgtggtggcccancctctctctccccttggagctcttgccaaaggaggagacaagcagaggtctctattggatttctcaacacctgaagaaagttgcagtgttttcctcttggacattgttgtatttcaaataaaccacaaatcatcattttccaccgagccactgggcagaattcacactgaagctgtcgtcctgcgtacataccatcgtccgttaaacagagaaagagctgcttggcattcttcttccgactggtactgaacatatatacttgcccctcaggtgaggttccaagttgcaactgaccttgaactgaatcactctccccacgttattttttaattactatttttttttaaagatggggtcttgctctgtcgccaggctggagtgcagtggcgcgatctaggctcactgcaacttccgcctcccgggttcaagcgattctcctgcctcagcctcccgagtagctgggactcnactaaaagtacaaaaattagctggcgtgcaccacngcgcccagctaattcttgtatttttggtagagacggggtttcaacatgttgaccaggatggtctcgatctcttgacctcgtgattcgcccgccgcgtcctcccaaagtgctgggattacaggcctgagccaccgcgcccagtctctccccacgttcttgaactcgggcagcacatcctcacagaaatctaggaactgttggtaggtttcttcctcgctgtactccaggcttgcttcggagtcatagtcatccctcctgcactgctcctttccaaacactgtaaacatgcttttaataagaagggtaggactggatgttgggaaatcatgtgaacatctatctccaaatctgcaagctcctgttttactgtagaagggacaattaactccatccttctccatgactctgaaatccaagggggggttccgggttttgccatgtggcgccattttccaactcattttcagcctgatccagcatcttctggacagcttccggtttttgtttcttctgtcgtttctgttcctcctcctctctctctttcctctgctgttcttcccattgttcctttaactttcgctcttgttcttgccgttttctagccacctcttccttttccttctttattctgaattcttcttgtgccttctgctctctcagcaaccactcctcatgtaatctttgcctctctcttccccatagcttttctagttgttgtttttcaataaaagtgtcctcctctttctgtgagagtcctgagtccctcagtggagcaagttcctgctggcgtttctttcgtttctccttcttcagggcggccctgtactttttgtggcttggtttctctggaaatgtcaccttttcgggcgcagccatcttgccggcaccgccccgcccctctagttgtatcctttataataaactggtaaacattgtaaccgcagattcagcccaatctggttcaactttgtgtaataaaatggcgagttgtttttcagttgtcgtggacccccaggttgcaagttacataccctgggcatgtccagatgaacgaagcgtgcaaatccacgtggaacctaagtgctcagactgaggaacagggactgagttaagaagtggacaccacgtggcatgatccttgatccaatcagattgagccctggcgtgatccagtcagatcaagcctcctgaatcccctcattacaagatccaatcatatcatgcctcactaccctctgtatataaaatctgccccagcctccaacttggagagacagatttgggccagactcctgtgtccttgcttggctgccttgcaataaatttttctctctacaaaaaaaaaaa

SEQ ID NO: 179704 - DNA, 3900 bp, Homo sapiens
  misc_feature (1163)..(1163): n is a, c, g, or t
  misc_feature (1291)..(1291): n is a, c, g, or t
  misc_feature (1570)..(1570): n is a, c, g, or t
  misc_feature (1602)..(1602): n is a, c, g, or t
  misc_feature (1746)..(1746): n is a, c, g, or t
  misc_feature (1905)..(1905): n is a, c, g, or t
  misc_feature (2050)..(2050): n is a, c, g, or t
  misc_feature (2518)..(2518): n is a, c, g, or t
  misc_feature (2553)..(2553): n is a, c, g, or t
ctaaagcaggagttctggacactgggggagagtggggtgacatgagtgactccaaggaaccaagactgcagcagctgggcctcctggtgtccaaggtccccagctccataagtcaggaacaatccaggcaagacgcgatctaccagaacctgacccagcttaaagctgcagtgggtgagctctcagagaaatccaagctgcaggagatctaccaggagctgacccagctgaaggctgcagtgggtgagcttccagagaaatctaagctgcaggagatctaccaggagctgacccggctgaaggctgcagtgggtgagcttccagagaaatctaagctgcaggagatctaccaggagctgacctggctgaaggctgcagtggaacgcctgtgccacccctgtccctgggaatggacattcttccaaggaaactgttacttcatgtctaactcccagcggaactggcacgactccatcaccgcctgcaaagaagtgggggcccagctcgtcgtaatcaaaagtgctgaggagcagaacttcctacagctgcagtcttccagaagtaaccgcttcacctggatgggactttcagatctaaatcaggaaggcacgtggcaatgggtggacggctcacctctgttgcccagcttcaagcagtattggaacagaggagagcccaacaacgttggggaggaagactgcgcggaatttagtggcaatggctggaacgacgacaaatgtaatcttgccaaattctggatctgcaaaaagtccgcagcctcctgctccagggatgaagaacagtttctttctccagcccctgccaccccaaacccccctcctgcgtagcagaacttcacccccttttaagctacagttccttctctccatccttcgaccttcacaaaatctctgggactgttctttgtcagattcttcctcctttagaaggctgggtcccattctgtccttcttgtcatgcctccaatttcccctggtgtagagcttgtttttctggcccatccttggagctttatgagtgagctggtgtgggatgcctttgggggtggacttgtgttccaagaatccactctctcttccttttggagattaggatatttgggttgccatgtgtagctgctatgtcccctggggcgttatctnatacatgcaaacctaccatctgttcaacttccacctaccacctcctgcacccctttgatcggggacttactggttgcaagagctcattttgcaggctggaagcaccagggaattaattcccccagtcnaccaatggcacccagagagggcatggaggctccacgcaaccccttccacccccacatcttcctttgtcttatacatggcttccatttggctgtttctaagttgtattctttattttattattattattactatttttcgagatggagtttcactcttgtcgctcaggctggagtgccatggcgcgatcttggctcactgcaacctctgcctcccgggttcaagtgattctcctgcctcagcctcacgagtagctggaattacaggcaggcgccaccagncccggctaattttttgtatttttagtacaganggggtttctccgtgttggtcaggctggtcttgaactcccgacctcagatgatctgcccgcctcggcctcccaaaattgctgggattacaggtgtgagccaccgcgcctggcctattattttttgtaagaataaaacaggtttantgggatttgggactctgaacagttctgtctctactacctgatctcctcctaccacgactttgggatctagaggagctttggctccggctgtgacggctccggccgttctcactgcggctgcaccggcccccgctgcggtcactatttcttcctctgctnggtgaattgtgcctctcctggctctttgacatgtgctagtgagatttcttccttttcctttcggattccccatttcttttgtaggaatggtctggactagggttctccttccccgcagcctgtagtattcatcgtggtggcccancctctctctccccttggagctcttgccaaaggaggagacaagcagaggtctctattggatttctcaacacctgaagaaagttgcagtgttttcctcttggacattgttgtatttcaaataaaccacaaatcatcattttccaccgagccactgggcagaattcacactgaagctgtcgtcctgcgtacataccatcgtccgttaaacagagaaagagctgcttggcattcttcttccgactggtactgaacatatatacttgcccctcaggtgaggttccaagttgcaactgaccttgaactgaatcactctccccacgttattttttaattactatttttttttaaagatggggtcttgctctgtcgccaggctggagtgcagtggcgcgatctaggctcactgcaacttccgcctcccgggttcaagcgattctcctgcctcagcctcccgagtagctgggactcnactaaaagtacaaaaattagctggcgtgcaccacngcgcccagctaattcttgtatttttggtagagacggggtttcaacatgttgaccaggatggtctcgatctcttgacctcgtgattcgcccgccgcgtcctcccaaagtgctgggattacaggcctgagccaccgcgcccagtctctccccacgttcttgaactcgggcagcacatcctcacagaaatctaggaactgttggtaggtttcttcctcgctgtactccaggcttgcttcggagtcatagtcatccctcctgcactgctcctttccaaacactgtaaacatgcttttaataagaagggtaggactggatgttgggaaatcatgtgaacatctatctccaaatctgcaagctcctgttttactgtagaagggacaattaactccatccttctccatgactctgaaatccaagggggggttccgggttttgccatgtggcgccattttccaactcattttcagcctgatccagcatcttctggacagcttccggtttttgtttcttctgtcgtttctgttcctcctcctctctctctttcctctgctgttcttcccattgttcctttaactttcgctcttgttcttgccgttttctagccacctcttccttttccttctttattctgaattcttcttgtgccttctgctctctcagcaaccactcctcatgtaatctttgcctctctcttccccatagcttttctagttgttgtttttcaataaaagtgtcctcctctttctgtgagagtcctgagtccctcagtggagcaagttcctgctggcgtttctttcgtttctccttcttcagggcggccctgtactttttgtggcttggtttctctggaaatgtcaccttttcgggcgcagccatcttgccggcaccgccccgcccctctagttgtatcctttataataaactggtaaacattgtaaccgcagattcagcccaatctggttcaactttgtgtaataaaatggcgagttgtttttcagttgtcgtggacccccaggttgcaagttacataccctgggcatgtccagatgaacgaagcgtgcaaatccacgtggaacctaagtgctcagactgaggaacagggactgagttaagaagtggacaccacgtggcatgatccttgatccaatcagattgagccctggcgtgatccagtcagatcaagcctcctgaatcccctcattacaagatccaatcatatcatgcctcactaccctctgtatataaaatctgccccagcctccaacttggagagacagatttgggccagactcctgtgtccttgcttggctgccttgcaataaatttttctctctacaaaaaaaaaaa

SEQ ID NO: 179705 - DNA, 4286 bp, Homo sapiens
  misc_feature (1549)..(1549): n is a, c, g, or t
  misc_feature (1677)..(1677): n is a, c, g, or t
  misc_feature (1956)..(1956): n is a, c, g, or t
  misc_feature (1988)..(1988): n is a, c, g, or t
  misc_feature (2132)..(2132): n is a, c, g, or t
  misc_feature (2291)..(2291): n is a, c, g, or t
  misc_feature (2436)..(2436): n is a, c, g, or t
  misc_feature (2904)..(2904): n is a, c, g, or t
  misc_feature (2939)..(2939): n is a, c, g, or t
ctaaagcaggagttctggacactgggggagagtggggtgacatgagtgactccaaggaaccaagactgcagcagctgggcctcctggaggaggaacagctgagaggccttggattccgacagactcgaggatacaagagcttagcagggtgtcttggccatggtcccctggtgctgcaactcctctccttcacgctcttggctgggctccttgtccaagtgtccaaggtccccagctccataagtcaggaacaatccaggcaagacgcgatctaccagaacctgacccagcttaaagctgcagtgggtgagctctcagagaaatccaagctgcaggagatctaccaggagctgacccagctgaaggctgcagtgggtgagcttccagagaaatctaagctgcaggagatctaccaggagctgacccggctgaaggctgcagtgggtgagcttccagagaaatctaagctgcaggagatctaccaggagctgacctggctgaaggctgcagtgggtgagcttccagagaaatctaagatgcaggagatctaccaggagctgactcggctgaaggctgcagtgggtgagcttccagagaaatctaagcagcaggagatctaccaggagctgacccggctgaaggctgcagtgggtgagcttccagagaaatctaagcagcaggagatctaccaggagctgacccggctgaaggctgcagtgggtgagcttccagagaaatctaagcagcaggagatctaccaggagctgacccagctgaaggctgcagtggaacgcctgtgccacccctgtccctgggaatggacattcttccaaggaaactgttacttcatgtctaactcccagcggaactggcacgactccatcaccgcctgcaaagaagtgggggcccagctcgtcgtaatcaaaagtgctgaggagcagccagaagtaaccgcttcacctggatgggactttcagatctaaatcaggaaggcacgtggcaatgggtggacggctcacctctgttgcccagcttcaagcagtattggaacagaggagagcccaacaacgttggggaggaagactgcgcggaatttagtggcaatggctggaacgacgacaaatgtaatcttgccaaattctggatctgcaaaaagtccgcagcctcctgctccagggatgaagaacagtttctttctccagcccctgccaccccaaacccccctcctgcgtagcagaacttcacccccttttaagctacagttccttctctccatccttcgaccttcacaaaatctctgggactgttctttgtcagattcttcctcctttagaaggctgggtcccattctgtccttcttgtcatgcctccaatttcccctggtgtagagcttgtttttctggcccatccttggagctttatgagtgagctggtgtgggatgcctttgggggtggacttgtgttccaagaatccactctctcttccttttggagattaggatatttgggttgccatgtgtagctgctatgtcccctggggcgttatctnatacatgcaaacctaccatctgttcaacttccacctaccacctcctgcacccctttgatcggggacttactggttgcaagagctcattttgcaggctggaagcaccagggaattaattcccccagtcnaccaatggcacccagagagggcatggaggctccacgcaaccccttccacccccacatcttcctttgtcttatacatggcttccatttggctgtttctaagttgtattctttattttattattattattactatttttcgagatggagtttcactcttgtcgctcaggctggagtgccatggcgcgatcttggctcactgcaacctctgcctcccgggttcaagtgattctcctgcctcagcctcacgagtagctggaattacaggcaggcgccaccagncccggctaattttttgtatttttagtacaganggggtttctccgtgttggtcaggctggtcttgaactcccgacctcagatgatctgcccgcctcggcctcccaaaattgctgggattacaggtgtgagccaccgcgcctggcctattattttttgtaagaataaaacaggtttantgggatttgggactctgaacagttctgtctctactacctgatctcctcctaccacgactttgggatctagaggagctttggctccggctgtgacggctccggccgttctcactgcggctgcaccggcccccgctgcggtcactatttcttcctctgctnggtgaattgtgcctctcctggctctttgacatgtgctagtgagatttcttccttttcctttcggattccccatttcttttgtaggaatggtctggactagggttctccttccccgcagcctgtagtattcatcgtggtggcccancctctctctccccttggagctcttgccaaaggaggagacaagcagaggtctctattggatttctcaacacctgaagaaagttgcagtgttttcctcttggacattgttgtatttcaaataaaccacaaatcatcattttccaccgagccactgggcagaattcacactgaagctgtcgtcctgcgtacataccatcgtccgttaaacagagaaagagctgcttggcattcttcttccgactggtactgaacatatatacttgcccctcaggtgaggttccaagttgcaactgaccttgaactgaatcactctccccacgttattttttaattactatttttttttaaagatggggtcttgctctgtcgccaggctggagtgcagtggcgcgatctaggctcactgcaacttccgcctcccgggttcaagcgattctcctgcctcagcctcccgagtagctgggactcnactaaaagtacaaaaattagctggcgtgcaccacngcgcccagctaattcttgtatttttggtagagacggggtttcaacatgttgaccaggatggtctcgatctcttgacctcgtgattcgcccgccgcgtcctcccaaagtgctgggattacaggcctgagccaccgcgcccagtctctccccacgttcttgaactcgggcagcacatcctcacagaaatctaggaactgttggtaggtttcttcctcgctgtactccaggcttgcttcggagtcatagtcatccctcctgcactgctcctttccaaacactgtaaacatgcttttaataagaagggtaggactggatgttgggaaatcatgtgaacatctatctccaaatctgcaagctcctgttttactgtagaagggacaattaactccatccttctccatgactctgaaatccaagggggggttccgggttttgccatgtggcgccattttccaactcattttcagcctgatccagcatcttctggacagcttccggtttttgtttcttctgtcgtttctgttcctcctcctctctctctttcctctgctgttcttcccattgttcctttaactttcgctcttgttcttgccgttttctagccacctcttccttttccttctttattctgaattcttcttgtgccttctgctctctcagcaaccactcctcatgtaatctttgcctctctcttccccatagcttttctagttgttgtttttcaataaaagtgtcctcctctttctgtgagagtcctgagtccctcagtggagcaagttcctgctggcgtttctttcgtttctccttcttcagggcggccctgtactttttgtggcttggtttctctggaaatgtcaccttttcgggcgcagccatcttgccggcaccgccccgcccctctagttgtatcctttataataaactggtaaacattgtaaccgcagattcagcccaatctggttcaactttgtgtaataaaatggcgagttgtttttcagttgtcgtggacccccaggttgcaagttacataccctgggcatgtccagatgaacgaagcgtgcaaatccacgtggaacctaagtgctcagactgaggaacagggactgagttaagaagtggacaccacgtggcatgatccttgatccaatcagattgagccctggcgtgatccagtcagatcaagcctcctgaatcccctcattacaagatccaatcatatcatgcctcactaccctctgtatataaaatctgccccagcctccaacttggagagacagatttgggccagactcctgtgtccttgcttggctgccttgcaataaatttttctctctacaaaaaaaaaaa

SEQ ID NO: 179706 - DNA, 4236 bp, Homo sapiens
  misc_feature (1499)..(1499): n is a, c, g, or t
  misc_feature (1627)..(1627): n is a, c, g, or t
  misc_feature (1906)..(1906): n is a, c, g, or t
  misc_feature (1938)..(1938): n is a, c, g, or t
  misc_feature (2082)..(2082): n is a, c, g, or t
  misc_feature (2241)..(2241): n is a, c, g, or t
  misc_feature (2386)..(2386): n is a, c, g, or t
  misc_feature (2854)..(2854): n is a, c, g, or t
  misc_feature (2889)..(2889): n is a, c, g, or t
ctaaagcaggagttctggacactgggggagagtggggtgacatgagtgactccaaggaaccaagactgcagcagctgggcctcctggaggaggaacagctgagaggccttggattccgacagactcgaggatacaagagcttagcagtgtccaaggtccccagctccataagtcaggaacaatccaggcaagacgcgatctaccagaacctgacccagcttaaagctgcagtgggtgagctctcagagaaatccaagctgcaggagatctaccaggagctgacccagctgaaggctgcagtgggtgagcttccagagaaatctaagctgcaggagatctaccaggagctgacccggctgaaggctgcagtgggtgagcttccagagaaatctaagctgcaggagatctaccaggagctgacctggctgaaggctgcagtgggtgagcttccagagaaatctaagatgcaggagatctaccaggagctgactcggctgaaggctgcagtgggtgagcttccagagaaatctaagcagcaggagatctaccaggagctgacccggctgaaggctgcagtgggtgagcttccagagaaatctaagcagcaggagatctaccaggagctgacccggctgaaggctgcagtgggtgagcttccagagaaatctaagcagcaggagatctaccaggagctgacccagctgaaggctgcagtggaacgcctgtgccacccctgtccctgggaatggacattcttccaaggaaactgttacttcatgtctaactcccagcggaactggcacgactccatcaccgcctgcaaagaagtgggggcccagctcgtcgtaatcaaaagtgctgaggagcagaacttcctacagctgcagtcttccagaagtaaccgcttcacctggatgggactttcagatctaaatcaggaaggcacgtggcaatgggtggacggctcacctctgttgcccagcttcaagcagtattggaacagaggagagcccaacaacgttggggaggaagactgcgcggaatttagtggcaatggctggaacgacgacaaatgtaatcttgccaaattctggatctgcaaaaagtccgcagcctcctgctccagggatgaagaacagtttctttctccagcccctgccaccccaaacccccctcctgcgtagcagaacttcacccccttttaagctacagttccttctctccatccttcgaccttcacaaaatctctgggactgttctttgtcagattcttcctcctttagaaggctgggtcccattctgtccttcttgtcatgcctccaatttcccctggtgtagagcttgtttttctggcccatccttggagctttatgagtgagctggtgtgggatgcctttgggggtggacttgtgttccaagaatccactctctcttccttttggagattaggatatttgggttgccatgtgtagctgctatgtcccctggggcgttatctnatacatgcaaacctaccatctgttcaacttccacctaccacctcctgcacccctttgatcggggacttactggttgcaagagctcattttgcaggctggaagcaccagggaattaattcccccagtcnaccaatggcacccagagagggcatggaggctccacgcaaccccttccacccccacatcttcctttgtcttatacatggcttccatttggctgtttctaagttgtattctttattttattattattattactatttttcgagatggagtttcactcttgtcgctcaggctggagtgccatggcgcgatcttggctcactgcaacctctgcctcccgggttcaagtgattctcctgcctcagcctcacgagtagctggaattacaggcaggcgccaccagncccggctaattttttgtatttttagtacaganggggtttctccgtgttggtcaggctggtcttgaactcccgacctcagatgatctgcccgcctcggcctcccaaaattgctgggattacaggtgtgagccaccgcgcctggcctattattttttgtaagaataaaacaggtttantgggatttgggactctgaacagttctgtctctactacctgatctcctcctaccacgactttgggatctagaggagctttggctccggctgtgacggctccggccgttctcactgcggctgcaccggcccccgctgcggtcactatttcttcctctgctnggtgaattgtgcctctcctggctctttgacatgtgctagtgagatttcttccttttcctttcggattccccatttcttttgtaggaatggtctggactagggttctccttccccgcagcctgtagtattcatcgtggtggcccancctctctctccccttggagctcttgccaaaggaggagacaagcagaggtctctattggatttctcaacacctgaagaaagttgcagtgttttcctcttggacattgttgtatttcaaataaaccacaaatcatcattttccaccgagccactgggcagaattcacactgaagctgtcgtcctgcgtacataccatcgtccgttaaacagagaaagagctgcttggcattcttcttccgactggtactgaacatatatacttgcccctcaggtgaggttccaagttgcaactgaccttgaactgaatcactctccccacgttattttttaattactatttttttttaaagatggggtcttgctctgtcgccaggctggagtgcagtggcgcgatctaggctcactgcaacttccgcctcccgggttcaagcgattctcctgcctcagcctcccgagtagctgggactcnactaaaagtacaaaaattagctggcgtgcaccacngcgcccagctaattcttgtatttttggtagagacggggtttcaacatgttgaccaggatggtctcgatctcttgacctcgtgattcgcccgccgcgtcctcccaaagtgctgggattacaggcctgagccaccgcgcccagtctctccccacgttcttgaactcgggcagcacatcctcacagaaatctaggaactgttggtaggtttcttcctcgctgtactccaggcttgcttcggagtcatagtcatccctcctgcactgctcctttccaaacactgtaaacatgcttttaataagaagggtaggactggatgttgggaaatcatgtgaacatctatctccaaatctgcaagctcctgttttactgtagaagggacaattaactccatccttctccatgactctgaaatccaagggggggttccgggttttgccatgtggcgccattttccaactcattttcagcctgatccagcatcttctggacagcttccggtttttgtttcttctgtcgtttctgttcctcctcctctctctctttcctctgctgttcttcccattgttcctttaactttcgctcttgttcttgccgttttctagccacctcttccttttccttctttattctgaattcttcttgtgccttctgctctctcagcaaccactcctcatgtaatctttgcctctctcttccccatagcttttctagttgttgtttttcaataaaagtgtcctcctctttctgtgagagtcctgagtccctcagtggagcaagttcctgctggcgtttctttcgtttctccttcttcagggcggccctgtactttttgtggcttggtttctctggaaatgtcaccttttcgggcgcagccatcttgccggcaccgccccgcccctctagttgtatcctttataataaactggtaaacattgtaaccgcagattcagcccaatctggttcaactttgtgtaataaaatggcgagttgtttttcagttgtcgtggacccccaggttgcaagttacataccctgggcatgtccagatgaacgaagcgtgcaaatccacgtggaacctaagtgctcagactgaggaacagggactgagttaagaagtggacaccacgtggcatgatccttgatccaatcagattgagccctggcgtgatccagtcagatcaagcctcctgaatcccctcattacaagatccaatcatatcatgcctcactaccctctgtatataaaatctgccccagcctccaacttggagagacagatttgggccagactcctgtgtccttgcttggctgccttgcaataaatttttctctctacaaaaaaaaaaa

SEQ ID NO: 179707 - DNA, 4032 bp, Homo sapiens
  misc_feature (1295)..(1295): n is a, c, g, or t
  misc_feature (1423)..(1423): n is a, c, g, or t
  misc_feature (1702)..(1702): n is a, c, g, or t
  misc_feature (1734)..(1734): n is a, c, g, or t
  misc_feature (1878)..(1878): n is a, c, g, or t
  misc_feature (2037)..(2037): n is a, c, g, or t
  misc_feature (2182)..(2182): n is a, c, g, or t
  misc_feature (2650)..(2650): n is a, c, g, or t
  misc_feature (2685)..(2685): n is a, c, g, or t
ctaaagcaggagttctggacactgggggagagtggggtgacatgagtgactccaaggaaccaagactgcagcagctgggcctcctggaggaggaacagctgagaggccttggattccgacagactcgaggatacaagagcttagcagggtgtcttggccatggtcccctggtgctgcaactcctctccttcacgctcttggctgggctccttgtccaagtgtccaaggtccccagctccataagtcaggaacaatccaggcaagacgcgatctaccagaacctgacccagcttaaagctgcagtgggtgagctctcagagaaatccaagctgcaggagatctaccaggagctgacccagctgaaggctgcagtgggtgagcttccagagaaatctaagctgcaggagatctaccaggagctgacccggctgaaggctgcagtgggtgagcttccagagaaatctaagctgcaggagatctaccaggagctgacctggctgaaggctgcagtggaacgcctgtgccacccctgtccctgggaatggacattcttccaaggaaactgttacttcatgtctaactcccagcggaactggcacgactccatcaccgcctgcaaagaagtgggggcccagctcgtcgtaatcaaaagtgctgaggagcagaacttcctacagctgcagtcttccagaagtaaccgcttcacctggatgggactttcagatctaaatcaggaaggcacgtggcaatgggtggacggctcacctctgttgcccagcttcaagcagtattggaacagaggagagcccaacaacgttggggaggaagactgcgcggaatttagtggcaatggctggaacgacgacaaatgtaatcttgccaaattctggatctgcaaaaagtccgcagcctcctgctccagggatgaagaacagtttctttctccagcccctgccaccccaaacccccctcctgcgtagcagaacttcacccccttttaagctacagttccttctctccatccttcgaccttcacaaaatctctgggactgttctttgtcagattcttcctcctttagaaggctgggtcccattctgtccttcttgtcatgcctccaatttcccctggtgtagagcttgtttttctggcccatccttggagctttatgagtgagctggtgtgggatgcctttgggggtggacttgtgttccaagaatccactctctcttccttttggagattaggatatttgggttgccatgtgtagctgctatgtcccctggggcgttatctnatacatgcaaacctaccatctgttcaacttccacctaccacctcctgcacccctttgatcggggacttactggttgcaagagctcattttgcaggctggaagcaccagggaattaattcccccagtcnaccaatggcacccagagagggcatggaggctccacgcaaccccttccacccccacatcttcctttgtcttatacatggcttccatttggctgtttctaagttgtattctttattttattattattattactatttttcgagatggagtttcactcttgtcgctcaggctggagtgccatggcgcgatcttggctcactgcaacctctgcctcccgggttcaagtgattctcctgcctcagcctcacgagtagctggaattacaggcaggcgccaccagncccggctaattttttgtatttttagtacaganggggtttctccgtgttggtcaggctggtcttgaactcccgacctcagatgatctgcccgcctcggcctcccaaaattgctgggattacaggtgtgagccaccgcgcctggcctattattttttgtaagaataaaacaggtttantgggatttgggactctgaacagttctgtctctactacctgatctcctcctaccacgactttgggatctagaggagctttggctccggctgtgacggctccggccgttctcactgcggctgcaccggcccccgctgcggtcactatttcttcctctgctnggtgaattgtgcctctcctggctctttgacatgtgctagtgagatttcttccttttcctttcggattccccatttcttttgtaggaatggtctggactagggttctccttccccgcagcctgtagtattcatcgtggtggcccancctctctctccccttggagctcttgccaaaggaggagacaagcagaggtctctattggatttctcaacacctgaagaaagttgcagtgttttcctcttggacattgttgtatttcaaataaaccacaaatcatcattttccaccgagccactgggcagaattcacactgaagctgtcgtcctgcgtacataccatcgtccgttaaacagagaaagagctgcttggcattcttcttccgactggtactgaacatatatacttgcccctcaggtgaggttccaagttgcaactgaccttgaactgaatcactctccccacgttattttttaattactatttttttttaaagatggggtcttgctctgtcgccaggctggagtgcagtggcgcgatctaggctcactgcaacttccgcctcccgggttcaagcgattctcctgcctcagcctcccgagtagctgggactcnactaaaagtacaaaaattagctggcgtgcaccacngcgcccagctaattcttgtatttttggtagagacggggtttcaacatgttgaccaggatggtctcgatctcttgacctcgtgattcgcccgccgcgtcctcccaaagtgctgggattacaggcctgagccaccgcgcccagtctctccccacgttcttgaactcgggcagcacatcctcacagaaatctaggaactgttggtaggtttcttcctcgctgtactccaggcttgcttcggagtcatagtcatccctcctgcactgctcctttccaaacactgtaaacatgcttttaataagaagggtaggactggatgttgggaaatcatgtgaacatctatctccaaatctgcaagctcctgttttactgtagaagggacaattaactccatccttctccatgactctgaaatccaagggggggttccgggttttgccatgtggcgccattttccaactcattttcagcctgatccagcatcttctggacagcttccggtttttgtttcttctgtcgtttctgttcctcctcctctctctctttcctctgctgttcttcccattgttcctttaactttcgctcttgttcttgccgttttctagccacctcttccttttccttctttattctgaattcttcttgtgccttctgctctctcagcaaccactcctcatgtaatctttgcctctctcttccccatagcttttctagttgttgtttttcaataaaagtgtcctcctctttctgtgagagtcctgagtccctcagtggagcaagttcctgctggcgtttctttcgtttctccttcttcagggcggccctgtactttttgtggcttggtttctctggaaatgtcaccttttcgggcgcagccatcttgccggcaccgccccgcccctctagttgtatcctttataataaactggtaaacattgtaaccgcagattcagcccaatctggttcaactttgtgtaataaaatggcgagttgtttttcagttgtcgtggacccccaggttgcaagttacataccctgggcatgtccagatgaacgaagcgtgcaaatccacgtggaacctaagtgctcagactgaggaacagggactgagttaagaagtggacaccacgtggcatgatccttgatccaatcagattgagccctggcgtgatccagtcagatcaagcctcctgaatcccctcattacaagatccaatcatatcatgcctcactaccctctgtatataaaatctgccccagcctccaacttggagagacagatttgggccagactcctgtgtccttgcttggctgccttgcaataaatttttctctctacaaaaaaaaaaa

SEQ ID NO: 179708 - DNA, 3604 bp, Homo sapiens
  misc_feature (867)..(867): n is a, c, g, or t
  misc_feature (995)..(995): n is a, c, g, or t
  misc_feature (1274)..(1274): n is a, c, g, or t
  misc_feature (1306)..(1306): n is a, c, g, or t
  misc_feature (1450)..(1450): n is a, c, g, or t
  misc_feature (1609)..(1609): n is a, c, g, or t
  misc_feature (1754)..(1754): n is a, c, g, or t
  misc_feature (2222)..(2222): n is a, c, g, or t
  misc_feature (2257)..(2257): n is a, c, g, or t
ctaaagcaggagttctggacactgggggagagtggggtgacatgagtgactccaaggaaccaagactgcagcagctgggcctcctggaggaggaacagctgagaggccttggattccgacagactcgaggatacaagagcttagcagggtgtcttggccatggtcccctggtgctgcaactcctctccttcacgctcttggctgggctccttgtccaagtgtccaaggtccccagctccataagtcaggaacaatccagccagaagtaaccgcttcacctggatgggactttcagatctaaatcaggaaggcacgtggcaatgggtggacggctcacctctgttgcccagcttcaagcagtattggaacagaggagagcccaacaacgttggggaggaagactgcgcggaatttagtggcaatggctggaacgacgacaaatgtaatcttgccaaattctggatctgcaaaaagtccgcagcctcctgctccagggatgaagaacagtttctttctccagcccctgccaccccaaacccccctcctgcgtagcagaacttcacccccttttaagctacagttccttctctccatccttcgaccttcacaaaatctctgggactgttctttgtcagattcttcctcctttagaaggctgggtcccattctgtccttcttgtcatgcctccaatttcccctggtgtagagcttgtttttctggcccatccttggagctttatgagtgagctggtgtgggatgcctttgggggtggacttgtgttccaagaatccactctctcttccttttggagattaggatatttgggttgccatgtgtagctgctatgtcccctggggcgttatctnatacatgcaaacctaccatctgttcaacttccacctaccacctcctgcacccctttgatcggggacttactggttgcaagagctcattttgcaggctggaagcaccagggaattaattcccccagtcnaccaatggcacccagagagggcatggaggctccacgcaaccccttccacccccacatcttcctttgtcttatacatggcttccatttggctgtttctaagttgtattctttattttattattattattactatttttcgagatggagtttcactcttgtcgctcaggctggagtgccatggcgcgatcttggctcactgcaacctctgcctcccgggttcaagtgattctcctgcctcagcctcacgagtagctggaattacaggcaggcgccaccagncccggctaattttttgtatttttagtacaganggggtttctccgtgttggtcaggctggtcttgaactcccgacctcagatgatctgcccgcctcggcctcccaaaattgctgggattacaggtgtgagccaccgcgcctggcctattattttttgtaagaataaaacaggtttantgggatttgggactctgaacagttctgtctctactacctgatctcctcctaccacgactttgggatctagaggagctttggctccggctgtgacggctccggccgttctcactgcggctgcaccggcccccgctgcggtcactatttcttcctctgctnggtgaattgtgcctctcctggctctttgacatgtgctagtgagatttcttccttttcctttcggattccccatttcttttgtaggaatggtctggactagggttctccttccccgcagcctgtagtattcatcgtggtggcccancctctctctccccttggagctcttgccaaaggaggagacaagcagaggtctctattggatttctcaacacctgaagaaagttgcagtgttttcctcttggacattgttgtatttcaaataaaccacaaatcatcattttccaccgagccactgggcagaattcacactgaagctgtcgtcctgcgtacataccatcgtccgttaaacagagaaagagctgcttggcattcttcttccgactggtactgaacatatatacttgcccctcaggtgaggttccaagttgcaactgaccttgaactgaatcactctccccacgttattttttaattactatttttttttaaagatggggtcttgctctgtcgccaggctggagtgcagtggcgcgatctaggctcactgcaacttccgcctcccgggttcaagcgattctcctgcctcagcctcccgagtagctgggactcnactaaaagtacaaaaattagctggcgtgcaccacngcgcccagctaattcttgtatttttggtagagacggggtttcaacatgttgaccaggatggtctcgatctcttgacctcgtgattcgcccgccgcgtcctcccaaagtgctgggattacaggcctgagccaccgcgcccagtctctccccacgttcttgaactcgggcagcacatcctcacagaaatctaggaactgttggtaggtttcttcctcgctgtactccaggcttgcttcggagtcatagtcatccctcctgcactgctcctttccaaacactgtaaacatgcttttaataagaagggtaggactggatgttgggaaatcatgtgaacatctatctccaaatctgcaagctcctgttttactgtagaagggacaattaactccatccttctccatgactctgaaatccaagggggggttccgggttttgccatgtggcgccattttccaactcattttcagcctgatccagcatcttctggacagcttccggtttttgtttcttctgtcgtttctgttcctcctcctctctctctttcctctgctgttcttcccattgttcctttaactttcgctcttgttcttgccgttttctagccacctcttccttttccttctttattctgaattcttcttgtgccttctgctctctcagcaaccactcctcatgtaatctttgcctctctcttccccatagcttttctagttgttgtttttcaataaaagtgtcctcctctttctgtgagagtcctgagtccctcagtggagcaagttcctgctggcgtttctttcgtttctccttcttcagggcggccctgtactttttgtggcttggtttctctggaaatgtcaccttttcgggcgcagccatcttgccggcaccgccccgcccctctagttgtatcctttataataaactggtaaacattgtaaccgcagattcagcccaatctggttcaactttgtgtaataaaatggcgagttgtttttcagttgtcgtggacccccaggttgcaagttacataccctgggcatgtccagatgaacgaagcgtgcaaatccacgtggaacctaagtgctcagactgaggaacagggactgagttaagaagtggacaccacgtggcatgatccttgatccaatcagattgagccctggcgtgatccagtcagatcaagcctcctgaatcccctcattacaagatccaatcatatcatgcctcactaccctctgtatataaaatctgccccagcctccaacttggagagacagatttgggccagactcctgtgtccttgcttggctgccttgcaataaatttttctctctacaaaaaaaaaaa

SEQ ID NO: 179709 - DNA, 248 bp, Homo sapiens
tgccaaggggctccccgccctgggccccatggccagcatcttcctcccactcaccaagcactcttctcccttctcaacccccttctctctgagtcctgctgagggcttgccttgtttatgaaagaacttaggccacgtggttagagaaaactcccagcaaacaccaccagggctcagtccccagggagggaggttcccagccacagttgcagtgctgacacttacctaccttgttctgtcttcctttc

SEQ ID NO: 179710 - DNA, 497 bp, Homo sapiens
cgatctctgtcttcctgtagttagacaataaaaattccttcatttaggacctactgtctctgaatctgtactcctgtgggcattcgaaattgagatttacctattaagtcaagaattacagtaagcaagaaagaagccaaaagccctcttcaaatgcttagtcacatggtttgccattttttttaatatgttaattacaaactactgatccatacctactcaattagcttttaagcactgaaaagtactttgttcaacatacttgcacatattccactgtgtgcctggtttatggcttttgaataaacaaataggtgttttcatacttccaggcaaagccagcagtggggcttgggtgggggcagagggtggcgtgtatgtgtctgcgtgtttaatcacagcgaagtataatacacaactgcctctctgaaatttacaaaaatgctcagacaacctcaattaagctgatttctaaaatacgcagacaaaaggaaaca

SEQ ID NO: 179711 - DNA, 757 bp, Homo sapiens
  misc_feature (22)..(23): n is a, c, g, or t
  misc_feature (36)..(36): n is a, c, g, or t
  misc_feature (39)..(39): n is a, c, g, or t
  misc_feature (42)..(42): n is a, c, g, or t
  misc_feature (44)..(44): n is a, c, g, or t
ataaaacagtggttccccgggnngcagaattcggcncanctncnaaaaaaaaaaaaaccaaaaaaaaaaaaaaatacaaaattagctgggtagggtggcgcacacctgtaatcccagctacacgggaagctgaggcaggagaatcgcttgaacctggcaggtggaggttgcagtgagccgagatcgcaccattgcactccagcctgggcaacaagcacaaaactgtctcaaaaaatagtaataaaaattttaaaaattagctaggtgtggtggcgcatgcctgtagcctcagctactcaggaggctaaggcaagaggatcactcaagcccaggagtttgaggctgcagtgagctaggattgcgccactgcactccagccttggtgataaagtgagaccctgtctctaagaagaacacagaaagagagagaacctagttctgactgcagaatccctggagcacagatgctcgctagaacaggagcagcacagccacagaatctgccaagctccagacacaggcagggttatgtgggcagagccagcctcagaggagttagtgtgattttgtcctcctggccttgttctcctggccaccctgcgagacacatggggtcatcccagttcacagatgtgaaaactgtccaggtgcagtggctcacacctataatcccagcactttaggaggccaaggcaggtggatcacttgaggtcaggagtttgagaccagcctggccaacatagcgaaaccccatctc

SEQ ID NO: 179712 - DNA, 698 bp, Homo sapiens
  misc_feature (22)..(23): n is a, c, g, or t
  misc_feature (36)..(36): n is a, c, g, or t
  misc_feature (39)..(39): n is a, c, g, or t
  misc_feature (42)..(42): n is a, c, g, or t
  misc_feature (44)..(44): n is a, c, g, or t
ataaaacagtggttccccgggnngcagaattcggcncanctncnaaaaaaaaaaaaaccaaaaaaaaaaaaaaatacaaaattagctgggtagggtggcgcacacctgtaatcccagctacacgggaagctgaggcaggagaatcgcttgaacctggcaggtggaggttgcagtgagccgagatcgcaccattgcactccagcctgggcaacaagcacaaaactgtctcaaaaaatagtaataagctaaggcaagaggatcactcaagcccaggagtttgaggctgcagtgagctaggattgcgccactgcactccagccttggtgataaagtgagaccctgtctctaagaagaacacagaaagagagagaacctagttctgactgcagaatccctggagcacagatgctcgctagaacaggagcagcacagccacagaatctgccaagctccagacacaggcagggttatgtgggcagagccagcctcagaggagttagtgtgattttgtcctcctggccttgttctcctggccaccctgcgagacacatggggtcatcccagttcacagatgtgaaaactgtccaggtgcagtggctcacacctataatcccagcactttaggaggccaaggcaggtggatcacttgaggtcaggagtttgagaccagcctggccaacatagcgaaaccccatctc

SEQ ID NO: 179713 - DNA, 1002 bp, Homo sapiens
tctctcaatcgctgcgtgcggggtgttgtcgctctcgcgtgtctgttattctcccccccagtgcgctgcttcttgttcttgcgtcctctctctatacagtcgccctctcgttgactcatcacagtcgtctcgccgccttggcggctcgttctctcccgctgtggtctacattagtacgcgccgcgcccggcctctttctagttttttctgtttcttttgcttgtttcttctgttttgttggtaatgtctgtgctgttcttttcttttctttcgttgtgtgtttggtttttttttgttttttttgtctttttttttttttttttttttttttttttttttttttttttttttttttttttttaagcaaataaaggattttattttttaaagaagtggcagtgtgagaatttaaaatcaatcacataaaacaatcaggaaaggggtggggagagaagtgtccagtacaacctggacaaccttgctttctgcccttacttaaaaagacagacggttcaaatctttgctacctcccttaagtatctccataaatgctcttccaagaaatcctccaaaaggcacttagctccatacttatgcattgaattgtttcaccttagcaatcagtttttaagactccaaggtaacaagaaagaaaagatctgattcttttactaaaagctagtgaataggactgttttttttcaagaggcatcacttttacaagaactagctagaccaccattattcctttatcaagaaaaagtttcttttttaaaaaataaataaaactctggctatacatagtacaaagttcatacataatacatctggaaaaaaaccgaagagtataccctgaagcaaaaggtttattggagagagaaagcctcttccattataccaagtctgaagatggcagttttcaaagttcagagggtggcagtgatatataattaatgccaaactgtttgctcatgggtatggcaggatgcaatgaaggaccaa

SEQ ID NO: 179714 - DNA, 742 bp, Homo sapiens
gtcttgctctgttgccaggctggagtgcagtggcgcaatctcggctcactgcaacctccacctcctgggttcaagcgagtctcctgcctcagcctcctgagtatctgggactacaagcgcccaccaccatgcccagataatttttagagacggagtttcaccatgttggccaggatggtctcgatctcttgacctcatgatcgcccacctcagcctgtatcttgcccattatcaaactatttcttgctgccatattcttttctagtatttgacatcttgattttcagaacctggtcaatcttaccataaaaacctagctgccatttcacacctctgctctgactggctcaaggcctgctcttctttaatgcctatagctgggcagaatgaagcaggtatttaaatactgatctctaaatattttaatagaatgatgtatgtgttcagcttatctattagtggggtaaattgtaatgcgagaagagaaaatcaagttacaatacctacattgcagattttcagtgaggcttaaaaggcatgaaaaattccctaatgttagtaaatactcaagaaatgctggttaatatttctacttctggtcaattgctttccaagtcgaaacagctgataaaattctatacattatacattatgttattcatattatgaaaatgttaagtctttcatttcacaatattattagccaagagaataaaggtttgtagtgacttaaagatcttga

SEQ ID NO: 179715 - DNA, 516 bp, Homo sapiens
gacacacgaacatacacacaaccgcacaccgtcccatgcacgctacatcatccatcactggggcatgacacacgaacacacacataacctcgcagcaaattgtcacagaccaaattgtggtctgaggcaatttgagatttctttacaggaaaggttttaggtagcattctggctgggatagtgacaaaactgcaaatgcatagcaaatgcactgtttttatgttgatagtaatgttgagtggctttagaggggaactgatgtagcagctaggcttggtcatgtcgcatgctttatcatccaaaacagcaatgcagcatgggatttagaagcctggaggttaatgaaggttaaaaaaaaaaaaaaaaaaaagtacagtggaaagagctctttcttgtttcaaagtcaagctctgctactgtcattctgaacgtgttatttagatgccccaagcttcagtattttcatgtgcaacatgaggaagtcggacaagatgagcatcactagaacttagatgc

SEQ ID NO: 179716 - DNA, 329 bp, Homo sapiens
gagatgctttgacagatatagaggggctaccatttcagtctgggtggccttgcctagagccctctaaactgcacaatttagtggcgcctattcagtcttccaaagactgtcatgtaacatgttttgcttatacaaatgatctcaatgaagggagattatgaaatgaggcaatatgttaaatctagaaagacaagggaaatacattaaaagtaaggtcctggaaagccacaggctaacagctaccaataatattttttaaatggtattaccccaaagtgaatgtcatgagaactgagggggaatgcaattttgatcacgtgtgttatcag

SEQ ID NO: 179717 - DNA, 141 bp, Homo sapiens
agtgttcaaccgtgagaatttagagttttcttgcataaactatgggcataagaattccagattaggtttctttaaaatggagtttaaattttaaaatgcccataaacaatccaagtacagaattctttcccccatatttta

SEQ ID NO: 179718 - DNA, 589 bp, Homo sapiens
ggtgactctaaggacccctcgaatcgacggttctctaacgtgtatctaatgcaatgattaattttttttatttcattgcttactttttcatttctaaaagttccatttggttctctctaaattatgcctactaatttttaaatactttcttatttcttgttcatttttgtgattctgtctttaagttcttcttgtatttatgacagtttttgtattatatgtatttatttatgtgtataaatttatagggtacaagtacaaaacgtgacatgcatagattgtgcagtggtcaagtcaggactacattgtacccattaagtaatttcttagccacccgcctcctgcccctctacctttccggatctccgttgtctctctgcccactgatagactacatccatgtctatacatttttatttttattttatttttatttattttttagtttttgaggcagaatctcgctctgtcgcccaggctggagtgcagtggcatgatcttggctcactgcatgctccgcctccctggttcacaccattctcctgcctcagcctcccgagtagctgggactacaggcacccgtcaccac

SEQ ID NO: 179719 - DNA, 365 bp, Homo sapiens
tgagtttgccacatcagagacacttccgagaccctttcccatatacaccaagtaataaaggattgatgtttctttaaaggtctgaaattatctgtgatgtttttcatataatccgtgacagctaggtggtaaaattcaggaaggttttcctggtaattatccttaaactggggaaaaattatgacccctttctctcattgtataacatgacaaactatagatcaaaattaccttgcattaggttgatgacataaaagttgttcttggccccgtggagtatgtcagtctcattttgaaaatacagatgaatgtctgtacacttttacttcacggtaattatctcctgataaattaatggagttagt

SEQ ID NO: 179720 - DNA, 349 bp, Homo sapiens
gacctgaggacccgcccaggtagattctttccagaaaacactaaattatactaaaatatgtatttataattggtaatgttctatatattaattactctcctcatccacttataagattttactattaaaattcttgaagggaggccgggtgctgtggctcacgcctgtaatccagcctgggcaacaagagcaaaactccgtctcaaaaaaagttcattcagagttaatccctacagaaacctattttgtaaaaagtataaagacagaaaacaagtctaaagatggctgaggcatgacaaagcattcaaacttaactatcagattaacaaaagatttgtatgtggagggg

SEQ ID NO: 179721 - DNA, 361 bp, Homo sapiens
aacatatcccttccagaagctgcaacgaacgatgatgcaatgcagctagctaaatagaaagcggtcactctctgtcacatagacactttccataattacctgacttctctgataagacagtggcactcacaggaagctcacactcacatggggaagaaaataaatgcccccctgcccctggggacaatagaggccaatctctgaagaacccagataccatggtgtagataattaacgccacgaggacgtggatgacattgtcagaggccacgctgacccagagttctcaggaagggacacagctagtcaccggaccgtaaagagtgaaccacgcctgtcagaagtcatttcatggtaggca

SEQ ID NO: 179722 - DNA, 128 bp, Homo sapiens
acaaacccagaccaaccatgggggtctccctcctgttaacacccctccctaacagccctcctggtggttccctgtctgcccctcccctttatgggtcaagcctgctggcgtctgtttcattgtgctgt

SEQ ID NO: 179723 - DNA, 449 bp, Homo sapiens
gccgtcctaggggctggagacactgcatgaacaagacaaaaacttgggcccctggggaggttataatctagtagaaggagacaaaatgagtagatggattattaaaagcatatgcattgtgagaaaattccagcaggtgcagggaatagagaaagggagtggtagggcctgtgatacttcaggttgagctgcttagcgctttttttttttttttttttttttttgccctgtgggcccctctgatagctggtgaagcccgcacacctttctcagaacaatgatatttttaaggtataaaatcaaatacaaagtattacaatagaaaccatttctattaaaacatagcaaaatactttaaaaattgtggtaaatgtgctgctttattcaatgtattaaataagatctagcattgggcctaatgacaaccatggttttgaagttgtgatgag

SEQ ID NO: 179724 - DNA, 629 bp, Homo sapiens
atattttcatgcacggcgcatctgaaaatatcttattcttgcctttaaacttggaaagaattactccattgtcttatagcattctttattaatggcgagaaggctagtatcagtctgtttccaactttgttgcagacatcctgtcactcttccctgggaagttttgaggattatttttactttatccctagagttataatatatcagcccaatatgtctaatgtgggcatatttgtgccagtcatcattaagcatgtactttcaatctgaagactcacatgttccattaacacagaaatattcacaaggaaaatttgatttgctacatctttcactgttttctctctctttttctctaagttggaactcttagtagacagatgataactggaactatttttttaatttaatttttttgaggatatagcaggtatatatatctatgaggtacatgagttttgatacaggcacaaaatgagtaataatcacaccatgtaaaatggggtgtccccccgaagtatttatcctttgtgttataaagaattcaattgtactttcagttattttaagatgtacaattattattgactacagtcatcccgttgtattaactttctgttttaagagca

SEQ ID NO: 179725 - DNA, 239 bp, Homo sapiens
gcacagatacgtccacagcacatgaatgatagtccctctgcagtataaagcatcatgggagatgattagggaaaaagtgtctgaaaaggttccttagaggggaaatgatgaaaacatttgagtagcaccacaacccatctttgaccccgaccagtctgctctgaacaggcagcagggcaaagcagattcttgatgacaccagtgctcagcacagcccagcccctcgccccagcacctcg

SEQ ID NO: 179726 - DNA, 294 bp, Homo sapiens
aaaatgaaggaggaggccagatatttttgacttttagagagatcagtgataataggctgtcttcttttcataagaacaattcttatgaaaactttctctgattttctgcaacatgatgtgttacttcatgttaatttgtgtgatcaaagaaacatggcagatagaaaataatggaagatccaagggtgtgttctgtttggcttctgctgcatggcatagtgaaaagagcatgggcttgggtgttttcgagctgagttcttccttttactgacgttgtggctgggagcaggtttt

SEQ ID NO: 179727 - DNA, 292 bp, Homo sapiens
gtggggcatggagggctggctactggggtcagcgtggagctgtgtggacggttctggttatagggcctggtgtgaccagaaagaagtcacgagtgacctgggagctgaaagaccacctccctccaaaatcaggaaggccccttaagaacaagttgttggcatatttggaaggctttcttccagaagaacattcagccctttggcactttgtgctgaagctgtgacgccctgatgctccagggcctgagtcagtgtcctgaggatgctggcaccctccttcagagcacgtttc

SEQ ID NO: 179728 - DNA, 570 bp, Homo sapiens
ccctcacggttacctcaactttagcctaaattttatctcactctttaaaacttgtctgtcttggccaagacaaacaataccagtgggagatgtacactgggattccatattaagctttaaattaaggaccagagtaaatattaaataattgaaattctcatcattcttgagagatgcttttcacctcggttttttggcaaaggaagaaggagatgttcttctgtttatttctcagattttattggagggtggaattctactttttctttcttataatctagaatttacattcagatttcctgcctttcccttacaaaatacctgtgtagttggataggtggagctctggactcagagttctttcttctagtaatcttaggaaattatttaatttttctgtgttttcatattttcacacataaaagagaaaacaccatttctaaactacctcttcttttctctgcttttaagcatgtaaaggttttcccaatcttgggcagtgacatgtacaggacagtatagctttacatctgccttgttttaattaaacactagttctttgaggtaatc

SEQ ID NO: 179729 - DNA, 472 bp, Homo sapiens
agctgcacagaggccttcttcctgggcctgcgcgtcaagtgcctgccgtcggtggcagccgcgtccatccgctgctcctcgcggcccagccgggactctgacaggctccagctccacacagacggcatcctgtccttcttgaagaacaacaagccaggggacgcgctgtgtgtgctgggcctcacactgtctgacctgtacccccatgaggcctggagcttcaccttcagcaagttccttccagggcacggtcacgtgccacgagctctgccaccttctgggcctggggaactgccgctggctccgctgcctcatgcagggtgcgctcagcctggacgaggccctgcggcggcccctggacctctgtcccatctgcctgaggaagctgcagcatgtcctgggtttcaggctcatcgagaggtaccagagactctacacctggactcaggcggtggtggggacgtggcccagc

SEQ ID NO: 179730 - DNA, 299 bp, Homo sapiens
cctaaacagaggctaacccccttttccttgagctctgttttcctaggctcctgcattcctgctctctgcagtctgatttcttagaatctgagcattagctgctgatacttatcagctgccagcctgaggtctcaatgtaagggttcaagtttagaacatagatcttttttagacaaagaccactctttttcataagattaaaacctaggacccttcttccatttatgacagtgattcgaaggcgtatctaaaaactttttttttttttgagatgcagtctcgctctgtcatccagactg

SEQ ID NO: 179731 - DNA, 1079 bp, Homo sapiens
aggttgcagtgagccgagattgcacctctgcactccagcctgggtgacagagcaagactccatctcaaaaataaataaataaataaataaataaactgacctcctgaatcccagtgctggcttggctgctatactcttgcccttcactgaacctcagttttcctcatctgaatagttgggagactcattcctgcctttctcatgtccctggctatttggtaaaccagccagtaggaagacatcgtgaaatgtattaaagtggtcttagctagacagagtgggcatgccagggtcagcagagattctgaagtctagaccagttccctgggtgggccgttgtcagtcctagcagatggccaggtcagccctcaggctggaaattttagggcagctattggtaggtgtctcctcttgctgtgctgagatacggtcaagatcatacttaggcttttgttggaagaacatacaagacgagagaaaaaaaaagatcatacttaggggctcccggaatttgctctgccctaggttgctgagacctctagaacctgtgcaggctaaaggaactcagtcggtagatccgagagaggtggtcagggagaccaggagcatgtctacactgccagcagacttttgcctcctcccccaagccagcaggatggcccaaaaaggctcccccagcagatcatctttgcagctccttttttagctccagtggcagcagggatgaggaagggaaagttctatcatttttttctaatttaaaatgacatttaaaatcactagcctagtgggggccaggtgtggtggctcatgcctgttatcccagcactttgggaagccaagacgagtggatcacttgagctcaggagttaaagaccagtctgggcaacatagcgaaacgccgtctctataaaaaaatacaaaaattagctggatgtggtggtgcacacctgtattcttagctgcttgtggggctaaggcgaaaggatcacttgagcccaggaggtcaaggctgtagtgagctgtttgtgccactgcactctagcctgggtgacaaagcaaaaccctgtctcaaaaaa

SEQ ID NO: 179732 - DNA, 400 bp, Homo sapiens
tcgagctcgcacccatagttacaccgtacctatcaaaattgttttgctgaaaaaacagcagatttcaaaacagaatgactcaatttttataacaaaaatactgtgcaaggaaaaaacctaaaatgctgtacacaacattgtccacaatcatgttgttcagtgttggtgagaaggggaaagcaagcagttgaaaaatgaggaattacagactatccttataaataagtaatcacaataatattttattttatttcaattttttgagacaggctcttactctgtcacccaggctggagtgcagtggggcagtcatagctcactgcagccttactcttgggctcaagcaatcctcccacttcagtctcccaagtaactggggctataggtgtacggtgccaca

SEQ ID NO: 179733 - DNA, 412 bp, Homo sapiens
actggatgcccagaagcacagtggcctcatccttaaagcagtggaggtggggggtggtaagaacagggccgatcttgcagggccgttgtgaggattaaaaatacaatgtatgataatgatgcatcaaagtaggttcctcagtcctatcaaatgtgccactctggtgggggacgctgatgatgggggaggctgtgagtggtggggatgggaactccagactctccactgcagcttttttttttttttgaaacacagtttcacttttgttgcccaggccagagcgcaacggtgcgatctcagctcactgcaaactccacctcccaggttcaagcaattctcctgcctcagcctcccgagtagctgggattacaggcacctgctaccacccccggctaattttgtatttttagta

SEQ ID NO: 179734 - DNA, 652 bp, Homo sapiens
gtcgtggcttgagcctgtaatcccagcacgttgggaggctaaggtgggaggatatcttgaactccaggagtctgagaccagcctgggcaacatggcaagactttgcctctacaaaaaaaaaaaaattagctgggcatggtggcacacacctgtcattccagctacttgggaggcttaatcaggaggctgagacaggagaattacttgaatcagggaggcggaagttgcagtgagctcaaattgcaccactgcactccagcctgggtgacagagtgagactccgtcttagaaaacaaacaaacaaacaaaaatgcttcatttcagtgacaccctgagctgggagggagtaaagactcataggcaaaagggactaatacatgtatataaaatgcttcatttcagtgataccctgagcaaggagggagtaaagactaggaagtactgttaggaagtgacaccacttttatttttggagctgtctctgacctgtgaatcctacagtgaatactcttaaatattttagtatctgtccagatgatattggtacccagatcctttaactatacctctgatattccaactgttttgctcttacctgaatttatgctgcctatcttgaactaggatcttaaatttaaaatggcacccaata

SEQ ID NO: 179735 - DNA, 783 bp, Homo sapiens
ggaccattgtaatcatgtcatctgaccagcctgggtaatccaggatgatctcttgacctcaagatccttaacttaatctcatctgtgaaattctttttgccaagtaaatttacatattcacaggttccagagattagaacctaaacatttttgggaggggtgaggaggtattcagcctaccacagttaatgaagagtgagtggcctgagataaggtcttagagattggcagggaccagatcatgataggtcatgatagggagtctgtttttcagtcatagtgctgagaggtttcagtaggggaatgataggatttgatgtgaaaaagtctccctggccgctggatggcgattagactgttgggatcgagagcagaaggcctcagctttttattcataacatcatacggtggatctcaatcttgctgtacgttatgatcacacctcaaagcaattatatctgaaccactgagggctggacccaagtatcagcctttttttgtttgtttgtttgttttttaagaaaaagcattctaattgtagccagggttgagaaccactagtctcatagatctgaatccattttaccttttcagccttagctcagtaggagcttctcgcatccatcacttactgcatgagctacttgaccatttcttagacaaacttcctgtattcccacctgtgcctttcaaaatatacctagtctagggaggcctacgcggactgtcagggcccagctgacaaactctcctccagaaagcttctccagtgccctgtagtag

SEQ ID NO: 179736 - DNA, 352 bp, Homo sapiens
tctcacctgactacccggcctctacctgaggcaggacttaggactgtcctgagatctttcctgttttgccaaacagctttgctgcatgtgaaccctggagcactctgtggtctggctcacctttccctgaagctgagagcaggttggaaatcaactgtctgtcagcatgtccaaaggtggctggatcctgggtcccagagagatcatttcttcctgaaggaggacaggaatggcgttcaaagattcatgcctgtagttacaggaacaagatgctgaaagttgtaggtaatttataaaaccacgagaggttggtcatttcaggcctcttcagcctatgattttagatagttgt

SEQ ID NO: 179737 - DNA, 213 bp, Homo sapiens
tacacgtaccatttcacttaaaaataagaacaatcctgtgggatagctattataactatctcccactttactgatgaggaaaaagaggtgtagagagttaagtaacttccccaaggttacacatgggagaatactggagtctggatttgggccccagggaactgatctcgaagacctcattcctatcattatattttactatccctcttctat

SEQ ID NO: 179738 - DNA, 348 bp, Homo sapiens
acaatctagtctccccatatccccaaaacaaaaacaaactaacagcaacaacaaaaaccctttccatcaggccaactagtggctttggaaccaattacaaagtactatgagatgactctttaaatgaaaactcttaagctattcaccaagtcaagtacattgtgggagctgaactcccacttcaaaatttgggttctgaccacggcctccaatccaacctccctcaaattccaagagagttaatcctggcttcccgtcaggaagtttgctctcacaaacttgtagaagtactggctattaaaaagtgtatgggttcttttagtctttctgtgccatggtcagtaaggg

SEQ ID NO: 179739 - DNA, 299 bp, Homo sapiens
ctcctaccccagtgcatagtatcatcttgactaatccagcgagagattatacacatactcctccctgcaatggccagatgagggatgacaattggctccatctgagcaactgtcttcccttccacttcccaaaacctctcttcccttatctctccctatatttaactggctccactgctttcctccatcagctcctactattttatgatgtacttgcattaccaacacattgcttaattccttttagcctgattttttttttcttgagacagggtctcactctgttgcccaggctggag

SEQ ID NO: 179740 - DNA, 398 bp, Homo sapiens
agtggaggctgagccaggatggcccttggtccatgtggccccaagcctggtgccacacaccacacactgccaagaaagtggcctgggcccccactggggcatgtttagcttttgccttccctgcatactaaccccctgggttaccccagatgtgccattcacatagttactgactggaacttagtttctttggcagggacttcctttttagtagttgttgaattacagcgggaggaagtgcctggaatctgctggtagaaaggctttggtgaaagagctctccagaggagcggaagttggtcaggaattaggttgtgtggctgtggtggaaaggaggccagtgtgggcagaagccagggtgcagttccccatggcctggaggctgtgagttccacgac

SEQ ID NO: 179741 - DNA, 203 bp, Homo sapiens
ctaacctgcattgctacctcatgcaaacctctaggccatgaacccatcttcacttctcaactagacttcagcttcaaggacatgctcatccgtgtattgctgactctcgtgcatccaatgccaccaaactcatgctaattcccacccagaatgcacttgatctttcaagcatctatagcagcacacaaagagacaatgtctag

SEQ ID NO: 179742 - DNA, 615 bp, Homo sapiens
tgatttctccttcagtcactggatttctaattactctcttgcactgcaacgagttgctcttgctacaagtacttcttaaattttgccagagcgtagaaattacccagtgtgtttataaatattcacactcctaggtttctcctgatgattctgtcaataaatctgaaatggtttctgggaacctctttttaataatagcctcaggtaactcttgtatccagcatgtttaggaaactgtattaatatatctgaaaatggcttcatttttgttgctagtaagggctcactgcaaacaaatgtagttggggcaagaagaagcagaagtcttggtgaggaaggcttatagctgtggtaaactgaacttatttaggatttttttccctgggaagttaaaactttaaataccttatcttttccatcagccttcttgtcaagaaggtaggttctgagcattttccccatccttacaatagggatggtaatcttgatttgtccctaacatggtggcagtacagagaaatgaatcctgggtttcctgttcctagtgtagggtttttaataattagaccagaatggccatgtttcagaatcagtatagtgaaggagatgaagtat

SEQ ID NO: 179743 - DNA, 389 bp, Homo sapiens
gcgaacgacacagcggccatcttggtaaaggaaaaggaacaaggaagaaagtggaaccaattagcaagctaagggtcttgcggtgtcacccaggctgtcacaggagtgcagtggtgtgatcatagctcactgtggtctccaacttcagggctcaagcgatcttcttgcctctgcctcccaaagtactgggattactggcgtgtgccaccgcacccagatgagactaacgttttaatgtcaaaaaacctataaaatatttggaaaaaaagcgtttaatctctaagagccgctatgcaaaagcagtggagacacaaaaatctgtatgacactgttcctgccctgagaccgggacaaggtggttttatgcatcaaatacagaatggcacgtt

SEQ ID NO: 179744 - DNA, 457 bp, Homo sapiens
ttccaggctcagagaggttgagggcttgtgcggagctgtacagccagtgaaaggtggagccggcctcaccccaggcaagggcagtagaacctttgctctccaccatttcccagccagactctgccctagatttcaagacactagtgtcctaccttccagtctagggttggcctgactccattctagaccacttgggcagggatggggaacccctcattaaggacaagggactctaggatgggctctcacaagccctgattttgtcagatccctccttggctctagaaactgctgtggctctccactgtcactaggagaaagtctggcctccttggctggtcctctgaagccctccctggccttgtccctctgcctttcccctcctgcctggagtgcagcagcaggttggatgtcgggagggagaaatacaaggctgggaaaaatgagcttctactat

SEQ ID NO: 179745 - DNA, 467 bp, Homo sapiens
ctgttgctgggtcaggtgctgacagactttctccctgctgagccctctggcatgcttggagctcagtggtgataatccagaacttctcttcccttggagggctcttgcatggaggcagagttctagataaggacctagagctttgccctttcttccggcccaccctcctcctttcctggggacttaatgaagaacaccagggacggaagtagtcactcttgggcagggacacttggccgccctaatcagcctgcctacttcctgccctggctcctgctctgagattaagaaaaacaacaacctcttaaatttagacaacttctttgccatacatgggggatgctcacatacatgcccttattaaaaatgtttttacccaatcctcacaatttggatgacaaattatgatccccattttacagataaggaaactgaggctgagcaagatgaaagatttaccctggcct

SEQ ID NO: 179746 - DNA, 592 bp, Homo sapiens
actcacttgaggtcaggagtttgagaccagcttggcacatggtgaaaccccatctctactaaaaatacaaaaatcagctgagcgtggtggcgcgtgcctgtaatcccagcactttgggaggccgaggcgagtggatcatgaggtcaggagttcgagacccacctggccaatatggtgaaaccctgtctttactaaaaatacaaaaattagctgggtgtggtggcgcgtacctgtagtcccagctgtttgggaggctgaggcaggagaatcacttgaacctggaaggtggaggttgcagtaagccaatacagagccactgtactccagcataggggaaagagctagactccatctctacaaaaaaacatagactttggagtcaaattgcctggttgttggatcccaggtctgagttttactgtttgtgtaacctgggataggttatttcacatctctgagcctcccttttctcacttatggaatggagataataactgtatccatctcatagtgttattgtcatttaaatgaggtactatacataaagcttttagagtagtgcctggtagatagtaagtgatcagtaaatgtt

SEQ ID NO: 179747 - DNA, 381 bp, Homo sapiens
caggtaagggtgggcagacctggcagaaggctggttcaaggcatgggggtgtgcgtgggggggctccttttgggggtggggggcggacgggattagttccaggatgggagaagctcggttctggctgggggagatgcccttagctgcaaaagctccgggcggccaggcagagtgctggcctcggtgggctcacagggcggagaagggggtcgggctgcaggaggaggcgcctggacctccggagcagagtcgggtagcggtccgtgccgggacgggggacccgtcggcgccggggtgtgcaaaggagcgtgtgtgcggctggagggcggcgatgcgaacaacaatgcgcccgcgcccggggccaggctgcactggcggccg

SEQ ID NO: 179748 - DNA, 231 bp, Homo sapiens
tagacaaaagtaccctattctgaaaaaaaatttctgcaaaagacatttattagtaaggaaggaaagtgaccgacaagatttaaggcaggaacagtaaccctgctttgtgcaattgcaattgggtttatgatgaggagtgcccttatctataaacctttaagccctgagtcttgaaaggaaaagaaaaacacctagtttttatcttgctaatcttctgctagtcttcttgtt

SEQ ID NO: 179749 - DNA, 609 bp, Homo sapiens
tggggcacattgctttatctttttctgagttgttaagcagttagaaaattattttaaatagattttttttgatacacttgatgatttttatcagtaaacttgaaaacggctgtttattttggtcacaaagaaatattttaataatgcttttgacaagatatctcaaaccatctgaatagagaatcttaaatagctttaaaagaatcatgaacttattagcaaaaataatgaagttcagtataacatttaagttgacattttgagatagtagataaagtttacttgggacacacatgaaattaaaggtgattcgttagtgtttagtaactgtctttatttcttcatttttttgttttatattttatttagcaaaacatcttaatattatttttagtttggagtgtttgtagaatatttaaataaacattaaaaaattcctaagggaagggacaggtgaaatactaatacaaacaaaaactgttacaaaatcagaaatgtcaagattttggggggctactgtgtatctgtttatctacttgatcttatatgcgattttgtctttcatttcattactcttcttcattgggaagaaaaaatcctctcaaggtc

SEQ ID NO: 179750 - DNA, 399 bp, Homo sapiens
tttaaattctattgattttatgatgcatttggaatatggggagtgtcaatgccttccccttcttttggtgttgcattctgtctgcatgagaaactatttttcataccttggggataacatggatccaattatggagaaaaatgaaaggaaccaagcccttagctggatgccttagtgttcagatactgacactgcacccttccttttatctaagctgttgcttcatatgccattttactgagacaatgggagaggctaatggaacgtcataaacatcactcagaatcctaatttggtattgatgcaattcctattgaggaacagagagaaaaaggattcagtatttcagagagagaaaaggattcagtatttctgctgaataagaaattatttctgttg

SEQ ID NO: 179751 - DNA, 179 bp, Homo sapiens
taacagaaataatgcaaaggagagtgaggtcagctgccagcagcttagatgaagcggggagagtggatatgatacaaatgccagtggaacaggcagccacacaccctgccaacgtcttggagtcttagaggtcctcagccctttcctgtggaagcatccactttactcctcactgcttg

SEQ ID NO: 179752 - DNA, 188 bp, Homo sapiens
accactggtgctactgagacctctaggacagaagttgcctcttctagaagaacatccattccaggccctgatcattccacagagtcaccagacatctccactgaagtgatccccagcctgcctatctcccttggcattacagaatcttcaaatatgaccatcatcactcgaacaggtcctcctcttgg

SEQ ID NO: 179753 - DNA, 565 bp, Homo sapiens
tgatgggcacttgaataatttcaactcagaagactgcagaataatcatattttaaactctaaaaaatagtcagcataaaaaggatcaactaccatataaaatatttcctgtatatagtttttcctaattgatcccattttgttctgattattaaacttactatatgcttggcattcttctctgggatcttttcctcgtgactaaatccacaagaaagtatttgcttactttgcacggaagactgttctgtgttcttgtttgttttctaaatgtcttaaacgcagggttctgattttctctccacatagcaactagtatacaatgaattcccagaatgttgttgcctgaaaatagtaaaaggacttttgcagtgattactattctagaaaaacttgcaaagaatagtcttttctagtgattgcagaaatataaagtttgacagtaatgcaaatggccactgaattatatttgaatgtattttagttatcaaacaatttgttctctatgtagaatgttttgtattgattacttgaaaggcagatagctgttatttattaagacactt

SEQ ID NO: 179754 - DNA, 499 bp, Homo sapiens
ttcagttaaaaggtggaggagataagatttgggtttgtagacaaatacaaagttactctcaggctaacattttctttacttctcccactgcacagtgtgtgtcatgagtactttatacaaagttaaggtggtttgcccatctatttcagttggtaattatagaattggagatgcgaagttgaagctgttagccttctaacatacctccatcagtggactctaaggattttacccagaagttctatgttctacagtttcagacttaaccactttacttatacctgtccatctcttcttttgatatttttaataaaaataatccttgttgacctctgttcctatagggttatagaaaccaaactgctataagctgggcgtggttgtgcacacctataatcctagcactttgagaggctgaggcaggaggattgcttgatcccaggagactgcagtgagccatgatctcagcactgagcaccagaacaagactctgtctcca

SEQ ID NO: 179755 - DNA, 198 bp, Homo sapiens
atttctggagacctttagtctatagactaatctgagcaaggcattgtgaacagtagtgtcataaagatgaatggtactgaccattagggaattgataggctggaagatgagatggaatttgtatgtaaatctcttaatacagagaaggaaatggtaagtatgataatagaggtgagcacccaaaaaactgtggtccca

SEQ ID NO: 179756 - DNA, 524 bp, Homo sapiens
gtctggattgctgcagtggcattctaaatagtctccttgttgccacctttgtacccctgcctgtcatcctctgatgtgaagtcagattctgtcactgtcctgctcacatccactcaagagcttccttctcttgagagtgtaagcccaagtcttatcagtggcccatggggccttccataatgtggcttctggtgtctctcaggctcatctccagcccacacttcattgtttccctccactctggccacactggcctccttgttgcccctggaatacagtaggcatgcggttatctttgccctactgcactttctgtctggaacattcctcccctggatagacacattgctcacttcctttgggttgtgttcatgtgtcccctggcaagaggggcttccctgacctccctatgtaaaacagcaactcatctctactgctcatctctgatccctttccccttctttattcttctttattggcccccaaaccgtctcacagagttgatatgttacctgctcactcta

SEQ ID NO: 179757 - DNA, 339 bp, Homo sapiens
attgagcaacagcaggtagatttccacaaaagaacaagacaatgatatgctctcatatcccaaaaaactaatgggagctggggactttagagtaacataccataggtttttttattttaaaacatgacaggctgggctcagtggctcacgcctgtaatcccaacacaatgggaggccaaggagggcggatcacctgaggtcaggagacaagcctggccaacgtggtgaaaccccgtctctactgcaaatacaaaaaaaaaaaattagccgggcgtggtagtgggcgcctgtaatcccagctacttgggaggctgaggcaggagaatatgaaccgggggc

SEQ ID NO: 179758 - DNA, 214 bp, Homo sapiens
aaggtgggaggatggcttgagcctgggaggcaggctgcagtgagatgcaattgcatcactgtattctagcctggcaacagggcaagaccacaccaaaggaggggaagcgaggggaggggaggaagaaggagaggaggaaataaaagaaaatcaggagtctatctttcaagtactcaagtcaaaataattggagtcatcattggcccctctcttt

SEQ ID NO: 179759 - DNA, 387 bp, Homo sapiens
aaaaaatgaatttttttttttttaatcagctaggcatggtggcatgtgcttgtagtcccagctactcaggaagctgaggtgggaggatcacttgagcccaggagttcgaggctgcagtgagctatgattgtgtcatgtactccaacctgggtgacagaacgagaccccgtctctaaaagaaaaaagaaaatgcctgtttcagttgtcactcctcaccagtgaggcatgggagtgttctcttcctccaaacctcactaaccctggataatggcattgtgataaattttccactggtcaaaaaatatatattgccttaaactcaaaactcgtccatcaacagtgaggttggctgtctttccgtgtgtttgttagccagtggtatctcct

SEQ ID NO: 179760 - DNA, 200 bp, Homo sapiens
ctcggcctcccaaagtgctgggattacaggcatgagccaccatgcccagcctctttatgctctttataacagaaaatgaatgtaccattttttacttgggtctcagaaaagacaagtatgagttggtgtttaacattagactaggttgtaaattgacaggagagccatccacatacatcagaaaaagaggagcagagaag

SEQ ID NO: 179761 - DNA, 509 bp, Homo sapiens
ttcacttactatttttaaaggatattctcaatgagtgtgaatagtgagtcaacagctttctttcaccatttcacacatcctgagcctccattgttttgagtcagctgtcgttcatatctttgttacctgtgaatgcacaaaatttgctctgtatgatgactatgatgtgtccaggtagggttttctttacatttatttttatgaggggtttatgaactttttgaatctataagttgatgttttttcactacattttagactatatcaactttttttttctttcatcttttccagccatttcttcttggttctggttccgtgtgtaccgcatgatattgtaccacgtgtcacggagactcgcttccttgttttctttcagtttcattttcccttgcacttcagatggaatgatatctattgatctcttttcaagttcactcattctttcttctgtaatgttcaatctctcttaagaaagtccaaataaatttttcatttcagagagtgga

SEQ ID NO: 179762 - DNA, 863 bp, Homo sapiens
cttcttctcaaactaattgtcagaaagtcagaaacttcctggcccggtgtgatggctcacacttgtaaacacctgtaatccagcactttgggaggccaaggggggtggatcgcttgaggtgaggaggttgagaccatcctggccaacatggtgaaaccctgtctctactaaaaatacaaaaattagccaggcatggtggcacatgcctgtaatcccagctactcgggaggctgaggcaggagaattgcttgaaccctggaggtggaggttgcagtgagctgagattgcaccactgcactccagcctgggtgacagagtgagactctgactaaaaaaaaaaacaaaacggagaaagtcagaaacttcctgaatatactacatctgtcttctcactcctctatttccacctctcctactttttccatatgtgaaagggacatggccctcttataagaacagacaggaaccttccttcagaggtggaaatgcacaaacagtaacagtagggttgcccaacaaaggagtgtccttgttagaaagcaggtgagaggagtcagatcatgaagaagtgcaaagatttgagtctaagaaagcattcatggaccagactggtggggaatgcatccacatagacctgccctgaccctaggcctcaagcaccccatttgtccatcaccatctggcttctctcctcaccaaaaagcaatgtcaacatgcaggtacgaaacatgaacagttgcttttttcccattctccattaccctcatgtgcagaaccaccaatacacattacggaagaggtgtgcaggccattcctgggtacagagaagtccacatttttctgcatacatcatttcaatgaac

SEQ ID NO: 179763 - DNA, 263 bp, Homo sapiens
gggattacaggcatgagccatgacacctggccaaactcagcattttcaaaagtcaaggaagcattaatatattttagaaatactttcatttaaaataaatttcagaactctgtattatttttgcaatttttctacaaatctaaaactattctaaaatttaaaggtttctgtttttaaaaaaataagtttgagtcttctagtaagaccaggcagttcctcctataggatcaactctgcctatcataacagctataacttccaga

SEQ ID NO: 179764 - DNA, 112 bp, Homo sapiens
tgctgggattacaggtgtgagccccccgtgcctggcctgttctttcttctattttgaaggtcacttgggatgcattttcatgctattaataaagaaatgctgacccttgtta

SEQ ID NO: 179765 - DNA, 456 bp, Homo sapiens
ggcccggcgcacccaagcgagggtgtccaggggtgtctgggttcagactaggtcctgttcaaggaagcaggggaggaaggtcactcgtgggtcacatgtggttggaggagcagcaggaaagccctggagccctcgtctgcatacagaactcacactggcttgaattccacatcagcgcgcagcttccaaaactcctatatcctagcacacacaggatctatttaatctaatcctcacagcaacactacaagataggtattaatataatcgctagggcacagaggaggaaacgcctcagatgattgagcagtgcgctcacacagccggtaaggtggtggaaccaggaccggggacttgagcccaggcttagggagaggcctggggagagaatctgagctgagtgccaagtctgacttttcttcttcaacactcactatctctgacactggacaagtt

SEQ ID NO: 179766 - DNA, 182 bp, Homo sapiens
gtggagaggacgcgtaggacgtctctggagagcagatttgaaactggcatccaggagagaggaggcccaccagtcactccaaggaccactgagattaggtgtgaaggcagaactggaatgtgggagggatgcgtccatccaaaagatgagcttgagtttactgttttccattcattgcatgt

SEQ ID NO: 179767 - DNA, 1838 bp, Homo sapiens
ggcacgagggcctttgctcctgagaagttactgacaggtggaacctgaggcagcaggacagcctggcattggccacgggacatcggccacaaccatagcaacttcggcatcaaatggggcaggagagagaacattaaggcagccatgagctccagccaccccgagccgggtccctgggcacccctgagcccccgccttcagcccctgtcccagagctcttccagcctgctgggtgaaggccgggaacagaggccagagctccacaagactgccagcagcaccatgtggcaggcccagctgggcgaggccagcaccagaccccaggccccggaggaagaggggaacccgcctgagagcatgaagccagcacgggcctctggccccaaggcgcgacccagtgctggaggccactggcggagcagcactgtgggcaatgtgtccaccatgggcggtggtgacctttgtcgcctgcgggcccctagtgctgctgctatgcagaggagccattcagacctggtccgtagcacccagatgcggggacacagtggtgctcggaaggccagtctcagctgctcagcccttggcagcagccctgtccacagggctcagctgcagccaggtggtacttctggccagggtggccaggccctgcaggcctggaaagggacctggctcctgaggatgagacttctaactcagcctggatgctgggggcgagtcagttgtcggtgccaccactagacctgggggacacaactgcccacagcagcagtgcccaggctgagcccaaagctgctgaacagctggctaccaccacctgccatgctctgccccagctgctctactctgtggcatgagggagatgagggaggtgggggctggtggctgctgccatgccctacctgccacagggatcctggcctttcccaaactagtggcgtcagtgagcgagtctgggctgcaggctcagcatggggtgaagatccactgtaggttgtctggggggctccctgggcactcccattgctgtgcccacctttggggtcccgctgggttagtcccagagcctggctctaggaccaaagatgtgtggaccatgacctcagccaatgacttggcccctgcagaggcatccccgctgtcagcccaggatgctggtgtgcaggcggccccagtggcggcctgcaaggctgtggccaccagtccgtccctggaagcgcctgcagccctgcatgtgttcccagaggtaactctggggtccagcctggaggaggcgccgtcccctgtgcgggatgtgcgatgggatgctgagggcatgacatgggaggtgtacggagctgcggtggacccggaggtgctcggtgtggccatccagaagcacctggagatgcagtttgagcagctgcagcgggcgcctgccagcgaggacagcctgtctgtggagggccggagggggccgctgcgggctgtcatgcagtccctgcggcgccccagctgctgcggctgctctggcgcggcccccgagtgaggagctgtggcccttggagctggcctgggcccactgacttagtcctagacctgggccagggacagtgggggctccgtgccccctggacccaccggcagctgggcacatgtctcacccgaatatcggctgcctccagaccacaggactgcagcctggggcttccggccccacacagctgggctgttttcttaagggcttgatttccaagggccacatctctgcaccttccaggctctgaactttgagacagggctttagcactgtgcagaggggagatcctgagttttctttaaaaaatgaccttttgttc

SEQ ID NO: 179768 - DNA, 1986 bp, Homo sapiens
cctccaaaccctccctttaggaatgctgcctgctgctttgcccagagttggccctgagtgttcctatcaggccccgttcactctggggtggattaaaccacctcctggagggtgctgtatccccactgtgcaatgggggtttgtgctgtgtgcattcctgcctggtccttgagagttactgacaggtggaacctgaggcagcaggacagcctggcattggccacgggacatcggccacaaccatagcaacttcggcatcaaatggggcaggagagagaacattaaggcagccatgagctccagccaccccgagccgggtccctgggcacccctgagcccccgccttcagcccctgtcccagagctcttccagcctgctgggtgaaggccgggaacagaggccagagctccacaagactgccagcagcaccatgtggcaggcccagctgggcgaggccagcaccagaccccaggccccggaggaagaggggaacccgcctgagagcatgaagccagcacgggcctctggccccaaggcgcgacccagtgctggaggccactggcggagcagcactgtgggcaatgtgtccaccatgggcggtggtgacctttgtcgcctgcgggcccctagtgctgctgctatgcagaggagccattcagacctggtccgtagcacccagatgcggggacacagtggtgctcggaaggccagtctcagctgctcagcccttggcagcagccctgtccacagggctcagctgcagccaggtggtacttctggccagggtggccaggccctgcaggcctggaaagggacctggctcctgaggatgagacttctaactcagcctggatgctgggggcgagtcagttgtcggtgccaccactagacctgggggacacaactgcccacagcagcagtgcccaggctgagcccaaagctgctgaacagctggctaccaccacctgccatgctctgccccagctgctctactctgtggcatgagggagatgagggaggtgggggctggtggctgctgccatgccctacctgccacagggatcctggcctttcccaaactagtggcgtcagtgagcgagtctgggctgcaggctcagcatggggtgaagatccactgtaggttgtctggggggctccctgggcactcccattgctgtgcccacctttggggtcccgctgggttagtcccagagcctggctctaggaccaaagatgtgtggaccatgacctcagccaatgacttggcccctgcagaggcatccccgctgtcagcccaggatgctggtgtgcaggcggccccagtggcggcctgcaaggctgtggccaccagtccgtccctggaagcgcctgcagccctgcatgtgttcccagaggtaactctggggtccagcctggaggaggcgccgtcccctgtgcgggatgtgcgatgggatgctgagggcatgacatgggaggtgtacggagctgcggtggacccggaggtgctcggtgtggccatccagaagcacctggagatgcagtttgagcagctgcagcgggcgcctgccagcgaggacagcctgtctgtggagggccggagggggccgctgcgggctgtcatgcagtccctgcggcgccccagctgctgcggctgctctggcgcggcccccgagtgaggagctgtggcccttggagctggcctgggcccactgacttagtcctagacctgggccagggacagtgggggctccgtgccccctggacccaccggcagctgggcacatgtctcacccgaatatcggctgcctccagaccacaggactgcagcctggggcttccggccccacacagctgggctgttttcttaagggcttgatttccaagggccacatctctgcaccttccaggctctgaactttgagacagggctttagcactgtgcagaggggagatcctgagttttctttaaaaaatgaccttttgttc

SEQ ID NO: 179769 - DNA, 495 bp, Homo sapiens
cgttggggcggctcagaggcagccacttctttcttcctcatcactttgctgttttcggaaagcagttagtagttattcgctgtatgtggcttttgagccagatcggccctcttcattatgctaaacggcggaatcatctggagcgagatacccaatgaactacattgagctcaggagagttttatgagcagaagagcaaaaatacacatattggccgagcgtggtggctcacgcctgtaatcccagcactttgggaggcctaggcgggtggatcacttgaggccaggagttcgagaccagcctggccaacatggtgaaaccccgtgtctactaaaaatacagaaattagccgggcatggtggtgcacgcctgtaattccagctactcaggaggctgaggcaggagaattgcttgaacccgggaggcggaggttacagtgagccaagatcacgaccaccacactctagcctgggcaacagagtgagaccctgtctc

SEQ ID NO: 179770 - DNA, 592 bp, Homo sapiens
tcatagtctgctacgtacataatgaggctcaaaaagactgagtttgggaaaagttaagatcctcctatagttcctcaatgtgatgactgggtgttcacactcattggcgagatgtgcctctctcaaaccttgttcagatgctgcagacacattacccatcagatgtgcaaaaaaaataaataaataaaaaagggaggccaggcgcatgaaccgagatggtaccattgcactccagcctgggcaaaaagagcaaaactccatctcaaaaaaaaaaaaaaaaaatgagctggttgtggtggcacatgcctctaatcccagctactccagaggcagaggcaggagaatctattgaacctgggaggtggaggctgcagtgagccaagatcgtgccactgcactccagcctgggaaacgagcgaaactctgtttcaaaaaaaaacaaaaaacaacaacaaagaaaacaaagccagcctgggcaacatagggagactccatctctataaaaaaatgtaaaaattagccgggagtggtggcgtgcacctgtagtcccaggtactgaggaggctgaagcaggaggatcacttgagtctgg

SEQ ID NO: 179771 - DNA, 484 bp, Homo sapiens
gaataactattacagcataaactattacagcataaactattacagcatacaagtccacttaaaaaatatccacatataagggctgggagagagacatcactacaggtaattttatatttggggttaactcaaatcaaaatgactagaatatacagtaaatgtctttgattaatattattaactgataaaacaaattagtggatcataggattgcttattcaatattctaattatcaattcaaaaatgattttcgtaagccctttgtgactatctctttaataaaacccaaataatagtttatgctgtacagcataaactattacagcatatttaaaggattattcaccatgagaacatggagtttactcttagaatgcaaggtggttcaacatatgaaagtcagtgcaatgcaccacacattaacagaatagagggggggaaccacttgatcaactcatgcagaaaaagcattctgacaagata

SEQ ID NO: 179772 - DNA, 321 bp, Homo sapiens
cagggacacagtttgagaggtgagttgaaggagtattgagtatttcatgaatagagccttgggttattggttaggagcatggtactggtcatacaaggcccatggtttgagtctctcctgggcaggtgctctttgaccatagattgcatcattcatcccaccagccattttataaatgatgtgttactatctgtggtaaagaggaccagtatgtggctgacaggtacaaatctatcacccctgttgaaaacacatctctctcagattactcagcctctttccttcattgtctttattacagtttgtactgttggtagtttt

SEQ ID NO: 179773 - DNA, 242 bp, Homo sapiens
gatacatccagccagggcaggtgtttgttcgtcttacaaggaagacaatagatataaattttttttttctacagcctcgacctcctgggctcaggtgattctcacacctcaccctcccgagtagccgggattacgggcacgcaccaccatgcccagctaattttttgtatttgtatttgtatttttttgttttgtgtgtgtgtatgtttaattttttttgtatttttagtagagacggtgtt

SEQ ID NO: 179774 - DNA, 686 bp, Homo sapiens
accttttcatgataaaaaaaattctcaataaactaggaatagaaggaaactcccttaacataataaaagccatatatgaaaaatctacagtgaacatgcccaatggtgaaagactgaaagcttttgctttaagatcaggaacaaggcaaggatgcctgctttcatcgcttctattcaacatagtactggaagtctatccagagcaaagttgggcaagaaaaagaaataaaagacatccaaattggaaagcaagaagtaaaattatctctgtttgcagatgatatgttgttatatgtagaaaatcctaaagattccaccaaaaaaaaaactgttagaaataattcagcaaagtagcaggatacaaagtcaacacacaaaaatatggttgtatttctacacactaacaatgagcaatctgtaacgaaaattacagaaacaattccatttatgatagcatagaaaagaatgaaatacttagcagttaaccaagcaggtgaaagacttgcataatgaaaactataaaacatggctgaaataaattaaataagacataaataaatgcaaacacatcccatgttcatgggttagaagacattattgttaagatgtcaatactacccaaagcaatctacagattcagtgtaaaccctaccgaaatctcaatgacattttcttcagaaatagaa

SEQ ID NO: 179775 - DNA, 312 bp, Homo sapiens
aaaggaggaaggagttttggtggatgaccagcattttccaccacagctgactcatccaaggtggcctcagccactctggtttgttcattgaagaaggtggtaaaagtaggggctcataaaccaataacacagacacacagaaacgattgttctcggccgggcgcggtggctcacacctgtaatcccagcactttgggaggccaaggcgggtggatcacgaggtcaggagatcgagatcatcctatctaacacggtgaaaccccatctctgctaaaaatacaaaaaattagccgggcgtggtggcgggcgcct

SEQ ID NO: 179776 - DNA, 409 bp, Homo sapiens
tctattccaggatcttatgatctgtgtcctaactacatattatagggccccagtggtccctatgcctctggttctattgtcatcacacacttcctgtttcattcctatagacagatttattcatgactagggaacagattatgctagtaaaggtgttggttaacatgagtttaaggcaagaacttaaacgtaaatatctctagggattggacaggcaatatgccttaaatagtaaagctatcaggtagggattgactgcatgcctgcagaggaaactgctgcctatttagccacagaagattattgccatgtaaaaatgtgagtatggtttgtcacatatttttaaagaaaagtcagaaatccaaaaatttgtatgaaatttttaaacattttatattgtcaattcaat

SEQ ID NO: 179777 - DNA, 545 bp, Homo sapiens
tattttctaatgtgtttgttttaattttaaaattcttttaaaatagcaaaataagtaactcacttgatttgaaaaaggagtctattttttcacttggggaagctcaggggaattactctcctaactccagggttttggtttttgctcttttataggttatcaattgttataaaaatcataatacgtgattctcaaatatagcaaatcaaaacctgctctagagtatagtttataactttttatgtactatgccatcttgtatgaagagaaaactagacttaatctccctgaaaaccaagttgctctcttctttaaagttagaattttcagtaaactaataatttcattattctttcttgtttgtacattctaatttcacaaaatgtcagtctgaccaaatagcagaatgttttataaagactatttggaaattacacatttttcttacattaccatttattaaatgtataatacagtgcatttaaaaattagttttcctatgtaggtgtgaggaatgatatatttgacagtaatgctatccttta

SEQ ID NO: 179778 - DNA, 835 bp, Homo sapiens
ttttttgtatttttagtagagacgggcgtttcgccatttcgcccaggctggtctcgaactcctgagctcaggcaatccacccacttcggcctcccaaagtgctaggattacaggcgtgagctagcgcctggcctatagttacgttactttagatgcctggattcaccagctaagaagttttttttttaattaaatttttttttggccccagtgctactaccaaagcagtcaggaagttgaagataaggcagacaactggattgattcaggtatatttaagtgggttgagggttattgatgaaatggttaaagttattaaagaccaaaggtggagaggggttgagggagaccaaaagtagagtctaactgggtaaagaaggaagtaaagaagaaaagaacagagaggacaaggggctgcagtcttaggttcaataacgggtgtaactggaatgtgagtgagagctggaagaaacaccaaaggttgtggccagagagtgggatgtctgaatttcctatttcagatgtagagcaattccacatcatgatagggtatatggtgtggccatgataaggaatggtgaaggttgctggaggtaaagaagaaactggaaacctaggtgtagctgggttgtccacatggccactgaggccatgcagtataaaggcttgagcagaagaaagtgagccaggtgttaaaccaaaaccatatttcccttctttgaaatcagttaagaattgaggcacaaaagctgaaccagcattatatagcagtcatttgtagaatctgctttgggtgaagtcacgtcagcctcaattagaggtttggcagttgtca

SEQ ID NO: 179779 - DNA, 231 bp, Homo sapiens
aaccaaatatactttagtttcacacgaaacagcgtgatagattgatttctttcccttatcttccataagaagatcctaaaggcctcaacaatggatcagaacagctgtgtcttggttataatccaatatcagctgtaagtctttgacatgtcagagttttggagtatctgacttaatgtggcacttacgttttttagcactttgcttttgagaaattagactatgttttaa

SEQ ID NO: 179780 - DNA, 333 bp, Homo sapiens
ccttcctcctcccctcaaggtatgtgtgtaagcatgatatttgttggtggtagcagtgaaggagtggggagtgaggatagtggacagaggttaattaaatcacccaaatatgatttgtagaatatctcctcttctggtttaattcttctttccaagtacaaccacaggagtcaaaagagcaccttaaaattttccaacaacctccatttgggaggaatgtgaatttcacagaaagagaaatttttgtgggttttatgtctgtgtgtgtgtgtgtttgtttgtttgtttgtttgtttgtttgttttttgttttttgagacaggcccaggcggct

SEQ ID NO: 179781 - DNA, 440 bp, Homo sapiens
tgtcacccctctttactcctcgctcaccatgttagttgtcggtgatgctcacctcttcccccagtccccccttcctcacactcggagaggacttcctccctgccctcatcaaagtaacaacggagcatctctgctctgggtatttatgtaccggtcttagctcctctatgaaagctgagtgtacattctttaggaacagaaaaccacagctgtctagttgccataattatacaattatgttccaagggtctaacatatagaaactgctcaatcaatctgttaaacgagtgtcaagcaggtgtgactctgtgtgccacagggcaagcgcagagaggaggcttactgattaaatatgtgcatctctattacatgcacgctaaagcttctttcactgcagcacaaaagacatttttaacagcacctgattaaagaaaaactta

SEQ ID NO: 179782 - DNA, 672 bp, Homo sapiens
tgctataattggattctccctctccccctccctccactttaaaagaccaaaatgataacactgagttcaggctaaaaatggtatgcaagttttggaagagacctaggcacaaaaaattatatttagtatattcgatgcttatcaattcaacaaaaatcagctacaaagggcctgttccagaactttagcaatcatcccaccaaattaggtcaccatatactaaaatctgacagaggtttgtgctgtatttttcttaaatggcaaagagagaatatgatcgagagcttaatagaaaacacagcccacaacataagaacaaaaggtcaagtcatattttgcaaactccaagatttgtaaatccatctccctgccccacttcactaacatctaccattctcaagaaatcacattacactaaaaaaacatgagttttgctctaggtaagaatgactaaagggaaatctcccttctgtccttccaatcacacagtaaatacagcacaagatttaattgcagtttataccatcatacatcccagtggggtggctcatctgagagctgaatcagtgacgccctttaacttagactccatgaccttctgggttgtggtaattaccctaacccagaaaacagtcctcagagggaaatgtcatcagtggataacttgtgcca

SEQ ID NO: 179783 - DNA, 576 bp, Homo sapiens
tggaaaacattcacatcaaagtgccacatcatgggtatgcatacatgtttgtatatcatagactatctggatgtttttaagtttcttatcgagatataattcatataccataagtgttgccattttgaagtgtacaattcagtggcttttagtatattgagaaggttgtacaatcataattccagaatgttttcatcacctccagaaaagaaaccctgtacccatgaacaatcagtccctctctctcacccccattccctagcaaccactaatctgctttctgtttctatggatttgcctattctggacatttcatataaatggaatcatccaatatgtggccttttatgtctggcttctacttagcatcatatttttgaggatcatccgtgctatatcatggatgggtaccatgttcctttgatggctgaataatacccccttgtagggatggaccacgtttagtttatgcacacatgagcttgagtggctgctctttaaagggtataaaagaaaccagttctccctggaggggaccagggaaatggggctcatggatggcaagaggttttttca

SEQ ID NO: 179784 - DNA, 191 bp, Homo sapiens
tcccttatggattactttttgtctataactaatcaaatgcaacctctactgcatattgtaggcaataaaaatcattgaaaagcatttacatttaattatacactgacaatacaattttaatataattaatgtaatataattgacgtgtgtctaaaatcacattctggtgaatgatgctgcttggtggggga

SEQ ID NO: 179785 - DNA, 392 bp, Homo sapiens
gctttcaaggaaacaggtaagaattgaaataagtgccagttatgtgagagaatacaaaagaagcaagccagtaaagaatttcatctaaaagtatatataaatagaagatgagagaatgaaagacttaaaagattaaatgtagaccatgaagcattgatattaccaaatgtaccaaaatgtaaacttaataagttaaaatatgtaagttcgagaatctagatagtgaaatgacttcagataatgagaaggtttgtataaaatgcaaagtgacaggctaggtttggtggctcacacctgtaatcccagcacttcgggaggcggaagcaagtggatcacctgaggtcagaagtttgagaccagcctggccaacatggtgaaaccttgtctttact

SEQ ID NO: 179786 - DNA, 372 bp, Homo sapiens
agcatgctcctgcacacacctctgggtgtctaccccagaaatccacacaaagagataaaatccagctaagttttcttcctcttccaagaaacaattgttgtggaaggagaaataagtctagatctctgtgccttacctcacaccatccatcacccacagaaatgatgcagggtcctgatgagcacctccagttttggagctaagagatttaaggtggtgcggccagcccatcagttctgccacctccctgtttggttccaaggtggtgtgggctgcagagcctatggaagtagggttgggacctcagaggaagtgacacttttgatgcttgtcccgggccccagctcaactctctgctcaccgtggtgtgac

SEQ ID NO: 179787 - DNA, 367 bp, Homo sapiens
aaaagatgtaacaataccaggggtcttgatagaagatagtgtagtctcctaagggtacaggaggaaaggggtttttggctgccaggcctccatcctcccagccttgccaaggtgtgatctactgggaggagttgtttatgcctatgctggcagccagacttcctgtgctcctgctcccttgactttcagatgttatcttacaccttggcgtatggcatcctcagcttcctgagcagatgggtttcttccccagtctttggaagagcaaagctgagtgtcgtgttggatggggtattaggttcctattgctacacacaattaaaacaacacaaattttttatcttgcagaagatcagaagtattagaa

SEQ ID NO: 179788 - DNA, 534 bp, Homo sapiens
cggacctgaaatgctgtctcatacataacacatacatccagttccacacaagagtccatcagtcatagtataaaatgtgtgtacaaattgctgaaaggcttggacagtaagattctcatcataacatgaagtacaattcttgctctgtatgactttaagcaaaagaacatgtactgaacactaataggatcataggctagacgctgtaaacatgatttactcgcccacacgcatgtcacagtacacatatgacactagccatttcttttacccataaaatgcatgccattacatgtatcttatattacaccaacacccatgatgtcatgggaaaaccattctgccctttcctgcactctattctttggatgtggaaagacaaaacgagcctcacaaatcaaccttgaactgtgtgtgtaacagggcccaagagcttgacaggccagtgtgatggggaccagaaaagtgattttaataatcgcaccaaagacaaataagaacaaggataacagcactggcctcctccctaactgc

SEQ ID NO: 179789 - DNA, 498 bp, Homo sapiens
aataaatcatacatacattccaaaatactggtatacataatatttaaatgtttttacaaattcagaaaggtttgttttttaaattttatcatttctgggtcatgtttacctctggagggcaagaagaagttgggctcagacaggcaaacacaggtaaccttcaatgacactgttttaattcttaactcggtagacaagttcaagaatattcatattagtatgctttttaacttacccataaaatgcatgccattacatgtatcttatattacaccaacacccatgatgtcatgggaaaaccattctgccctttcctgcactctattctttggatgtggaaagacaaaacgagcctcacaaatcaaccttgaactgtgtgtgtaacagggcccaagagcttgacaggccagtgtgatggggaccagaaaagtgattttaataatcgcaccaaagacaaataagaacaaggataacagcactggcctcctccctaactgc

SEQ ID NO: 179790 - DNA, 301 bp, Homo sapiens
tgttactgatcttgtcaccatttccatttttgataatgcgttcattctgacactgctgactttaattttgattttttacaatattgcattgagtattaacttaccttgatgactgggtgttagtatccccttaagttttgccctggagattagtgccttacttgcattgctcaagtttgggccctgcctcatgctcccaaacttccaccctgtctctgttcttccttgggccagtctttttgtccattcctccaatgactccattccttgtcaaattgagtcctagtaacttgcttgtaca

SEQ ID NO: 179791 - DNA, 258 bp, Homo sapiens
  misc_feature (1)..(1): n is a, c, g, or t
ntctttacatatgaattctgaaggctacccctttcccatttggatggcaagtatcttttcccaggctgcgtgtgagattttgctttatgttatgtgccgtttgtagaacaggggtttctaacttttatgtggtcaaagagaacagcaaaaaaatgataaaattggtaaaacatattgataaatctgaatcaatgtactgattggaaataaaataaattggtagaaaatcggggtagaactaattctagaagatgatat

SEQ ID NO: 179792 - DNA, 218 bp, Homo sapiens
tgagcatagtccattcccaatgagtgaaactatgttgctaaaatttaagcagtaagaaaataacatttagagttagaaaagacattcgatttagattggttcaaccctttcatttttacaccgccaccatattgcctctaaatctgggagtagacacatttaaaaagaagtcagtgttttatggctcatctttttttttccaaaggagaaaagttgat

SEQ ID NO: 179793 - DNA, 373 bp, Homo sapiens
caccatataatcttgtaggtttatgtttttgaaacatgattttctgtagttatgccagtaagtatagccaaacttcctgggcagactcagtagcaatccctgaaaatattgaggaggaagagaacttaacagccttcataggatgaagaagaatcagagggcattgtgcagatgaggcagcaggtcgaggggatgttgacgtcttggcagctctgagatatccgcttctaaatacagaattgcctgaggacgtagaagggcctccacaactgcaagtgatttcataaatgcagtgtatttgtagtctctcttctcttgacccctgcctttttttttttttaattctttttggttgtgagcaggggtaccgaac

SEQ ID NO: 179794 - DNA, 748 bp, Homo sapiens
ttattcttaccagctctatttaacatatgtagtcaatagccatgtgttgttgtggagtataataatagattagcctcaagaaaactataaattaacaaactaagtgacctgctcagaatgacacagcccacacatggcagagctaagactggaactccagtcatcaactcctttgcacactcacacatttcacactttaacacactgtctccttcaggcatggagatttgagaagtcccacggatcagcatcaagaacagatttcaatctctacagagcgacagtatctccaggaatctttcaagattcaccaaacaaaattcatttccattcgtcttcatattccacgaaaacacaccaaagctgccttagggagagggtgtcgccccatcagaggtgtcaaggaccatgcaaggccaggggtcacactggcctcaacaatgtttcagacaaaaacggctcccttgggaggctccgaggctgtcatcgatttgctaaaggtcagtacggatcatttgggaatggatttgtgtaggcatggcctaagacacatggacttctgccaagcctatatatttttttcaaaacatctgcactgtcttcacccttgataaatagcagccaggctacagaaatatttccattacgcacaaaagcctgctttgccaccacaactcattgaaatggatgtttccaacttgagaagaactcttcaatgaaaacatctaaaaacaccccaatcttccag

SEQ ID NO: 179795 - DNA, 224 bp, Homo sapiens
gagggtctcttgttggatttttactgctgtgttgtttgttgattatattttccctccctagggataaatttacaaagaagaatttagatttgagctgtttattgctgccttgtcatcagatgtatgaagcccagttgggggtgttatgtgttaaatgccagtagttagtatcttactaaggagtgttcaaatacagttgttcggtgggattctggtaggtatag

SEQ ID NO: 179796 - DNA, 203 bp, Homo sapiens
atcgtactaccacactccagcctgggcgacagagggagactccatctcaaaaaaaaaaaaaaaaagtcaccacacatttgaggaaaaattctgttaaaataaaaactttagacaaattaaatttagcagagtttatctgagcaaagaacaattcatgaatcagccagcatcctgaaccagtagaggttcacagagttttacca

SEQ ID NO: 179797 - DNA, 207 bp, Homo sapiens
atactagcacaatacgatatccttcatttcatgtttgactttcatagtcttatcataaaaatgacaaatttttacaaaaatatttgagggcttcatcaattttccctaggcccctcttaaccctttgatacacaaaccattatcttctgaagcacttatatcatcatcctgagcagtatttttcctcttcatttaagttaacaagat

SEQ ID NO: 179798 - DNA, 457 bp, Homo sapiens
ctggtcccatgcaggtgtgtttctagaattatgggcttaggatcataatattgctgttttacattttgcctgaaagtgttgttctcacactaatgtctaaaaaaatgccactgagctccttaacattttgtagagggaaccatttataaaacactctctagatgtttctgtcccaggtaatagaacgcccagcacttgattacctgtagttgttacagaaaatgcatgtgttccatggaatgttaattatttctattcactgcctaaattggagcagttggcaataattctctttgaattgctattcagggaaagctatttaagcccaaacacaggagtaacttttaactcctttgccaaacagcttgcaccttttcatgattagcttcccttatgcagtctgttttcaacaactatcattgaaaatggaaaaagtaagtaagtggaaaggaagtaa

SEQ ID NO: 179799 - DNA, 737 bp, Homo sapiens
tcgaatcgacggtttctctctttgacttatagatggctggtcttcatgtttacatggggctctgtgtccaaatccaactccactcaccccccgacttttttttaaattgagacaggatggagtgcagtggcgtgatctcagctctcgcactgtcttctgggctggagtgcaatggcatgatctcggctcactgcaacctctgcctcacgagttcaagtgactcttctgcctcagcttcctgagtagctgggattgcaggtgcgtgccaccacacccagctaattttttttttgtgtgtgtgtttttaatagagatggggtttcaccatgttagccaggatggccttgatctcctgacctcatgatccgcctgcctcggcctcccaaagtgctgggattataggcgtgagccaccgtgcctggctcaaaacatttagttttaataggcattttagggtatgtcttagtccatttgggctgctataacaaaataccacaaactgggttcttacaaacacagaagttgatttctcgcagttttggaggctgggatgtccaagatcaggcactgatggattcagcatctagtaagggcctgctgtctggttcatagatggcaccttgtgtcctcacatggtaaaggaggtgaagaatctctccctggcctcttttgtaagtgcactaataaggacacttcccaagttcccatctcctaatacagtcacattggtgattagg

SEQ ID NO: 179800 - DNA, 286 bp, Homo sapiens
ttctgcatttcagactctaccaatttaacttaggctctcattatccctccctcaaaaagtagccaaacatttctgtatagccaatctaatcctccaacaaacatcttaatcataatactcatgtattcaaaattcatccacaagcccatcatagaattcaaacactttttttctggctttcaaatttttcaaccatctggctctgatccacctatctcataaaatgatactgcattgctatctattatctttattctaccttcaaaattcagtaaaatataaatct

SEQ ID NO: 179801 - DNA, 416 bp, Homo sapiens
aggtcgactgaccgtggcccatggcagccacttgccagtctcgtcgatgctctttctgtcaaggagggggagagcgcctgtgtttcatttccaaatgactagccacaaaagccctttctggcggaaatgcatctgtttggctgtttatcatctctcagtggcgtctggaagtccctgagacaaaagaaacacaggccggcatgttctttgtttcccaatgaaaccaaccaaaatggatttctattttgattcagttcctgcgacctttactaatgcagccagtagcttgattggcaatggccctcttttgtggtgttgccaggaatctgtctttacaccattgttctaacattgggtgggttgtcaggttttgctgggagcccctcaagcctcatgtgcactagaaatgagctccc

SEQ ID NO: 179802 - DNA, 319 bp, Homo sapiens
aaagtcagactgattctaaaagaaccaagcgagtgcttttattgataccttgccctttgcagagtgtgtcagtgagtaggtgacatttgcttgaggcttagctccatttgttactgaagggatactctgggtactggcagaacagaaattgataaatagaaaagaggctttgggttgaatgcggctcttcttacaatcattaatgcatccaggtgtttggaattgtagtctggttagtaaatactggttgagactatatttccatctagattaatggtgttttccagcaaccaaggcaggtgttctgtgcaactgtagt

SEQ ID NO: 179803 - DNA, 355 bp, Homo sapiens
tatagcaaaagagaaactgagaagcacccccgagagacctgtattgggaccaggagtgggcagcctatagcctgcaagaactgggcagggctatgtgctatgcactggggtcatcaatccagttctcaactggagtgcttcttggcaacctggcatgttgtctgagggcaaagaaaagagggcaggtatcatggagggttgatgtcttgtggtgaaggatcaaacctaaatgtgatgctgctagactcaaggggcacccattggtacttacaaagtcactcaaaggcttggactctatcttcaacccagagtacaatctctaaggccatctctgcccctcttcccagtatattca

SEQ ID NO: 179804 - DNA, 348 bp, Homo sapiens
atctcaccattgcactccaggctgggtgacatagtgagactttatctcaaaaaaaaagaagaaacaaaacaaaacaaaaattagctgggcatggtagcacatgactgtttaatctcagctactcgggagactgaggcaggagaagctcttgaacctggggggcggaggttgcagtgagctgacatctcaccattgccccctttgccatgccctgacatcctcacatgtctctctgcttttgcatactcttttccacctggtttgaatgcccttcctttatcatgggacattatcctttccatttaatacccatcttgataacctgactctgaccccctaggcaagttt

SEQ ID NO: 179805 - DNA, 253 bp, Homo sapiens
tggttaatcatcttaaatcatcatagtgttgggtaatgtctgtagaaggatgctttaaactctacttggtgcttcagctatgctgaccatctcaccattgccccctttgccatgccctgacatcctcacatgtctctctgcttttgcatactcttttccacctggtttgaatgcccttcctttatcatgggacattatcctttccatttaatacccatcttgataacctgactctgaccccctaggcaagttt

SEQ ID NO: 179806 - DNA, 622 bp, Homo sapiens
cagaggtggtgataagcggtggatgccacacacgctttgaaggtagagaggacacacttgggcctgtgggatgggctgatgggttgaatgtggggtatgaaagaaaagagcaatcgacgatgccacccaaggtttgaggcctaagtaatgggtcgatgttgttgagctttactgagatgttgaacacaagcagtaacaggtttggagctggggagagagtgcactaaagacgtggattctgggcatgctaatttcctgtctatttggcattcaaatggaggctgaatctggcactcagaagagagtcagggggcgggggggcagcggagatgaggcagaggcctgagtaattatcagaatatggtcattcttgcctggatattcctgggcagctcagctaacctgctggatttgcacatccttatgtgtaaactggacatagcaatacactttccaagccagacccctatgagtccctcacgccttagtttccagtacacctcaagggacaattctgaaatccagttgttttctccttctatgataattaatttaaaaagatgaaaatctgacctgcaagccattaacaaaacaatcacagattgacttcatacagcctaca

SEQ ID NO: 179807 - DNA, 684 bp, Homo sapiens
agatgaataaaggaaaaaaatgagaagatccaagtaaacataatcagaaatgacaaaggggactttaccactaaccccaaaactagcagaagacaagaaataatcaaaattagagctgaactgcagaaatcaagaaattctttgaaactaatgagaacaaagatattacataccagaatctctgggacacagctaagggagtattaggaggcaagtttatagtgctaaaggctcacttaaaaaagaaagatctcaaagtaacaacctaacatcacatctagaggaactagagaaacaagagcaaactaaccccaaaactagcagaaaattgaaactagccactgtccttacaccatatacaaaaatcaattcaagatggattaaagacttaaatgtaaaacctaaaagtataagaaccctggaagataatgtaggaaatactattctggacataggccctggcaaagatttcatgatgaagatggcaaaagcaatagcaacaaaacaaaaatggacaaacgagacttaattaaatcaaagagcttctgcacagcaaaagaaactatcaacagagcaaacagacagcctacagaatgggagaaaatatttgcaaactaggcatctgacaatgatctagtaacaagcatttataaggaacttaacaggcaaaaacaaagagcttca

SEQ ID NO: 179808 - DNA, 727 bp, Homo sapiens
acacaacctggcaagcctggatcatgaagaaacagaagacctgaatagatgtaacttctaaggagactgaacagtaatttaaaacctccacacaggctgggcgcagtggctcacgcctgtcatcccagcactttggaaggccgaggcgggtggacacgtgaggtcaggagttcgagaccagcctgcccaacatggtgaaaccccatctctattaaaaatacaaaaacttagccaggtgtggtggcaggcacctgtagtcccagctactcgggaggctgaggcaggagaatggtgtgaacccaggaggcagagcttgcagtgagccaagatcgcgccactgcactccagcctgggcgacagagcgagactccgtctcaaaataaataaataaataaataaataaagtaaagaagtgaaagaatagctattccataggcagagcatggcattccaaaaaataagaggaggaacgtgcccacctaggtacaatgcttgcttatatataacaaaaatcatggaggagatgtgctctactacaagggtttgtgatacaggattgctaatctttgtgtaactactgtctttcatgagagcctttattattatctattttttttttttatactttaagttctgggatacacgtgcagaacatgtaggttagttacataggtatacacatgccatgatggtttgctgcacccatcaacccatcatctacattaaa

SEQ ID NO: 179809 - DNA, 820 bp, Homo sapiens
tccccctcccccccccccccctcccgccccccgcctacgagagattatagctcgataccggttgttaattcgtccggggactaggctaatcgtaatacatggcctgtgatcctagatatagcaaacagaagacctgaatagatgtaacttctaaggagactgaacagtaatttaaaacctccacacaggctgggcgcagtggctcacgcctgtcatcccagcactttggaaggccgaggcgggtggacacgtgaggtcaggagttcgagaccagcctgcccaacatggtgaaaccccatctctattaaaaatacaaaaacttagccaggtgtggtggcaggcacctgtagtcccagctactcgggaggctgaggcaggagaatggtgtgaacccaggaggcagagcttgcagtgagccaagatcgcgccactgcactccagcctgggcgacagagcgagactccgtctcaaaataaataaataaataaataaataaagtaaagaagtgaaagaatagctattccataggcagagcatggcattccaaaaaataagaggaggaacgtgcccacctaggtacaatgcttgcttatatataacaaaaatcatggaggagatgtgctctactacaagggtttgtgatacaggattgctaatctttgtgtaactactgtctttcatgagagcctttattattatctattttttttttttatactttaagttctgggatacacgtgcagaacatgtaggttagttacataggtatacacatgccatgatggtttgctgcacccatcaacccatcatctacattaaa

SEQ ID NO: 179810 - DNA, 326 bp, Homo sapiens
agtagagactgtctcttcagttctcttggccttcctacaatgggaagtctggtgtagaacataccctaggagccaactaaatgtggtagtggcctgccaaccctgcagagggctagcaaatcttcagggagtctgctgccggtggaaactcaccagtactagaatcccaggctccaaagaagtctagaaaagtacgtcttttaaggagctaataagaggttcaagtttccacaaatcctatctgctcttggcctagttcttttgggatcagtgtgctagtctctcttgtcaaactagttactgaccagcaagactaaaaaaccagg

SEQ ID NO: 179811 - DNA, 203 bp, Homo sapiens
aagactgcactttgttttgtgttcattgtatttgttttcacggctagcctctgcacgtgatgccaatgctggcttgctctttcagggagagagggagggagagaaagtgtcttctgaaaataaatgtatttcggtaaacaaacaatgtgagccttttaacttttttttttcttattttttttttttgagacggaatcttgctc

SEQ ID NO: 179812 - DNA, 377 bp, Homo sapiens
aactcttggcttccaggttctagcactcattactaccatggacagcagcttccttttaattcagtgggattctgccaggcaggcttccaggggagctgtggggtctagtacaagtttctcccctgttgctgcttcagtggctttcaccctgcccaatacatatttaatatgacaccatgtgtctctttgtcagtctcctcatattgagcctaggaattggcaaacactccatgaatatttacacattgacttttttttaagctcttaagagaggaatatcccttggagtcctctttggagatttccagtgtctcatcatcaagcaacatgtcctttcagctaataagatctttatgtttcataatcattgcttaata

SEQ ID NO: 179813 - DNA, 652 bp, Homo sapiens
  misc_feature (25)..(25): n is a, c, g, or t
  misc_feature (60)..(60): n is a, c, g, or t
cagttcaaatctcgttactaggctngagaagaagaggcaaaaacctcccccattcctatnggagcggtggcaggaattcacagcacaaaaatagctccttaaagaaattctcggccaggcgtggtggctagaagaaaaagagaatttggaaatcacaatacactttattgcttttcaaaggctaaagtgcagaaattatgttgaaagactaattatccttggcatataggaataatggttggtggcagcattagaggtcactgtcccatcaataactgcacatttgaagtaattcaccaaggctgttctgaacatatgcagaccaagaagcactgggacccaagttatggaatgaatccatctatcactgactattacggttgagggaaggtcatttaaatctcattgtatctcaattccttcaaaggtcaaatctctttgtgtcttaattccttctaaggccctaactcccacagacagtacagaggaaaatgcacctgcaaacattttggacagcattttgtactatgcacatataaataagttaaagacctggtggaattccatgattttactcattatatactcagaaaaggctagaaaggaaattaaaattatatttgctatcttgggaataagttcagtttctttt

SEQ ID NO: 179814 - DNA, 514 bp, Homo sapiens
aacacagagtgcaagtaattatatctgagtaattagcctcaagtaatactgggaaggcaggcattatcttagcttcactttggaggtcagccaaaatccctattcatcccttcgtgggcctctcatttaaggaggacttttcccaactgctatcagagaacaaatatttggaggtgatttttctgcctccagtgatgaatgaggaaatacctgctccccgtctctgtaatcagtccatcaacactctgagatcttggggaggtgtatgtttaatttatatcctacctctttccaaaaaagatttaaggtagcttacagtaaaggctcatatgcctagggcaatgtaaaaaaaaataagaaatatctaaatacattatagtaagaagagatagaggagggtgctctgaagtagtagcaggttggtcttgcaaggaagcaccaagtttggttggaagtatctggcatgcacagcgaggtgagaggcagaaagaagtcattctgactgcccttgcca

SEQ ID NO: 179815 - DNA, 257 bp, Homo sapiens
agctacggggcgggctgggttggggggccgctatgccgagatgaaggaaagtcggccttggcttcagaggtggatgcatgttgctttctctggagtcatctcagctgagaggcagcttctccatccttgcctggtctagttttaggtggcttattctagagacaggcattcatgttgtcatgatccactagaagctcgaggctggaatcttaggtgtggaagtgatagtaggcctcttgaagggagagaaggcacta

SEQ ID NO: 179816 - DNA, 152 bp, Homo sapiens
agctcctgtggcagttatggtcttcatgcaatatagaagttgttaactactatgagtagagtctctttcatgagaatactaacattcttcctacttgttaacttttcttatggctttacagttcatggtatataaggtgcttctgttccttt

SEQ ID NO: 179817 - DNA, 230 bp, Homo sapiens
tgcccggttaccaggcggagtacagtgacatgatcatagctcactgcatcttcaacttgcctgtctcaggtgatccttttgcttcagcctcctgagtggctgaagctcacacctgtattcctagcactttgggaggctcaagtgatctgtctgccttggcctcccaacgtgctgagattataggcatgagcccctgtgcctggccaaaatcctcattttttaacaccagg

SEQ ID NO: 179818 - DNA, 612 bp, Homo sapiens
tggcaggtgtctcattattcagctccacttatgagtgagaatatgcggtattggtcttctgttcctgtccccatttccaacactggggattacatttctatataagtttccaataattttggaatacatactaataatatatttatgaaaatatggtccaaagtagacaaaacaccattcactcttctatttgaaagttttccttctattctaatgtcacaatctccagcgttattaatcagaatcctgcatttaagggcatctgttaaattttatagctgattataaaaccatcatttaaagaggaccaaaatgagacaacatctgtctgtggatgacaaaaacattaaaggcagccacagttgaagacacgaacaacaacctttaaagtagaatttgctgtagagcctattatgagggggacatttctagttattacctcttttattctaaaccatggaaaaaggacctatcaaataaagtccttctagaagagtgaagggctcctggcaatgttctctttaatccatgatgtgggataaggggagttttgactgattatgaggcaatgtagatgccactaaagtttcaacaccctaaaaggaaaaaaaa

SEQ ID NO: 179819 - DNA, 574 bp, Homo sapiens
gctcccatggaccagccacctcccagcaggacccatttccaacactggggattacatttctatataagtttccaataattttggaatacatactaataatatatttatgaaaatatggtccaaagtagacaaaacaccattcactcttctatttgaaagttttccttctattctaatgtcacaatctccagcgttattaatcagaatcctgcatttaagggcatctgttaaattttatagctgattataaaaccatcatttaaagaggaccaaaatgagacaacatctgtctgtggatgacaaaaacattaaaggcagccacagttgaagacacgaacaacaacctttaaagtagaatttgctgtagagcctattatgagggggacatttctagttattacctcttttattctaaaccatggaaaaaggacctatcaaataaagtccttctagaagagtgaagggctcctggcaatgttctctttaatccatgatgtgggataaggggagttttgactgattatgaggcaatgtagatgccactaaagtttcaacaccctaaaaggaaaaaaaa

SEQ ID NO: 179820 - DNA, 445 bp, Homo sapiens
ttcagaggatcccaagtcagttacacaaaaaaaacagtaaaaaattgaagttgctattattccttgaaaggagaggtgaaagacattaagtgtctaagatgtttacacacataccttatctatgtaaggctgtaaagatttgtgatataaatttccccatatgaaatggcatgagagtatggctttcttcttattgttggatagtttcactagtttacaacagtttacccatagaattattatcttctaaaaaatgtttataaacatcaagcaacaagataatgctagtagtacctttatcttctactctgataccctttcctcgtcgtcacatttttacttcactaagatgtgtgtattttagtgccaggtatactgtaatcctatgaaaaaaaaaatggaggagaggaactatgttgacttttatattgtgtaaataggaatc

SEQ ID NO: 179821 - DNA, 604 bp, Homo sapiens
ccacaccaccgaacatggaggtccaatgccgattcatgaccctgagagctccatcctgagggggcgggcccggaacttatcatttactctgatgctttcctgaaagcacttgcaaatcgctatgacacaaaacttcaagagattcataaaaaaaagactcaagcacaggtgtctgataacttttaaatcacactgttgaacccattaaactggggttgttcttagccttacagccctgtgaatgggagctggatgacttcatagagacttcagagaaattgctacaacagtttatacctggacaaccttggtgcctgaggctgtgttggccacacagaaagttcaccagaaacctgatgatatcaccagagacatccaagctgcaagccgggaacacccatcggattgaaactgccacaccagaagaagaaaaaacaaatgctatttctatatgaatacatcaggaatagatgcccaaatctgggatctttagaaatataaaaggccaggtccaggtgctccaccagacgtgggaaataccgtcgactgatctagttaaatcaagagattaaatctcggctcttggggaccctagtttcagggt

SEQ ID NO: 179822 - DNA, 377 bp, Homo sapiens
tgatgtagatgtaggcatttagagctatgaattttcctcttagcaccacctttgctttgtcccagaggttttgataggttgtgtcattaagttcgaagaatttttaaatttccatcttgatgtcatttttgacccaatgttcattcaggaccagattatttaatttccatgtattttcatggtttggaaggttccttttggaattgctttccagttttattccactgtggtctgagagagtgcttaaaataattttaattttctgaaatttattgaggctcattttgtggcctatcatatggtctatcttggagaacattccatgtgctggtgaatggaatgtgtattctgcagttgttggatgaagtgttttgtat

SEQ ID NO: 179823 - DNA, 120 bp, Homo sapiens
gccccccagattggccgagatcttcgtgatggtttagtatgaccctattactagaccattatccatccttagcaccagcaacggctgtgatttttgtagtgttcctagatttactgaatg

SEQ ID NO: 179824 - DNA, 259 bp, Homo sapiens
aatgatgttagtattttgacaggatttgcaccaaatctgtagattgggcaatgtggtctcttccatgatattgattcttccaattcatgagcatgggatgtatctctgttcatttgtcatccatgatttctttcagctgtgttttgtagttctccttgtaagagatctttcacctccttggctaagtacattcctaggtgggttggttggttggttttgtagctattgtaaaagggattaagttcttgttcttgatttg

SEQ ID NO: 179825 - DNA, 323 bp, Homo sapiens
caacctaaaagcccatcaacagaagactgcataaagaaaatgtggtacatatacaccatggaattctacacagcgataaaaagaatgaaatcatgtcctttgcggcaacatggatggagctggcagccattatcctaagcaaactaacacaggaatagaaaaccaaataccacatgttcttctcagttataactaggaactaaacattgagtacacagggacacaaagaagggaaggacagacactggggcctacttgagggtgggaagagaatgaagactaaaaacctatccatcaagtactgtgtttatttcctgggtgat

SEQ ID NO: 179826 - DNA, 259 bp, Homo sapiens
taaatatatgtgaaaaaaaggaaaactattgaatttgggcttttattttatgctgacatatggaaaagagagtaaatgggttaatttagtagaaataaagatcaacctgcatgtgaaaaatgctgttctactatgtccttctctttccccagtacagcctgagtaaaagcaaaagggctctgccaggcttattaattccacagcactcccttctgtcctgtgatgcagcacagaataaccctacagcgattgcgggaga

SEQ ID NO: 179827 - DNA, 330 bp, Homo sapiens
ccattcatcacacttgaaacttggcctcaggtctatggtattttgaaattttttgttgttgttttgagagtgacatgagtgcaggcccagcttcatggatatacaaactatacattcacatgggttccacacctagatgggctcttacatcatgtagctggtcctacctgggagagagctaaaaattaagttgcagtcatcaaattactgatcagatactgaaattaaacctgaaagatgttgagaacccagagaaattctcaatcatgttaataatactttcatgcatttgacatttcttttttcctgcctcttctctctacctgtaga

SEQ ID NO: 179828 - DNA, 168 bp, Homo sapiens
aaatgcatgtggcagtggttcccaaacactggtgtgcagatggaacacagcccgtgaagttttcagcggtccttgttaaaaagagataaaggaaagagataaaggataaagtgctgagattctcgtgaagctaaatgaagctaaataaacatccttcaatgagaatat

SEQ ID NO: 179829 - DNA, 403 bp, Homo sapiens
tccatcaaccccacattatttcctacataataagatggttgtgtaagtacaatgcaaccatcaaaatcaggaaataaacactgttacattactattatctaatcctcatacccattcaagctttgccaattgtccgactgtcttttacagcaaaagaatatagttcagaatcacgtgttacatttagaagctacatctttttagtgtcctcggtctttccttaactttgataaccttgacacttctgaagattacaggccaattattttgtagaatatcagataaagcaggtgttttatagaatgtcatcaccagtcttacgttatgcttctttggtagtaaatattacagaactggtgctgtattcgtttcattgcatccttttagatggtagtggttttgg

SEQ ID NO: 179830 - DNA, 160 bp, Homo sapiens
aaggagttctgttagaattgaaaaggtaggaagctggaggcgcagtgtccacaaatgtaacagagtgtcttggtgtcaggaaaacacagcagggcacaggtcaggcatgtggtttgggcagcagcagtgggagcagggagcagctcagtggtagatggga

SEQ ID NO: 179831 - DNA, 295 bp, Homo sapiens
tctgattctaattttctctgagaggaattttcagagaggaaagaagtaacaagtatttcataggccaactctattgttaggacagaatctttcattctggacctcatgaggcccacgtatcttcttcacagggcccaggccctccctgttttccatagcatctaacacttaccctcatacttttgtcatctattattttcagacaaaatcccaactctaggattctaactctaatctactttttaatgatcccataagtcagtgttgttggtttgacattcccaaatatctcaca

SEQ ID NO: 179832 - DNA, 185 bp, Homo sapiens
gatggacccagaactggagatctaaagtcactttggtcgtgggcagggggcttgcacagggggttgacagcactgaaggcttacagaacacttttacagtccccagttttcagcttcccaaactctcgtttgtttttggttttgttttgacatggagtctcgctctgttgcccaggctggagtgc

SEQ ID NO: 179833 - DNA, 298 bp, Homo sapiens
gactctcgaatcgacggttctccttctaaacatgtgtacaggacaggatcatgcataaggcgacttgggctatgccgtgcccgcctcaggccccggtattgcagctgtccagtcatggggtgcaggtgaaacaaattcacgtgccgcttgtgtgcttgggctagttttgtagtcacttgagaaagatgggtgatcatacagtgtacattccacttatgtaaaagtcaacattagagaaactacgtgctctgcttcaggaaggcgaacgtaagtgctaacactcggaaaacaaacaaag

SEQ ID NO: 179834 - DNA, 204 bp, Homo sapiens
taccattacccagcaaatacctgtgatgtgccttgtataggatgtttgttatctcaagcctcataacaaacttcccagtttacagatgggaagctgaggttaaaatatttaaatggcttgcctaaggtcacacagctagttaagttgttaagctagatttgaatccagtataccacaatgacgcaagagaagattaaacctgca

SEQ ID NO: 179835 - DNA, 286 bp, Homo sapiens
ttgagatcggcctgggcaacgtaggtgcaagattttatctttacaaaaaattgatttaaaaaatagtctggcagccaggtgcagtggctcacgcctgtaatcccaacactttgggaggccgaggcgggtggatcacttgaggtcaggagttcaagaccagcttggacaacatggcaaaaccccatctctactgaaaatacgaacattagccagacgtggcggtgtgcacctgtaatcccagctactcaggaggctgagacaggagaatcacttgaacccgggagct

SEQ ID NO: 179836 - DNA, 644 bp, Homo sapiens
gcattggtgattgggcatcatcaagttattttcaccagaaagcaaacactatgggtagggatcaaaattgagcttcaccaaaaaccatcaagcactctgtacgcacccccaacccacatcagcttgcagaatgacagcagagtctaaaaatgtttttaggaaacatgatgtaaagcaaaatctgcagcttctgcataatgaatgtgcagcataaacaaatttgtcagtcccctcatgcaaaacagcaagtcagtacatgctggttaaacacagcaggatcggcctggggctcggagaagtctatgcagttcctaaaacagttttaatttttgattagttttgatttgagcatttatttgttgaacttccagttctttgcaaatagaaaagtgaaaatagaggtatcaccttctaaatgatgggtttttgttttgcacctggctaattggcaattttaaaaaaagcaagctgtctctttaaatgttttgggtggagtgcctcttcctctctgtcccctggtttctcctttaatcaccctgatagttccagctgctttccgagctcccttctgggccgtgcgggtgggttggagaagcctggcagaactgtggcagtgactgcgtgagcaactgagaggcctgtag

SEQ ID NO: 179837 - DNA, 332 bp, Homo sapiens
cagaataagcaaatccatagaggtagaaagtggattcatggttgccaggggctgagaggagggggaattgggagtgactgctaacaggtacaggggttcttcttggaatcatggaagtgtttgtgaattagatagtggtgatggttgcataaccttatgaatatattaaaaaacactgatctgtatacttgaaaaaggtgaattttacggtatgtgaattagagcttactaaaaatgaaagcagataagctaataagaaatacaaggaacagttttatgccaatacactcgaaaatttaaatggacaaattcctagaaaaaaaatgcaactt

SEQ ID NO: 179838 - DNA, 411 bp, Homo sapiens
ccactggtatcgaaggacgcctgagcagagggaagcactttgcgagtgtgtttacccctagtccacagaggcagaaacagatatgctgtccaggatcccgaggcagcccagtcattattacatctttattgaggttttacaaagtgccaggcaccatgctaatggatctgcatatgttatctcatttcctccttgcagcagccgtgggaagtaggtgttatcattatccacattttaaagacgaggaaactaaacctcattacttatgacttacgtatttaatgagttactgaaatcgtaaagtaacttccacaaggtcaggcagctactaagctttagagtttcagctgtaacctggtcttgcaactctgaagtgggtgcaactgcctcccaaacagcattacctttcac

SEQ ID NO: 179839 - DNA, 390 bp, Homo sapiens
agaaaaatgctgaggaagaaaaacaaaaatgagagacaggcgattgagggaaggagagcacagctaaggtggagagtggcggtagccctgcacctgcagctgttggtgcagctgggtggtgggtgggcccagagcacacgcgtgtgcatacagaagtcgagccgctgagccactgtcagtgcaagaatgtcagccctgggatggggatgagccggcttttatctcttccggctgtgcaggatttacaagcttttgaaacgcaggattaataagaagaggccggtgttttaatctataatggaacagaaagtatcattattgttaaataatgcacagcctgtcgtttattaagaattaatggtttatcgagtgctcaggttgctgcagccg

SEQ ID NO: 179840 - DNA, 413 bp, Homo sapiens
attctaatctacacaagtgacacaatttgttagaactacacagagagtgcatgtaaaactgataaaatccaagtaaaatctttcttgaattaataacattgtctcaatgtcaatttattggtttcaacaatgttctatggttaagatatcaacgtcagggaagttgaataaagagtacacaaagaactctgtaccacttttgcaaggtcttgtgagtctgaaattatttcaaaagtaaaaattttttttttttttttttttttttttttggagacagagtctcgctctatcgcccaggcggcatcctttccaaaggcggtatataatgattgtaccatagttcatcggacagtggcagggctatccataactggcggtggcatacagcatggtgcacaaacattctttggggg

SEQ ID NO: 179841 - DNA, 298 bp, Homo sapiens
caggtctgagccagcacccccaatcgatatactgatttcatttcctttggatgtgtatggtagttcaatttttaattttttgaggaagctccatactgttttccatgatagttatactaatttccattcctaccaactgtgtagcaatgtcccttctctccacatttccttattggtgctcagaagtcaaaatttgagggaactacagtattagtataaaaatgttaaagcacttttatgggaattgaaagaagacagctgcaatttcaggaaactgattaagaaacacttggtcatg

SEQ ID NO: 179842 - DNA, 181 bp, Homo sapiens
cagtgtccattttaattacaaatcaaagtaacatgcaatagatgaagtgttttaaaaaagtatacatggattctattgaaacctgctgtcacccaaacctgaacactaaagtgattcaagattactttttgaaacagctgaggcagacatttctaacttaatccaacagtgaaggtaataa

SEQ ID NO: 179843 - DNA, 597 bp, Homo sapiens
  misc_feature (586)..(586): n is a, c, g, or t
acactaacatcagacaaaatagacttaaaaaaaaatgtgccaggtgtggtataatgactcatgcctgtaatccaagcacttcaggaggccaaggtgggaggatcacttgagttcaggagtttgacaccagcctgggcaacatagtaagacctcacctctgttaaaattcaaaaaaattagccaggcgtggcaacacacacctgtagtcccagctacttaggatgctgaggcaggaggattacttgagcccaggaggctgaggctgtggtgaactatgattgtgtaactgcagtctagcctggacaacagagtgagaccttgactcaaaaaaagtaaaggggatttattagtttagtatgtaaaaatccagtggtagggtgggattcagggttttttgatgaggattctgactccatttttctgtgattatttttgtcctgccaccttcttgagtcagctttgttctgaatcttgctttcctcatggaggtaaagtgactccagtgattgcaagattccatcagcaagctgcatattgtaggagagagcatctatgttcctgaattcctggctgaagtcctaagctntgagctgatta

SEQ ID NO: 179844 - DNA, 171 bp, Homo sapiens
accagaagtctgaaaggtgggcctattttgtccttaaaacataggaagagcctgtagtatcatttttaggttgagacaaaagaaaatcaagatatgggccactcattgcagatgatcttctctgcctccccatctcctgcttggcccaaaagcagcctgctgggagatgca

SEQ ID NO: 179845 - DNA, 503 bp, Homo sapiens
acgtgaggtcaggcacaacagtctcttgagtcgtaactgcaaactaggaatgaaacgagtatcaaatcataaatctgaaacgtggtgtgcacgtcaccattctgcctacctaaggcaggagatctgctggctctggggagtgtacatggggccatcagattgtgtattcttggttttcacctaaaaattgatgcagagggatcacaatgttaagattttcccagggtagtgtggtgcgtactttttaactgtttgcttaaagtgtatcacagtaaaaatattacttaagcatagtctctgccatcttctgacttaatagaaatccctagacaggtacatgatgttacttagagtgagccacctaatctaacaaggcttccatttcctcacctgcaaaaattgggagtgtcagaggtgtttgagccagagttactccatctttaataggggctgggtaaaatacggctgagacctactgggctgcattcccaggaggttaaggc

SEQ ID NO: 179846 - DNA, 492 bp, Homo sapiens
caggtcaaggggggactcctgggctttgttctgaggcagtgggcagccacaaagcttccaagcatgggagtgatgagggctgacgtaagtgctagaaaaatctcgatgctgtgtggagagtggacaggaagcggcgggactggaggctgtgactgtttaccttcatgggaacacctgcatacccgtgcacgcgcgccaagcccacccacttacgcatccagctgacgtgtactgtggccacaggagctggcccatggctcagatgtggcacctcagttcccccctacccaagcaagcctcatggggcccagaacccaggcccttccccccatctttctgaggagtccacaccaagggcctgacccagggctgaaccttaggcctggctttgaccaaaggttccaggcagccacccggccagccagactccagggcagctcccggggcacatgctcacagcgggaggctgggagcatgggtctgcaggggagc

SEQ ID NO: 179847 - DNA, 576 bp, Homo sapiens
ttgagcaagcccaactctcagccagggactagaagcaactgatggaatggccaaggaaaactggccaaggaacattctgcccagtctcatttgtcctgggagataatttcaacatccgtggggtgggtgtgctcacaattcctacaagggctgcccttaggctgagattaattttgtgagcacaggctttatttgctgagtattgacagatcaatatattgttgggcctgcgttctatagactactgaaaacatgagtgcaggaagagaggaatttcaggtgatggatgcactaaaagttgaagcccaagaaacgcaggagaactggctacacatggcccttgacttacaatggggctacctctcaataaacctattataaattgaaagttcaacttacgacattttcaacttacgatgggtttatgcggatgtgaccccatgggaagtggaggagcatactgaatgcgtattgctttctgccactgtaaattcgaaaaaatcattcagccagaccatcgtacgtcagggaccctctgtatttagagtgcgatagtgcagaaagatactgacatca

SEQ ID NO: 179848 - DNA, 380 bp, Homo sapiens
agacagatgttggtccagccagtgtgatgaaaccacctcaactgcatttgaggtatagtagatcctcagaatctcacaccccctctgtcaattctgatgaagttaaaatatgtggtagtagcagcagagctgctgacaaacatttgttacataatcctcaaagaatcatcacggctttgcagaactggagaagaaccaatgaatgctatgcacatcctacataaagagccaaggatgatctcagaaaaatccaatcactaatcccaccaaattattggcttcctacctcacctttccaaaggagcattttatctttcagcaaaactcaactgccactacatatggtgcagacttgctgtctcaaactctagaatcctcaa

SEQ ID NO: 179849 - DNA, 574 bp, Homo sapiens
cagccccatcctagttttatgatactgcaattatctaaaattattctaagaggcacacgaaattttcatgacaaaatgaatgtgacattggtttaattaaaaaaaaaatcataccatgttcagacaggaatggtctatgtatgtgacaagtattataataaaattaaataatagtagagtgtttaacacctcacataggttagtttttaacattccatttttagatagtgttcaggaaaataaaaagatacttcactggttgtgaaaccatctaaaataatgctgcctcatcacattttcacagatgctaaattttacgaaagctttatgacacagaagtcataaagactaccatacgtaacaggcagccagaattttaaaaatattattacaaaacaatacaatgaattaaagaaatactatttttttatagtagtataataggcattttcacttttagtagagatactccatttatacagcctaagtaaccataacatgatcaaagagaaagaccaggaaaaaagaaaatgaattcctttaaggattataatgtgtcatttttaattttatt

SEQ ID NO: 179850 - DNA, 251 bp, Homo sapiens
tatttgatgtccaacttcactatcagcctcacccatctcctgcctggatggagtcttcatcctgactgaatgattggcttggcccaaaatggcaggaaggggaaaaaagacattaaaaatggaggagtgatgtattcccagggtagagaacacaacagatttggtgaacgagctttctgagacaagatgtctgagaaaaaagttatgcctgcttaggcttattctccctgctgttccccgtacgaggccaa

SEQ ID NO: 179851 - DNA, 365 bp, Homo sapiens
caaggttacagtgattgtgccaatgcactccagcctggggggtgacagagtgaggccctgtgactcttaaaaaagtactcttcaagcaatgcccagcttcatttttatgaattttctctgtggacagtagtcattttctccagctctaggaaggctgaaggctgtaagtccaagccccactttacaagggagaaaattaaacataaagatagcgctttatcctgcaatgtgtgacctggagtttcaactggccacgtttttattccactctgctgagggctgagcctgtgctaatcccagatgcctacttgggacagttctgggaaccaacacatcagagctgatgggaaattctgcccccagag

SEQ ID NO: 179852 - DNA, 656 bp, Homo sapiens
aaactcacagctaatatcatactaaatgggaaaaaatgaaaaacttttcctcaaagaaatcaaacaagacaaggatccccattttcaacactcttgttcaactagcatgggaagtcttagcctgagcaataaggcaagagaaagaaagaaaatgcatccaaattggaaaagagaatgtcaaaatgtccttgtttgcagatgacatgatctcatatagagaaaaaactgaaaactccaccaaaaagtcttagaactattttaaaaactcttaacattgcacgattaaaaaaatcaccataggaaaatcagtaatgtttccacacaccaataacaaactagctgaagaggaaatcaagaaaacaatcctatttacaatagttacaaaaaagacacctaggaataaatttagccaaagaggttaaaaatttttacaatgaaaaccacaaaacactgatgaaaataattgaagagaaaaaaaacaaatgaaaaaaaattccatgtttatggattggaataattaatattgtcaaaatgcccacataacccaaagcaatgtacagattcaatttaatccatatcaaaatgccaatggcattcttcatagaaatgaaaaaaaaaaccctaaaatttgtatgaaatcacaaaagaccccaaat

SEQ ID NO: 179853 - DNA, 313 bp, Homo sapiens
acagcctcaaggacagaactttaccgaggtcatgtgcctaggaagtgatggaaccaattcttaaacctaggctttctgaccctcatccaatgttcaatttggtatattatgtctcactttttgtgagagtgaggtggtcacggagaataagcaaggaggctcacttaaaagttttaagaagtattattcaattcctttttcctttatatttttatttttaaggcttcattttttttcgactttttcatactttaatattatttctaagcatgttgaagagttgaagaatatcctattgaaaaagttcttaggt

SEQ ID NO: 179854 - DNA, 251 bp, Homo sapiens
attgttgttctttcctccaggagttaaagatgagccggtcacttccctcctgtgacagcgaatatatattgcgttgctggcgaatgttgagtgtagtggcctgagggacagctgagctttcccaggagctgcaggttagatttggtcatcctccttttgcagaggagaaaccgcctaggtcacacaataggtagtaagttggagaaccaggacttggacctgggacactctgactgtagtctgagctttca

SEQ ID NO: 179855 - DNA, 330 bp, Homo sapiens
ctcagctctgccagtgcagcaggtgttttcaaggggccggagatcaaagatatgggtctggtgtcagcctcctggggttacagcatacagcccaagtgtgctgagctgaactcaggcaccccaaaagtatctagaaaggaagccagttgacggaactcaacttattccacagtcaaaccctcaagggcatgaaagaatataaaagcaaaaagctgcatccaaagcatagcaacttccagcattaaaggaacatcagctcacacagatgagaaccagcacaagaactctggcaactcaaaaagccagagtgtcttctgacctctaaatgat

SEQ ID NO: 179856 - DNA, 486 bp, Homo sapiens
gagcacattgtttgacatacagcactttttgaaatcgtgtgagatgatgtctgtaaaatttctttcaaaccataaactttcctaacagtaggggttcccattcattctataagttgacaatacaactacttccctttttgctattttgtgttttcaaaacccaaatttgaaagtttgaaggactaccctaaggaataattacgaaatctgtgtcaaattgccatgcctgctttctaaaacgcatttttgtaagatgttctctataaaactgtagaactagcagtgattgaatcatttcagggaatgtatctttcctaaatagtgttttaaaaaaaaaaaaaaaaagaaacgagatgacctagaatatgagaaacttcaagaagtcttgaataatacctctatttatatctgtgtctatttttatgtctatgtctccctccctttgtgaaataactttgaaggaaaaactttgccttataggtaagg

SEQ ID NO: 179857 - DNA, 201 bp, Homo sapiens
aagatattgtatacattataaagcaggagatatacatgtacatattaatagcaggcaaggtatgaaatccaggtagggcatacatggtaagtaatataatatatattagaagacaggcaaagtggataatattaggatatatatacatataagtatctatagtcaagctataaaatagtgtgcagaagatataaaacatat

SEQ ID NO: 179858 - DNA, 494 bp, Homo sapiens
tctctgtgcttgtctggagtacctgcctgtgctctctgagcagcctctgcacctggctggtgggcggggctgagcctcaccttcaaggctgcagattccctggctttcggtgtgctgggggatgccttctgcatggcctggctttcctgggatttccagaccagatccacctctttctcccctttttctttgtctttctgcccccgaagagatagcagtgtacaaaaacaagccagcatttcttgttctcttgctatttgtaattgtcccgagcctggactgggtccagtccgctcatttattctgccagggcccagtctgcagatctcagccgaagccggttgtcctgcctggctcgctctgttcctggaaagctttgtcacgcacagccaggggccactttgggtgcatcctgtctcccccgtcgccgtatgtttgggagcagaagttggctctggtcagatatgtggatgttaatttatcctcattcttgg

SEQ ID NO: 179859 - DNA, 309 bp, Homo sapiens
aaacaaaacaaaacaaaacactgacatcctccctgaagtctaagacacacgtttatccatgtctgtctgtctctagtctgcctgtcctggtaaatgatgtcatggccaactcattccaaaacttcaaaaagttaactttatctgctcactgtcctacaactaaaatgcatgtgagtgacatccagctccacctggtggtgaggatcctgttcttttactagttgtctcttcagcttaaaatcctttagtggttcctgtagtcttcaggacacaaatccaatttagcacaagtgatcttgcctctgcttt

SEQ ID NO: 179860 - DNA, 285 bp, Homo sapiens
gaaaattaaaaaaagcaggtgtgatgaattttaataatatttttatttaaaccaatatatccaaatattatcatttcaactggtaaccagtataaaattattaagatattttacaaattccttttgaactaagtctttgaaacctgcagctccctgggcagcaagcgaggctccctgcgcagcgaggtgagcagcaaggtgggcagcacgggaccgccccttaaattttacacttaaatcacatcatttccattcagactagacacgtttcaaatgcttaatagc

SEQ ID NO: 179861 - DNA, 905 bp, Homo sapiens
  misc_feature (441)..(441): n is a, c, g, or t
  misc_feature (445)..(445): n is a, c, g, or t
  misc_feature (447)..(447): n is a, c, g, or t
  misc_feature (492)..(493): n is a, c, g, or t
  misc_feature (590)..(590): n is a, c, g, or t
  misc_feature (599)..(599): n is a, c, g, or t
  misc_feature (603)..(603): n is a, c, g, or t
  misc_feature (609)..(609): n is a, c, g, or t
  misc_feature (623)..(623): n is a, c, g, or t
  misc_feature (634)..(634): n is a, c, g, or t
  misc_feature (640)..(640): n is a, c, g, or t
caaaatagcttgcagaagatggtgcgtccggatcagccacaaacagtaacaaccatctaatcgagcctcagatccgccggcctcgtagcctcagctcgccaacagtaactttatctgccccgctggagggtgccaaggactcacccgtacgtcgggctgtgaaagacaccctttccaacccacagtccccacagccatcaccttacaactcccccaaaccacaacacaaagtcacacagagcttcttgccacccggctgggaaatgaggatagcgccaaacggccggcccttcttcattgatcataacacaaagactacaacctgggaaggatccacgtttgaaatttccagtacatatgcggtcaaagacatctttaaaccccaatgaccttggccccttcctcctggctgggaagaaagaattcacttggatggccgancgtntnatattgatcataatagcaaaattactcagtgggaagacccaaganngcagaaccagctatactgtccggtgtccttactccagagaatttaagcgaaatatgactacttccaggaagaaattaaagaaactggtgatatcccnaataggttngaanatgaancttcacagaatacntattgaagagncctatnggagaatatgtccggaaaggacgatgtctaaagctagacggggtgggtttgaccccaggcaggctgacattgggggtgacagaaatgcttctcacggcaggatggtaccctattagccttggttctgcaccgacaaaccttgaaacctaaaaggcgtagggaactgctccccattgaggaggcacggcacatggcgctagtctcaccagtggaacacccacgtcgtaactagagtggcgcacatcaaaaacaacacagccgcaac

SEQ ID NO: 179862 - DNA, 455 bp, Homo sapiens
aatgttggttttcacagtcttaacatggaatagaaatttctttttgtaaaatacatgcctcttctttggccctcagtttaaagaatcagaggctgtggtagccattaatgattttttttggttataaagctgtattctggccttgagactgtacttgctgatgcccaggcaataaagtacttttggtctacgtacataatagaacagggccgattgactattcagcttgcttcagacagctttcagctaaacactgggtatatcgtagtgcttgcaaatactacttggtggtaagcacttgaacagttgaacctccctaagaaggtacagggagttagtaaaaatggcatggagatatgattcagcagctcttgtgtctggtcctcaagataaactcactactttacggtgacactttggagaagccgggttagtttttctaggtcctagtttcc

SEQ ID NO: 179863 - DNA, 432 bp, Homo sapiens
tcttttcaaggtcatacagctactaagtggaaaagctatgaattaaatgaaaagtttcctggctaagaagtccttgctttgtcctcaaaataggtttttgctaagcctacattagttagaatgggaaatatatatagagatatatgggctgggcacggtggctcacacctgtaatcccagcaatttgggaggccaaggtgggtggatcacgaggtcaagaaatcgagaccatccagggaatattgtcactgaggtggagtaaattaagcgtatataaaaatacaggttgagtaaggttatgatagctactgagtaaggttatgatagctggccaacatggtgaaaccccgtctctactaaaaatacaaaaattagctgagtgtggtggcacacacctgtagtcccagctactcgggaggctggggcaggaga

SEQ ID NO: 179864 - DNA, 265 bp, Homo sapiens
catgacacagaacgtgtttgggattcttctcctgcaagttgcttccagagcctcatagcatgttgttttcgttaccacttgctttgtggattggtacatggtcattttataaatattccatgtgtgctttaaaaatatatatttttttacatgaagttattctataaatatccattagattgatctttaatttttaatatcatgtatgtgctttactgtcttttttttaaaaaactccttaactttttagttactgagagtgtgc

SEQ ID NO: 179865 - DNA, 224 bp, Homo sapiens
ccaaccttcccaggtgactctaatgtgcagccaatattcagaaccattactttactctagcttctagaagttcagagcacaggggccccagcacgctcctacaaactcttcaggggcagaaaggacagcatgcctggccaggcaggccttgctagagatgggtctccttattcttccttcaaaacacacgcacactcacacccccccgagaagcaacctgcaaa

SEQ ID NO: 179866 - DNA, 385 bp, Homo sapiens
ttgcaagtaataacactgaatgcatgaagaaaataatatccaaagcagaaatcatccccacttaattcgcatgggattgctcttattactattctgtcatctgtgagaagaaccaatactttttccattcatttaaagcagcctgtttcctaaatataattgatagacttaaaattgcttcctgataaagtaacaacccgcaattttgcacaaggttttagttcccattacagtctagtttcatgcaattgcggttgccacatggagtttcatattccaccttcttaattggcacacccaatactttaaaagcaattctagcagcttcaggcactcaaaatttccattttcatcatttcatccaaggctttgataaggaagaatc

SEQ ID NO: 179867 - DNA, 237 bp, Homo sapiens
aaatatatatatatatatatatggctatgactgtttctctagagcactgatttagccctatcctattgattctgatatattattctttagatgttctttaattttggttttaatttgttctttgacctaaggattgccttaaaaagagttcttatagttccaagttttgtttgttgctttaaagttttacttttattacttaatttgtccagagaatatgatttgaactatttccct

SEQ ID NO: 179868 - DNA, 210 bp, Homo sapiens
cttactttgatattttaggggatcattctttgagtaactttctgaaagagatcgcaggaggtaaactttagagaggcagcatgtctagaagttctcctgcttggcggattagctgggcacaggattctagtttggaataagtttgtccctgggatgttgaaggtattttagagctgtttgtgacagatagtgttttccacaaatagccaa

SEQ ID NO: 179869 - DNA, 567 bp, Homo sapiens
tcctccaggtcattattcaggcaatctgttccctctcttctgattcaattttttccctctctcctaagtttcatgctactcattccatcagcatacaaataggtctcccatcttgggatgggaaaaaaacaactctcaaccccacatcttcgtccaacaatcacttcacttatcttcacccctctctcctggactttacagcgaactctttaagagatttctatattgctatctccaatttctctcctcctattcctgcattcttgaacccactccaattaagctttcactttcaccctccaccactccactgaaactactcaaaagggtcccatgatactaagaccaatgccagttcttggtctttaacttacctgacccatctgcagcactgggcacagctgaccacttactctaccttggagtttttccatcacattcttggtttttctccttccatcctcactagaagcttttctgtttcctctgctgggtattcttcatctcttttgcctctaatgtaggagggcgagggctcagccctcattttttttttttttttttttg

SEQ ID NO: 179870 - DNA, 989 bp, Homo sapiens
  misc_feature (1)..(1): n is a, c, g, or t
nagactttgtgctagtcgaggcccggtgttataagcactggagagtgtcatggaggcctacgagcaggtccaaaagggacccctgaagctgaaaggcgtcgcagagctgggagtgaccaagcggaagaagaaaaagaaggacaaagacaaagcgaaactcctggaagcaatgggaacgagcaaaaagaacgaggaggagaagcggcgcggcctggacaagcggaccccggcccaggcggccttcgagaaaatgcaggagaagcggcaaatggaaaggatcctaaagaaggcatccaaaacccacaagcagagagtggaggacttcaacagacacctggacacactcacggagcattacgacattcccaaagtcagctggacgaagtagccgcctgcccccagtatggagcagcatcgagggttcgcaaaaggccacactggggttgtgtgtgtttcctttggtatattctggaaacatggctacacacacccttgcatcttctgctacagactgcttttcgaagctgtgtaccctcattctggaacttgattaaagtaagatcgtccttgtactcagtttaggcttcttggcaacatacagaagatacacccttttcgtttggatggaaagtttctaagtttatccagaggtaaagcccattgtgtgtctgtgtcatgtacaaatgttttcacccgagttgcatgtaacgctctgaggccagccagctgtcttctcctggatgagacagactccagagggtaaggagctagcgccatggtggcctgcagtatgcagagccccgcaggacccagcgtgggcgcccttccagcttcctctagctttgggcctatgctgtcccctgcaggcctagggaagccacttgcaactattcggccttcagattcctctcagccactggcctgagacagcatagcctgggtaacggaacagccacctaaggcaagaatggaacggacacaccttgctc

SEQ ID NO: 179871 - DNA, 583 bp, Homo sapiens
  misc_feature (319)..(319): n is a, c, g, or t
acccgtccaagtctacaccgttacaccaaggtgccccccccctaccttggggccacatgtacttaccaagtttgaaaatttatatatctcccctatccatagtgtagtaattatttcagataccctatttgggggagggccttctgtattaccccgcccctctcaagatttaggcaagtctgcccagggatacattaggagcgcctgccaagtggggtccaattctacaagcatgcaggcttggatgcggattcttttcccgagtgcgcctcactcatggttggaacctagtgtagaaattggacgttccaattctacnccaactatcccatcacaggaatattagaaagatattccttaaacctgaaaattattaacttgggatcctaggcatttataaagaattatgactcctgccaattgaaaaaaaaaaaaaaaaaaacactagatggcacgaaagacaccatttggcttttcctgtgtccactgctcacagtgcataaaaatgtagattaaatcaccgttcagttcggcatgggaagcacttagtctatgtgtagaaaattggaatggaatatggagc

SEQ ID NO: 179872 - DNA, 667 bp, Homo sapiens
  misc_feature (319)..(319): n is a, c, g, or t
acccgtccaagtctacaccgttacaccaaggtgccccccccctaccttggggccacatgtacttaccaagtttgaaaatttatatatctcccctatccatagtgtagtaattatttcagataccctatttgggggagggccttctgtattaccccgcccctctcaagatttaggcaagtctgcccagggatacattaggagcgcctgccaagtggggtccaattctacaagcatgcaggcttggatgcggattcttttcccgagtgcgcctcactcatggttggaacctagtgtagaaattggacgttccaattctacnccaactatcccatcacaggaatattagaaagatattccttaaacctgaaaattattaacttgggatcctaggcatttataaagaattatgactcctgccaattgaaaaaaaaaaaaaaaaaactcactcctctgaggcagagcccaacctaaggggtagagaggagtactgtaaattaagtgtgtcaggagggaaataatcccactcaactttcaccattttcaggtcttaaatccatggccagcatgtatagcaggtgggctaaaaagccagcctccaccaacagtccagcccacattacacatttcctttcgccaaataattccccagcctaggtgtagaatttga

SEQ ID NO: 179873 - DNA, 551 bp, Homo sapiens
ggtgaatgcggtaaaggtttatgagtgtgggatatcagggtggagccgttgagacacagggaaaagttagttacgtatagtggagatatagagggggtgggccgaatgtatcggaataatagaagtgatactgcagtcaatattcttgcaattatgtctttatacatatctatgattatttccttaggataaattcttggtggtgaaattgtataatgacctttagttgagaaccactggtttatgacaaaatgctttaggataccccctttaccattctgatataaaattgtacacaagacttttttaaaaaccccaaaacctaacagcataatgcctttattgtaaaggaaaataatttgtaattaatacagattgcttacagatttcaacgtataaatgaacagtgtgactgcataaaagaagaacatccctaggaggtggtattacaccgtttacaacttctgctcatgtgactcatgaatctcctctattaaacacctgtaatcatggggaaatccagctaggccttggaaccaggcaggtcagtg

SEQ ID NO: 179874 - DNA, 689 bp, Homo sapiens
ggatcacaacgtcaggagatcaagaccatcctggctaacacggtgaaaccctgcctctactaaaaatacaaaaaactagctgggcatggtggcactcgcttgtagttccagctactcgggaggctgaggcaggagaatcgcttgaacccgggaggtggaggttgcagtgagctgacatcacaccactgcaatccagcctgggcgacagagcgagagtccatctcaaaaaaaaaaaagaaaagaaaaaagaaagacagactggaaaaatagcttttatcaatctctgatatgctacatatgtcatggagaaatgcagaatggcatgatatgaaattccatttttgaatgaataaaatatacatgtgtatgtatatatacttattaacacttaggattatatacacacaataaaacgtctgtaaggataaactaaggttctatcagtgggaaatgagattgaaaagagggggatgtgttacttgatatgctgttgtatttttaaagtttttgcaattaatatttgttactttaataattaaaaattaggctggcgtggtggctcacacttgtaatctcagcactttgggagccaaggcaggaggattgcttgagcccaggagttcgagaccagcctaggcaaacatggtgaaaccccatctctataaaaaatacaaaaaattagccaggca

SEQ ID NO: 179875 - DNA, 603 bp, Homo sapiens
ggatcacaacgtcaggagatcaagaccatcctggctaacacggtgaaaccctgcctctactaaaaatacaaaaaactagctgggcatggtggcactcgcttgtagttccagctactcgggaggctgaggcaggagaatcgcttgaacccgggaggtggaggttgcagtgagctgacatcacaccactgcaatccagcctgggcgacagagcgagagtccatctcaaaaaaaaaaaagaaaagaaaaaagaaagacagactggaaaaatagcttttatcaatctctgatatgctacatatgtcatggagaaatgcagaatggcatgatatgaaattccatttttgaatgaataaaatatacatgtgtatgtatatatacttattaacacttaggattatatacacacaataaaacgtctgtaaggataaactaaggttctatcagtgggaaatgagattgaaaagagggggatgtgttacttgatatgctgttgtatttttaaagtttttgcaattaatatttgttactttaataattaaaaattaggctggcgtggtggcttcaaatgatcttctaacactatatgatcacagcactactgca

SEQ ID NO: 179876 - DNA, 632 bp, Homo sapiens
ttattcctaaatgtttgtggggcatcctaaatcctgagcaatacagcctccataagaaaaaattactctctcctccctcctcccctacccatcattccaaagttcttacattacagaactgctttatgcagataggcttacatatcccagaggagagctcatataccatttatattatatcacatgcacctgtgccaggccacagggactctctgtgaagttacccatgtccctgtctaccgcctcctccgatcaagaagacctcatggcttcctcattatcatctttgcacccccaactaggggaatcttttccagtttgttttggtttggtttggtttttattttgtttggggttatgggaaaatgagaattcccctcttcaaattcttattttcctttttgttcccctaataatgcagacttattgaaacacggaactaggaggagatatcctattcacctttttctcttccctttcctgaaaacacaagcgtagtgttgtctaactaatagaatgtgtggttggagggcgaggagtcaggagatcaaagaggagaaaaatatagtgggcaaaaagggtgaatatgtcagcaatattatctgctacttgtacatagtacttgtacaagc

SEQ ID NO: 179877 - DNA, 344 bp, Homo sapiens
aaatagtgggcgctggcactcagaacagcccatgtgagataatgaagcagccttccagacataagatcccagaatcagacacttatccaaggttcccctcctgcaatcagcgggtaggagtttgcaatgaaaacactccatgctatgtcccagagtgactcgttcatttatccgtgaaagcagagtccaaatccatgttcatgttaaatgtgcagaaaaatagcatcttgagagttaatgccacagaatgggcatgattccctaagccacatttgcctgattgagacagactttaacatttgcaaaacctccatgttatgagaccctataggtgatagtacatg

SEQ ID NO: 179878 - DNA, 363 bp, Homo sapiens
agctgagatggtgccagtgcactccagcctgggcgacagagtgagactctttctcaaaacaaaacaaaacaaaacaaaacaaaacaaaacaaaacatacattcaaacataaaatgaggaattttaagacagtgacagcagagcattaagccaagctcaaggtccctgtcagcatggggccctgtgtgactgcacaggccaaacacccatgaattcatctcaatttccatccctctcacactcttccccactgctgtggtctcagttgacaccttcctcatttctactccggaggactgcctgtaccctgatttcttcaagggtctctccagtctatcagacacagcccaacccagggtttctc

SEQ ID NO: 179879 - DNA, 800 bp, Homo sapiens
aggttggtcttgaactcctgacctcaggtgatccacccacctcggcatcccaaaaatgctgggattgcaggcatgagccaccacgcctggctcagaatttttttcaacttatcttgacgttcctgggtccacctacagtgatatgatctgctggggatgagtggaaactgcctcctctagatggggcatctggtatccagattgacaagggcctcacccagctggcatcagacattggtccctgcctgggccctgctctgagcctttgccccaatcccctcccttcatgaggttttccagccccctcacacaatcactccttccctcttatgttcatactccctcattatttgtttacatgccagacctctctccatcttggctgtgatagtctgagggtggggcacttgtcttttcacctctgatttacccaggaccaacagacacattgttggtgctcatagtctttgtcaaattgaagttttaaattgatggctcatgcttgtaatcccagagactcaggaggctgaggcaggaggatcactggaggccaggaattcaaggctacagtgagctatgattgtaccactgcactccagcctgtgtgactgtgtgagacttcaactctaaatagatagatagagggatggatagatagatagatagatagatagatagatagatagatagatagaaatgggatagaacagaatagctgaaggttaggtcaggactaattggtacagttaccactgactgaatcaaacaggtgctaaattgcattgtaaaatattataaga

SEQ ID NO: 179880 - DNA, 173 bp, Homo sapiens
ttgagttgccctatggagaggcccatgtggcccagcaaggaagccagggagacccagacccactgcctgagaggaactgagggcctcagtccaacagcctgagagatctgagacctgtcaacaggcaagtgagtgggtctgaagtattaatagatcctccctctacagagctt

SEQ ID NO: 179881 - DNA, 606 bp, Homo sapiens
ttctaaattgattgaagtttcttttgccaaggttaaggacatgcctgggagacaggtatgttcctttctccaaagatgattttgagggctttaatatttaaagtaggctgaagagcaaagagggaaggtatggtaatccacatgttgccagaggaaaggagcaggcaagggaatagtcaattacgtattttcttttgcttagtaagttgggactttacataagataaggtgaacatagagtaattacctgtggagatatttaacctgttatctgtagctatctgcttgggaacaaaaggaaaagcagtttattgcatgactcagcttgcagcttaattttttctcttgacatggtggattggggtcccaagtttttgttttgtttttagtgtcaacagcctaaaataggcaataggaaagaaaatactgtatgagagatgtcatagtgttagactgtggagtttggcaatctattgtatatgaaagttgacagcagagagagtttaaaactattattaaaattttagcctgggctggggcacaatgtctcacacctataatcccagcactttcggaggctgaggcaggagaatcacttgatcccag

SEQ ID NO: 179882 - DNA, 402 bp, Homo sapiens
ctactttgtatgtgcttgaaattttccacaaaagcaagtttacaaaaaagacttctagcttgcaaagtgccatatagttatatcagatataaccatcataattctttctatatacatccttcttaactactagatgtttagaaaatgccttcctcctttgttgtgtccccttgtgatgacatggttggttgtgtgggtgcctcggaaatacagttcttgccaagggacccttttagacaggcaggtcatcagatgataggatcagcttccacacaggggctaccttagaagggtgcccttctggtgtttcagtaactgaatcccaaagcttgagatccacagtggatttgctgcagatgaaatttctctccacaataaaatagtgttagagtgtggttttag

SEQ ID NO: 179883 - DNA, 643 bp, Homo sapiens
ctggcaaaacacattatgggaggggggaaaagaggaattctgttgaggggcagtaaatctttctgaggaaaatgaatggattagagaacagaggttcacttgtaaattagttctctttggaatttttatgaacctgagagacagacattatcttgtgaaagggtctgctgaggtgtggttacattcatggtcatcctttctgcaatagataatgagatagaaaggaaggcaagaaaaaaaaaaactattgttctccttggcgtgtccttctggtctttatgtagataggggaaaagtctcttacagtgtgtattgatctctaagagcctttaattcaaaatactcattataccaagtgatcatattttggagtaaagttccttgtgctcctttattccacctgtctggaacttccttgcaagtttcatgcattaaaagctgagttggtggctgtgaagtgagaaatcagattagtagtcgagtagcaagagataggcaaaggagggggaaaaaaacaatttgggataagcagaaaagagcaaatttaaatatattgtcccatatctgcctgaatcagtctcttagtcctgagaatagatcagttcagttaaacagctgtgtcccatttcaggagatggcattg

SEQ ID NO: 179884 - DNA, 201 bp, Homo sapiens
tcctgattttgcatctgttcctgaaatacttcatttttgctgagttaggtcctttattccagcctgctaagtcatttggagagtgattaaagcaccagtatattagcattgtaccatttgcctatcgaatctgggaaccacctgaatcctcatcaaagccattaacaaaatatgcagccctggagagcataaacagagccc

SEQ ID NO: 179885 - DNA, 312 bp, Homo sapiens
gacctaagtttcactgtagatcaaggcagccaaatagtgctaattttaaaagcagttaggagaatataaacatttaagaaaataataagacaaatagaatatataagcacctatcttttacttagcactgaccagaaatgtaattgttttaagtcctacaactttaaaatttaaaatcataaaaaactttaaaagggtattaaatatatcatcctcataataagaaaaagacagtgctcctatatggtaaataactgcatgcagcatttagtaataacattgttagtataacaacatattctagagatttgg

SEQ ID NO: 179886 - DNA, 399 bp, Homo sapiens
acagggtcaagtgtactttttttaagtctaacttctatctctgttgcttgtatccttttcttgccacccaccccggacaggtaactatcttttaaaaatggcttgacctggctacgcacgcagtggctcacgcctgtaatcccagcattttgggaggccgaggtgggcagatcacctgaggtcagtagttcgagaccagcctggccaacatggtgaaacgctgtctctactaaaaatacaaaaaattagccgggagtggtggtgtgtgcctgtagtcccagctacctgggaggctgaggcaggagaatagcttgaacccaagaggcagaggttgcaatgagccgagatcacgccactgaactccagcctgggaaacagagtaagactccataaaaaaaa

SEQ ID NO: 179887 - DNA, 314 bp, Homo sapiens
tatcaatgcatcctacccaatattcgcctgcagcaaaataccttagtaacatctttggcataaaaaataatttttttcaaataaacttcaaaataacaagaaaagtcaatgggaaaaaattattaatcatggataccaggataagaactgatatcccagtctaaagatgatcacagttgaaattaaaccttaaaagaaaataattgcttcacctgaatactccttttcaaaatacttaaaaatcgtccctctctggcatgcaaatatgcccaattcctaacttataagacctttcctacgcgattagggttagt

SEQ ID NO: 179888 - DNA, 403 bp, Homo sapiens
caatgtctacttgatacacattctaaaaataattttttagtttaaaaacttaatattatcaaaaaataatttctgtactataaaacattatactacatgattgtcaggatgcttacaatgtgtactgccttactaggttcttgatgtgttctctatagtggtagaatacctggactgcctattttaaagatagggaggctgagtttcaggttgcatgaatgatgggtggtagaaccaggacaaaggccaggtgttctgctccaggcccagtgagtccagcaccttacactgcacatctcaaggctctcatccatgtctcttccagccacgagatgcacagacacagttattcttaaagtttcccttagccacaccactaggatgaggccccattcatcagcaa

SEQ ID NO: 179889 - DNA, 202 bp, Homo sapiens
attagtgctgctcgaactctgtggagtaaagggccactttttgttggcttttttcccccaattcgaccaagctgtagtcctgccgtgcagaaccagcacgcagcttgctccacatgcaactcctcacgcgagtttaacacgctcgccttgagtgttcaacacaatgtgttcaactggttctgcagcaacatcaaattcctat

SEQ ID NO: 179890 - DNA, 620 bp, Homo sapiens
ccaggttgatttcatgtgttttaatgagggtagagaattgtctaagaaggagatagagcaatttagaaaagtagcatttagtctttagtaatatgtatattgggcttttttctattgttaaaggaatcctaaatttctgtaaatttttttgaaagcctccagccattgcagtttgttaggtgcaatatcagtatcattgatcacttgtatgatatggttaggaatgtatgtaaacttaaattgcaaaaccacatttattcctatggattatttgcttacactagttcattcttatagagacaactcaaaggtactgtaccgttgactgtacagttaccagaatgtcacatatggaacaatggggtagacaatgaattagaaatgtcatttttaacatttttaagcagttgatagaaataaggtcctggataggagaaaaagcgatttatctccattgatgggggattatggttgagtctcttagctattggtatttataacacttatcatgattacccctactgcagccacttggtaggtttttagtgctcataaaagaattgcacttattttaaaattgaaacactatttcaacactgtgatgtgtatggaggcggaat

SEQ ID NO: 179891 - DNA, 438 bp, Homo sapiens
acctcacacagggcccttctaactctcttcatgtcttggcagtgtgagatctatgaactgtgtctggtctcctgatgttcttactgggtctgcaaaaggttgtagaaaggtcatgtgcattctactttgccacagcccctcccactactaagcttcacccatttacttacactcaggctatagcgagtattttgagtttgcggtcgctgctgtacatgtgaagctggcatcggacaggcatcagtgtactcacagcattggccagtgtttcacatacctgttgggtactggcttccatcacatcctggggaagagcgcagtttctcacggtcatttacatcctgtgaacattttattttatatagttacttaaagttctgggtttatatcttctctcttccccaggaagagagtttggaaacaatagctttggctggg

SEQ ID NO: 179892 - DNA, 294 bp, Homo sapiens
gtggacatttccacgagtcacgtgatcagccttatgtataccaatgtttgcaaggtttttgtctcaatgtcttactatcaggaccttgtaacaaaatagccagtcttctcacacatcttaactcttcgacacaatgtattttatgtatcttaatacactgattttgtgggaaatcttgttttatgttaaaaaaaatcttcaaaaatggtaagccactaatttcagaagttcctttgctttctagaagttactagctattttgatatttccatgttgtgactcgtggaaatgcaa

SEQ ID NO: 179893 - DNA, 248 bp, Homo sapiens
ctgcttcttcttttaccccaagatggctaagaaagccttcaaagtcctttgaaagcattaatttatccaacttttcccacaaagactgaaatgggtctgcatcaatgatgtaatttgggtattgctgggttatacaggagcacaatggtgatgattatgggtgcgctgcagaggactgagttaatggaatcccatcagggactcagagcacaaattcggggcacaaacaggacccacctcatcccgct

SEQ ID NO: 179894 - DNA, 647 bp, Homo sapiens
aattctgattcaactgtcaagggtagaatatgaatatatatattttcatccaacatttttatctgaaggtccccagatgatcctaacatgcagacagaactgggaactactgctctaaacaatttcccactacacaggctccgaaaaagtacatctgtagaactcccatgaatgtggcagtatagtattttagtaatctaaagaaaataacattccaggctcagagcagctgtatttactttaaagttttgcattttgaaaaagttgattagtaagtctgattatgtcaactgtcctagctgaagctttaacatcaattgcaccatcatcccctatcctttgatcaagtagttctcaattttagtagcacataagctcttaattgactgttatttatttatttatttttatttaaagacaggatcttgctatgttgcccaggctggtctcaaattcctgggctcatgcaatcctccagcttcagcctcccaaaacacagggattataggaatgagccactgtgcacagccatctaggaagcttttaaacaagccacaaaccccaggccaaatatatcagaatatggggggagtgaggaagaggactgagggggacacctgggcattaccattttcaaaaactcccaa

SEQ ID NO: 179895 - DNA, 565 bp, Homo sapiens
tctagacacgaattcatcatctgcggaagatcatttcctgctgtcgttattgtctgtagcagctccagtgacatgtgctggcatgacaagccccatttaatctcactaatgcatccttttccacgggcaaactaaacccagacccattccaaaagagatgaacccagccatcgcttaccataggaataacattaaatactaatggggacggaagaccctgggagtggcttgctgagtgatgggccttcctcggagggaactgctgatgggattctgctcagatccaaatgaggtgatgctcttggctcttgagttaaggttcagaggttgcagtggacgctgtgccctttccagataccaagaactctgtctagcaaatgtccacaagaggctgggttggactttggtctacatatattttcttcaacatttctcttccattcatcctgaagtcaaggacaaaacaaaggccttgaaaacatctaatgaggacactctagcagggaatggaactttcagtgcaagtagagcattgagcagaaggtagttttctcctttgagtaaa

SEQ ID NO: 179896 - DNA, 307 bp, Homo sapiens
agatccccatacagagtagctgggattacaggcacccattaccatgcccgctgatttttgtatttctagcagagatggggtttcaccatgttggccaggctggtctcgaactcctgaccccaggtgatctgaccgccttgacctcccaaagtgctggaattacaggtgggagccactgtgcccagccaggatcaaatatttttaagagtagttgtgaactgatccttgtttaaaaaattgtttacaaaatggttacatgggttggttgtacctttacttttatgtgtttgaaatactccagaaagtg

SEQ ID NO: 179897 - DNA, 259 bp, Homo sapiens
taaggagaaaatctgaaaaacagccagagagttaagacacatcactccgaagcaggaaccacgtagacggacaggaaacttctcaacagcaaggatggaaggcagaagactgcagaatgggggagacaatgattttccacttccatttccacactcagctaaacagacttacagaaaaggtggatgaaagaaaagacacttgttggtaaaaactgagttgaccattaacaggctgcccttaaataacttctaaaaataa

SEQ ID NO: 179898 - DNA, 234 bp, Homo sapiens
agtgatatgttgagaagcagcagcacaaatgttacctatttcacaattttaactactctgatgaaacggtcttactgaagtgtggtgaaagcaaatgtcattaaaaatctgtacagtactttaaaaaaaaaagaaagaaaaatagcagagtgccttgaacacagcaaatgttcaacaaatgtttacttcagtaaacaaatgaaggcaccgggcgtagtggctcacgcctgtaat

SEQ ID NO: 179899 - DNA, 195 bp, Homo sapiens
ttaagattagaggcaaggagaccatttacacaagagattatgtgggtctgaacaacaggctatttgaataataaacatagaaagaggagtggtggagacaaacaaaattcagaagataacactggtaactggatatagggttggaagaaaaagtctagtggaaagtcactatggattgagtgactggtggatgtg

SEQ ID NO: 179900 - DNA, 557 bp, Homo sapiens
ttatggcctatgtggtagctcttaaagtgcccttgcagtatagatgggaatctgaagatttcattcaggcaaaaggaatttagtgggaagtatgctattcctgattcaagcacttatttcaggatgcaaaattaataatagtttattaataaaacataattaagttcattcagttcccagaagctgtcagggaaaaaacaaccaaggagggctgctatcatgtgcaaatttcactgaatttagtttttcttctttcgtggctctaagggtcaagatgctctatgttaatattgaaagtactctgaaactgccacctactttgtctttagggaggattttttttaaattgttgttagtgaattaatggtactgaagaccttgggttaattctagaacaagcaaaattttttattgacacacacagtcccagcacagtggctcacacctgtaatcctatcactttgagaggctgaggcgaactctgcccaggagttcgaggctgcagtgagctctctgcactacaacctgagcgacagagctagaccctatctttacca

SEQ ID NO: 179901 - DNA, 546 bp, Homo sapiens
ctagtaagtggttggaatcattctgtattataattgtgtaatcaaattcttttttgaaaaaagaaaaattaatgtttgagtatctattagaagagaaaaaaacagaaatgtagtttacccaagatagcataattctataatcccttcatttggaggcaaagaacagaaatagatgattcataaaagaaaaatggttataactggtagataaaaataagaaaatattcaatgtgattagtagtccaaaaaaggtgaattaaaatgagatgccttaactcttaaataattattgtcatcaaagatgaaactataaaagtgatcacacccattaatctattaatttcatttctgaaaacttacactaaggaaataacccaaagtgtggaagtagctataggccctgacactattcaaatcagaatactcatacaagggacaattgaacccacaagataattatgtagagaatcctagcacatcagttttgttaggaactgacttcaaaggatgataactttaactgatcagtaattattaaccatagta

SEQ ID NO: 179902 - DNA, 230 bp, Homo sapiens
tttttcgttgttgttaggaccagatgaagtgattgctatgagacaggctttgtaaactctaagacctttataaatacaagatgttattactggagcattgtgtctccatccggctaggagggaactcaggctgcctcattgcttcggagatcttctgtccctcgtgccctgccccctgattgctctagaaggacgtggtctgtctgaccccatcatacgctgcacctggt

SEQ ID NO: 179903 - DNA, 476 bp, Homo sapiens
ggagccattgtggctccggccggttgcgcgggccctcggaccctcaggtaggcgagggttcgagggcacgagttcgaggccaacctggtccacatgggaaaaaaaaaaaaaaaataaaaaaaaaaaacactcgggggggccgcgcccggggcccctggaagaaggtttcagaaaccccatgcggtggggcgcggcggggccccagagggggtaaggggacacggggcccaaaggagggtcccacagagggagacacccggggcgcaagaggcacaaggccggggggagttttctccaccaatattaaaaaaacgcccggggggggacacacgcgaaggcggctcgtgtggacaccacattcccagagaggggggcgttgcgaggggccccatgaaggggggggtctactacaacagggcggacttcacaggcagaagcccggaatattcaaaattagcccccaaggggggggatag

SEQ ID NO: 179904 - DNA, 487 bp, Homo sapiens
atcttgaggcttctgtgggatggaaactatagcatgaaaatctgattaacaaatatgtgggggcagtttactaatccattcaattagggcaactgcaccttctcagcatgccatgagcaattccattagatagctagttactggaccagatgattacctaattacatgaatatatcagtgtcatttttcccaacacaggacttgaaggccagatttgagaactagtcctggggtagtagtacccagagacctgtttgggagactgggaaggtctgggccatcacgttcttgctgatagcccagagatcaggtcaaggacaggggcaatgagaagaaagaaacagagaccctgggaaggagctatcttggtctttaccggcaagaattaacttcaaagatgggacagaggttctataagttcaagaaagggagaaagttaacacttaaaaacataggctggattggataaagtaccgttggagcactt

SEQ ID NO: 179905 - DNA, 340 bp, Homo sapiens
tccctgactatctgtccccacgtgccatctgttatcaagtcttgtcaattgtaccttttaaattttgtctcaatctaccccttctctctatccctactgccagcatctctcccttggaccagcctcttaactagccaagtcttgcccccttttatccattctccacactaaagtgagatgaactctcttaaggatatgcacgattctgtccttttcccacctagaacccttctgtggtcctctgaagctctcagcaccaagttccaacactgcaacatggcttggcatagaatctgcatcatcagccctgccattccctgcctcctattctacagtccag

SEQ ID NO: 179906 - DNA, 306 bp, Homo sapiens
aattctgccaacaaccagtgagcttggaagaggatcctaagcatacgatgcataagatgagatagcagccccagttgatgccatactttcagccttttggggcctgagcagaggatccagttgagtcatatctagactcctgacctacagaaactgtgaaataataagtgctttaagctgctaatattacagcaggagaaaactacagccactgtgatcgtagatatcttttccccattttatttgtcatttaaaaatattttttaaagctcttattaggtacataaaattagaattgtaacacct

SEQ ID NO: 179907 - DNA, 477 bp, Homo sapiens
gacccacgtgcacttagttactcccttggtttctccaccctcatcctcaactaaaataagaagctgaaacatgactgtcttgccattaaaagtctgaagaaaaaactcacatgtcatattgagcctcctactgaactcagccacatatggaagtttgaagtgggtcctcgaaatgcatgtactgcactccagagttaagagagccattagcaggaagaaggactttggcgaggggtcattcctgcaggaggtccatgttgtggtttgcaagtgtcccccaaagttcatgtgttggaaatataatccccagtgcagcagtgttgagaggtggaacccttaagaggtgatggggtccagaggactctactctcatgaatggattagtgtcattatcaggagagtgggtttgttataaaaacaagctcagccttctcttaagtgaactgttacccttccaccctttgccctgggatgaca

SEQ ID NO: 179908 - DNA, 314 bp, Homo sapiens
tgtgtttatcctgcttggggttcttagacattcttgaatttgtggcttgatgcttttgccaattttggaaaattcttggccattattgctttgaattttgcttctgcctattctccttaccctttccttctgggactagagatatttgtatgttaaaacattttttaaccatgttctatatatctctaatgcttcttcttttattatcatccttatttctctctttgttttattctggatattttctattaacctattttcaagttcacaacttggatcttctgttgtgtctaactggctgcgattgagttatt

SEQ ID NO: 179909 - DNA, 283 bp, Homo sapiens
acaatgaaagaggatgggaaaaccaaccggaaataacataaacatccacccataggaaagatgctcacgattcattgtcaaatagaaaaataaaaacaaaaacaataagaatagaatgacttctactgaaaaaatataaattcctcggtcaaaagagaggaatgtgagaactggaaatgtacttccaatctgtcctccaaaaaggctatcttgagttacactctccataacagagttgtttgcatctgtggaaagaaattctcacgatgttcagggagctttc

SEQ ID NO: 179910 - DNA, 422 bp, Homo sapiens
agagaagtgagggaggcctgtatggtgagcaccatccctgcccacctccctgagatggcctgtcatatggcccactcaccacagatggcccagggagcataggacccaaggtcacatagctcaatagaggtgggtctgggaattgagctcaggccccagacccagtccaaggttccctgacaaggagagggcaggagcacaccagggcacccagacccagcgcagcagaggcaggacattcaccttgtcctcagcctggacaccctgaggtcatactatgccaagacccaggctgggccacctttgctctaggaagccttagggatcctgagtgaagattttccaggaatgcaggcccacagattaatggagatagttcatagaaaatacccctgcctttgcttcatgagacatttcatggg

SEQ ID NO: 179911 - DNA, 243 bp, Homo sapiens
tcctttatcctacacgaggttgtgtaatcttatggagatatgtctttcaaataaaatacaaggtattttggctcttttttacatagtatctctaattttttcctttttaactacaatagtttgttttttaattaatgttgtataggaagatcctattgtatgttttatactgagaacatatctcagttagaaccactcacctatcaagtgctcaattgtctcattagaccgtctttttggaca

SEQ ID NO: 179912 - DNA, 153 bp, Homo sapiens
tttgaggaacagaaggagactgatgtgctggcaggatgtgggctgcaggggaagaagcaggagaaaagaatagggtctagcaggtggtggtaagtgagagacctgagcttcttagacctgagtccagatgtgatgggttatgtgttacaggca

SEQ ID NO: 179913 - DNA, 331 bp, Homo sapiens
tgcctgcctcggtctcccaaagtgctgggattacaggtgtgagccaccgcgcctggccatttttgcatttttaatagagacaggttttgccatgttggccaggctggttttgaactcctggcctcaagtgagctgcctgtttcagcctcagcctcccagattgctgggattacaggtatgagccaccacgcctggcctaaatgcttaataaagattattctgtggtatgtattcacaggcagtatgccagataccagggatgaaaatataaataagaccttagtcccaaggaatatctgcagtttccatagtttcactctgttttttaata

SEQ ID NO: 179914 - DNA, 292 bp, Homo sapiens
tctactcctgctgcgttcctaggggagagggttaattcccaaaaggcaccacatcaggagatgttataagtggaattgttccagataagcaatgtcagtcatgcagtcatcctgatgtgcaagtcgaacctcttcatggacatgatactggtggtgtccaggaaactagggtgtggctaagactggaacagcataggtcaaactttgcaaaattaactgtgttcattttcattaaagtgtcttccttatatcctattctaatcagaaaaataaacattttattgattatgga

SEQ ID NO: 179915 - DNA, 473 bp, Homo sapiens
ccagtatagcaacatccttagccagaagtctcaacagaattatcatgaacataaacgtttaagggttatatacatatatcaatttaaagtatgaaaaggtgcatttgaacttcatggcaacatttaaaaatgatatccttgttagcacatcaccttgaatctatgatgtatgattcagcaaattaggacagaatcaaattctcagcaaaaagtactttgaggctggggatggtggctcacgcctgtaatcccagcactttgggaggccaaggcaggcggattgcttgagcccaggagtttgagaccagcctgggcaatatggcgaaaccccatctttacaaaataatttttaaaaattagccagctgcagtggcacatgcctgtagtcccagctgagaaaagaagactgcttaagcccaggagttagaggctgtagagagctatgatcacgccaatgcactccaacttgggtg

SEQ ID NO: 179916 - DNA, 350 bp, Homo sapiens
ggcttaggctccgccttagcagaaaagaaggaaaggaaattgagaaggaagtcaggtgtcccctgcccctcacacttggggatggctgacttggaggacatgagatgggggaaatctgagtgagggcagagaagagaaatgtggaggctgctcacagggaggctagggagcatatggcatatccagcctggggagtggcaccactgggggaaagggtgcgtgtgacagtggggaaggagtggtgataacagatgtgagcttgctgtgtccactaaaaaggtcacggctatttttaggaagtaggtgacaaggcatgttcctgtagaactgcttattactgagaacccact

SEQ ID NO: 179917 - DNA, 310 bp, Homo sapiens
gcatttgagaagaaaaaccaccaggcttgcacgctaactgtgagatctgcaagtagagatctatggggcctccaaaaggcgggaaacacggggaagacagagcatgggttaaactccgttcagatggacagttggatcccaccctttacatttcgaggcatttcccctgaaaaggtttctgaaggttaagaaaaactattgatcttattacttgaaaatgtaacaaaacacctttaaaaatacatttgttttgtgctcagagggagggcaaagcctgccaggctaggggtgattatctggccagtttatc

SEQ ID NO: 179918 - DNA, 335 bp, Homo sapiens
gaggttgggagttcgagaccagcctgaccaacagggagaaaccccgtctctactaaaaatacaaaattagccaggtgtggtgcatgcctgtaatctcagctactcgggaggctgaggtgggagaatcgcttgaacctgggaggcagaggttacagtcagccaagatcacaccattacactcctgcctgggcaataagagtgaaactccatctcaaaaaaacaaaaaggaaaactcgatacaatgtaagaacatgaccctcctctgctcataacatttgacggtttgacagttcccaagtgccccccatggccctgtcacctccgtgccctcctcc

SEQ ID NO: 179919 - DNA, 144 bp, Homo sapiens
ctgtgtctatcaacaaattatacatatggcaacacacaaacctgtatgttaagcactataagggatgagtctcaactttatcacttatttatgatgggattttggggaactagtttgaactttctaagcttttaatttccttct

SEQ ID NO: 179920 - DNA, 614 bp, Homo sapiens
cctgcttcacctgttagttttctttcctgagcactgagcttgccaagattgatgtcagatgcagcctcaaactcccctgcattaacagaaagcattaggttctcaggtgagaaagtttttctttagtgacaactcttgcagacaaatccagttaatatgcctgtgtgtgcatgtgcacatgcacacatattcatgtatactaacagcttgatagatgagaaatggctttctgatgatttttaaatcaatttttatagtttaagggctttttttccagaagaggagaaaactttatttaggtagtcaagtgtttgaacttgctgacaggcacttcgcaaataatttttgagtgaataaatgaatgtgaataattgaatgactagtggactcttgcattccttcttcaataaaaaccaaaagcaaagcaaagcaaaacacaacaaacaaacacagaaatccagttctcctaagactagcacaaaaggagatctgctacttggggagcatgataaggtagactatccattttaactttctgctctagatttctcacagcacaggaaaaacaagggcctgtatgttaaaaagttattttactaaagttgggggataac

SEQ ID NO: 179921 - DNA, 565 bp, Homo sapiens
accctgcagctacacttccagttgtaacttaagtctaccaaattcgtcacttgtgagagatttcgaagatgagcaaaagctgcctgattatagaggaaagcatagacacagacatgttcagtttttctacaacaatgtatgaagaggtcccagagtgtaaggcagggattctcaacctggagtccacaagatattgaagatactgcttgagttctttgagagatcagaaatttaacaaaaaaattaaaaaaaaaatttttttaacttttgtgcatcaagcaatggcagtattgacagtaaatgaacaacctcattaacaattgtgttagaaattagccatgtggtagtgcacagtaaaaccatgtttattgagatacagttgtccttgataactggtggttgctacgcatagggggaggatggtagggggctaatgaacatcagcctctccctctcaaattacctccacaaacctctccataggcaccgccaactacctgatataagcaaaaaagctctacaagtgtaatggaaaattggagagaaattttaattctgatgaaaa

SEQ ID NO: 179922 - DNA, 606 bp, Homo sapiens
atcgaggatctcctcgaatcgacggtttctcactgtcactcaggctagaatgcagtagcgtgatctcagctcactgcagcctctgcctcctgggtagctgggactataggcatgcaccaccacgcccagctaatttttgtattttttgtagagacaggattttgccatgttgtccaggctggtctcgaactcctgacctcaagtgatccacccgggtggtctgccatttttaaatcacacaacacattttgtcatgggtaagacccacgcatggaagctaggcagtttttgccctgaacatcttgaacagtcagcttgagttttctgcaagtcagcaagccttcaaacataacccttgaggccatcagatacagttttggttccttgagtcctataaactttttaaatcgttgaaaaaattgaactagaacaaagcaaaccatttgttgttttctttttcccccctgagacagagtctcactctgtcgcccacgctggagtgcagtggcacagtcttggctcactgcaacctccatctccagggtgccagcgattcccatgtctcagcctcctgagtagctgggattacaggtacacaccaccacg

SEQ ID NO: 179923 - DNA, 285 bp, Homo sapiens
cttttctttgttcctctgggtagttatcatttttgttccttttctatcataaatactatttcagaagaaattgaaggtaagtgtggtcaatttggcccattttaacgtgttctagacttacagtttttgtgtgtacacatttaaaatagtacggtttaaaataactgaaattggccaggtgcggtggctcatgcctgtaatcccagtactttgggaggcagaggcgggcagatcgcctgaactcggaagttcgagaccagcccgggcaacatggcatgaactttg

SEQ ID NO: 179924 - DNA, 223 bp, Homo sapiens
gatttgagtatggctgttcaccggcaccttttattaatactttgtcctttcaccaagttagtcacaatattcttcccacagatgtttgttccagagatattttggggaaatttaaaaaataccaagcacaaagaatttaacatctacatatttacctccttgggttgacaacatttaaaaatcaaatctttaccttcattgccttacttttatgcataacccg

SEQ ID NO: 179925 - DNA, 1061 bp, Homo sapiens
atacttggctaattaaaaaaaaaaaactattgtagacaaagtgtctcactatgttgcccaggctggtctcaaacttctgggcttaactgatcctcctgcctcagcctcccaaaaagttctgggattacaggtctgagccatcttgcctggctatcagtgccttttatattcaaaatattttgagccaaaatacataaatactgaatttaggaatttttctgagacagccatccaaatactatttaaatattatttcaactcgtgtgaacttttggatcaataaaaataatgatttgatttttttatctctatacatgattttcaactatcagtctctcagagtaaacaagtggtccatagtacactggttgtgatgttctgaaccatattactgagtatcatatttatgtttagagagtcaaagtggagtaggaattgaggaccttcgtgctggtcctggctgtgccactgacaaggctcttggacttgctctttggaatggatggaatgttagaatcagatgagatcatacagtggtctaattcactcaatatatagaagagggaagaataatcattgctgtaacatttatgttttgaccaagtgccagtggtagtcatttgtttaattaaactttgtcttgatcaaaggtgttaccccatgagaatatttgatgagtctggtatgaaatacaatcctaatgacattcaagcatgtttttcacccttttaaatgatacaagtgaagaatattgagtgctctttaaatgaaagatgccattataagagtagatagaaccactcctggagtaaaaggggaattacaagtttgtattggccgggagccactgcgctcagccagcgtcttctttagaattcatgttataatacctacgaaacatcattggtgaactgtgtttaatttcacctttctaagttataatcaatacattttactggtaaattttacctgataatgtacttattcacaatggtccctgaaaatttttgattaagttcattcagatgctgaggaatatgagtaaagcaagccacgacatg

SEQ ID NO: 179926 - DNA, 138 bp, Homo sapiens
tcccctacacaacagagtgtcactctttaaagatgtcagaccaaaaccctttgtacaaaaccctccagtggcttcccatctcactcagagttgtttattgatgtatccctaggatgagaacgtatctgccacctacaa

SEQ ID NO: 179927 - DNA, 626 bp, Homo sapiens
tgactgggagtctgaggcacctgtggaacatcagtctccattcattccaggtactcttaaagtcctgcccaagaactcctcctcagtgttcaaagatccattaggcacagatattgctcagtttagtatattttggagcgctcaaataagaccaaaacatctctttcgaagtttgctctgatttttgtctttctttgagttcttgggactattgatcagcaaagaaaaccataggaaaacagtactcatgctttgattagaaactgacaaactggtattgttagaaatcttgagcaagattttgtgtcccataagcaatgtgttatattcaaataggcattttatgtatattcaaatagaattgatttaggcaaatttcaatggttgcatattttgggttaatagtttatcagtgtccatagaatatttttctaggaaacaaaacgcatactttgtgataaagtttttcacaggcagaattctgcagttgggtggggctaattattttgtttttcactttaaaaaaattagattaaaaataatgagacagattttaaataacagcaaattgacagtggcccttgctatctctttttagctggtgtagtttagaccaattgtttatt

SEQ ID NO: 179928 - DNA, 359 bp, Homo sapiens
agaattgcttgaacccaggagacagaggttgcagtgagctaagattgtgccactgcacgatccagcctgggcgacagagtgagacttgtctcaaaaaaaaaaattaataaataaaaattaaagctttttctctggtaggacaatttattcaaaattacttgtgtgtatttcctggaaaaaagtttttagacagttcatttaaaaatacttgccaagtgcagtggtgcatgcctgtagtgccaactacttgggagactaaagtgggaaaactgcttgagcccaggagttcgaggctgcagtgagcaatgattgcacctgtgaatacccactgcactcaaggctagacaacatagtgaaac

SEQ ID NO: 179929 - DNA, 258 bp, Homo sapiens
ccaaaatgagggcataaaaatcccaagataacttcggatcataaatgaacacagactatctgaatatgggacaagtacctacctcagagcaaagcaaacagtctgagaagaggcgagcacaggccacaggaagcccagcgtaagtctcaatcttttggagatttcccttctattgggattctcagccactgtggtctggaaacaggaggctgagagaggcctttgctccaaaacctggtgacacctttcagtccacca

SEQ ID NO: 179930 - DNA, 429 bp, Homo sapiens
aaatttgtcaaagcactgcaaaaatcaggtttcttatttttacccagaaccttcttggtaaccactgtttttcacagagatgcaaagatctcttggatgcacatttattccttactgtttaaaccactgtcataggtcaagttctgaaagagaactgctcgccctgcttccccgcaagaaatcattatataggggcaagaagttttggtctttatctttgcctagaaccttgaagtactccatgatttcctgggattttcacgagttgtacttgtaactcatggttgtagggctaagagaaaggcagtgggaggaggaatatagtatttattgagcactgatgcattttcagtgcagtgctaggtatatgaggcattgtctcatctttaaaagtaaccatttttctccatataaagtaaaaacagttga

SEQ ID NO: 179931 - DNA, 357 bp, Homo sapiens
tacacaccaggcagtggggcaggaagagccaggcctcgaacccgcagggcagccccaccgccagcgctgagatccttgtcacagggcccggcctggcgtccgacagggagcgcctgcgttcttgattctctgtgttttttgtctggggacctgtccagacaggctgagtcccatcctcgaatgctcatttcactgaccgtgaacggtagcgtcaggcttcactgccctggcttagaaatgcttttttgtaaatggaagaaaataaaacacaaaacagtctgaaaaaaaaaaaagtgagcctacgtgtgggtgaaggataagctgataagctgactcgtgcacgccttgtgtttctta

SEQ ID NO: 179932 - DNA, 668 bp, Homo sapiens
aaggggagttcccctgcacatgctctcttgcctgctgccatgtaaaacatgacttttctcctcctttgccttccaccatgattgtgaggcctccccagctatgtggaactgtgagtccactaaacgccattttctttataaattacccagtctcagggacgtctttattagcagcatgaaaatggactaatacaaatggatacaaaaaactgactgtctagagttaggccactcaggcctgggtgtggtggttgtgtgatactttgggaacctcatctccttgtttttttctcctccataatcctgcaagtgtggctttaggcctcatggccttgcaaggctcctgcaatttcatgtttctttcaagaagaagaggaacagtctcccctaaactcccctccccttccccttcttcagcctccatctggagatttctgctcacagggttttggctagaactgtgacacgtagccacttttacctttaataatgacttgaaaatgtagattatttttgcttttcaatttcttaaactagatacatttctaccgaaaacaaaactggacatggtagacatttatgtgttctttgtaatttcagtggcagtgtttctagtgtctcatcattaagatgttggcttcttatatagatgaagattctctcttgac

SEQ ID NO: 179933 - DNA, 564 bp, Homo sapiens
agggctcttattactgccgttaccactgtcattgctactgttaccaagattacagaggaggggacctgactacacccaaggtctgaggggccagagagggcttcccagggcaggtgacgtcaggctttggagtcagaccttcttaagttcaggctttgcctgaactgtggattcacagttcttcagagaactcactatgtgtgacattgggcaagttagttattgaaattaagttgagcatgttatttacattctgattacgttagttaaactctacctggaaaatgggataataacacccgacagccaggctgccgtgggagtatcagagccaccaggccagttctgtttgaacatttccctgaatgtcttggaggatgggatggggagggatgaggagggccttctttggggtcctcctgtctgctgcacccttgaccttgtctggtgtctgacagcagcagcaggtaaagagcaggcctcagtgatctcctgcatttcctctggccctcactgggagctcttgccttgcctgacagttcaccaagtactgtgtactatctt

SEQ ID NO: 179934 - DNA, 913 bp, Homo sapiens
gtgggtgtgtttgtgtgtgtgtctgtgtgtgtctttgctaggttttgctattgcagtgattctggcttaacagatgagttagggaggaatctctcctcctcagttttttggaaaagctttagtataattgataccagctctcagtatgtctggtagaattaagctgtgaatccatgtggtctggggctttttttttttttttgattggtaggttttgaattctacgtggacctcaatattaaattctcaaaaccttaccaaaaaaaaaaaaaaaaaaacagaaaaaaaaaaaaagagaggggcgcgcgcgcgcggcctagaagagagtctctctcccgcggggggcgcgcccagagtgctttgcgcgcggctctccctcgcggttttctttgttgtgtcctagggtgcgtggccccccattatggtggggggcgctgcgcgtgtattctatacagcgcgtggagcgccgcggggggcccgcggctggtgttttatcacacacgcgcgtgcgcgggatgcgtggtggagaacacagctggcctgcctgacgcgcgggcggggtggcatacctgtgtgtgaggggagaggggaggatcctttttatctgattctgcggggggggcggggggacccactatgtggcggggagccacaacatctctctcactctagagcaagggagtattattaacagacgcgtctctcccaggaagggggacaactatttacaacaatacttcttgaggaggggtgtgtcttatatcgggggtgggtccactccacctcgggaggcggtcgcaactattatgcgggcggcgagcgcgtgtctaagaaaaagaaattgttcgtgggctcacacagagagggggatttgatgtaccttcgggagagaaatattttttttttatacccg

SEQ ID NO: 179935 - DNA, 238 bp, Homo sapiens
ccatgtgtacaagaaagggactggaagaaagcaatcttttaagatatcattataggccaggcgtggtggctcatgcctgtaacccccgcacttcaggaggttgaggcgggcagatcacctgagctcaggagttcaagactagcctgggcaaccccgtctctactaaaaatacaaaaatcagccgggcgtggtggcacatgcccgtattcccagctactcaggaggctgaggtggaaga

SEQ ID NO: 179936 - DNA, 592 bp, Homo sapiens
  misc_feature (563)..(563): n is a, c, g, or t
  misc_feature (565)..(567): n is a, c, g, or t
  misc_feature (571)..(571): n is a, c, g, or t
  misc_feature (574)..(574): n is a, c, g, or t
ctacatgtcaatacaaattttcaactgaaacttttctcatcagcacagtgagacatcacttttatctcaccaaggtcttcaaatctggtcacttctctattatctccttcacaatcatactcaaccaaactttcatcatatctcatcaagaccgctgcaaaaacagccatccatgtgcctcctcaattcattttcaaaaactccataaacaatttgaatacatgtagccattgggatttttctgtgggagaagatgtccaaggaattctaggccaagtaaagctgcaaccatctgatagctggatgggatagagttaacattccaacatttttcctggtgttggtttgtttatgagagggagtctcgctgtgtcacccaagctggagtgcagtggcgcaatcctggctcactgcaacctccgcctccagggttcgagtgattcccctgcctcagcctcccaagtagctaggattacgggcccccaccaccatgcccagcaattttgttttgtatttttagcagagatggagaacaaatttaaaaaggagaaaggtgcttgtantnnnctcncanttaattcagttttgtgaa

SEQ ID NO: 179937 - DNA, 486 bp, Homo sapiens
ccgccgccttttttttttagttgatattgccctattatttcagctcatgtattatttctcatctccctatagaatcagtctcttgtgttaccatatgctttattaataacagtattataaacttagagtttttttgttcagaaatcttgtttcattagtttttgtttctgtacttagatactcaaataatagctgcttttattattttctgtctgccaggcactatactaagtgccatcattgtctctttaggccacacaatagccttatgaagtaggtactattattttccaaattttaaaggtgaaaaaactgagaattagagaagttaagtaactttgtagagtttctcagctagagaatgatagagtcaggatttggtaccagacttggtagatgtagagatttttttcaatgctcatgttcttaaccattacacaagatgcataattctgcaaaaactatattaaatacttaataaattta

SEQ ID NO: 179938 - DNA, 1137 bp, Homo sapiens
  misc_feature (1)..(1): n is a, c, g, or t
  misc_feature (3)..(4): n is a, c, g, or t
ngnnattctactgactccaagttcacgcagctgttcatcccctgcttaatgtactggtgagttccttgaagccctgaaccgaggacttcttgtgtactttaacatttgttatatctgaagatattctgattggcaacatttttaacatagagaactgtttaaagaaaataccgccagcacacaactcatccacaaattgctgtttttgaaaaagatggagaggctgtgactgagatcatcagagaaccagcccggcaccccaaacataatagggcaaaggagtcagatgagaattttgttcagtatgagacactggacaacaagacaggacccttgacctcagaaatgcaggaattcaggaatattatagaacatgaagtagcagagccgtggaggagaatttatagcactaatcttgagcactttcccccgaggactctgcgctgttttcacaaaggcctctcggaatgccaggctgtgaaaggtagaaatgtaaacacggggacaggagtgtccttcagtctaaagagtgagccacgcaggtttctagttgccagcattccagtagtggtactgggaaatggttttataggataaacaaatcacccaaatgcagaaaatgcaattccactgaagcaaatccaacttcctttcctgacggagaatgtaattaaatcctgcttcaggaggacggtttatatcctctgctgctgggggtctcggctcatgctcatcgctggtgtttacaagatgacattacctgcctcctgtgacatgctgaggcagccctgactttgaagatggggcggtggtgcatgtgagggaagggggatgagtgaggctgtgtttcatttgcagagcttggctgttcatctctcacattcacatctgacaccagaagcccacaccatgcttggcttttccaaaacagtgattctaatgtaacaccctaataagctgtgttaactcacctttcagaaggaggctggggggacatacatcacaacaagttgagaggaaggggtgattgtaacaatattaaatataattatcaccagcagaagttctatgagatgaagtgaatgaatcacagctcatgatgtcttcaaaatacaattaaaagtgcaattttacttt

SEQ ID NO: 179939 - DNA, 474 bp, Homo sapiens
aggaacgggagttaagtatgatgtgcaagtttctagcttggataagtgggcaatgactgagttaggaacaggagaagcaggcagggagtaggggaaaatgtggcaagttgagttcagggtttgatttcaagatgtctgggtaatttcctattataattttttaacttagttttgttattttgttcatgctttgatggataatttccaagcagagctgtccagaaagcagctgcaggggctggtgtgaaactctgccagattttggtgtcatcagcctcaatctttcccaaaaggaaaaaataaaacaaaaccacttttagagaagctgaaaatgatataaactttgggaatgaagcatttagaaaaacagatcatgcaatgggatttcccacggacccattttaggtcattacagggtaattgtctcccattaattcagctgtttttcactaacgatcttaacagtctttcagt

SEQ ID NO: 179940 - DNA, 103 bp, Homo sapiens
gtaatgtgtgcatgaacttgctgtgagtaatgtgtgcataaacctgtctctgctcatgagtcagtcccaaatcctttagacctgctcagttcacagaagggaa

SEQ ID NO: 179941 - DNA, 515 bp, Homo sapiens
  misc_feature (3)..(3): n is a, c, g, or t
ttnatagcccaatcccagagaaaaggggcgcagggataaggcagaggctcagggactatacaggagtttttctggggaatgttaaggagaaaggtgcaaaacagctgaagctttcaggactggatggggaggaaaaaggattttaaaaagctttactggccgggcgcggtggctcacgtttgtaatcccagcactttgggaggccgaggagggcagatcacctgaggtcaggagttccagactagcctggccaacatagtgaaaccccgtctctactaaaaatacaaaaattagctgggcgtagtggcgggcacctgtaatcccagctgctcggaaggatgaggtaggagaatcgtttgaacctgaggcagaggttgtagtgagccaagatcgcgccacttgcttcaggcagtagtctgggggcgtagaaaggaaggcttgggaggatgtggtgggcagaatagaatcccccaaagatatgcatgctgtaatcctgggaacttgtggatatgtta

SEQ ID NO: 179942 - DNA, 188 bp, Homo sapiens
cagggaatgtctgttgagtgaataaacggatggtcaatggaaggaatgaaggttaagtgcaacttcctgacctaggagacaacgttagctctccatgttatctgttcccacagaccagtggcacatcttgcccataaagagtatgctcggatgctggttttgaaccccaacatattagtttgtcaacg

SEQ ID NO: 179943 - DNA, 232 bp, Homo sapiens
actctataagccctgtcagtgaaatggagatgcgcagcagatgagccagatccccaaaggatggttaggaaccctgcaccgtagtggaccagtctttaaaatcagcagttctatgttcttcagtaatattttatgcttgcattcaaaacacctatgccctgaggtgtagcgcatatctaatggtgttacaggtaccagtggaaaaattagtcataaggacccaacggcagct

SEQ ID NO: 179944 - DNA, 405 bp, Homo sapiens
ctcaacactcttccacgccaggcaaagctacgggacttccctcttccatccacgttttttttaaaaggcccaaatttggggttacaaagtaaactaacacaatttgtcagtggaatgaaagaaagacctaagataagtgcagataaacatggtggtatcaaaggaatacgataaactatgaagacagaatacagaaaaagtgactggcaaaggattttaaaacatacaaagagaaaaaggtaccaccaacaacatgatagcgtgccagactgattatgccaaattattccagctaaagaaactacacaaaattttaaagaaaaatggattatgctaaattattccagctaaagaaactatacaaaattttaaagaaaaatagattatgctaaattattccaggta

SEQ ID NO: 179945 - DNA, 477 bp, Homo sapiens
aattctactactgcattccagcctggatgacagagtgagactttgtctcaaaaaaaagaagataggactacaggcacgcgcccctgtacctggctaatttttaaaatttttttgtagagatggggtcttgccttgttgcccaggttggtctcaaactcctggcctcaagcagtcttcccatgttagcctcccaaagtgctgggattataggtgtgagccactgtgcccagctcgaatagactgcatacttattatgtctttttttaaacaagtgtgtaataaactcacacacttttaaattctataatacagttgtccacaatatgtctcgaggattaaacaatgattgagttgctgaaataacgtctgtttgtatcctaagtttttcccccctttagactgtgagaatgatataaataagcaataacaacaaaaaagcttaaatcttcaagattatactttttttttttttttttt

SEQ ID NO: 179946 - DNA, 335 bp, Homo sapiens
  misc_feature (32)..(32): n is a, c, g, or t
cgcgagaagacgacagaggctgatagtggagncctggagcgcgggtccggatggcagaccgcagagatcaccttgctgatgtgcccagctcgaatagactgcatacttattatgtctttttttaaacaagtgtgtaataaactcacacacttttaaattctataatacagttgtccacaatatgtctcgaggattaaacaatgattgagttgctgaaataacgtctgtttgtatcctaagtttttcccccctttagactgtgagaatgatataaataagcaataacaacaaaaaagcttaaatcttcaagattatactttttttttttttttttt

SEQ ID NO: 179947 - DNA, 276 bp, Homo sapiens
attttatcattgtcagtgaaaattgctttatgcgtcatgtatgtgttttcacagtatcagaattcaagttaattttatactgccaatttatatcattgttccataatcagtaagtttttttcaactaaagaagtcttaaaagactaatagctttagtaaagtaatgtggtgaactggacatggtggtgtgtttctgtaatcccaactacttgggaggctgaagtgaaagtattccttgtattctggttttgaggctacagtgagccacaaactaca

SEQ ID NO: 179948 - DNA, 189 bp, Homo sapiens
atgacctcataagcagtagctccctcatggagtatttttaggcatcactttcctccccctcccactcagcttccatgcacttccagtgcagtccagaactctccggaatctctagggttgctgcgactcttgttgttttcccagtgtttaaggggtggaaactgtaactgcccctccaaacactcaact

SEQ ID NO: 179949 - DNA, 396 bp, Homo sapiens
aaaccaaccaatccaaagcgtagtacccaaccacctcctttatctaacccttacacatgaagtcagtatttctccagtcaatatttctcctgccctaagtcaccccagggacaggtaggagacgactagggaccactacttttgcccagaacccactgaaattattcaagctagccagtcctgaacagtttcctgccttgccttttccatggaaaccacagtaaaggcctgtgcccatgctttttccctttcctctttcttcctcctgatcaaccctagtacctctcatgtggccctgcattgcatagtgtatcctctcctcttgggaactataagtaataaactgttatttcaagacagtttctacaagtctgttgggtactacgctttggcagt

SEQ ID NO: 179950 - DNA, 342 bp, Homo sapiens
ataaaagtcttttctctgactacaataaaagcaaatttgaaatcaataacagaaagatcttggacacactccaaatatttagaagctaaatgacacatttttaagtaaccaatgaatcaaacataaaattaaaagggaaattaaagtattttgaattgaataaatataaaacatcgtatatcaaaaaaaatctggggactcttgatagaccagtgttagggaaaaacttagagtactaaatttctgtattagaaaagaggaagggtcttgaattaatgacttccacctaaaaagaaaaaaggtatttaacaaaaagatcagaacagaaatcaacaaaataga

SEQ ID NO: 179951 - DNA, 218 bp, Homo sapiens
attccaggaacttaagcaaatctcatcttccaagattctatggtccaactcatgctaaaaccaattcaaaatgaaaacattttggaaattaaagtacctattgtagtctaggagtcagcagaccttggttttaggcttgagcccatcaatgcctgtgtgaccttagagagatccacttagcattatcttctgcacagccatgtaagaattaaataagg

SEQ ID NO: 179952 - DNA, 451 bp, Homo sapiens
cgcccgcctcggccccccaaagtactgggattacaggcatgagccaccgcgccgggcctagtcttgacctcttttaaactccaaattcgcacccccaactgccaactaccacctgtggtcctgccatttgtccccagatcagattggaatggtacatctgcttgaccaagcctggatcacatgcctaggctctagctgcaaggagagcccagaaagtacctgtgtttttagcttctgtagtagcatagaagtacaacctcccaccaaaacccaggaggtggtccagtccccaggcagttcggatgctccctccgcattgtgcttctgctgccttacctctatcggtggcctcattaaactcctaggcccccaggttcaactcctgaacattttcctggacttgtccccacatccaaatcagccacatcaaaacccatcacttcttcctgtg

SEQ ID NO: 179953 - DNA, 458 bp, Homo sapiens
tgagtagtattttattgtgtgtatatctgtatatcacattttctttatccaatcatctgttgatgaacacttaggttgattccatatctttgctattgtgaatagtgctgctataaatatatgggtgtaggtatggaaaccatctcaaccaaaagataaaagttaacatcaccagaaatgtgatgtgtgtctcctgaaatggtgcagaatacagcatcatatttgaagtgttcctgacaaacatgcatgatctcattcatgaggaaatatcagataaacccaagttgaaaaacattctataatgtaactgacctatactcttcagaaaagtcaaaaccatgataaggaaagactgctggactgttccaaattgaagaagacttaaagagacattataactgaatgaaatttataaatctggagtatatcctggacatcattaggacaactggaaaaag

SEQ ID NO: 179954 - DNA, 494 bp, Homo sapiens
tgagattgaaacatctggtcaatatctcctaacactgcaatttcatgcacagttagcattagggcacatttcttctactcttcttacagggtccataagggtggcacatatggctgatcatttcattcaaaaaggattcaattcaaggcattacacacaatcgtctgtgctttatggtgttttaagtctacctgccacagttttccatcatcattgctgactgctgttctcttccactataaaagcctgcaaatatgacaaagcacttaaagcttaacagctttcctctacctgagttagtaagcatttaaggcaaaggaatctataaagtggcaggtcattttctattgtcaagaactcccaatacatgaaactatttaccattttatttaccatttagcaaaaatctaatacagattagaaaagtaatttttaatgtcaaatcaaatacttaactttctgcttgacagatctacgaaagtacactcttttgg

SEQ ID NO: 179955 - DNA, 657 bp, Homo sapiens
ttctttctttctttctctttctttttctttctttctttctttctttttctttctttctttctttctttctttttttccttccttccttccttctttctctttctttctttctctttctttttttttttttttgatggagtttcactctttttgcccaggctggagtacaatggcatgatctcagctcactgcaacttcttgcctctcgggttcagccattctcctgcctcagcctccctagtagctggaacaacaggcctgcaccatcacacccagctaattttttgtatttttagtatagatagggttttgcaatgtttggccaggctggtctcgaactcctgacttcaggtgatccacccaccttggcctcccaaagttcctggataacaggtgtgagcctgttatcatggtaggcagtatgactatttctttaaaagttaaatacacaattaccatatgatccagcatttccatctctgggtatatacacagaataatttaaagcaggcacacaaacaggtatttgtactgtcatgtttctagtagcattatttacaatagccaatagttggaaacaaatgtctgtaaatggttgcatagataaaaatgtctctgggcatatacacagaataatttaaagcaggcacacaaata

SEQ ID NO: 179956 - DNA, 333 bp, Homo sapiens
ggctacatagacactcctaaaaatgagcttccgaactgagatgaacaattcactgcttcattcctcctataaatccacgtccactttcaaaactcatgtgctaaatccttagatttttttcccccagcaaacatctacctaagagcctgatttcattgacacacacttgtactccgcaacaacaacacttcctttgaaaaacagaatgtcacttcctcagtccagaggccagaagtcccttgattctgatctggggagccaagacaggaaattctggtaggcttctgcctctccccccatggacagccactggtgcagctgacagagggcagg

SEQ ID NO: 179957 - DNA, 450 bp, Homo sapiens
tttttcataatttgacagccctatcatattctttcctgatttctcctctacctgaggatcatatctactttcacagtgtcagctaataccttgactgtgatgattccgaaatctgcatctttagtccagccatcctttctgtgtccagatcaatatgtgagtcatttcttgggttttcctacttgattggcccccagtaatctacaattcaacacacccaataggaaactcatagtcctctttccgcagctggctttgtctctcctttattccctgtctcattgaatggtacttgtgatcacccagttgcacaggtcagatccttagtttcctcctgaatttcctgcttctccttagtccccataccacacatggtcttcaaatcttttttttttttttttttgtttgagatggagtctcgctctgtcgcccaggctggagtgcagtggt

SEQ ID NO: 179958 - DNA, 552 bp, Homo sapiens
tattagggggctagagatctctttgtgtaacatttaactttaatttcttggacagcttatatgaataattgaagtgttgaggcagttaaaatttattttcctctcttgggatttcccagttgtcatagatagctgtagtcactagggaagtagaaatattatttccagcaaacagatggctttcctcgtattggtccccaaaagcgcctactgaggtttgtgtttctgttggatgatttcctaatcacaccaactcagtaacttttgaaagatcacacctggtaacagaatatgatgtaaatattaatatgacttagtgaacttgagagcatccaaaattgtaagtttatatagttcctacatccctggggagagtagtctgtccaatgagaggaatcgcctggtagctagtactttacttttcttatcacaagtcccctttctgcctcagttgtactctcagggattcccaagctgatacttctgctttttaactctcattaactctgtcatctacgtgctattttcatttctgcttagtcagatgactac

SEQ ID NO: 179959 - DNA, 272 bp, Homo sapiens
ggagtgttccagaggctcctcatccttgccaacgcttggtattttcagtctttttagccattctactggagcagtagtattttattgtggttttaattagcacttccctgataactaataatattgacccatttcccatgtttctttttattatatgctttattttgtgaaatgtgtctatgagttttttatatattctaggtacaggtactttacaaatatttcccatttcttaataatgataccttggaagatcagatggttttaatttt

SEQ ID NO: 179960 - DNA, 469 bp, Homo sapiens
ttcatttcaggtttttcagattattaccctttggttatcattactatgcagtctactttatagatcatttgtgtcaaatgttaaattttatattgtctttctcttgcttcctggaagattttaatgtgcctcttctagatacttgttgatgtttttggtaaacatgaacagattttaatgttagcctaagaacacgatgaagagaactaagtgcttaccaaaaaattagccatgtaatatatatttcaaaatcatatataggagaatacctcatctgttaagtctgcagcaccgaactgcagggagtataaaaatgaatgttgagatgagagtctactagcgagtctcagtatttcacagacaaacatacatttagtaattctaaaacaagttagatattcatctgtgctataggccagtaatgacccaaatgctatgggaaagttgttctagaaggaagaaactcttt

SEQ ID NO: 179961 - DNA, 137 bp, Homo sapiens
aactccctgaactagaaggaaaaacaacactcttatcttcaaggaccaggaattaaagcgaaggaaataccgcacagaccttgttagattcctggatacgtgtgcaggctgtgcagatttgttacataggtaaacat

SEQ ID NO: 179962 - DNA, 398 bp, Homo sapiens
cgcattactcttttttgaaaaagaagaaaaagaaaactctcagagctaggtgctccccttactccaagatccaacctagatttgtagggataacttgcaaactcctccctaccaatgtcagatcccagactggcgagggtagaacatgctagatcccctcttttcatggcaggaagacaaatggggatgcctaaaaaggatctagcaggtcgggtgtggtggctcacgcctgtaatcccagcactttgggaggccgaggtgggtggatcacctgaggttaggagttcaagaccagcctggccaatgtggtgaaaccctgtctctaccaaaaatgtaaaaattagctgggcgtggtggcgggcgcttgtaatcccagctactcgggagactgaggcagg

SEQ ID NO: 179963 - DNA, 188 bp, Homo sapiens
ctcagagtcacagcttggcaaagccagtcaccacgatggtcgttcctggagcatatgatctgagagaaatggccccaaataaataaggcagccacagagtcaggcaagggctgagtctccagggcacagtaaacgctctgggctgtacatcacatcatgtgtctgagcggcccgcaggagccaccacc

SEQ ID NO: 179964 - DNA, 347 bp, Homo sapiens
ttccaccctacacatctcctgccaatggaagagtgagcgtgcctgtggtgctcctgacacatctggggtagttcccattcacagtgctcaccctttgggactttccacacattacagggtcatcgtccatctatgctaacctagaatgtccagataaaagctcctgtttagagactggagagaaaattgtcaactctgaaagcccacaaactgtctcagccagggggaacacatgcaggaaagactacagaatcgtatgtcagaagcctaatttcagattgacccctacagctttatgactgtgagtaattcacttactttctctaggctctgttattctcacatca

SEQ ID NO: 179965 - DNA, 760 bp, Homo sapiens
gtgatacatattttctagatctttacaattttctgttgtaataaataagagtgcataattttgatcaacaaagaacaaacattttcattcagaggactaggaatgtactaagtaaataaatagttgtttttggaatgaaaaacaaaaatgggattaagattttgttttctgaccgtgttaaaggaaaccatgccattttttctttttacttttttttttaaatacccagacttcaaaactaccatatcagttttaacttctgaatctccttctacatggggactatttgtgataatcagtgaccttttacatagaatgctattaaaatatagttttatgtctggcaaatataagactcctttcttccctacatattttgatttaaatgaagtattgtctcatttctccaggtgtgattcttatgtatgttataaattttgcgatctgtcaataccacagaacaagctgagctgtggttaacactatttcaacatcgaagaactttcttccagttctttctgaaatatgccagtcaaagaaaaaaagtttgaggaagttgaagaatgtaagaaattggtggagcatgctagtggtggttttagaatacagtctttttgttcgtgagttctgtgcttcagtcgaaatcagtcatagcagtctagcaaaaccaatgaattacctaagttatttcagaattaatatgtattttaaatatcaaaatcaagtcaattcactgaagctaggcattctgcaattatca

SEQ ID NO: 179966 - DNA, 429 bp, Homo sapiens
gggcgtaaacccaggtcatctgcctccatgtctacaatatatcccactgctctgcctcagaaggacagacagaatctgagtagacaagtgatggcaaattcatggggagagaattccaggctagaggaaatgcgtgaatgcctagaactcatgaatggcggagctggctgggcatctgcttgtggccacagccatgggtgtgtgtgcatgggtgtctgtgccagggtgagtctctgtggcttgtgtctgtggcctgtgtgcatgtgcccactgctcctgcggcaccccctcccgttcccctctgggcagctggtgagcttgccctctgaaagccattccctctcctgcagctccccagggcatcccagcagccagcagccctgtttgattctgttcatccataaatcatcttgctgaggagatgagaag

SEQ ID NO: 179967 - DNA, 245 bp, Homo sapiens
agaggacccaggcgttgtagtgaggcccgttgtcagtgcgctcacagggagggcttagcctgggcatctcttcctattcctgctctcttccccatcggacatcagtggctctagcatcataaggtcaggagcaaagtgacacccctatttcagatgaaaagaggacttctccacatcagtgctgcgttttcatggtcctcttcccttccccttctgagctgggccccttctcttcccactgacaa

SEQ ID NO: 179968 - DNA, 230 bp, Homo sapiens
ttcctccactcaaccgttatcctttgtctctgtctccacatatatgttccaaaggttgatctcaaatttggccataataaactagtcaaaaccgcctaggcatggctcacacctgtaatcccagcattttgggaggccaaggtgggcagatcacttgagctcaggaattctagcccagcctgggcaacatggcaaaaccccatctctacaaaaaatacaaaaatttggcc

SEQ ID NO: 179969 - DNA, 415 bp, Homo sapiens
actgagggatggcaatgtgcatcgtggccacatgtacattaccacacacatttattacgacgcaatgctaaaactgggcctactgtacacatctaatatgactgctcatgggtgaaaccagagagaagacaagcgaacgaacacatcagagagctggtgaaaatgaagatctaaaatacatttctcaacatataatgttttccataggcacatgtcattaaacagtaaacactctcaattatctacactgttagttttagtcagcgattcagttttttgctatggatcctgaataacaaacttctacatcaaaaagggaaaagacctttagtctacaagcagagagaaagcaaggtgctctgtggactataaattccttatcttcttactaatgagatctgaagcttactaatga

SEQ ID NO: 179970 - DNA, 508 bp, Homo sapiens
aaataagtgatggtacatacgtacaatggaatattataaaatgacagctgtaagaaagaatgaagaagctctctatgtaatgatttcggatgaattacaaaacatattaagtgaaaaaggcaagatacagaatagttactacagtatgctattatttatatttaaaaacttgcaggtatagcaaagaaaatcattggtaattgcttttataagcataaaaattctctggaagggctgggcatggtggctcatgcctgtaatcccagcaccttgggagccaagctgggaggctgcctgaggccaggagcttgagaccagcctgggcaacatagtgaaactacacctttaccaacaattgtttaaaattagctggatatggtggtgcatgcctgtgatcccagctactcatgaagctgaggcatgagaatcacttgaatctgggaggcagaggttgcagtgagcatagatggagtgactgtactccagcctgggcaacagagcgagactc

SEQ ID NO: 179971 - DNA, 552 bp, Homo sapiens
tgcaggactggacgatttcttaacacgttgtgaagggtctcatttctcggtatttaaggatgtgatcacaagattgttccctatcagggacccttctcttgaggttttgtcgctgctgttaaaaatcccttagggacaaacgtgaaacagaatgttgtgatttagtacatatgacctcttggaacacgttcaagagtttgacactagcttcacctgctccgtcgttccctcactcctacattcagggtcattagaaggtaaccttagtaaccagttctagggtcctgccccactccacccctaggcaaagcttaacacacacgaaggtgacgataatagctaatgattatggactgtcacgctctaggcagcatgctgcctgctttgtcagtcattatcacatataattctcatagtagctggttgaagccagtaccgttaccccactttacagataagcaaacagactctgaggatccgtgtgtccaccagctgagagaaggtgagcccaggcagtctgactccagagcctcttaacttctcgcgagcaca

SEQ ID NO: 179972 - DNA, 680 bp, Homo sapiens
ctgtcgcgggctgcctagaggaccccggtgtagttgttctattgctcgaagcatcctttattagcagtcagtccttgagcatgttacttaaatccctgtgctgcagtctcttcattagcaagataaagatgagaatagaacttgcccttataagcctattaatgtcataatttatgtaaagcacttattcagtagggtagattaaggatgatcacaaattcttgctattcctcccatcaagaggtggagtctaattctcctctctttgcttctgggctgaagcaaagcatttaccttgtaaatgcttgatcaataaaatgtggtagaaatggcattctgagatctgtgaggctaggtcagaagaagtcttttagcacccacctcccaaggctctggaacacttgctgtgaactcaaccagccaccatatgacaagactggccaccctgagactccatgctatgaggaagcccaagctacccaggtagaggggccacttggagagagttgcttgattagcacccaaccgacccagcctgcccggtccgctcaccagacaggtaagcaacaaagccttcagataactaaccactgctcatctgagcccagtcaacctacagaactgtgagaaatattaacaagttgttatttggagccactgaggtcagggtagtttgttat

SEQ ID NO: 179973 - DNA, 302 bp, Homo sapiens
caacctcaagtaaaaagaggaattttttaatatatgtgtgcataatacaatcacatagtcagaaataaaaacatagaaagtgatcaatagtgtcttactcccactttagcccccagttcttatgcccatataactatcttttaaaaatttcttttgagacagtcttgctctgtcacccaggctggagtgcagtgacacaatctcggctcactgcaacttctgccccctgggttcaagcgattctcatgcctcagcctcctgagtagctgggattataggcacgcactaccacacccagctaa

SEQ ID NO: 179974 - DNA, 419 bp, Homo sapiens
ctgatgtcatacatgttatggctactgggttccctagtcattcgtgtatgttagtcctacctcctaattagatccaacttcctaaaggatcgaaaccttgctggcctcctctttcgtgtgttgtataaaaaatgaagaacacacaagcagaggtcgaggaatacatgactaattcacctaaaatgctcaaaactcagctgatttactttgtaaagagtcttcattttaaatctcatacaaaactcaattttcttaaaagaaaacaatgctatttattaaaatgcctttgtaatatcttaaaatggatcaatgtacattccattctccaaaagcaggaaaaaatatgtagggtataaaatgtttattatattaaactgctgaattacccaaatgtctgtaagttgtcagctgaaagaaac

SEQ ID NO: 179975 - DNA, 466 bp, Homo sapiens
acacagcacagtgcaacaagatgcaaaggaatggggcatgtgctggacttgatataagaagaacctcaaagagccaaaagacattcactggaaatcatggcaggccaatgtgagaagagcagctagcactgggagttttgccagtccaataagtagatggatgcaagagacctacagtaaggattaaaagaccgaagctaacttctacgaacttttgaaattgatcttccaaggttctcttccaagactccagtttgaagagaaaccattgggaggaaaagcacaatcagcaagataggaagaagggaaaagagaaactaaaaatgtggaggggaagagggccagaaactcccagaaagtaagctgctacacttctgaacattacacaaaataacagaaaagggagctctgtgaaattattaaagcactctgaaggtacatcacctttttaaagttcaggaaagct

SEQ ID NO: 179976 - DNA, 100 bp, Homo sapiens
gttagaggcttatttaccccacatggagactgtgctggggggcggggttgtgggcacagccaaatgggcctcctcctggaggtggtgtctgtctcacact

SEQ ID NO: 179977 - DNA, 494 bp, Homo sapiens
acctcatgtttgaagttgaaataaaagagcatttcattgataacatcatctgaatgatttcctaccaatgtattgcctttgacttaaaccactcttgatgctgtattttctatttagatttcatgttaaagaaaagaattacatgaagcataaagaaaagccacttgggacttagaaaagttcaaataatcagaattttaagatatccaagttcatttattcagatattttatgagttttaaaataagcatgattttgtgctggatgtggtagctcatgcctgtaatcccaacactctgggaggctaaagtgagaggatctattgaagccaggagttaagaaaccagcttgggcaacatagcaagactgtttctccaaaaaaaaaaaaaaattctttttatgagctaggcatggtgacacatcacatgcctatatacccagctactcaagaggctgaagtgggaggactgcttaagcccaggagttgagggttc

SEQ ID NO: 179978 - DNA, 853 bp, Homo sapiens
gggatagggcagcagggacctctcacagactggctgcacttcgttaagtgtgttgtgaagcaaagctgcatatatctttagttgcacaaagcctcacacagttactcctctttccatttatcgcccctcacgcttccctcacaggggctggaaatgagtctctcaaaccatcatggaagataacagctcatcaataccttccagtacacttatctttctccccagagagctctgaacccaaacaaaacaactcccacaaaaccaaacaaataaaactcaaaaccctcttcaattcaagatagcaaaactatgtcaattgatgcaaatacttaacaatacttgggtggacagaaatgagaaggttggtgatgttttgtacactccatcccataattcataaaacccaggaatagtgggggtttctcatataacttgaaaaggaagtcaacttatttgcataagaaacataatgcatgaaagctctcatctcattggcaatctgtgagaacgcaatcctgggagaaatctgcaatggttgtagtccaaaatttaacagtgctttgtcaaatggacttcttgctatacaagaattttctctgtaggtgctaagaaacatccactgcaccctactccaaaataaacacacagaaattaaactctttcaatccagataacacaaaagacaaagatagaaatgggattgccctaaaagtagacttcacagtatggtggacagagctcaggatgtggcattaaaggtcttagtcgaatccaggccctgccacttacaagctggaatcccccgagaaagtccctttcccaccaggcacggtggctcacgcctgtaatccca

SEQ ID NO: 179979 - DNA, 122 bp, Homo sapiens
agctgagggtgatgcacaggcaggcgatgaaactgatgcgtcagtccagccaagaaaggacgcgtccctggtttggctacgtggccgtcctttatttctttgttaactgaattttcttatag

SEQ ID NO: 179980 - DNA, 422 bp, Homo sapiens
agcatttgacagaaagtaaaggagtgctcaaaacaaacaccaaacagagcaaaatgcaaaaaaggaggaagtcatgtcaaaaaggacacaggagcaagcccaaaaagtgtgcagagtcataaacagaaaccaactgagcaataaaaaaaacagtactggattctaacccaaagaataaaataaatctccatagtgcatactgatataaagaaatgattgaatgaataaatgagtagaagagagaaactgtccttacaggattcccaatgataaaggtagaaggcacgagggaagtagaaaatcaccatttgaacaccacagtaataactgctgcagctaagattcactgatgaatactaaaattagtgggtgaaactttaagcagaaatagaatctttgtatagcctcaaagtatctaccca

SEQ ID NO: 179981 - DNA, 708 bp, Homo sapiens
gaaacaaaggatatataaaacaaccagaaaacaaataacaaaatgacaggagtaagtattcacctatcaataataaccttgaacgtaaacaaattaaattatccatttaaaagatatagactggctgaatgaataaaaagaacaagactcaactatattctgcctacaagaaactaattttacctgtaaagacaaacacagacagaaagtgaagggatagaaaaagatattctacacaaatggaaaccaaaaatgagcaggaatagctatatttatactagataaaatagactttaaattaaaaattgtaaaaagagacaaaagggtcaccctccaatgataaagggattaattccacaggaggattatatgacaattgtaaatatttataaacctaacactggagaacccagatatataaagcaatcgttagatctaaagagggagagagaccataatacaataatggttaaggactttaccaccccattgtcaggattgggcagatcatctagacagaaaaccaaaaaagaaacattggatttaaactgcgctatgaaccaaacaaatcttacagacatttgcagaatatttcatccaccagctgcggcatacacattcttcacctcagtatatgcaacattctccaggatagactgtatgttaagccaaaaaataaatctcaacaaatttttaaaagttgaaata

SEQ ID NO: 179982 - DNA, 283 bp, Homo sapiens
attaaggaggggtaaggaagaagcgttggtcaactggaagcaggtgatcaggcaatcatgatagatgaggtctctgctgccttaattgtctgcatatggtgatcttgttagttcagtcccttgatactgtctgggaggcctgagagtcagtttcctgaggaaggaactcagataaggcaaatgtaagtttcaaactttaaactaggaggatcaatttctacgtgtgtgtgtgtgtgtgtgtgtgtgtgtgtgtgtgtgtgtgtttccataaacatcagttcta

SEQ ID NO: 179983 - DNA, 303 bp, Homo sapiens
cacaggctcccctagggcccagaggcagccaagctcaaggcaaagtggatgggagaaatagtaatcccccatcctctagtttccacctagacattgtacagctataaatgcttccacttgcacctgctgggatggaattgctcaagtacccagcacagaccctccaagaggggaggagtaggaaggagatgctctcatcctcaagagtcacagactctcttttgctccccacttgtcaagtttcaggaaatggctgcctctgtagctcctgtcttagactcacaggtgcaaccattggatagg

SEQ ID NO: 179984 - DNA, 147 bp, Homo sapiens
gtaaatattttaggctttgtggactgcctctttcacagtgacttaactttgctttatagtgtgaaagcaggcatagacaatatgtgaacaaatgagcatgactgctttccaataaaactatttacagaagcaggtggtgagttggat

SEQ ID NO: 179985 - DNA, 123 bp, Homo sapiens
aagcacctggacacaagatggctcatgtcaaggctcagagctgggagcagcttgttctgggagccggggactgttgtttgtaaagatcagtgtctccctatggtaggccagttgcttcctggc

SEQ ID NO: 179986 - DNA, 272 bp, Homo sapiens
accaatggtcaactgtatgtgcaaaactaattaagatcacatagctactaaggaaaagatgatatgaaccgaagacatacattgcaaagaccatactcttgctcactatgctgatgtgcctttcttaaggatattcttttttttttttttttctttttcttgagaccaagtttcactttgtcaccaaatctggagcgcagtggcgccatctcggctcactgcaacctctgcttcccgggttcaagtgattctcctgcctcagcctcttgagt

SEQ ID NO: 179987 - DNA, 804 bp, Homo sapiens
tgaggcgagcgagtggcggggctgaagggagtcgcggcggcgctgaggccagcggcggagctgtggggggcaacggtgctgaggcggtggccgcggccgggcgggttgggctgacgtgagaagcgccgccgccgctgggcctcctccattccggcccgcagccccgcgccctcccagcctttggcgccctcccgcgcgggcggcgcgctggcagccgactactccattagtccgccagccatgacagacctgcgtaccacactcgacaggtgcagccagaactaccacacaggactcagaggccgccatcaaccgccagatcaacctggagctctacgcctcctacgttatacctgtaccatgtcattactactttgaccgcgatgatgtggctttgaagaactttgccaaatacttatcattacaccaatctcatgaggagagggaacatgctgaggaaacctgatgaagctagcagaaccaacgaggtggccgaatcttaccttcagcgatctcaagaacccaagactgtgcatgcactgggagagcgggctgaatgcgcatggagtgtgcactaacatttggcaaaaaactgtgagtcagatcactaactggaaactgcacaactggcacttgacaaattggcccccatgtgtggtgacttcttgagacacattaactggaatgagccggtggaaggccatcctcgacttggtgaccccgtgaccattgcgccagatggaagcgccgaatctggctggcggatatccttgacaagacacctggaaactgctatgaagccac

SEQ ID NO: 179988 - DNA, 311 bp, Homo sapiens
gtggtgtgttatgtgctatgtgtcatgcgtgtgtatgctgtgtatgatgtggtgtgtaggttgtgtggcatgtggtgtggtatttgatgtgtgtgtatggtgtgtatgatgtatgtaggatgtatggcatgtggtgtgttatgtgctgtgtgtcgtgtgtatggtgtgtatgatgtggtatgtaagttgtgtggcatgtggtgtatttggtgtgtgtgtggtgtgtatgatgtatgatgtcatatgtagcatgtgtgttatgtggtgtgttatgttgtgtgtgtggtatgtggggtgtgtattatgtgata

SEQ ID NO: 179989 - DNA, 532 bp, Homo sapiens
tttatcgagtgacaaaacagctctcagcagagagggggacacgagttgggtgcactacccttacccaaaatcaggtagtcctccctgtgcctgaaggtgggcagtccctgcaagtgtggctgagtccggggcctttttttttttgggatggagtctcgctctgtcgcccaggctggagtgcagtggtgcgatctcagctcactgcaagctccgcctcgcgggttcatgttattctcctgcctcagcctccccagcagctgggactacaggcgcatgctgccacgcctggctaattttggtatttttagtagagacggggtttcaccgtgttagccaggatggtctcaatctcctgaccttgtgatctgcccacctcggcctcccaaagtgctgggattacaggcatgagccaccgcacctggccaagtctggggcttttatgggctcagaatgggggagtgtgtggtgatgggtttgtgagtatgcaaaaaaggctaaaacaaaggcaccactcaaagatggaaacaacatg

SEQ ID NO: 179990 - DNA, 300 bp, Homo sapiens
catttgtgttgcaggagctggggtgggaggtggggcataagatggtctttttgacattttggaagattaagttctcagttccttaagaacgaatctgagacaccatgggcagaaaaagcgcctgcagctccagcttcacttccctttacgtgcttaatttctaagcagaccctttttaaaaaaaaaaaaggtaatacaaattcaaatttactctcagtccatgaatcctggtgattaatgcagtctgaatttgtgagatcttactgtgtttttgaaaggtgaagcccgctgggcttctgg

SEQ ID NO: 179991 - DNA, 531 bp, Homo sapiens
catgcctgtaatctcaggacttttggaggccgaggcaggtggattgcttgagcccaggagttcaagaccagcctgtgcaacatagtcagaccctgtctcattaaaaaaaaaaaaaaaagcatcctaaaaagtcataatccaatataagcactgacttatgaatatttttgaagcccagttctgcaactgagttccaccaccacccaggtatgccaccttcacgtgaccgaatgagatgcttgctctagaaccttattggagttaaaacaggtgatctcaggcagtattgactgatttttgaggatttttttttttttaaagcccagggagcttgactttagcagcccagtcaaaagtacctgccacagacgaagggccaaccaggagtggttttatagtagtaaacctataacacatggttttatagtagtaagcctatatactatatagagagagtatatatacaactatgtatatatagagagttacaacctaactctgaagaatatcaaaccaaatgtttagttagct

SEQ ID NO: 179992 - DNA, 630 bp, Homo sapiens
gggctacgggatcgagcggggaaggctttggtattctcccgtggttgctgtagggtgtttctagcccttggaaaatttcttgcccgaggttttccaggtggtgaatggggtgcaaagctttccagtacctttggggtcagattcctttcgagaaaaccacccctcttgaacaccgcttgcttttctgctgcttaggagaaagtaggagtggagagaggtcagattttttgaagatagtgttaatagttactatgtgtgtgcaagattaggactaagcctaaagtcttagttccctgattgccaaaatgagtgttagagcttccagtttagcctcctgtttagatttgctccttctaaatcatttggagaatcatagcaattttaagagttacttatttggaggattataaagagttttcttatcaaaaatgccttcggtgaattatgctgagactcttaccggcatcttcttaaatcctgcagtttttagatcgacttttaagaatatgaaagaaatacacacgcagttctattcacggtgccttgctttgagttggacatatggactctattgagccagtgatggcaatactttctttaggttggcacactttcatcaacaaatatttg

SEQ ID NO: 179993 - DNA, 160 bp, Homo sapiens
tttttggtccctgagttctgtctatctccacagctgcagctgcacaaaaacagtactgggacaaacactcaggatcactacgtgaaagtaccaggagttcagagttccgagttctaacagaagagctggaaattaggggaatccctaaaagcagagaaat

SEQ ID NO: 179994 - DNA, 187 bp, Homo sapiens
tgccccccactgcatggggcatgaacgccagtcatgcccagcacccagccctgcatagagggagccaggcaggacccaggcttgtggccaagtcaccctttgccaccgaatggtgtttgcagaagcagggagaggacgtgggtcataaagtgggtcctgttcctggagtgcgcaccctcccccgtgg

SEQ ID NO: 179995 - DNA, 189 bp, Homo sapiens
ttggagttatcagtgggtactactttgtctcggggctgctgtaaattattctttgttgtctccctgaagtgccccatcacagagtaacatgtgttttgggatagttataaggcatgtagggttataatgacaaagcaggaaagttggtactgtctaaaccacagagtttgtggttgaagtggcttatgt

SEQ ID NO: 179996 - DNA, 345 bp, Homo sapiens
agagctccatccatcccttcgctctcaggttcacccagctctcaggagttgtcacattgttctctctggggctcttggtggccttatgaggcaggcagtctgtcccctggcccaggactgtatgtattcttaaggttagcacttaataggggggaagttatgtcttctgtttgcagaggagagtacacagcaggaggtgttgaggtgggggctcaggcttcctgcagttctctgttcttccctcagtgctgtctctcttggattttgttcacctgcttttgcttacattgattttagtgggggttagtgactatggcttttccagtggccaggaggtacatgtgg

SEQ ID NO: 179997 - DNA, 362 bp, Homo sapiens
ctattatccttagcaaattaatgcagaaacagtaaaccacatacttcatattctctcttataagttggagctagaaatgagaacttacgaacacaaagaaggaaacaatagaaaaaggagcatattggagggtgggcagtggtaggaggtagaagattaggaaaaatatttattgggaatgaggccttgtatctgggtgatgaaataatcagtacaactaatgcctgtgacataagtttacctgtatggcaaacttgcacacctacccctgaagccaaaataaaagttataaaaaaggtgatggtctcacctattctcttggggaaggctccaaaagtaacagctacctctagttaaaaatc

SEQ ID NO: 179998 - DNA, 406 bp, Homo sapiens
gtgatgtacatcctcagcttatgaatataacaggattaagagattaaagtaaagacaggcataagaaattacaaaagcattatttgggaactgataaatgtccatgaaatcttcacaatttatgttcctctgccgtggctccagccagtccctccatttggggtccctgacttcccacaacaagaaataataagaggttaaggtggagaagagcaaggaagtccactttataaaggggtcaggaaaaagctctctgtggaagcaccatcttagctgagacctaaaggatggtctaatttggggaggtgcagaggaaaatcattccaggctgaagcagcaagtgcaaaggccctgttgtggagaaaggtttgaaagtccaaggaaacaaaggaggccagagtgtccg

SEQ ID NO: 179999 - DNA, 532 bp, Homo sapiens
tctttccttgtctgatgcctctggtatccgacccataactttttaatctagatatggccattctgccgaagttttcagggttttcaggttgacgcctcagccaggcactctacctgactttgttaactttatttttatttgcacttggtgccacactcttcagcccactccacctccagtccctggggccaccatttctctgggaggagtagccaggcatttcttgtcacctaagctctagccattggattcatcttcattcctgacttttgtagtcaacatgatctgacattgttctttaaaatatatctcttttccatcatctatttccatgactattatcacaacccacatttaagttcttagcacttcatagttacacatttaacagctacgatcccatttcccgagacggtgattagttatacatttaagcacatgactttgttctggctaatgttatgtaagacaaagtcactgggagattcttagaaaagtttttctctgagacaaagggacacataaggagaga

SEQ ID NO: 180000 - DNA, 239 bp, Homo sapiens
tcctccgatacagtcccactcaatattcaccctggtctatttttgcacaagggtaagaatttcaaccagcttggataaacacacaagttgtgtgacatgaagataaatttggcaatggttgcttagaaactgacaacagtgcaatcaataggcagtttcccagagcgccctactccaacaccttttaaagtgccaatcaaagtttgcaaaaccattcattatatttcaatatgtggaat

SEQ ID NO: 180001 - DNA, 274 bp, Homo sapiens
tggaatgagggggaatggcctgtagacagagcctcagggagccacatctgtgagtatccagggagagaggaacccacaaaggacagaggggagtggtcgtagtggcagaagacccagaaacttgggatacagaaaccaaaggcgcagagaagacctaggaggaaaacagcagtgcgagggcttcagaaggccagagtccttgaggctgagagggccagactgcagcctcggggaaccgccaatgtccctggcaaggctgacggcagagggcggt

SEQ ID NO: 180002 - DNA, 662 bp, Homo sapiens
aaagggtgccagagaaaaaaataaagttaaaattaaaaaatcttttatgtttcttattcttaagacatctaagaaaactcttcatttaaagtagtaatagcaacaacacaatggataattagtgtatatggataatgatataaaggacagtaatgttataatggacaagagggagaaattggtaatacttggttgtgagatacctgtactacctgtgaaaccatatagtgttatttgaaggtggacttagattagttgcaaaggtacattaaaactctaagtaaccactaacttttttgaaggaagtaaaatacatgctaacagtggagataagatggaatcatatgaaagctcaattaaaaccaaagaaggcagaaattccaagaaaatatatttaacatgtatgtacctgacagcagaccatcaaaacatgtaaggcaaacactaacggaactacaaggaaaaggagacaaattcactattagagttgatgatcttaacatccctcttcagtaatttatagatcaagcaggcagaaaatcagtaaggatttagttaacctaaacagggtatagtggtgcatgcctgtagcccaaaaatacgtggccttatgtctggtatcaactcttacatgtaaagatcttggaagtcatcaccccact

SEQ ID NO: 180003 - DNA, 333 bp, Homo sapiens
ctctgaaaaaacaaaacaaaacagataaccattgttactattttgttgaacattttccagataccctgatagaagacagatctgtgcatgcacatacacaattttacataaatgggaccattccatataggccagtatctagtgagtactttttttactccacaatttgccatatatgtctttccaaatcaatcaacatagattaaatcatatcaactacacaggattccatcatctgtgtgtgctcttgaatcctacttttaaaatgttctcagaaaggttatcctgaaatatattcctatcagaagttttccacactctctctaaactgaa

SEQ ID NO: 180004 - DNA, 251 bp, Homo sapiens
ggctagctcacccacagttcagctgtctgtataatcaagtaacagtctgagaggagtgttgagatatatttaacatttggaacaattacaatgattatttcttagtaccatctaaaggtggcccctctatagcagccaagctaataagtagtaatgctgctgctgctgttgatgatgatgataatggtgaggttgatgatggtaatggtaatggtggggatgatggtgatgatggtgatggtgaggatgat

SEQ ID NO: 180005 - DNA, 285 bp, Homo sapiens
tcattaacgtaactacaaagtgtaattacaaactctggcaaatgtcgtgaaggaaaagtgatgttgagtcctctctttctcttacccaccacatctaatctgttagcaaaccctgtgggctctaccctctcatccccatcatcaagtcttccctcatctgcatctcttgcctggcttttgcagtgttctccagttgttctctctgctcctgtccttgctttcctgtagtttattctaacactttagatagaatgatcctgttggaacatggttaggtctacctgg

SEQ ID NO: 180006 - DNA, 178 bp, Homo sapiens
gatggaccaatattctagctaggaggaacctcacatgcagaggcttagagttatggaaaatggagagataagttaggagcagattgtaaagaggcacaccaggagatgtggaatttactttgtaggcaatagagaaccagcccaccagcccagactttcaagtagggggatcatggaa

SEQ ID NO: 180007 - DNA, 132 bp, Homo sapiens
ggatgaacgaatcaagtagtatcgggactatgctgtgcatatcgtagtgttctttcttttccctcaagacttggtctgcttttattgttccctgaagttttcccaagtccagatcagaagaggaaggtgttt

SEQ ID NO: 180008 - DNA, 793 bp, Homo sapiens
aaaaaaaaaagtaaaacttaaaaagaaaaccttttaaaaatgaaaagtagggccaggcatggtggctcgtgcctgtaatcccagcactttgggaggctgaggtgggtggatcgcctgaggttgggagttcgagactagcctggccaacatggtgaaaccccgtctctactaaaaatacaaaaaattagccgggcgtggtggcgcatgcctgtaatcctagctacttgggaggctgaggcaggagaattgcttgaacctgggaggtcgaggcagtgagccgtgattgtgccacccgtactccaacctgggtgacagagcaagaccctttcttaaagaaagaatgcctaccttaaaagcagctctatgcccccagttaggagactgaggtgggacaatcacttgagactaggagttcaaagctgtagtatgcagtgattgcgcttgtgaacagccactgcactgccgcctaggtaacacagtgagatcctgtatctaaaaaaaggcagctcttgggccgggcacggtggctcacacctgtaatcccagcactttgggaggccgaggagggcggatcatgaggtcaggagatcaagaccatcctggctaacacggtgaaaccccatctctactaaaaatacaaaaaattagccggacatggtggcacgtgcctgtagtcccagctactcaggaggctgaggcaggagaatcacttgaacctgggaggcggaggttgcagtgagctgagattgcgccactgcactccagcctgggcaacatagtgagactccatctc

SEQ ID NO: 180009 - DNA, 656 bp, Homo sapiens
taaggctagataaatcataagccaggaacatttgaaagtctatccagcctgggcaacatggtgaaactgcatctctacaaagaatactcaggcggctgaggcaggaggatcacttgagcctgggaggtcgaggcagtgagccgtgattgtgccacccgtactccaacctgggtgacagagcaagaccctttcttaaagaaagaatgcctaccttaaaagcagctctatgcccccagttaggagactgaggtgggacaatcacttgagactaggagttcaaagctgtagtatgcagtgattgcgcttgtgaacagccactgcactgccgcctaggtaacacagtgagatcctgtatctaaaaaaaggcagctcttgggccgggcacggtggctcacacctgtaatcccagcactttgggaggccgaggagggcggatcatgaggtcaggagatcaagaccatcctggctaacacggtgaaaccccatctctactaaaaatacaaaaaattagccggacatggtggcacgtgcctgtagtcccagctactcaggaggctgaggcaggagaatcacttgaacctgggaggcggaggttgcagtgagctgagattgcgccactgcactccagcctgggcaacatagtgagactccatctc

SEQ ID NO: 180010 - DNA, 357 bp, Homo sapiens
ctgaaattatgttgtcaggtagaatgtaggaaatgctatacctagactacattgacaatataaccttgaaagcattgtttatataaatgaacaaaagtctagaataaccgtattttagcaggcagggaattttgtagagctgtcacattcagctttctgttacaatttaggactggctatatattttgttggtttagtatgaaataaaaatatggagtcattcaaaagttgttaagaatttcagtatggcaagagacaagcaattaaaccaaacgtaacaatctgcgtaaaggtataggtcatagacccatgaagccagctctgcctctataccattactatttgccagaaatttag

SEQ ID NO: 180011 - DNA, 452 bp, Homo sapiens
aaagggagcaacaatggctgcagtatatgtggcctttcagctagcgcagaggatggaaaccagagtgggctgatgattggatgccaggcctgagccaggtgagtcctgttctcattatactgtaaagtgagctgctccaagcctccctgattcttagcactcccagtccctgcaggggtccctgagaaggttaatcttgcattaggccctctgctgttttccctctgtaagccttactccaccttgcagtgagttctagtataacttctattccagtaagatcaaatggttaaggactccagaaaagaaatttggtgaacacaaagggtttgtcatactttaacttttgtccctttcccaggtggcccatgcttctaggccagcctcccaattcctagcttgcttcatgctcctggcctttgcctactcaaaacaatctgtcctccctaacc

SEQ ID NO: 180012 - DNA, 684 bp, Homo sapiens
cctgtcacatattgaaagtaaaattaatatttgtaggaaatgcattccacaattaccaactgcagttgtgattcaggaaagggagatattgcatgggcattcttcaaatacagagaattaaactagtgattttgggaacaaccggactggaaaaggagaaaagcccagtgtggcaggcaggatgctatcactgaaaggaagctgaagggctggctcctaaacagcaaacaaattacaacccccatctttcagaaagggagcaaacatgaaagcaaaggaaatcacaagcccagagcagcagcagataatttcattcaaggcagctgactgaggcaaaaggaaacttcaaagcaaaaatcaaaaaagccaacaggcagacgaatcgacctggagtcgcagagtggccatggcccaccttgaccaagaccactggttgctgaatgaaaattaaacaaacaaacaaaaaaaacccatataccacgtgacataaatcacccaatcaacaataaaccagaacaaattaaccacgttcagttattactaagctacagagacatgaggcaggagcctgagatttcacagaaaaatgtaccaggggagatccacgaaacatctgtacctcaggcaaacaccgctgagcaacagcgaaaagaggaatgctacgagtccttttctttttaagta

SEQ ID NO: 180013 - DNA, 121 bp, Homo sapiens
ggccagactgggcaacacagaagatcccatatctgccaaaactttgaaaaatgagccgagggtgatggtgcgccccgtgcacctctgtggccaaggacagcgcgtggccatcgtggacagg

SEQ ID NO: 180014 - DNA, 427 bp, Homo sapiens
cttagctctttcgtgtgtgctcctgcaccactgatcccttccacaacatggactgtctgtgatgcacgtgtgcaggatgctgggagtgcccaggtggaaagacacacgtgctgcccccaggaactgactgactggtaggcacagtacagataccagtggtgaggacagtgaggattcttcccttctgaccctttgcagatggtaaaggaaggaactcatcacctaattcccccgactgccccttgagaacaaaatcccttgaaaaattccaaaagctttaactctgataactgttaaggcactaaacaagaggatgatggggcaaggaaaatgggggcagtgtagtgcagaagtctgaccctcaagagcagaggagcttggtcctagccagtttggtttcaggcctacagtggcatttggtattttg

SEQ ID NO: 180015 - DNA, 456 bp, Homo sapiens
tgcttgtagtcccaactgcgcaggagcctgaaataggaggatcacctgagcctggggaggtcaaggctgcagtgagctatcacatcactacaatgtagcctggatgacaaagtgagaccctgtatcaaaaaaaaattcttgtaagaaagaagaaatcaactaaaactataatttagatatattttagaccatttttaatgtacacacttgaaattaatagttttaaatgcccttttgtaacttgtattagaaaagcctagaagtgtagttccattaagtcataatcaatattaaaatttaagttcaataacaaaaccagcattagcatcatttaattcaaaagttaaaagttctttcctttagccttctgattaaccaatatttttgttcatactctaggtgatagatgggtctttgtgttactgttattctttgaaatagatatgtaatgccctg

SEQ ID NO: 180016 - DNA, 158 bp, Homo sapiens
atattgatttatcagtactttggtgtgtaaatcaagcattaagttgaagttctcttatagtcaataaattctatgggccctgtgtggtgggtggttcatacctgcaatcaaagcactttggaggctgggcagggtggctcatgcctgtaatcccagca

SEQ ID NO: 180017 - DNA, 503 bp, Homo sapiens
ttcccctcacttttccattgccaaataaatcgtccttatcttttggagttaagttgaaacatcaatttcttgagattgtttcagatcctacttttctactgcccaaaacccgtagttccccagtctgtcactttatagcacctggcacttccctttttgcaaccaatgtcacgcttattgtaatagttgttcaatgtctatcttcccaattagactagaagtttcattagcatagaaatcctatcttttgcacctcgattcttagcacaatcttgggcattgtgctttgtacctatttggatgatgaatgaaagatgaatgattacatctcataatcactttgagattcctttctgaaaactccaatattgaactctttgtgcctttctaaatatgctggtaaaactgagaacaggtttttctattagagtgaaaaggactgctgtttattgaatgtttccccctacctcgctactccttaccttttcctattatgacaatct

SEQ ID NO: 180018 - DNA, 558 bp, Homo sapiens
aaactaaaatataactaccatatgatcccactatcctacttctgggaatgtagcaaaaggcatagaattcagtatgctgatatttgttttatatcacttctatgatcacgtgagatagaaaatgaaagcaaattacattaacaaaaatgctcctaaaatagctctcatcagatgaaagccttctgaaacactttttaactcctcttttccttgatttttcccacgttagcatcttttgtgctaattggaaactttggttgtgccacatttcttgggagagtcctgtgctactctctgtgagattatctttcttacttagtaacagtccctctgcaagttgtgttgatggtactgccagaggtgttaatggaaggatttcagaccaagttcttgaatgtgtgcacagttgcaaccacattatggctgccttctggtcaatagtgtttttacaatatcaatattaagacatatatgtctctttgaaaaagtaagaaaatgcgcactgtaacataaacagaatactctgtttttttctgtgactgcccatttctcagtggt

SEQ ID NO: 180019 - DNA, 505 bp, Homo sapiens
tagcaaaaaatattcaatcaacctaagtgtccatcaacagataaaggaaatgtggtatatacacataacaaaatactactcagtcacaaaaaagaataaaatgtcttttgcagcaacatggatggaactggacgtcattatcctaagtaaaacaagccaggcacagaaagacaaatgtcacatattcgtattcctaagtgtatgctaaaaaatgagctctcatggatgtagagtgtggaacaatagataaggaagacttggaaaagtgagtgagtgggaggggggaagatgatgagaaattagttaataggtacaatgtaggttattagggtgatggatacccttaaagccctgactttactactgtccaacctatgcgtgtaacaaaattgcacatgtaccccataaatttacacaaatgttttagtcctaaaaaatgcaaatgatcatctgagccttcagtaagctgtaatctttttgctggcataaagttttgcctcaatgt

SEQ ID NO: 180020 - DNA, 199 bp, Homo sapiens
tatcacaaagctacagtaatcaaaatagtattatactgacataaagacagacacacagaccaatggaacagaagaattagcccagaaataagccctcacatatattgtcaaatgatatttgacgagggtgccaaggccacaaaatgggggagagactagtctcttcaacaaatgatgttgggaaaactgattacgtcca

SEQ ID NO: 180021 - DNA, 169 bp, Homo sapiens
gagaagtgtgtgactagactgattttaaactgtgcatgttcatacctgtgtgagggtaagttgtatttctttggagggcaggatgatgtcctaacacaagatatcataagacttcattttctgggttttgtctgtaatgccttttttttttttttttttttgagacaaa

SEQ ID NO: 180022 - DNA, 160 bp, Homo sapiens
cctaatagtcaccccatgaatgctcagtgaaagaaggcgtccaccacaaggtcctggggaaccaagaattccactgtggcccataaattctaagtcctacaggattctggaatgggagatgggaacggccttcaaaagtggcctctcttttaacccatta

SEQ ID NO: 180023 - DNA, 299 bp, Homo sapiens
aaagctttacacccactgcattgcacggaacctcccttgtcccactgacccctgcactctttataagcttgctggtcatccatcctggctcagctcccccagacctgggtctccagtaatgtgcctttatccaaggtgatgccataacgcagaacggcagacgccgaaggtgccttctcccatctgacacgagtccactctcaagatgacagcagcactggtgcagatgtggcaggtgactccaccctacaatcgctgccagtcctcccagaccagcctcagataacaggcactcaaat

SEQ ID NO: 180024 - DNA, 513 bp, Homo sapiens
tggagtctcctgcttcagacatttccttccacctgtaatacaactttctggaagaaaattcatagatgtagttagttaacatattaaaggagacatagctcacataaacagggcctaccttctgttacagaaggaaaaaaatggagttcaattgctccacaatgtggcaaaagctaggcttggtgagttattgagtatgatgtgagaacttggctgtttgcacttaaatttctctgagctttggttttctaagtaaaatgatggtaatagcaatctcagagatctgtgggaagggtagaaaagctttaaaggatgaagttatgttcctgtacgtgaataaagcataaaatgttctgcatggctggaacattgtggacatctgtatatactttagtttttgtcctagcctcagcacaatatgcaaatcttctgtttctgcatagctacctttccaaatacctaacaaactgtttttctgtctttctgccttttttgttcttcctacttaccata

SEQ ID NO: 180025 - DNA, 809 bp, Homo sapiens
attcaggacataggcgtgggcaaggacttcatgtccaaaacatcaaaagcaatggcaaccaaagacaaaattgacaaatgggatctaattaaactaaagagcttctgcacagcaaaagaaactaccatcacagtgaacaggcaacctacaacatgggagaaaatttttgcaacctactcatctgacaaagggctaatatccagaatctacaatgaactcaaacaaatttacaagaaaaaaacaaacaaccccatcaaaaagtgggtgagggacatgaacagacacttctcaaaagaagacatttatgcagccaaaaaacacatgaaaaaatgctcatcatcactggccatcagagaactgcaaatcaaaaccactatgagatgatatctcattgtgatgtaccacattcttaaaagtccagtccacttttggtggcttgtggttggctttgtgattttgctagtgtaaatagtgctgcgactgcaggtgtctttgataaaatgatttccgtgggatagatacacagtagtgggattgctcggtcaaatggtagttgtaactatttatttgagatacctccatactgttttccataaaggtggagctaatttacattcccacaaacagtgtatgagtgacggatggagtttcttttaactcagagatagcaagtatggaagcagtgggtttttgttttcacaagacttgtgacatgaaaagagaaatttggaatgtaaattaattgttactgcatagaaatttgtctaagtgcttaggaacttaaaatctatcctagttaaccttcagtt

SEQ ID NO: 180026 - DNA, 171 bp, Homo sapiens
tccaactacactgctcttccagataccccacagtgctcaccatcaacccgtacatgtctgatttttttttaaatgttgtattatagaaattttgaaaaatgaacacaagtggagagggcatcacgaaccttgaattaccttgctttaacagttaacactatttcctcaatg

SEQ ID NO: 180027 - DNA, 657 bp, Homo sapiens
ttctactgttcactcatcagccacttgtaaacttatttttccgaggcttctagcctaggaagaacctgaacactataaacgagatctttctctgaagatgctcagagtgtgggggaagggacagggtaaaagaagttactagtatagcatcaataaattctgttttgattgcaagtggttttgtactttattttctttcactctcccccacctttttttttttttttttctgagacagagtcttggttctgttgcccaggctggagtgcagtggcacaatctcggctcactgcaacctccgcctcccgggttcaagtgattctcccgccccagcctccgagtagttgagattacaggtgtgtgccaccatgcctggacaatttttgtatttttagtagagatggggtttcaccgtgttgaccaggctggtttcgaactcccgaccttaagccatccgcctgtcttggcctcccaaagttgcagcggctcatgcctgtaatcccagcgctcaaggatggcttgaggtcaggtgttcaagataagaagccagaagtctaaggcagtatacaataagcatcacataattgctatagcacccagagtctgttcttttaagcaaacaaatatttttataactttgtattttataagcattta

SEQ ID NO: 180028 - DNA, 809 bp, Homo sapiens
tcctaaagaatagaaagcagacaggcgtgtatgcaatagaggaggagaccccagagtgctgagctgagcatgcccatggcctgcacccacattcaccattcagacgaggccctcctccctggaggtgatcccaaacctctggaaattggagtaactggccatttgatacccaaggattatgctcggcttggaagaatgagcctggcctatgggagtctctcctagggattaatctccaagacaaaggaagttgttcattggtttaggagccgggtagaaatcctgtaagttcagggttgcaagattttataccatttgtctgagctaggaggaaacccaggtagtggagagagaattgtgatcagttcctgtaacctgccacaatccctggtggactgaagaaagggtggcgaatgcgggaataaaagacaagagacaaaagagtatatttggaagaaggggtcagggggcaccttgcctctagtggacaagggccctgagctttacacagctttctgtatttattaggcaaaagagatagcgagaaggcaggtagaagaagaggtcagcttgtccagagtaggcttgcaagactgcattccctagatgtcgcagtagataacctcaaggagctcggcgccaggaagcgactgccctcatcaaaccttctggggcaggcacagaagtgagtttgtccacattctgtattaatggtaaacagtttgctgtttgatcatatagccccagtggaatgctgagttggtcacatcccacaggcctttggctccctgcagttctctctccctgaa

SEQ ID NO: 180029 - DNA, 370 bp, Homo sapiens
aaaaccaaatttgcatcattaggctgaggaatcgataagaaaagtgggtgtgtcctggaagtatggtatgcaagacatactagtggagttaatttacaagaacatccgaagaccatttgaggaaagaggctcaaatttcagccttgggaataaaacatagagatgggtattggttagaaaaacacataacaagttaatgacaatctactggatgtggagacagaagtagcaaaatactgcagtaaagaacaaaagatcatggttgtctttcatgatggaatgcctaggaagtctttgtgattttacaggacccagcagtgaataaagctgctctcttcctggcaacatcttaaaagaaaccagcagccgt

SEQ ID NO: 180030 - DNA, 473 bp, Homo sapiens
tgagaacaaaagcaaaatgctactttcacccagcaatacacatgcccctcagggaaaaggataaaaatgctaaactgtcctcttatagtggagcagaggaaaaaatacagaaagagcaaaataacaaattaataattaaaaagtatcctattagaagtataaaaattctaaactgttgtttcccctgaatcttctggcaaaatcaaacctctgatgaactgtgctatgtgtttaatttaactttacatacttttggtattccaaattattccctggggcacatatattccagctggagaaacggggttataaatctcatttgattcttcataacctacggattgggagccattatctctcttttatagatggtaaaactgaggctcaaataatttgagatttacccttggttagtgatgattcattcagcaaatcctttgagtacctgtgatgtgccagacactgctctaggg

SEQ ID NO: 180031 - DNA, 255 bp, Homo sapiens
tctttttagctggcaaatttctcttttaaggtaatgaaagtgtttcaggttcctctttgtccatttgcaaataaactggtgagttaacgtcactcccagtgcaaatgagagtgtagtgcacacgtcatgaagatgaagtggtttccccttaattttgcatattttcttgtctgcttttaactctagaagatatttgccttcacctgatttacagtcaggttcgtttctcgcatcgtaaatggactcttctcggtt

SEQ ID NO: 180032 - DNA, 364 bp, Homo sapiens
gtggaattatataatatttgtccttttgtgactggcttatttcatttagtgtaatgtcttcaaggtttatccatgttgtagaaggtgtcagaatttccttccattgcagtatacaccatactttgtttagttattcatccatgatggacacccaagttgcttctatcttttggcaagtcacaccctcttcttaaccatcttgacctgcaagtgacacctgtctcttctgatcacattccacaggagaaggtatgacatagctccacctacatgcaaggggagccaggaagtgcaatccctggctgggctgccacgtctcagaaaccattaagcctatggaaggtaaggcacaatttgttggtgg

SEQ ID NO: 180033 - DNA, 305 bp, Homo sapiens
taatctgcaacctgcatatcttctgtgtttgcccattgattagactgtcagctccctgaggacttccagtattccatttgatgtgcctttgacacaaaggcagccttagggcagacaccaccaagaatctgccagactttctcctccagaaccagcatagggataggaagaaggaacatttagcaaaatgtcattttccctaatatatatctcattatgtgcacttattatccagcttctttgtttaaaactctgctctaagtgttgtgggaaatacaaaatgtaaaataattagatttaaatta

SEQ ID NO: 180034 - DNA, 440 bp, Homo sapiens
atttcccttcactcccttgatactctgtcagcacatcaggtaactccactgcatgttgctagtaaatttcccttttaatgtatgattcctccttttccttagtttactaatgactgattgacccagaaaaagaaacttcagtcctctcgtgaagcctttttaaaaatcagcaagcagcttcttaatattagaattttttttttcaaatgtcagaaacaagataaaatatgagctcagactcttcaaaaggagaaggtggccggggctcagtggctcacgcctgtaatcccaaagtgctgggattacagacgtgagccaccacgcccggcctgggcagttttaaaaaggaaagcttcacttcacttaaaaggcttccttgcaatgagggggatgcttgggtgataattagttgggtctggtgaatacatggatcatcttat

SEQ ID NO: 180035 - DNA, 565 bp, Homo sapiens
tagggagtctttgcagcctgtagaagaggagaatacatataagaaaagtgaatgagccggcaggatggaaatctgattagcgtctggcatggctgagtatgtggcctttagtaattggacctctgcagcttttctcctccacctttgtctcggcttccacagagtgaggaatgtgatgcatgctggagacgggtaatgtgactgaccgagagccctgatggacaaggtgacgttggtgatagcccttggtgtggaacaggacctgaaagaacaggagcaggggaggttgaatagaatttagccagccttcttaggaacactcccagcaaacccttctctaaccctgaaggctttcacagctcactttgccgtgcatttagaaactcctcagcccaaccgctccctctttgttcatttgttttacattttacaaacatttgaggaaaggcactggttgtggggcatcaggaaattgttgcggtatgttccttgttttcaagatgcttatgtattgtgcggggaggggaggatgtgtatccaaaacactgttgcacaaggcagtaca

SEQ ID NO: 180036 - DNA, 365 bp, Homo sapiens
gctcatgctgctacctagattactacatgccactcatctcccacggatgcttctagatcttggagcaacttcttggaagtttctctgccttctcccactcactcttcttgtgacacccacccctacctcttcctgctccactctctaatgctcttctgctcccttattgtcaagctcgagtcttaccaatccatcaccactacttctggcttattaaaacttcagcgtggactctggtggccatggtggtgatatgtatttataccaccttttgagctgtacccacaagcaagtcacataggacactgcaggaaacagcaccttgagccagctttgctccagaaaaggtgcccttgggaaaagaa

SEQ ID NO: 180037 - DNA, 219 bp, Homo sapiens
cagcttaaggatccccttagggagatgacctaaatgtcatttttcaatcttacacccctgttacttccttatatttactctggtctccaaataaacaaaactgctcaccttgccccaaataagcacataccatccttttcctgtgcctctgccattcatttccttttcctgaaatgctcttccttctactccctaagaccctagggtaccgatgctcga

SEQ ID NO: 180038 - DNA, 842 bp, Homo sapiens
  misc_feature (839)..(839): n is a, c, g, or t
agatttctccttcaaataaagagtggagctgaagctaagaaattgcctggagtaggaacaaaaattgctggaaagattgatgagtttttagcaactggaaaattacgtaaactggaaaagattcggcaggatgatacgagttcatccatcaatttcctgactcgagttagtggcattggtccatctgctgcaaggaagtttgtagatgaaggaattaaaacactagaagatctcagaaaaaatgaagataaattgaaccatcatcagcgaattgggctgaaatattttggggactttgaaaaaagaattcctcgtgaagagatgttacaaatgcaagatattgtactaaatgaagttaaaaaagtggattctgaatacattgctacagtctgtggcagtttcagaagaggtgcagagtccagtggtgacatggatgttctcctgacccatcccagcttcacttcagaatcaaccaaacagccaaaactgttacatcaggttgtggagcagttacaaaaggttcattttatcacagataccctgtcaaagggtgagacaaagttcatgggtgtttgccagcttcccagtaaaaatgatgaaaaagaatatccacacagaagaattgatatcaggttgatacccaaagatcagtattactgtggtgttctctatttcactgggagtgatattttcaataagaatatgagggctcatgccctagaaaagggtttcacaatcaatgagtacaccaatccgttcccctttgggagtcactggagttgcaggagaaacccctggcatggattagtgaaaaaagactctttgattacatccagtgngaa

SEQ ID NO: 180039 - DNA, 634 bp, Homo sapiens
  misc_feature (631)..(631): n is a, c, g, or t
aaggctcacagctggattcatgcccagtaaagggacacctgaatggaactgagtcacttttagacttaatatgggatgttatgacaattcttaagttaaaaaatgcagatctcagaaaaaatgaagataaattgaaccatcatcagcgaattgggctgaaatattttggggactttgaaaaaagaattcctcgtgaagagatgttacaaatgcaagatattgtactaaatgaagttaaaaaagtggattctgaatacattgctacagtctgtggcagtttcagaagaggtgcagagtccagtggtgacatggatgttctcctgacccatcccagcttcacttcagaatcaaccaaacagggtgtttgccagcttcccagtaaaaatgatgaaaaagaatatccacacagaagaattgatatcaggttgatacccaaagatcagtattactgtggtgttctctatttcactgggagtgatattttcaataagaatatgagggctcatgccctagaaaagggtttcacaatcaatgagtacaccaatccgttcccctttgggagtcactggagttgcaggagaaacccctggcatggattagtgaaaaaagactctttgattacatccagtgngaa

SEQ ID NO: 180040 - DNA, 376 bp, Homo sapiens
tgcagagggaccaggaagacaagggctcaggctgtgccccacaacctgctctgagaagtctctctctctctttttttttttaacctcttcattgatagccttagacttccaaatgaactgaccagcatggagcctccataaaagggcacagaattctgtctggcacccaggaggaagggggttcccagtgagggcagggccagtctgcatgcacctgttcaggaatgttctcctcatagctcagcctcaaggtgtagacatcctctgtgagcacgcagtgtcatgggagcccttgcccggggagcagtccagctgcacacctggaatgggatggttttcctcttgaatgtgtggtgctaggccccatggcaggcag

SEQ ID NO: 180041 - DNA, 567 bp, Homo sapiens
caggattgagggcagaggaggaatgcttaagagacaggaaatgtagttatttttctcatgaagtttgtatcagaattgtatagagaaggagaaggaaggtaaacaaggacaggatcaaagatacagagaaatggcaaggaacagaaggaagaatagttcatcctctgaaataatagttaaaagactggtgaggatgaagattaagtttgtcagcagaggggtgtgagacagtaaggaggaaggacggacaataaaaggagggatggacaataaaagaaggcatgacctcctaggaagtgggcggcaggacctaacgcaacctcatttttacactccaagaagtagcagccagagaaactgtcttgtatcacttgacactaaattatttcatatccacactgaaaattttgaggccagtcagttcaaattatacctttcatccctgtaatctgtaggaaaaatctaagatgaaagtcttggtcacctattctccctaaatcctcaatcttctctgtcctactgttctgtttttcctcacttcaactcattctgttgctcctctctctc

SEQ ID NO: 180042 - DNA, 310 bp, Homo sapiens
tagtctcaaattaaaaaaaaaacaggccaaaactatcacatatttaatatatttcactcctagttgtgcaaatctgaggcttatccaggtccactaccctttgctcattgtctctcaaaaagcatttaggtcagacagagaatatgaacctttttactctgccttctaataaaaagttacacagggaaagaaaacgttatgtacacagtgaaatttggtcagaggaacttctattttcttcttctcttctacctatattgacataaatagagattataccaaacaattaatgatcttttttttttttttt

SEQ ID NO: 180043 - DNA, 383 bp, Homo sapiens
ctcagctagtttatgatctaaaagtcctcaactgcctattgtcccctactccctatgctgcttctaactttggctcatacttctgcctggaataagccgctcatgcttctagctgcctgattcccagtcacatttcaagactgaacttagcatttcctggccactcttacttccctgccatctacactagattcctattgcatacctgggtactccagtactccttcatgttactattgtattttggataccattctacctcagtgactgaaattatttgcttctgcatctttcactcttgagtataatataaatttctgtagggtgaaaactaattattacgcatctctgtatctataacatagtacttgatgccttaaata

SEQ ID NO: 180044 - DNA, 309 bp, Homo sapiens
ttcctcactgtccatctccggctatgacaagctcttcacaactcccttgtaggaatgccatcctgcctctccaataattataatgtcacttggtcaaatcctacaaagcttctcactgcatccaacactgacctgtctcctttctgaatatcagtaactgcatgtgatccactcttctttacttgtgatgtttccgctaacatttggaaatggttctccatcatagctccagcaatgtaatcattcctgagatgtattgtgatcctctttccagacgctcagcagcaatattcctgccaactgcccttg

SEQ ID NO: 180045 - DNA, 347 bp, Homo sapiens
acgtccgtgtacttccctcagtgttaggaccgagggccttgcgatgtatgaagcaagaagagaggcaggaggagggaaaaccggcgtctcttttcactttctctatatcgtctgacagtacggttgcttttctggtgtggttctgtcttctaaaatattagaaccaggctgggcgccaccgtctgtaatcccagcactttgggaggccgaggcgggcagatcacctgaagtgcaggaaacaagacctatgaggtaaggctccattttctttctttctttcttttttttcctgttttgttacagacggggtctcactgtgtcacccaagctggagtgcagtggtgtga

SEQ ID NO: 180046 - DNA, 618 bp, Homo sapiens
aagtcgtgtggtgcaaagttgctttgggcaggcccatgtgaattcctgataccagaacttcctaagcctggacagacattaccagctttctcagctcttctcagtgcactttggggttcaaggtgagacctggttacctctatctccaggaaaacaggtggagagagcagaagcaagcctttactctggtgagcaattgggcgatgataataatagtagttgtgacattattcactgcctcctatatgccaggcccaacaaacgcatcagcagaacaaaccaaatgactcataggccaaggaagaaatggaaattagaaaatatttagaattgaggccaggtgtggtggctcacacctgtaatcccagcactctgggaggccaagacgggcggatcacttgaggtcaggagatcaaggccagccatcctttgccaacatggcaaaaccctgtctctactaaaaatatttaaaaagtagctgggcgtggtggcatgggcctgtagtcccagctactcggaatggaagactgaggcaggagaatcacttggacttaggaggcagaggttgcagtgagctgagatcacaccactgcactccagcctgggcaacagagcgag

SEQ ID NO: 180047 - DNA, 519 bp, Homo sapiens
agaaaaggttttggtgacacgtaagagatttctcagcaaagtgcaaagactcggatacaagtgttctcttgcctcccttatgcaatgtgtgctggtaagagtttaacaatcggctctccaggaggagactggggcaagagggaccctgatttgcagcatttgccagttccgcagggtaagtgctcccactatggctggtttcaaactaccagtgtgacatcacagactgtgtttggaaggagatacacacgatagtcttatgagccagtatgagttggctccagcacaccactgcatgccattaatagatttctgctgttctttggaaatttatatcatggtatttattgctgatgagaagataatgagtttttgcttaagtttgggaaaggaaaacaaatttgaaaaatgtgcactgaaattgttatgaaaagctcctaattcttgagtttttgttgttattgctgtttttaaaagattgcttgtttggtccttcaaatgtgagtaaaggaaagaaga

SEQ ID NO: 180048 - DNA, 301 bp, Homo sapiens
caggagagagtcactagcaaaagggtatggggagggaagaggtaattgatgagtagagcctcggggaagccttcctgagagatggcatcgagcacgacggctttgaagcacaggtaggggttttgatctcagagcagagcagcatgtgggaagattccaaggtgtgaaaaagagggtcacacaggccaccaccccttagcaacgtggatgtctccagctgtgacccaggacagagagttttgagatggttacgtgactgaacccagtacacgcccccaggtgactcgtgagcccatctcaa

SEQ ID NO: 180049 - DNA, 865 bp, Homo sapiens
ttaactcaagttagaatgaatgaaaatttcaatttaagatcaatcaaatacacccatagatggaaaaaatcagaatccctgtaatggccaggcatggtggctcacacctgtaatcccagcactttgggaggccaaggcgggtggctcacctgaggtcaggagttcaagaccagcctggccaacgtggtgaaaccccatctctactaaaaatacaaaaatcagccgggcatggtggcgggtgcctgtaatcccagctactctggaggctgaggcaggagaattgcttgaacctaggaagtggaggttgcagtgagctgagactgcgccactgcactccaccctgggcgacagagggagtcaaaaaaaaaaagcagcaggcacggtggctcacgtgtgtaatcccagcaccttgggaggccaaagtgggtggatcacctaaggtctggagttcaagaccagactggccaacgtggtgaaaccccatctctactaaacgtacaaaaatcagcctggtgtggtggcaggtgcctgtaatcccagctactctagagactgaggcaggataattgcttgaacctggaaggtggaggttgcagtgaactgagatcgtgccattgcactccagcctgggcaacaagagcgaaactccatctcaaaaagtgaaagaatccctgtaacctccagttccccagggtgggtggtcctgtcttgtagaagagaaacaggccccgatgcggggaaggagcaggggtttggctctgtgaccttggcccagctgtgtcccttctttgaactttcatttttgctatctttacagcggaaatgaatccctacttttcagggtgatcacgtgggagctagttgg

SEQ ID NO: 180050 - DNA, 362 bp, Homo sapiens
tcttgaaatagttagttccttatctgtctttcacttcccattagaaagtgctgacattctgattttctgtaatcttattactctatgtgacttctatagagctctttcttattttttcttcctgttatttttacttttgaacatttacagggtgttagctgtcaatgacaatgaaccccaactatggtctttaatcttttcacggtggggctccaagatctttataactaccagcaaagagctctgtgatttgccaaaattcaatcataaggaagagtaaccccctccacactgtttttattatggtcttttccctccttgctctactacatttgtgggcataaagctttgggggaatgaaa

SEQ ID NO: 180051 - DNA, 448 bp, Homo sapiens
tatgtctttaccagcagcgtgaaaacgaactactaatacaccagtgaactctccaagttcactaatagtctttgaaggtgggactttggaggtaggagataagcaagggtctctggactatttgaaagatgcagaagccgtcagacactgggcacgctgtgccccaggacctaaccatagcctttggcacctactaacatgccacctaatctatttatttattatgtttgctattagttttctgcctctctctgctagaatgaagaaagctccatgaaactagggatctttgtttttaagatcagacagtatgcatgccctatagcatacactcaactaagatatgttgaatgaatgaataaatgaacttgttatgaatgtaattaatgccactgacttgtatgcttaaaaattattaagataggaaatgctatgatatgtgtatttt

SEQ ID NO: 180052 - DNA, 464 bp, Homo sapiens
catagtagtatggatggccatgggaggaagattcccagtacctagtaaaatgaaccattattgggaaacaatacctgcaagtgctatgatgtcatcatgaccttggaacaaaggcagcatcataaaaccagtaaatacagtccactgtacctgcccaggtaaagcaggaggctttttggtttactggtaagatttctgggctggcgtacgccttgcctgttgcagcatgcagatgttctctgtgtggtggcttgggaatcactggacattgtttgtggcttggctgtatcttaacacctaatgacccactggtggggattatggtactaggtccctgggttctggtataccctcatgggctagacaggcaggagtctggttcaactgcatagataaaaccttttttaaatcaggtgctggttaagggagatatcataaaacaacctttgaagatacaagaattc

SEQ ID NO: 180053 - DNA, 182 bp, Homo sapiens
  misc_feature (17)..(17): n is a, c, g, or t
gtgtgtgttggtgtggnagctgtcaaagcactacagtatcctgccatataagtgtgtggctgttagttcccggcttgtgcagtgcctaagtatgctgactgccttacctatatggcatctcctgtcatttgttccacaaagcttgtgctgctgcactttcactgtgtcttttctttccctgc

SEQ ID NO: 180054 - DNA, 220 bp, Homo sapiens
gttcctgaaactcttcttgcagttgctttagggttaaagataaattcttaatgaagaaaacaaagacaggagaagcaaggttgtactggggtcagatggatgtgagtaagccaaaaagcgtgctagtaaagaactaccgattaagtcatgaagacactgaaatcaatctttacttttgaaaaacacttgtaaagggaagaatgtgatgagatttttctac

SEQ ID NO: 180055 - DNA, 457 bp, Homo sapiens
atgacacaatatagtataagtccttacggtgcacatgaactgcgttaacatccattatatatattttgcatcttgctgttggccattccattaagagaaaataaagggagaatgtgggaagttaaataaaacttgaaaatgtgtgctagtggctagaacaaagctagagttctctagaaccacatttatgaaacacggcaaaatagaaacttggtgatatccacggctgttagaatgatggccatcagtcatgactgacttacagcttcaggagttttaaagacagcattaggagaaatgtgaaacctcaaatacggccataggtggatcattaagtctaattcctcatctcctaaacagtttgtctttttccagtcgttaggaaactgcctgcacccttctggagcacaactagtcagtggcttggtctgggcaccctctctctattgaccaacag

SEQ ID NO: 180056 - DNA, 424 bp, Homo sapiens
tgcctcaggatgaatcatgcactgagtctcactcatatgtgatttagatgagactgtggaccttagacttttgagttgatgctggaatgagttaagactttgggggctgttgggatggaatgagtattttgcacatgggaaggacatgactttgtgggggccagaggcagaatgcatcccttctaaaatttgaatgtgtaccttctaaaattcatgttgaaacttagccaggagtgctggcaaatgcctgtagtcctagctactcgggaggctaaagcaggatgattccttgagcccaggaggtcgaggcttgcagtgagctatgattacatcgctgtactctaacctggatgacagagggggaccctgtctctaagaaacaaaaacaaacacccatccatcccccatggaattcatgttgaaa

SEQ ID NO: 180057 - DNA, 542 bp, Homo sapiens
tggagaaggtggtttctgtgcagtgctgtgagcagcagccagagtggcacgtgcaaagagatgggcactgagggaggaagacactgctctttattaaagacaacagacagtaatgctagagatagaggcggccagtggctgcggcaggagatgtttcaagtggagagaagcaagtcagatgagagacaaggaaagaatgcagggtgagctgcatgggaagccagtggcacaggcgcctgccagtcaaactgttactacccctgagtccctctgtccttaacaccccttggctccctgctctctccacatgaccattccctatttgggccctcaatgatctctttctcaggctcttgtaattggcctgcatatgacactccctccctctcagcctagccacagccaggggatttccctaaatggcaaatggggcatgctactgcccacggctgcccaccccacagcccgtgacagcagttctcaataaggcagctaattgcaagcaggtctctggttgccatattgatttggggaggggtata

SEQ ID NO: 180058 - DNA, 344 bp, Homo sapiens
cagagtttagaaaatgaatgttgatagatagtctcccactagtctcttactattcaaagtatggtccctggattctcaggaccagcagcattagctttacctgaaatcctcacgccagacctactgaagctgacctactgaagcagaatctgtattttaacaagatctccaggtgatctgtatgtaggtgaagttggagaaggcagtgttaattgactccactttttttgttgttgtttttgttttttttttaagccggagtcttgccctgtcgccaggctggagtggcgcgatctcggcttactacaacctctgcctcccgggttcaagcgattcccctgccg

SEQ ID NO: 180059 - DNA, 400 bp, Homo sapiens
ttgtagttagtgctattgagagcttgaaaaagttctgaattgcggagaaccaccagcattttgggatttgtgacaccatctgaaattgcttgccgggcagatttttccatttggatgtaataaaactcacgaaagttgctgaaccacttgatcatctgggaggtaatgcagcggttgaactgtacaaacaagaggtccatccagtcagacatttgccacgaggtgctcagaattagaactgtctgcttccagctcagtataggggttcatatacggctttaaccagcattaacaggggcttcctttaaaaaaagaagcgaagccaccgctattttccaagcctatttagttatactcagaaaaatctaaattagctacagtgcccattagaacataactt

SEQ ID NO: 180060 - DNA, 600 bp, Homo sapiens
gtgcttgttctgtgctaagcactgttacaaacatgcaaaaacgctctttgagggggcttatgtgttagtagggtgagacatgataaagtaatagaatatatggtactttaggtgatgatgagtgataaggaaaaatagaaaggaatagggagtgggtgagagactctgtgtgtgtgtgtgtgtgtgtgtgtgtgtgtgtgtgtgtgtgtgtgtgttgtgggcgggggtcggttgcaactttagattgggtggcctgggaaggctttagtgattagtgagatctgagcgaagatctgaggaaggtgagagagtgagccacgtggataactaagggaagaacatcccaggcgagtgtgaagttcctgaggtgaggccatgactaacgtgtgtgagggacagtgtagaagccagcgcagcaggggcagaacgagggagggggagagtggtgcggggtgagggagagaggtggctgaggacagattgggtggtgcctcacaggccatggtgaagactttggcttttactccgagtgagggggagccgcaagagcattgtggacggaggagggatgtaatctgatttaggatttaacaggctccc

SEQ ID NO: 180061 - DNA, 197 bp, Homo sapiens
aataaggcagccagcacaagcctggagatggtgtgcctgtgtgtgcaacatgtgtgtagttgtgtgtttgtgccaacacatgcaagcccaagtacatatcctatcagctattgtgtgtgtgtgcacatgtgtatctggggaggtgcccagcatgaaccatgtgtcggtgtcagcgtgtctgcatctcagtgtggatg

SEQ ID NO: 180062 - DNA, 435 bp, Homo sapiens
  misc_feature (7)..(7): n is a, c, g, or t
cgactcngaggatccccttattcgtgttgcaccacgaacttgggccatcaacacaatcacttcagacaagaggcccctttcgggatgttcctatccccactccatccccacccccagttcatagtggcagggaatgagtcccaggccctgggtcttatttatttatgccacccttgtcagtttaggagaatcccagcctccagtgcctgcaatacacatggtgctttgcttctgtgatctccaaaactttgcagacaaggaaatgaccactcagaggctgagtagcttgcctaagataccacagatagttcatcacagaagcgagattctaactcagtttgtctcattcaaacctgaattcactgaagtgcagggtgctgccttgagcgtgtgtgtgactcttatttataagacataacgtgcaacacgaataaa

SEQ ID NO: 180063 - DNA, 482 bp, Homo sapiens
cctttcacttagtataatgttttcaaggtcacagcatggatcaatacttcattcccttttattgccaaataagattccattgtatggatatactcgtcatgtcatctgacagtcacccattgcctgcaggttgacatccagctactgtagcctggcatcacagtcttctagagcaaaaggtcctgcacgccaaactggctcttgccatctgcctggtctacttacctctactctttttttttttttttttttgagacagaatctcaccctgttgcccaggctggagtgcagtgacacaatcacggctcactgcagccttgatctctgcggctcaagcgattctcccacctcagcctcctgagtatctgggaccatgggcatgcaccaccatgccctgctaaattttgtatttttcatagagatggggtttcgctatgttgcccagtctggtctcaaactcacaggctcaagtgatctgcctg

SEQ ID NO: 180064 - DNA, 271 bp, Homo sapiens
acaatctcttacacttttgttggaaatatccatggtataaacatttggcaaagctattttgctgtatatacctttatagcttttgcctcaatgattcattctgtgagaaagaaagcacgcctttttctaagcactcttcaggatggggaagcatgtgtccaaccagcctccatttcttcccaggacatgaaactcaatctactcagtacagttcagtctaatagttcctttccctccagatatataccttgctgtctttttaaaattgttt

SEQ ID NO: 180065 - DNA, 703 bp, Homo sapiens
gggagagatgtccctttgcagcagctgtgcacagggcttctgcacctcccctggggacagcttggtgtcttggctctgccttcagagccaggtcctttggggacagttctccccactcttcctgatgcctgttgtgtggtcgtgtctcacctcgctgcctgctggcccacttgagcccagctccttctctggagaagttaattatcaaatcctagcaagaagggcaagtggtgatgattccacgacagagtgataatacctcacctctgcctcctgaacaactcggcctggtttcagcctgtgaaaatgatgccagtcctggaagatgcctagtgacattgcggagggatgacctgctcccaaccaaggattcttttcttccaggatgatgtcctccgtcataggttatgagatgtgccctataaccatttatgccaacaggactggttcattgaaatatatgggcaccagttttaactgtttggtgcattgtgttagaaagtagcagcaattgaatcattgtcgcttgatttctgtcccttcgtttttcatgcctgtcagcaagcaaaagtgggacaaatatttggaatttcttttttctggaacaccttttcttaaagtgtaagatttaaatggttttcagtaccagtcatcaccataatcaattttagaccatttcatcacctctaaaagaaacattagg

SEQ ID NO: 180066 - DNA, 135 bp, Homo sapiens
tattagtaacccagggattgctgtgcccatatcaactaccagattggtaaggccatgttaacaacataccaaccacaggccacaaaaccaatatcagatgaaaataatattcagactctaacatcatgtttaaag

SEQ ID NO: 180067 - DNA, 401 bp, Homo sapiens
  misc_feature (7)..(7): n is a, c, g, or t
  misc_feature (350)..(350): n is a, c, g, or t
agcttgnatgaactttgacaaatgtgcgcacccctgtaaccacattgcccctgtggagatatagaatacttccatcaacgcacaactcctcttgctccttccccacctccatcctcaccctaggcaaccagtgttctggtttctacctttgtaggttagttttgcctttcctaagacttcatataaatggaatcaaataatatctatccttttgtgtctggcttctttcagcagttttttttttttccccagaggtagggtctctgtcacccaggctggagtgcagcgacacagtcatggctcactccagccttgacctcctgaactcaagagatcctcgcacctcagcnctcctgagtagctgggactacaagtgcatgccaccactcttggctaattaa

SEQ ID NO: 180068 - DNA, 637 bp, Homo sapiens
caggatggagtgtggtggcacgatcttggctcactgcaacctctgcctccaggttgaagcgattctcgtgccttagcctcccaagtagctgagattacaggcgtgtacgcccggctcatttttgcatgtttagtagagatggagttttgcaatgttggccagactggtcttgaactcctgggctcaagtgagaccttgtctttactaaaaatcaaaaaacaattttttgtggtaaaatatacataacataaaatgtgttatttaaaccatgttttttctgaatattatgtggaacattttaaccatttaaaaatatatagttccataacatcaagtacattcgtattgttctgcaaccttgtagcatcctgggattcaatcttgacttcctatgctcacttcctagatgataatctttcaatcccgagtttcataagcattcccaggtttatatctccaacccaaacatcttccatgaacaccagactccaaatccacgtaacacctccttatggatgtaaataggcatctcatttgacatatccaaagccaaactcctgatccttcttctgaagcccctgccaaacctgcctttcctattgtctttcttacccatgagtggcatctttattcttgc

SEQ ID NO: 180069 - DNA, 223 bp, Homo sapiens
aggtgtaacccacccacctggcctcccaaagctcctgggattacaggtgtgacccacccactgtgtctggcctatatttcttatagtaatatagttatggtggggtctgaaacagaaataaataaatgcagaaatatctaagtactttcaacaaatggctcatgctacagatcagtttctagcaggcagagcacccaagtatgttcctggaggttattggcat

SEQ ID NO: 180070 - DNA, 569 bp, Homo sapiens
tctaatataaatggcaaaatattcaaactgataggcattgagattcttaaatgctaaagttgcattcaaaaggataattttaggcgttgtgacaaagcagtgttatattttaaagttagtgacaaggctatgcaccttttatctctaattgtttcttacagaatgtttttattattgagtagtaaaacaataaatgtcagatcctttatacaaattcaagattgacattgataaacaaaacttcagcatatcactcaaggtcagcgtagaaattgtgtgtctggaaacttctatagtaattttatattactgtgacattagtatgtgatcacttttctagtaatgttttaaaaaaatatatcttacaggccaggcatagtgctttatgcctgtaatcccagcactttgggaggccaaggtggcaggattgcatgagtccaggagttcaacaccagtctgggcaataaagtgagaccccatcgctacaaacaaattaaaaaatatttatgtatgtgtgtaatatatataatatataacaaaacacatatgtatgtgtatatatagtatgt

SEQ ID NO: 180071 - DNA, 334 bp, Homo sapiens
gcggggagggatgaagggtttcatttcaaaactcaagagctaagagataccacaccagagaaattagaagacaacctggtggtgatgagtgcttctgacccacaccaggtgacgaggaggaggtagcagcagtgacagaaaacaaagtgacatcagacactcctgcagaggggaggggttcccacgactcccacccgcttttaacttcttgtacaacacacacctgtctgtgacatgggcactgaaactaaagccaacagtgagggaggactgtgaccatacaggaacatttctagagaaatgacaaagcacttcgtacgttacaccaaatgcg

SEQ ID NO: 180072 - DNA, 263 bp, Homo sapiens
tcgcttaccttctgccctttacaccagtgttcctcccctctggaggacacagcaacacagcactctcttggaaagagagcagccctcaccatacaagccaacctgccagtgccttgatgttgaacttcctggcctccagaagtgtgagaaatacatttctgttctttataaactacccaggttcagatatctttgttacagcagcacaaaacagactaagacatagagcaagggtacttcaaggcagtaagcatggaagaaga

SEQ ID NO: 180073 - DNA, 261 bp, Homo sapiens
acatttaagcataaagataaatgccgtctacattttcaagactatatatatgaaacttagctaattacaagaggctacgacaaaattaataatggaccaaacatatttatactaataaaaaagtttctcaaattttcaagtctatttgagtttagtttagagttcatgcacagacatgaatatgttttatttgatatcctactattgagacagaaaaactccaaccggcctgcccactgaggtgaagccttaggaagttcg

SEQ ID NO: 180074 - DNA, 117 bp, Homo sapiens
ctatctgagctcctatcaggcattcagtcaagaagttagcagataatgacgggaacaggacattatctgcaggaaaataaagcaaggtggaagcagctgctccgatgggagctcccc

SEQ ID NO: 180075 - DNA, 314 bp, Homo sapiens
taggcactacaaatacagtggtgaaaaagataaacttctaccctcagagagctcattcaatactggaggctttaagcaataggtaaacaaatgaataaggttcttttcagaagtaatgagaacttgtaacaaatatcgatgtctattttagactagtcaaaaagatttctttgaagaggggctatctcagcagaaatatatcatatgattctggaataaagtaagtacaaaggccctgaagcagggaaaaaagcttaatgtgtctgagaaacaagagggttagtgagtgtggttagaatgatgtaagaaaaagg

SEQ ID NO: 180076 - DNA, 135 bp, Homo sapiens
cacgttgacacttcagttaacaccaaattgcttgcatctgattaattcattacactcattctgcaagtattttctgagcataaattatatactagccactatgccagtaagcacagggaatcctgaagtgaacgt

SEQ ID NO: 180077 - DNA, 451 bp, Homo sapiens
catgtcattctggtcttggaggtacatccagaggtgatgtttttggggtggaaggctgatgctactaagtggtcctttgcaaggtggaatagaaatccagctagaggtaagaaacacaggcccagttctggaatcagaggtccagtcagacaggccaggatctgggtagggtgttgaaaggcagtgccaggggtgagaaacacaggcccagctctgaaatcagaggtccaatcagatgggccaggatctgggtggggtgttgagaggaagtgccagaggtaagaaccacagtcccagctctggaatcagagatccaatcagacgggccaggatctgggtagggtgttgagaggaagtgcggtgtaataggcagagggaaagcattggtgcctcaatttccagcccctcaaggctggtcacagaatgcattattgttctcagctactggccc

SEQ ID NO: 180078 - DNA, 756 bp, Homo sapiens
ttataaaactgttaacagagatacagtttttcaggtattccttttaaaaatggattggattctactgtcaaactagatgaacttgaagaataaaaactggaggtcaagcacatgggtagttttaccttccctatctactacttaagatctttcacagctggtaaaaatgtaagggaatataatactatttacgatcagaaattggtcccacgcctcaatttgacacagggagtctacacaaacacagccgttggcgggatcacggtgactgtttgactgccacctgctgggaaggggctccccggcggtgcctgtttgtgtacattgccagtggcagctaggatcacccactgttctgtcggcacttggcatagctttatatttagtgctgttaaaatggcatgaatgcagttgtctccttccctgaaggttgctaatttaactgagagtgcgggccacagagacctgcatttgtcatttaatgtgtctgtgacacacaagtgaatagaaagcatattcaactcttaataaaccttgaataaggcactgagaatgtttgagtattcaagtgagaagctgtacttgaaaagcaaacatttcctactttttgtttgcaaactgtgttgccatggtgacgcacagtatctagcgcatttgagaaattaaagtagaaaatcaaaggaattgttgttttgcattatctatctgcacagaaagatttgtctttaatcatttcagcgaaactcgctgccccat

SEQ ID NO: 180079 - DNA, 301 bp, Homo sapiens
acatattaatacacttctgtttttcttctgttaatttgtcttttgttacagggagcctcagataagagttatgaaggacagagaaaattattactttttccttctctacactaccttgtttttcttggtgtttttttttgttttgttttgttttctttttttttgagatggagtcttactctgtcacccaggctggagtgcagtgacacaatctcagctcactgcaacctccacctcctgggttcaagtgattctcctgcctcagcctcccaaggagctgggaccacaggtgtgcatcacc

SEQ ID NO: 180080 - DNA, 196 bp, Homo sapiens
tgtggtgatggttacaaaactatacgtttactacaaatcattgaatcgtatacctaaaatcggaggacttttatgcctcaataaagctgtttgaattttcgggttttttttttttttttttgagatggagtttcactcttgtcgcccaggctgatgttacattttctagaagttctcagtgatgggcatttaaagg

SEQ ID NO: 180081 - DNA, 358 bp, Homo sapiens
tggctcaagctacatacactgtttgtaccttaattttttttcctttcactaaacagtatgttgtggatggcattccatgactagaggcataggtgtacatcattggattaatggttgcacagtatttcattgcatagatgtaccttaattttaattattttcaacttttagattcagtgggtacatacgcacgtttgttacctggtatactgtgtgatgctgaggtttgggtatgaatgattctatcacccaagtactgaacatagtacctaacaattagtttttcaacccttgtccctcatcccctctagcagtctccagtgtctacagtcatctttgtgtccatgagtacccactg

SEQ ID NO: 180082 - DNA, 359 bp, Homo sapiens
tgccttagtccgttaggggtaccatagcaaaataccataaactgagtagcttataacaaacacttaattttcacagttctggagggtgggaagttcctcaaggtgccaacagattcagtgtctggtgagggcctactccctggttcacagaaggcatcttctccctgtgtcctcgcatggtggaaagagacaaatctggactcttaactcccttataagggcattcatctcattcacttgggctctatcttcatgactaaatcatatcccaaagttcccacctcctaacagcattgtattggggattaagtttcagcatatgaatctggggagaatacagatcttcagttcacaacccc

SEQ ID NO: 180083 - DNA, 111 bp, Homo sapiens
ccccttgttcagataagttgtgctgcaaatggctccattcctcctgttttgtactagtgacaggaaagttcgtctagagataaaatgtcacaaatctgtccacctcctcta

SEQ ID NO: 180084 - DNA, 240 bp, Homo sapiens
tggcattgtctaaataatgctgagaccccaccaggggaagaggatttctataaccctcattgagaagcagacggattcatgagactgctaacccaagatcaagtggaacaaaaattaatgactaggcccagatgaactactgaaggaggactgcggcttttgtttacagtattgttgctattttaacactctatattctggatacataaggaaccctttctcttctccctctgcctgtat

SEQ ID NO: 180085 - DNA, 342 bp, Homo sapiens
cctgccttggcctctcaaagtgctaagattactggcgtgagccaccgctcccggccgatgttttatttttaaaagtaaaggaaaaaggtggcattctttcagaagaagatattgctagttttagagcaacatcttagaagggtgtcctgattgtttttagcaaatggaaaaagatctgggtagtcttggagaagaaactgttgccttttgcttttcctttaagaatatgtctctgtagtttgggagaaatagcaaaagaaccacaaagatttctcagatatttggggatatgtagtttcagtccactcaagaatctgactttaggcctcaatccgtcaccag

SEQ ID NO: 180086 - DNA, 785 bp, Homo sapiens
gcctcctgagtagccgggacacaggacacttcagagccaaagaggaaacgaatcccatctgttctgagcccccaagcacagttcaagaggacaggctggggagtggaggaaggggcggtgaagagaaaaataagaagactggaacatccagccacacacggagggcaggaagccacctgatgagagagccagggtgtggcagaagtcgccaaggaatccttctgttcccgacacactcctacagcactcgctcaagatggagcctgctgactctgtctaaggccctgtggcccttggcataggttgcaggacagcagtcctgtcagggctgtggacctcacacctctatgtaatgtgaagggcaccctctggagttgtgggacttggcagtagtgttactgcactggcctgcaagtccccatccattactgccacccagctcagacacagctcacccattcacatacacaaaaatggacacattgagagggaaacccacattaaagtagggagaagatggagggccctctgacctcctcccatcaggcacgtgtgcctcctctactcagtgcctgcatccaacctctgtatgggtacccatcctctattcccctcccactccaatggatgccagggatggaaggacagatggctgtgaaacttatcttcttatttagattaaattccagactttcctatttttagaaaaacaaattccttttgtatttccaagtggtaaaaatggcccgagctgtcatctaggacagtcagcagccaactcaaag

SEQ ID NO: 180087 - DNA, 304 bp, Homo sapiens
tatctcacataattatagtacatctattaaaactaagaacactggtacaaaactataaaccatagattttattagatttcaccagtttttccattaatgtcctttttcgattccagaatatcattttacgtttagaatgcacacactattttaattctcaaatatcctagtacttaatatcataaaatgttacatttctattttctaattgttatctaaaaatcattctgcattctgaccctcagagagaaaacacatatacacacatacacacatacacacacacacacacatatacacaaag

SEQ ID NO: 180088 - DNA, 753 bp, Homo sapiens
attatcccaccaagacagaaattaatcactactaatatttccattcatggccatccagggtctcttctatatataagtgtcttagttcatttaccaaacaggattttaaatactgcagaacaagcgggaagtagcatactagttctttggaagactaattttcttcattgtaaagttacacttactgctgagtaagtcaaccatatgtacaagaaactggagagaatgacaaaggtgaggggaatcatacctgctctttttcattcactcacagcaaaccatggagtccatgttttgggaaccattatgtacgcaaagaccaactaatgagtatgtttcctttataaatagcagcctactaaataaacaaatacatacatacaaatatacagtcttgccacaggagttacacacacagtgaaaggaatgacattaagagtattttttttgtcaccatgaaagtatcttaagagaaagtaaagggatatgtgaaaggttgatctaaaattcaagacctcttccacgaaaatattttctgtgcacataagatgaaggaacaatctcactacggaaaatatacctgttggttttacaatgctataacttatttacatgtgtaaataaatatgcaggagtttaaatagtccacaaatattgacagcttactctgtaccaggcaatgtattaactgctagggagtaagggagagaacagccaccagtccctattctgcagaactttcagtctacctct

SEQ ID NO: 180089 - DNA, 265 bp, Homo sapiens
aaaccaggaataatttcagttctcaccagccaaattggaagaccccatagataacaggcattaggtagagcaggggtccccaacctccaggggcactgaccagtactgttcatggcctgttaggaactgggctgcacagcaggaggtgagcggcaggctagccagcaaaccttcatctgtatttatagctcccatcacttgcattactccccatcactccccatcacttgcattaccacctgagctccacctcctctcagatcag

SEQ ID NO: 180090 - DNA, 561 bp, Homo sapiens
tgaggaaggaatttgtctcagtccacttccacacctgtccacctgagctgggcgttagcctgagcctttgcctctgtatggatccctgactttgagttttatgcaatttcttgtataaaaggagagcctgagtccatggaagttgggattgaacatcctgaatatgcagttccttggagagccaccaagaaaagacctaagcaagagacatgatgtcaccttcggggaggaggctcttcaagctgtttggcatgagaagaggaggaatgaggaggatcactggccttgaacccccaaagagaggctagagcacctttctaggacccagtccagggtttgtcttgaacatccagctccaaaagagatgctgtgcagattcaagctgccaagtcctgaaggacctgagggaaaacccaaccccaagcagcccagatggtatctgagtatcctgtgccctacccacgaagatcaggagcctaaaggctagagctcactgcagaaccagaccaaagacagtttaagggccattgagccaagccttcctgacctcccatggagagg

SEQ ID NO: 180091 - DNA, 871 bp, Homo sapiens
ggaatgagagaggatagtcaatttcccaccaagatcaaaggcttacttgatctttgaagagaggttccctctgaatggagcttgctggtgaagctcctgccttctgttctgcttctgagcgcactgactggctcaggtggctctgggacaacaggtgggatgccagcttacagggaccaagtcccagctgtggtgctggagctgctcagtggcaactctccgtctctgctgctttcacgcagcactgacgaagagcaggcatccgcctttccactggctctcctggatgactaagccctaagccccaaccgcatactcagcccttcactggcacttggcataattttatctcctctaaatcatcacagccaccctccatgatagcaatttctattctcaattaagtgaaaaggaaaccgaagtttaggagtggtaagtgacttacccaaaatcgtatagggaggaaatgcagacccaggatttgaactcgagtcttctttccttccaaactcatcccctcaacctgtttatttccttttctctatgaccatgtctgaagaaatctgccttggggttgtctcatattggactcactctcttggtctgtcagtgagctgaacttctcatccaatcaaatccaagcttatttcccaagtaatatctctagtgtattctatttgtaatgatcacacaggcaagggccacacatatcactggcatcctacagtacaattaatcaagtcaaattagattcctggcatctcatattctgactgaatgctaatggtagtagatgtaaaaatgactccagtgcaaggcaaggagggaggggactggatgtagggctgaatggcgaatcagtaagccttgc

SEQ ID NO: 180092 - DNA, 468 bp, Homo sapiens
ctcaggattcagggtggtggaaggtgatgagagggagaaaattggctgccagggcagtgataaaacagagctgggagctggcagtgtctcctctggctgtgaaggatggtgctgatgcacttgacacagagatccggagcaagggagtacaacaaagagtagaaaccaggaaatcaaaacacattcaaggcagacagattccaaaggtatcatgcctctgtctatgctaagtgcatgctttattcattttttaaaatcctacacaaactgaaagagacatcacagtctactgagccgtggaattaggcaggacaggtgcttttatatgaatttgtattaaacctactgcttaaatgtaatccatggtggttactgttatcttcacttataatgaaggcatatcatagaaatctctgcacattctcacttagctctcctgatttcccgttctccttgggcccacgcttc

SEQ ID NO: 180093 - DNA, 517 bp, Homo sapiens
ttgacacatcctgaccagaggcaagccaaacacttaggagactgttgcagtgtcaggagagagacactagtggcatgggccacttatgacagtaggacagcagcaatggaagtagacttgacagaacttaaatgattgtttggatgacagggtgggaggggagagaggttggaatgacatgcagattcctggtttaagattgtgatgtgatgtaggagacccaggagaacagcgagtttgggcgagaaagatattgccttcaggttgaaacatacggagtgtgagatgcctgtggaatgtccctacatcacacacagcacactgcagctgtgactacagatgagcagtagagggaggagccctggggaacagcaggatttcagaggcggccagaggaagaggaagctctaagggaggctgtaagtatgttttattttctagcagacttgtcaaagcaaaaggtaagctctagggtcaatagtgtggagagattgacaagggtaagcagagggtaggt

SEQ ID NO: 180094 - DNA, 999 bp, Homo sapiens
tacagttcaccccagaaagcaacaaaaaaatcacactacataatacctttctactgtcagaatctccctgatgcccatgccccaaagacagaacagctgagaactccttcagcttaagagaaaaccaaatgtcttcagcaccttatagttgctgtgtataggaaaacatgggcagaagaggactgcaggaagagaaaaaaatagctaagaccaatggtgtactcttcagtaatactccacttgcatgcagcagcttacgtggagagaatggctgatgtattgggcattgtgagaaaaaaaaaaactgacgtttatactttcctcaaattttggcagatttccccaaatataaacaatggagacaatttattcacacaatcatttcctagaacttcataaaataatgaagtaacaccgtaatggtgaaggttgtggtgaggaaaagaaggttggggaagaaaggaatgcttctttttattttctacccactcgacctcaccaaattactagggctcaattgagtccttagcaaacaaaacaatcaaaaatgtattttatgcaaatgaagctctttttagaccaagtacctcccaactgcagtgcttcccgcagcactccaagaagagtaattccaggataagcagatttctctaaagtctcagtggcaactagtgcccaactttgcaaggtttgatttaacgctcaagaatggcaaatgaggccgggcgcagtggttcacgcctgtaatcccagcactttgggaggctgaggcgggcggatcacgaggtcaggagtttgagaccagcctcaccaatgtggtgaaaccctgtctctagtaaaaatacaaaaattagctgggcatggtggtgcatgcctgtaatcccagctactcggaaggctgaggcaggagaatcacttgaatccgggaggcagaggttgcagtgagccgagattgtgccacagcactccagcctgggcaatagagtgagactccatctc

SEQ ID NO: 180095 - DNA, 689 bp, Homo sapiens
attgtggaatatttatactgcaatgaaaattttaaaaacacacacacaaaaaaaagtacaacaaatttaatgttgaaaaaaaaagaagccagacatttaaaagtacatacttattccatttatacaagtaagaaaatgggcaaaacacacctatgggtgttagaagtcagtgactgccaggggatgagatggtcttcaaagatgctggtaatattctatctcctgatctggctgtttgggtgtgttcactttgagaaactgcatcaagtgggacatttataatgtgcaccttcgatctctgtatgctatgctccaatgaaacacactccctaccaatccagggctgctaagggcagggtatgttttccataattattcctccatttactacagccctcgaccaacagccctgacaaggctaaactcaccatacttcagcatttatgcacacacaagttctgtcttgtctgaactctccaccttgattgtacaggccagcaccttcctgttggcctgttggcagtgtctgtacccataaaattgggtaaaacgacagaagttgcccatgtatgccaggaagagttgaggcaaactgaagtgacctgaccaccagaaagattcagagacatggccctggatcacaagaaggacaatgcctctggaagcccagctcgccagaactgctctgg

SEQ ID NO: 180096 - DNA, 438 bp, Homo sapiens
tcactctgtctcctaggctgaagtgcagtggtgcgatcatggtttactgcagcctcgacctccccagctcaggcgatcctcccacccctcactcccactgcccttcccagtagctggactatagggtccaagccgccactctggctaatttgtgtattttttgtagaaacagggtttcgccatgttgcccaggctggtctcaaattcttgggctcaagctgtctgcctgccttggcctcccagagtgttgggattacaggtgtgagccaccatgccctgctcagatagtctttcaaccagaaaaaaatacctactttcaaaggtgtgctttcttaaagatcctcagtgcataagggaaatgtcagaatcatccagtgcttttcccagacttcttgacagttacagttcaggagttaatggtactctgtgtgacctaaa

SEQ ID NO: 180097 - DNA, 341 bp, Homo sapiens
acaacatgatgtcatttttataagatatacacacacacacacactatacatatatgtatatcatacatatgttgtagaactatttaaaacacacaacacggtcatacaattaccttgggcagggagttggaaaataaaggcaatagaacacatgcaccttcaatgctactgataattttccatgattggctagatctgggaacagtgtgggaattagacagattgcaagaattggagcagtgacaggagaaaaaatgcagtttgaccagttaggtctaaactccaaatcacgggtgttcatgttattatttactttacatacacgttgtacgtactcttaa

SEQ ID NO: 180098 - DNA, 375 bp, Homo sapiens
attcctataacttttactcttgttaatatttctagttagtgactgatgcagttctacctttgtttcaaggttcatttcagatactgcctctcttccctttaccccataacaaaaggagggtcttctctttgaattctggagtactttgtacctctctttatgacatttaacttattttactttcttttataattacctgtgattgtcttatttccctcctactaggctgtaatttgcttgagggagaaagtatgttgctggcattatgtgttttacatttttataagtttattgtaagtgttttcccttttatttcttacatttattgaatttaggaagctccattttcacgaatctatggcacgcaaataggtg

SEQ ID NO: 180099 - DNA, 141 bp, Homo sapiens
cttaattcttccagctgctcatgacaaaaatcctgtagtcatcttttttttccacctctttttcttttaccccatattcaacgtggcagcaaaccctagtgggtctatcttccacacagacacagactcagacagcctact

SEQ ID NO: 180100 - DNA, 375 bp, Homo sapiens
tatacctgactcctgaataaactataaactttataataatatcaagtagcccttgtggagaagaaagggacttctacgtaaatataaatatttctcaactttcttaatatgatactaaacataccatttcctcaattgattttgcatcaagaagcaaaacatggccaggcacggtggctcaaacctgtaatcctagaactctgggaggccaaggcggatggatcacctgaggtcaggagtttgagaccagcctggccaacatggtgaaaccccgtctctaccaaaaacacaaaaattagccggacatggtggaaaatgcctctaatcacagctacctgagaggccgaggcaagagaatcgcctgaacctgtgagg

SEQ ID NO: 180101 - DNA, 756 bp, Homo sapiens
agactcggctattgttacaggaacgtactcctaaattaggttttcaatcttgtctacctgttaagttaggttacagttcatccacaaggactcaaatatagaagtacggagtccttctcaggctatcttcagttctctttaacagtatgatacgggataatcttcagtaaataaaaatttctttaagtttgttggattaactaaagcaggcatgtcttcagagttgtcaacattaaatataatacatacatacagtttttttctaccaggggttactaggcaaataagtttgttattgtaactagatgtttaagattataaaactgtcagtttaatctaagagcaaaagtgaaaatgtggtagctattttattaagtacagcggtaaagcaagtatatattaagtatagcagtaaagcaaaaaaacaaaaaaaaacaagtatttaacttttttttggtttttttttttgagacggagtctctctctgttgcccaggctggaatgcagtggcacaatctcagctcactgcaacctccacctcccgggttcaagcgattctcctacctcagcctcctgagtagctgggattacaggcgtgcaccaccatgcccggctaatttttgtatttttagtagagatggtgtttcaccatgttggtcaggctggtctcgagctcctgacctcatgatctgctcgcctcggcctcccaaagtgctgggattacaggcatgagccaccaagcccggccttaacttt

SEQ ID NO: 180102 - DNA, 420 bp, Homo sapiens
gcctcagggaactgaaggtttagtgtgattggaacaaaaaccaaatgataatggattttataggccttgtgtaggtattctctagatggaagcaatgtgtactatagccataacatattcatgtttcatttcacgctatcactttgactgcactttggaaagtggtttggccttatacgtctggaagcaagaacaatcacttaagaaagctgttgcagtaaatctaaataggatgactatagctagaaccaaggaatgggcacaggtagtggaaagacagattaattatatcataaggatgtagacttgttagaccttgatggttgaatgtgttgtgagatacatccctgcctccaccccctactgtaaggtttctgcttaagcaactggatgaatgatttgttggttaggatagtctaa

SEQ ID NO: 180103 - DNA, 2264 bp, Homo sapiens
  misc_feature (2190)..(2190): n is a, c, g, or t
  misc_feature (2232)..(2232): n is a, c, g, or t
  misc_feature (2236)..(2236): n is a, c, g, or t
  misc_feature (2263)..(2263): n is a, c, g, or t
catacaatatggagtgattgtgatggtgggacccctcttagctaattgctctgtggcgccatccgtctggaatgcagaggggtcttgcttactgcctatgctgccttcatgatatgctctctcgttaattcagactgtaaatttcaggctgaaacagactgcctgtgcatgttgccttaataagtcaaatgcagctaatctcaaatttgccctctctcgaagtgtacattaaacaatttagggtgtgcctaaattcacaactgcaaccagcttgcacatccttaagtgggccatacatattcaagcctctggggctttgttatagagtgccactcatttccccttttctgcttgtcagaatcctcattggccttcaagaccaacatgaaacgcctctgcgatgaagctataggagttagcagtggctacctgtcttcgctgtgctcagagcatgccaagggtttctttcccagcattccgatcatgcttccccgtggcctggttaattgtgtgctaggctgtattcctcaacaggctcctaaagactaagaattacatttaattcatttttgtgcccttcacagacccaggagagaggtctgaattctcccaggctgataagatggggagcatccactgagataaagcaagcatcatgtggtgtggtggctggaagagtgtaggatactgccagagagagaaagttgagttatactgtgaaaggcccaaatgtcagctcaggaatcggaactttaccctacagaaaagggagaaattgttaacggttggctaaatgctacatttccaaaaacccactcaggaagctctgtttctatcccagatccactcactgttagctaggcagcctgaggttggctgtttgtgtctcactttcttcatctatgccaggcagacactagtagttccccctcccaaggacaccgtgaggatccacagagttagttcatggaaagtggggagggtgcctggcccataatcgtgagctcccattaaatgccagccacttttacccagcggaacattgccatcctccccacttcctctgcatattggagggaggaaagaaagaggttgcttttgctttgacagcatcttcccccttctgggttcaggatgcttgacctcacacactggggcaactttgttggcattctcttgcatatgggctcttgaactgagcaagcaaagtgcatttcaaggagaaatgggtccacagggctttggttatcacagctggcccacgagaagcagtggggcatgaggcaaaaatggctgctcaggagaggcaggtccaagctcagatttgcaccttgtgaggccttgggcaaggtcagctacccctcagaacttggggtccccatttatgggaggtgggtgaatatgggctcctagcaggtgattattaaacacaatcgttcatgtagtgcgttcagcatagcctgtcacatagcagatgcaaaataaatgataacacatattacttgtgatatccgaaaacttagcagccaggtaaaaacgaaagaggaagggagtcctggaaacagccaacttatattggttatgagaaaaggttggttgtggtatttggcttttaataacaaccatcggagggggtgtggagaccataagttttgcatagacaaaagcaaacatgagaaggatgctgtcctagcaaagcttctagggaccatgaggccatgaggctaccaggccagaaataccgaaatctaactgccgctgcttgaccatggggaatatctcaccccagtgcagcactggcgccttcccgcagtatgttcctggtcatcgaaccactcaatggattacagtcatctgttcacctctgtgaataactgaaaagggtaaaaaccggaactgtttcctatgccccttgagaatctccaagtgggagccacatggccacttttatctccactggattcactctaaagacacagatgggccaggcatggtgggtcatgcctgtaattccagcactttgggaggctgaggtgggcggatcgcctgaggtcaggagttcgaggctagtctgaccaacatggtgaaaccctgtctgcactaaaaatacaaaatttagccaggtgtggtggtgggcgcctgtaatcccaactattcggaaggctgaggcaggggaatcacttgaacccnggaggcagaggttgcagtgagctgagatagtgctgctgtacnccancttgtggcagagcaagactccatctcnc

SEQ ID NO: 180104 - DNA, 202 bp, Homo sapiens
  misc_feature (18)..(18): n is a, c, g, or t
ctctagaggatcctcagntgttcatgtataccttttgaataaaagggggaaaataggaaaatataaatgtatctgctcatatgtgcaaaataaccccacaaagtagaaatgggagtccattgagactggttacacatgggagaggtgtgaccaagatggaaagtacaggaatggaggatgtggtgtggggtggcacttctga

SEQ ID NO: 180105 - DNA, 320 bp, Homo sapiens
ccagtggggagagcaagcccagaggtgagcctagagccaagtgaggcccaaggacgggtgctgccagccgggaaatgtccagctggcaaagtgacattgaaagaatcctgtctcaataggattattactgaaaaataaattattctctagaaagattctaatacatcaggaaaacttggggggaattctctttagacgtgaacacttatgaacatatccccaacctccttaattttcttattttagtaatatgagttcttatattatgttttctctgtgacaagcacctcacctcccaacccaccccctatactcccaca

SEQ ID NO: 180106 - DNA, 426 bp, Homo sapiens
tggagaatattccctgagcaatttaaaggctagtttctgggtttgcagaaaaaggcaaggttcactgtgaacggagtcttggaggttgcctacaatggtcatgggtggacgagtttgttggaaaagcccccgtgactgggctctcggtagagtggcagggcgtgtgtgttggaatggaagatggaaagttaaaccttgggctcagtgggcgtctaatcaagagagaagtttcctgtgcgtcaggcccagacctaggaaacggggaaggtctccgtgtttccagcctcagcctcaaatgaatgggcaccaggatgggccgcagtgacttctccggggtctctctgatgtccaaagctctccccacacccagatatttttgtttcacaggaaagtcaggagcctcctgaaaacagacatgaatgtagc

SEQ ID NO: 180107 - DNA, 194 bp, Homo sapiens
gtccattcctaaccatcagttcaagaatgcctacatgtagattgacaggctagccctctttctatgtgagtgcaaccagaacacatacatatgatgctggagaaaataacattgatcttaggtcagtagccttcggttcaagtcccagcctttttctaaccaactgtgataacctgggtcgttagtctacctgc

SEQ ID NO: 180108 - DNA, 302 bp, Homo sapiens
agaggatagctcgaatcgacggtttctctggctgtattccaaatcgaacgaaggacttaaggatttagtttactaactgattgaatatgcatctttaatatgaattccatgtgtctctgaaatatgtgagttacactgtgaaaaaagggtagacgataagccaagcaggtcaggagaaataagtaaaggtaggaatgtgtgaaggtaatttacaggctgcaaaactcagttgattggatgcttgtatgcagagtcctgagagataattaaggcaggaatactgggaagagaaggatgctctg

SEQ ID NO: 180109 - DNA, 535 bp, Homo sapiens
taaaactcttttcctattttagaccatattgttgttcatgacattcttgcatttctctgtattgctacccacttcaccctttgcttttgtggcagggcttctcagcctcggcactcttgacattctttgttgtgggtgtgtgcgttgtgcaatgtggtgtgtttggtagcacccctccttcatttgtgacaacaacaaccaaaaatgtctctagacatttccctatgtcccctagggaggcagggggcggaggcgggggcaaaattgcccctagttgagaacctttgttccatggtacctatggattttccccatcatcctgtgggacaaggtgtgatacagctcttaaataccagcaaccaccaaagaaaccattcctgacccgggcagaagttgtggctcagcatactacagtgagctgtgcataggcattaatgaaaaggtagggggatacaaaactcagactggagtcactaaggaggcactttccttcctctctttctgtctttctactggaaaagtgttatgaacatat

SEQ ID NO: 180110 - DNA, 323 bp, Homo sapiens
tatgcccctctgctgcccctgggccctgtgcggtcacaggctggaatccagttgagcgacgcctatttgtggcttttttcttccaggaacatatcgttaagccacttgcagcctcgtttggaatgacatcaaaggaaaatgaatgaaggaaacatgtacattcatactcgtttcttttgccgtcttattgcaacctgtagaagctagttcttctattttattcatttgttttcagacttttgttgcaaactttacatttccacttaggagatattcacgaggatggtatgcaaaagtagctttctgagatcagacatgtaagg

SEQ ID NO: 180111 - DNA, 305 bp, Homo sapiens
atctctgaatggccttaacggccgcatgatgtctctgttaacttcccacggctaggcactgaagttatttgttgttattactgccatggtgatctttatatccacattttagtgtaggattctgattatttctctagggtcagctcctgtgaagagaattgctgggccctttaagattcttggcaaagactgtcaacatgcttcccagaaaaacatgtattgacgccagctgtgtatgagtatgcctgtcaggcctcaccctccttggtacggggtattgtcattttagttgctaatttgattgc

SEQ ID NO: 180112 - DNA, 693 bp, Homo sapiens
ttttcttctttttaaaaacagggtctcactctgtcacctggcgtacagtggcatgatcatagctcactgcaaccttgaactcctgggctcagataatcctcctgcctttgcctcccataatgctaggattggcatgagctgccgctcccagccaactattacaatttttatcatcatcagcatcatctgtttatttaatgctcaaagtgtgaaataaatggcttcaaaaaaagtgtaagagatgggaactctcaccctattctataactaaggagaatgagcatgaagggctcaaatacttgtgtaagacacacaacaattcagtgttggagccaagagtcagacttggatgtgctggacctaaagctcagtttctttccactgtgtcacgttcatctctcttggtaccttgcgtccttgaaaatgatggatgtgggaagcagccacaggcaggtgggaagggcacaaaccgtggagttggagcacctggattccagctcctacttgctaactgcatgacctgggacacataacttctgctctctggacctcagtttttctgtgtaagatggataataatacccacatctgagggttgttgtgtcctcacaacagtaaagctatcacagagcatattctgtgtcttgtcatagacaatctattaggtggttctaaatctccttcctggctggg

SEQ ID NO: 180113 - DNA, 637 bp, Homo sapiens
tgaaaaaactttcctgatgtcatatggctggtgagaagtagacttgagatttgattctaggactactcagcttcaagctaatgataacagtagtaatatatcagctaaaatttatgaaacatttcctctgtgtggggcattttgctgaaggtttcattgatgattacataaaactcttaaaacaatgctatgaagcaaacactgttactgcaattttcagttgaggaatcagaggctcagagaagttaagaatcttgtgcaagaaatttataactgttaagtcttacattaaaaaagaagaaacatctcaaatcaacaacctaatttgcaacttcatggtacaggagaaaaacaagctaaacccaaatatattgaatgaaggaagtaataaggattagagtggatataaatgaaatggagaatggacaaacaatagaggaaatcaatgaaaccaaaagttggttcttcaaaataagatcaacaaaattgccaaccattaactagactgactaagaaaaaaagagacaagatggaaattactaaaatcagaaatgaaaatggactcccagcatggtggcttacaccttcaatcccagcactttgggaaggcaaattgggaggattgcttgaggcctgg

SEQ ID NO: 180114 - DNA, 278 bp, Homo sapiens
atttattgttgtagatgaaaagtctgatgcctatctgattcttagttctttctgatagttagtatgattttctgtgtaactgtaaagtgtgggggttttacttcttttttttttttttgagacaagaatctcgctctgtcagccaggctggagtgcagtggtgcgatcttggatcactgcaacctccacctctcaggttcaaatgatactcccgcctcagcctcctgagtagctgggactacaggcatgtaccaccatgcccaactaaattttgtatt

SEQ ID NO: 180115 - DNA, 405 bp, Homo sapiens
tgagattagacagtttctactggtctgccttctagttcaatgattctttctccaacatctcaaaactaatgtcagtcctatctagataatgcttttctttttagtcattgtgctttgttttttttttttaaccaactctaaaatttccatttgattatttcatggttcttatttctcttacgagatttcctatttgttcacggatttttagcacacaatactacaattctttgtttttctttaatttttcaacatatgtataatagctgctttgaagtcattgctatatctaatgtctgggcatactaagacattcagattccttcctattggccctttttccgcctctgttattggtgatcattttctctcattacacatctagtaataatttgtgaaaaacta

SEQ ID NO: 180116 - DNA, 246 bp, Homo sapiens
tggatggcaaacctaactcagaatagggatttgggtgccaggaagacaaaagcaggaggtgaaagtaagttgttcagcattccatttccttaggattactctaaatggctaaactacaagttgaagtatgaaatgcatcagaatcaaggtctccaggttggtgtagccctggccagctcaacatgaaatgagagccatgggcaacagcctacagcaccacatacagctgggtggagagtgacttca

SEQ ID NO: 180117 - DNA, 836 bp, Homo sapiens
ccatatttccttccctctatctttccttatcttagccagctttaagttccaactcaaatgccttctctggaaagacttatctgactattacagcccatgctgatcttctccctgctgatcgtgtcctcttagtcccatgctgatcttgtcctcttagttagcagcctctgctttggtcctgcattagtccatttgcattactataaaggaatacctgagggtgggtaatttataaagaaaggaggtttgactggcttacagttctgcagagtgtacaggaaacatggtgccagaatctgcttctggtgagggcctcggaaagcttacaatcatgcgggaagccggaggagtagcccgcgcatcacacaatgagagagggagcaagggttggggggaggtgccacacacttttaaacaaccagatctcacgagaactcactcactatctggaggacagctccaagccattcatgagggatccacccccatgacccaaacacctcccactgggccccaccaccaacattggggatggcaattcaatatgagatttggaggggacaagcatccaaactataacaggtaccaaatcactctcgaattccaagttgcttactccactccttcctcctggcctgtaagactcagggatgggaaccatgctatcatgagtcagaaaataacaagagacttgggttccaaacctagttgtatcatgtatcagttttgtgaccttggccaaggaatagacttcttggagcccctgtttgctcatctgcaataccctatcagtagtgcttcagggaaattaaataacgtgtgaatctttaagaagc

SEQ ID NO: 180118 - DNA, 779 bp, Homo sapiens
aactatatattattgttagtataacctgatcatattcctttttaggcattgataacacacagtctatcttagctggtgacaatgtatatgattcatatataaatagacagatcttggggatgcttttctaacagatcaaaaggcatgaagatatgtaaagagcatgccctggtgatggatgataagggaggaaagcagatggaagggtgtcaccaagagccaggcaagagatgctcatgttctgcactagggtaacagcagtaagggcgagaggacctggagatctgggcggagctggatcaaggggatttgtttgagcttggagaaggaatcaagggagagtctgaattcagtcacaagtttagggcagtgaatggacatgagagggtccaattatagaaggtgttggtgtttgggtggatttgaagggtaagaaagaaaggggaaatttgtataattcctagttttctctctagaagactggatggatgacatgtaattcaccaagaaagaaaaggaaagagtgaagtagggagcaagttcaacagagagagttttggacctgctgtctttgaaggactcatgcatttacttggaggtctcaagcaggaaagtggacgtagtgtctgcagcaggaagaagtgcaggtgggccatattgactctacagcgaagaccacagtcatcaatgaagttgctcgtggaggatgtagagtaagaagagaagaggaccaagcactgaatcacgtggagacaagcacacgtaaaagaaaagaaggg

SEQ ID NO: 180119 - DNA, 617 bp, Homo sapiens
gccaacattaattcaagtccagtttagaaactaacttttctttatgtcccttcaccatccccaatttataccatattgtcttacttttttctttttttgagacagaccctcacccagttgcccaggctggagtgcagtggcgtgacttcagctcactgcaacctctacctcccaggcccaagcgatcctcccacctcggcctcccaaagtgctgggattacaggcgtgagccaccgcgcccggccattccttaatgtttaacacccagtgcatattcagattttcccagttgtccgcaggatgtcttttatagctgctttcttcaaaccaggatctattcggagaccacacattgcatttgatttttatgtcttttgagccttttaaaatttagagcagttccctataaccccttcttttgtttgttttatgaaattggcttgttgaacttcacaaaacacgagttggggtcatgccaactgtaccgttagtgattagtttacatatagggaaaataatttgtgaatgttggtcaggctggtcttgaactcttgaccatgcccagctaaattttgtatttttagtagagatggggttttaccatgttggccaggatg

SEQ ID NO: 180120 - DNA, 900 bp, Homo sapiens
ttccgtaattttttttttgtttttgagatgaagtcttgctcttgtcacccaggctggagtgcaatggtgtgatctcggctcactgcaacctcgacctcccgggttcaagtgattctcctgcctcagcctcccgagtagctgggattacaggggcctgccaccatgcccggctaatttttgtatttttggtagagatggggtttcaccatgttagccaggctggtctggaactcctaatctcaggtgatccgtctgcctcggcctcccaaagtgctgggattacaggcgtgagccaccgcgcccggccattccttaatgtttaacacccagtgcatattcagattttcccagttgtccgcaggatgtcttttatagctgctttcttcaaaccaggatctattcggagaccacacattgcatttgatttttatgtcttttgagccttttaaaatttagagcagttccctataaccccttcttttgtttgttttatgaaattggcttgttgaacttcacaaaacacgagttggggtcatgccaactgtaccgttagtgattagtttacatatagggaaaataatttgtgaatgttggtccattcactctgccagctataccatggcagcatttccagtatcaggaaagcaaaccaggggatctaaaactgagcattaaaaactctcccctatccagtgaaagagataagaatgccagttgtgagaaaattgaaggggaaacggagaatgtcagtgttaaagatatttgaactttttttttttatccatttgaaaggtattttttttgggtgaactatttgttaatattcttggtcctgtaaaaaaaaaattggtgtttggactttttcttattgtagacactcttcataaattaaggaaattc

SEQ ID NO: 180121 - DNA, 363 bp, Homo sapiens
atcagggacccaggctctttccacttggaacacaagatagcaggggcctttgtcaccagcaggatggaagctgacacacaggacaccccttccaggaagctttgtcacatcgacttcacctaactccaatgacctctcccttctgagtccctctgcacttagaggctctttctgtttggactgagtggtggttttggaaaggctcttgtgtgattttcactggcgtggactcttccccagatgctcactttgtactaacaccgctggctcattatcacagagtcatggagcaggcactgagactcagagagctctgtggctgcgcaaggtcagggtaaaggtgggacttcagcctcaccagac

SEQ ID NO: 180122 - DNA, 338 bp, Homo sapiens
tcagcaaactttttctgtaaagagtgagatagtaaatattttgggtttatggatcataaggtctcttgcaactaactcaattccaatgttgtgaggtgaaagcagccatagaaataagtaaacaagtaggcatggctgtgttcccaaaaacctttctttacaaaaacaggcatcaggctggatttgtctcaggggctgtactttgctgacccctggcctaagccaatgggaccaatgtagttccattttcttgccagaaactggttgaaacataggcatatgatacaaccatggccaatgtgagatgaaggcagatgtgtgagcagcttctgggaaag

SEQ ID NO: 180123 - DNA, 247 bp, Homo sapiens
ccagctatgtgactttttgggcaaattacttccctattatgcctccgttttgatgtgtatcaaatgtgaataataagagtatctgcctcctatgatgaatatgagaactactgaatacatcggaaacactctgtgcagttcctggcgtgtagttctatatgtacacgtgttcattataacgtgggagtacatgcagcgtttctttttgaactccataggcatgtctctctttttttttttttttttt

SEQ ID NO: 180124 - DNA, 241 bp, Homo sapiens
tcttagcccctatttctccttctgtaatatggaactaataatcatagtgttattagggttatattgaagattcaaagaaataaagcatgctgaacacttagctccatgccagagctataggaagcacagccagcttcagcccccactcaaccgcgtggacttgactttcccttccctcctcagtcatatcactgtccacccactccttgcaaatatgatggcatatttttgaacatttgag

SEQ ID NO: 180125 - DNA, 399 bp, Homo sapiens
cgcacgaagtgctgaaggctggcgccaagccggacagattgggattcatcacgccctacgagggccggcgctcctacctggtgcagctacatgtcagcttcagcgtgctccctggacaccaagctctaccaggaggtggagattgccagtgtggacgccgtttcagggacgcggagaaggatttgatcatcctgtccggtgtgcgggccaacgagcacctagagccgaggtcgtgcgcagcttggagtgaatgtgtcccagttgttttcagaaaagagcagactaggtagagagacaaggagaacattgagaatgtgaaagatggtgtttacgtttggtgtttgttatttccagctctaggctggaagtttaattgccattgatccaagactgccaaga

SEQ ID NO: 180126 - DNA, 541 bp, Homo sapiens
tgtgtggagaaattctgatgcacataatttcctgagtcctttcttttaatccccagagaaaaacatggcataccccctccatttgaatctgcacataaagagaaaaggcaagtttcaaatccaaaaggggccattaaaggatttcactgggtactggaactgcatccaacaatggttagacattttacaaattctacttatttcttcaattaaagtaaaaaacgcttgaacagagatgcagaggtcatccactgaagtttggggtgcaacatcatctgccatcatgtgctggattatctagactagcaaagcacgggggagtatacgttcgtggggactggcatataagaactttgaaaaccagctgatgactgcagacgaagcctggctgaaaaactggtcagggttcgtgatgacaccaaacgtaaaaaacaaaaacaagcatggactcagggtcgcttcgcttcctctccactgttctgtaggtggtggcttgtcagcaacaactagtttctagaaagagagttttattgaaaatact

SEQ ID NO: 180127 - DNA, 432 bp, Homo sapiens
gaaagagttttggatctgtgtatcttaagcagaacataaataattttttttgtagacctaatgctgaaaaaagctatttggaaagcttctttatggctcgaaaagggtgccttataaatagctttacaaaaattgctttcttattttcatttactataattgttctaatcaaagcttaggggaaaaatgtgattactgaatttaaagttggtaattaaatgagtatacataagaaatgtaaattaaaagcgataatattttaagactagaaattaaaacattagtattgtagtaacaagtttctattttcaaggacattctataatctaaaatttcattttacagtgtgtgaataacaacaacgcttgaaatgattatttgaaggcaatgaaagatcaaaaaactttaatctgaataaaaattgaaagcata

SEQ ID NO: 180128 - DNA, 300 bp, Homo sapiens
gtgtaaagtgcctaacagtggttagctagctatcactaataaatggtagctatcgtgagtttattgagaaaaaatttaaaaattactggaccctacccatatgtttagactggtgcatacagccaccagaaagtgtacagatctgtttatagtagaacaaggaaaagctattacttgtattaaataaagtaagatgattaattaacaatcaacaaaatatactcttggcattgtggggccagatacccaatagatgcttgaaattaaattagacatgattttgctctcaaggaattttcg

SEQ ID NO: 180129 - DNA, 370 bp, Homo sapiens
ggggcagtacagtcctcaggcctctttcataagggcgctaaccccattcttgagagtggaatcctcacagcctaatcacttcccaaaggccccaccatgttggggatcaagtttcaacatatgaattttaggggaacacaaacactcagaccacagcatttggctcctgaacccccaaaagtcatgtcctttttacttgcaaaatacattcagtccaccccaatggccccaaatagaaactcattctagcatcaactcaaaggtctaaagtccagagtctcatctatcatctaaatcagatatgggtggctgggtgtggtgtatcatgcctgtaatcccacactctgggaaaccaaggtgggcgaatcac

SEQ ID NO: 180130 - DNA, 709 bp, Homo sapiens
tgtggtggtgcatgcctgtggtcccagctactcagaaggctgaggtagaaggattatctgagccctgggaggctgaggctgcagtgagctgtgatcatgtcactgcactccagcctgggtgacagagtgaggccctgtctcaaaaaaaaagagaaagaaatggacacaaataaatttctgggagtgttcatcatctcaattgtgttgacttcatgggtatattatgtatgtccacatgtatcaaattgtacactttatgttatttatataaactttatctcaaggatatttttaaaagtaaagataaaaacagtaaaagtattgaggaaatattgcacaggaatacactatgcttatgcaaatgacaataattagtgggagaaaaattaaatggatgaaacggctagaaaaacagctccaccttgaccctgatgttaaatcagaaggtggctagtaattcatttgggaatgtgttggctaaacatggtgcaaatgttgcttattgaacctacttcttaaaccatagttccaggcccatctgaatctgcatttcagagtgagtgacaagatggtgaacaaagtgattatcattgctaagagattttccatgacactagctgagatgatcaaggaaggatgctctttttctaaaaattttcagtgtacgaacttggtctacttcgttaaatacagatgtacacacacattt

SEQ ID NO: 180131 - DNA, 531 bp, Homo sapiens
atctaaaagatttggcaggttttcatattttccatgtgtcagagacctggaacactactgtgtcctggcaccccctcagccgctttcttgcctatggtatctcccaggtgccaggtgccccctaccctgcacaccaagagccacgctgggagagagtgctgccagccgagcacccgagcgcctcgacccgtcccacctgattgcaccggctctaaggcaaacctcaaagaatgcgctcactgtgaaggacagtagttagctgtgtccaaatctgtctgttctgctagagggaagctcctgggagagggaccatggagggcaggactgcgcctcactcccacctttgcatcttcagagcctgcaccgtgtgcacatagcccctcatcacagggcttaatcggtttgctgaatgaatacatgatcttcctatttgctgagagccataaatcaccagctatagaagtggtggccccagtagccgttgcattatagcatcccagggccaaagagaacaccagaagacccttaatt

SEQ ID NO: 180132 - DNA, 309 bp, Homo sapiens
ttacttttagccagggaggagtcactgagggcactccattgacactccttccttctattaaacacctaagtcttaggccaggtgtgagccaccacacctggccatgcctggctaatttttgcattttgggtagagatggggtttcaccatgtatcccaggctggtctcgaactcctgagctcaagtgatacacctgtcttggccttccaaagtgctggcattacaggcatgaaccactgtgtctgcccaatttttaatttttgtgcgtacatagtaggtgtatatatttatggggtatgtgttaggcca

SEQ ID NO: 180133 - DNA, 530 bp, Homo sapiens
tatgacctttacacattgctaagtattatgaatctcaatttttctcatgtgtaaaatgtgactatttttttgtttgtttgtttttgagatggagtctcgctcttgtctcgaaataaaataaaatataaaataaaataaaagccaactgtatgagaatcacatgaggagtaaatctcaaaaaatagattgatatatttggcttaagctgccaaaagacgtaagaatgatgtcaaaaagataaacattcacactgctgacaaatgagggaataagctccagacctttacacacaacatctcctttccctggaatgctctcctttcccctcaccctccaccctgtacttcccaggccttggctgaaatgtcagctcctgagagaggcattctctgaccatgtaaataggtgctaggcatcactcactagataaataaatcaccccacagattctgattcaagataactgcataggatacctgaacgaggtttccgcccctatgaaagaccatgctgaagaacccacctccaac

SEQ ID NO: 180134 - DNA, 301 bp, Homo sapiens
gtgtgaatattcactttctcgttccacaaaaagacccaccagcaagctgtgaaatgagcatttcacaaaagcataaaacacgccgataattaaaacgctgggcaattagagtgacaaactacactccccaatctacagagttaatttcacaacctctgaaaattataaaggaaatctatttagaaattaggaagctccaaagcctttttttttttttttcctcgagatgaagtctcactgtgtcacccaggctggagtgcagcggcgcagtctccgctcactgcaacctttgcctcccaag

SEQ ID NO: 180135 - DNA, 122 bp, Homo sapiens
gggcttggtgccttccagaagcgattgtaggacaaagaaggattttagtaaattttgagttggaaccctatgactgcctttcttagctgccaggaaactgctgttttgggtgctgtgttgtg

SEQ ID NO: 180136 - DNA, 239 bp, Homo sapiens
acacttacgctctagaggatcttatttggccacatggttttaaatatttctatataccactaatgactcccatattgaaatttataacccagactctattctaccagtgctcaggccaaatatcctgatgctgtcctagacttcccgtttgtgtctcactgctcatctaacccatcagcaaattgcattggcccagccctcaaagtagatccgtctctaccagtacccttctgatccga

SEQ ID NO: 180137 - DNA, 566 bp, Homo sapiens
agtgcacagaacacagccagtgcacaggagaacactgcacaggagaaccacactgcacaggagaatatgcataaacagttcacaggagaacacgcacaccacagtgcatagagcacagacacagtgcactaggagaaccacacaatgtacaggagaatacgcacacacagtgcacaggagaacatacacgcagtacacagtacacagtgcaccggagaacacagtgcacaggagaacacgcacacacagtgcacagaacacagacacagtgcacaggagaacactacagtagcacaggagaacacagtgcactaggagaatacacacggtgcacaggagaattcacacacaatgccacaggaaagaacacagatgcacaagaacaacacacacacacaacatgcaccaggtaaaccatgcacagtgcacaggacaatacccatggtgcacagcagaattcacacagtgcacaggagaacacacacagtgcacagaattcatgcacacagtgcacaggagaacatacacagtgcacaggagaacacagtgcacaggagaacacacac

SEQ ID NO: 180138 - DNA, 464 bp, Homo sapiens
tcaggcgattcttgtacctcggcctcccaagtagctgggattacaggcacccgcccccacgcctggctaatttttgtatttttagcagagatggggagtcaccattttggccaggctggtcttgaactcctgacctcatgtgatccactcaaccttggcctcccaaagtgctgggattacaggcatgagccaccacgcttggccatcaggttctttttctttaattttggcattttgaaaatgttattcttttcccttctggcctgtatggtttctgttgagaagtgtgttgccaaatgaattggagctcctttatatgttatttatctcttttctcttgctgcttttagtatcctttctttgtcgttgatctttttgagtttgattattatatgccttagggtagtcttttttgggttgaatctatttggtgttctctgatcttcctgaacatggatatttat

SEQ ID NO: 180139 - DNA, 367 bp, Homo sapiens
agacttttacttcatactcgttctgtacctttttcattttgaaccgtgttaccacctatgcaaacaaaaacatgaaaacaattttaaagacctttagagaatcacagagcaagagacattagggtgccccacatttaattcaacataaaaatgaaatgagtatgaggaacttctacaaagtttagatttttttccctagatgacttgttccgtatctgtgaaatggccaatgagttctgttttctctttatttcacatatctgctttattagtgtcctcagtgtgtgctgggtctaaagagtcaatctagcacagatgaagttcattaaatctaatgactacactgcagttcttttttttttttttt

SEQ ID NO: 180140 - DNA, 243 bp, Homo sapiens
acaaacctcatggaggagacagtagggctgggacaccttgttgcaatgctctgctagaagaccagtgtaaatataaaggtaacccaactcttaagagggtcgttactacagctggtgaagctttggaaccattgtggttaggaggacaagaatatgcttcagaaccatgtaagacttgagttcagatcctaactctgctatttattagctataaaaagttggacaatgccctctctgaatgtc

SEQ ID NO: 180141 - DNA, 487 bp, Homo sapiens
tgggggcatatgcagatacatgggacagatcccttggaggatacagacagataagctcatggttcctgcacagggtggtgtgggctcttactgctgagctgagacctatgtggtgactgtgttggactgaaccccagggaaaggtgtggggtcgggtgtgatgggcacaaacagaaaagtggctgttatgattcacaaacttattgcatgtcattgtacgttacaggtaactttcagtgctctctgatgtatggagcattaacaatatggaactaaactagtgtttctcatatctttcaatcaccacttccaataaaaaatattttctattgggaggccgatgtgggaggatcacgaggtcaggagatcgagaacatcctggctaacatggtgaaaccccgtctctactaaaaatacaaaaaattagccgggcctggtggcgggcgcctgaagtcccagctactccggaggctgaggcaggagaatg

SEQ ID NO: 180142 - DNA, 483 bp, Homo sapiens
cccttaaattcagaatcaggatcctatctgatccttgcatgggggaccgctgaagaatttggtctcccagaacttggtaggaaaacattctttttttttttggagatggtgtctctgttgccaggctgaagtgcagtggtgtgatctcagctcacggcaatctctgtctcctgggttcaagcaattcccctgcctcagcctcccgagtagctgggattacaggcgcgtaccaccacaagcagctaattttttgtattttagtagagacagggtttcaccatgttgtccaggatggtctctatctcctgactacctgacccgcccaccttggcctgggattacaggcgtgagccactgcgcccggctggaaggaaaacattctgagtgaccgtgtatgtaaataagtctttctggttattttattctgtgaacctgtgtgatgtaatgactgcatttaaatagtattacaacaaaaactaattg

SEQ ID NO: 180143 - DNA, 174 bp, Homo sapiens
gtccgggggctactaaggagaagagtcaagtttcaaaaaccagtattgtctccagagcccagcccataaccactgcaccacatagcttttcactatacagaggacttatctcaactaagctcagtcatgcctgccccagagcaatgcttcaatgaccaaacagagcacagattc

SEQ ID NO: 180144 - DNA, 335 bp, Homo sapiens
agactaactaggcttaaggttatgagggcagtaggaaaactggcattggaaagtgggaaagccaccccaggggcagagtttgtgaatataggaatgttgcaaaattgagaattggaagaagttatcagcatatgcaagggttcatactctagggccaggttttgtgtaggagtggaaagattgtagctcacctgtttttggcttccatcattgcctcttcttttcttggctctgtgcctagctattcttgtgctcagaaaaagtttgttaaacagctctgttgaaatggctatgaaatttgatcacaggcataagaactctcctcccctttccct

SEQ ID NO: 180145 - DNA, 364 bp, Homo sapiens
ggtggtggtgttttttttttttttttttttttttttgtagttttcattgctcacaaatctcaagtgcatccagcattctctgctgctgaaatatctggagccacaacaaaatttgggtttatgggcagtgcggtcaagaaactgggtccactaagtagtgtatcagtggatccagaggcactgtagaatccgggtttggtaattctgggacctcccctctctcttataccttcctccccaaaatgtttcttctgctcatcagggcaagagcaaaggaacccgaggctcttgctttgcagccatctttacaagcacaaatccatgatgctgggtccccttcctcctcatcttcctttaaatcctg

SEQ ID NO: 180146 - DNA, 241 bp, Homo sapiens
ttgagtggtgtgtattcagtgtggactattacaaataatgctgctatgttcaatcttgtacaggtcttttgtggacatatggtctcactcctcttaggtatataccgagtagtgaaactgccaggtcatgggagtatacacgtgtccaatttttgtgcattactaccagaaccatgaccacccctagtttccctgcctttatttcctttcatctatttactttgggctttctttgttccct

SEQ ID NO: 180147 - DNA, 307 bp, Homo sapiens
caagggaaggccacatgggcacacaatgacaggcagccacctgcaagccagggagagggtccctaccagaatgtgaccatgctggcaccctgatcccagacttccatcctccagaatggtgagaaaataaatgccggctgttgaagccacccagcctgctgtggtattttgttagggcagcccaagcagaccatgacagcccgccaaatccgggtctttctctctgctcattctgtaacccactgcctgtcaactgtgtcttcaccaatagtcattccgtcactggtgaagaaggtgtcacctggtc

SEQ ID NO: 180148 - DNA, 422 bp, Homo sapiens
cgcagtggaacatccatattagccacgtgtttctcttcttctaggaactaagtattcacagcctttgcccaatcttccactggctgcttgtgtttttgttatttgttgcagctctttttttttttttttttttttgagactgaatcttgctcttgttgcccaggctagagtgcagtggcgtgatctcggctcactgcaacctctgcctcccaggttcaagcgattctcctgcctcagcctcctgagtagctgggattacaggcacgcgccaccgtgcccggcctccacatagatgtcggataggtgttctgaacttatgccagagctgaactccacctgatccagaaacggctgccgtccacctgctcagaccatacctcagaactgttgctggctcctccttttccctcatgccccactgg

SEQ ID NO: 180149 - DNA, 262 bp, Homo sapiens
  misc_feature (135)..(135): n is a, c, g, or t
cgcagtggaacatccatattagccacgtgtttctcttcttctaggaactaagtattcacagcctttgcccaatcttccactggctgcttgtgtttttgttatttgttgcagctctttttttttttgtctatgtgngacatgagccattgatttcttatgaagttgagaagaacttcttgcccagcttgggattatgccaccaagaggctactcacgatgtttataggacaaacactggaactaatcatgcctcaatgggggc

SEQ ID NO: 180150 - DNA, 423 bp, Homo sapiens
ggaggaacttctgggtgatgggaatgttctgtcttgtggcaggggtttcacaggtatatacatctgtgaaaacctaaattgtatactttaataaggatatcgtttattgtatacaaaccaggccttagtaaagttgatttttcaaaactttcctactgatttgttttgagaagtaaatgagagaaaatgtagctggcatatggtaagtgtttggtagtaaatgatgatgatggtgatgttggtggacactggggcatgacagcagagtgtcctggaagtcagaggaccagagtttctctctttgagtcctgttattttatataataatctctgaacttcactttcttaacatgacaaaggacaggtctggacgagatgtcctagagaagcttaaaggtgcaacaatttgatcctaaagtgatg

SEQ ID NO: 180151 - DNA, 361 bp, Homo sapiens
ccttccagtaatgtgagcctagccttctaatcatctgagcctaggcactagccacctgagtggagaaacccctggcagtttgcgtcttcacaaatgagcagacattatggagtctgcagacagtcattattatctccattcattgtccagagtcctaaactggagaacccatgagcataataaaaggttatttatttctaccactaagtttgggatggtctgttacacagcaataggtaatcataacagaatttaatattggaagtggggtgttgctgtaacaaaacctaaagtgcatgggaccagctggtgggtagaaagactgttcatgaagcttggaagggactcatggagactgatg

SEQ ID NO: 180152 - DNA, 583 bp, Homo sapiens
tgggatgccaaaagtctaattctgactttatatattattatttatataaataacatggtattataaaatcataaaattacagggataccgttttcctttttaatatacctattattttctttactctgcaagttaagagttgtgctgcatcagcagagctgggtacctatggaaacaatgaatgatccctgaaggccattatgttttatgggccaagaaaaaaaagttggtttctatcttagatcacatgaatgcagaaataagttgtttggaaaaaaactctctgggttttaatatgcaagaataatattttggtttcctgtagatattaagattcattccatcagcaataccttgttcagtaaaataatgctggaaagaatggcatttaccttcaataaattttggcagttttggcataatttttatgtttaccaaggaaagaaaacaaaaatgggaacaagtagaaccaattataaagagtgctttagtttggcgaggatgttctaaatggccagtttgttgtaagcagggccaggctgaaagctgaaaaatgaaagtttgttaggtccttagtatgttt

SEQ ID NO: 180153 - DNA, 265 bp, Homo sapiens
gctgtcacaccagcagaacaagcactgccccacctcagtctctcacccgaggctcagtccacacccatcactccctccaactggctggaccacagttctgtccatccatcaagccccaagcacacacaggttcaagagcaatagatgcaagagctctgtggggttggtggtgtcactaccacctggggctaaagggagctgggcacgctgtttcaagggataagacggtcccgcttattatgtacagactacatggtctgtaaat

SEQ ID NO: 180154 - DNA, 177 bp, Homo sapiens
tacattccttttttaaattacacacacacgtgcacacacatctagagttaaatatttactgatttatatcttgatttttacgtttaaggtctggattttccaagtgtgaaattctaatactactaatactactactactaattttaatactactaactcagtagtaaaagaaactaa

SEQ ID NO: 180155 - DNA, 586 bp, Homo sapiens
ttttatttatgtgaatattctcttcatatcaagctaatacttttcatgcccttgtttcttttttctgtgactctttgcatacttggttttttgaaagttgcccacgtttttcatcaattgatatccatctttctgaatttgacttgtttgagcctaaaaaggactaccaatcatggctgcctgtcctgaccttttaaacttctttctaccacttattgcttgatgacatggtatcaggagcggcactgccatcattgtcgtcgttatcattattgtaaaccttaccaagtgtcagaccctgttctaagcattttataaatgtttatccatttaattctcataacagctaagcagaagatagtattattaacctctatttacagacgatgggattaagaaacagagagttggccgggtgcagtggttcacgcctgtaatcccagcactttgggaggccgaggctggcggatcacctgaagtcgagagttcaagaccagcctgaccaacatggagaaaccctgtctctactaaaaatacaaaaaaaatttagctgggcgtggtggcacatgcctgtaatcctagctac

SEQ ID NO: 180156 - DNA, 109 bp, Homo sapiens
tgttacttgatgttaggctcatggtagggtctaagggcattcttgcttctcctggtccagcctcagtcttaggcagaggctgtgagcctgagccctgtggttgaggcct

SEQ ID NO: 180157 - DNA, 258 bp, Homo sapiens
ctggtgctgtcagtggagtattaaagtccgtcactattattgtgttgtcatcgatctcatttcttaggtctggtagtaattgttttataaatttgagaactcttaggtgcatatgtatttagaattggggtattttcctgttggtctagtcctttttatcattatataatgtccctctttgcccttttttttttttttttttttttttttggagacgaagttttgctcttggtggcccagggtgggagtgcaatcagt

SEQ ID NO: 180158 - DNA, 453 bp, Homo sapiens
gaggcatgagttaacttttttaggccgcctcgtattttctttttagcctgggatttaatattgcaaaagtagtttacttcactacagagtttatgttctgggatttgtctgtctgaggcagtgagtcctagaggtaatatgtttcacctaaagattactcaaaatgaagaaagtattgatttttttttaacatctaattttgaaagaagaaagctcgcaaatacatcttttacagtagtatctagaattgcctttctcattccacctctgcttcacattctcttgggcctttgctttctgctttccctcattatgaccccttcaccccctttccctcctttctctgagttttctttcatggcctcccagattcactgtccctttgcttcccttctctggtttcaactcctgtccagaccattctgcttcatatttttcttatgctctcacacc

SEQ ID NO: 180159 - DNA, 743 bp, Homo sapiens
cgagtatgtcattagccaaatatgagattctaatgttgtctggcatttcgaatagtgtcagacttctacatttgtaaataaaagactgaagcatagattccttaatcacctgtaatatagtaaaaagagttttggacttagagtcagaagacaaattggaatcctggctcagctagtttagaaaaaaccttggtagcatggcggaatgataatatggatgctggagtcaaacagaggcaggaatgagttggatttcaccacttacattaatacattttgatgaaagaaagtttggatacctttggcctgtatgttgcagaaaacaaccagaagtagcatgaatcataagtgtgttatctcatagaacaggaagtctggaaattggtatttatgtgttaattccatggcttaatgatatcttctgcaacacaggagtatttaaacttttggttctgtcattcttagtttgtttgtggtatcttcgtttgagtggtgatattgctgtaatagcaatagttcaagatattacatgcagtcatgatgacagccagtaaagagaggaattcctcccatttgtctctttttagtaggtagaaaaccattctcaaaagctgtagtacacaccattgattcaaattatgtctcaaactcagactaaaagttactcactagcaaggataatgaagatgccatgactgacttagacttttttttttaaccccacctttggatttgggggtggg

SEQ ID NO: 180160 - DNA, 492 bp, Homo sapiens
tgagagtttacaacagagatctaaaaatggaatgtgtcaagaaaaataaataaataatgtgcattcttgaagagcttaatataggcatgaatcagaaatataaaagaccattataacgaaatactgtagcaggaaattataccagttgttatgtaactatggtcattataacatcaggtttgagaaaaacttcatctaggtggggaaaaaaagatagtgaagtttgttgaaagaaatggcactctttcagaatgagaagaaaacaatttcatattttttgagtatgtgaatgaaagaaaggaaacataaaagtagtgatcacattttatatagaagagagagacagtattaggtttcataaggaagattgatttgaattaatcagataacaatgtctatgtagatgaaacagtatatattgtgtcaaatttggctttataatttaattagtgttaattattaatatatcttccttcatattagtgcatattt

SEQ ID NO: 180161 - DNA, 484 bp, Homo sapiens
cgggaggctgaggcaggagaatggagtgagcccgggaggcggaaattgcagtgagtcgagatcgcaccaccggatctcaactgggtgacagatcgagactccgtctcaaaaaaaaaaaaaaaaaaaaagatgtatatgatggccaagttgacagtgggtagatttatgatgcctaatgtgtcaacctggccaagggatatttggttaaaacatttctgggagtgtctgtgaaggtgtttctgaaggagatttaacatttgaattggtggactgaataaagcagatagccctccccagtgctggtcagcatcatccaatctgttgagaggctgagtaagaaaaaggtggctgggtgtgggctcaggctgggcatggtggctcacacctgtaatcccagtattttgggaggctgaggcaggtggatcaactgtggtcaggagttcaagaccagcctaggcaacatggtgacaccccgtctctactg

SEQ ID NO: 180162 - DNA, 616 bp, Homo sapiens
aacagatgtaggctgggcagccatatagtgaaatacagaggtatcggtgaagggaaggtatagaactcccagagtttcaaatagagcagtggcaaacagagacttactattctaagattctccacaaactgccaaagaggcacctttgtttttaaggtggtactgtcccagctcccttttggaagccctttttttgttctcttcctaccccacatcacctgctaggccattaataaaagcaatgctttgttttccacactctaaatcactactaatgattctctaatggtattctaggtggcgtgaaggacaacaggagatgattttgttgctgctggaaacaggaggcctacttttaaaactaaaaagtacaatattctagcctgcagacgaaagaacactcctaatggacttgttgtgacaaagggaagccatatactaggagaaataatgctgcccatgtttatcaacaggtacaggttgctcgcttccaccaagtccgacctggacagaggccttaaacaagttaggaagaacatattgccgcccttcacaggtctcctcctctctctctcaatccctgagctttggtttcctgagattttattgattaaag

SEQ ID NO: 180163 - DNA, 151 bp, Homo sapiens
gaggcatgtaggtatgattactatctccattcaagaactgagaaaacaggtgtacagagatgttttttgagcttcacaaagactcacaggtattaggattaagctggggatcaaacccatgcagaaaaggtttcaccaactgcctcttcca

SEQ ID NO: 180164 - DNA, 475 bp, Homo sapiens
ggcttttttggaaaataaataatttcaaataattcttgactgacatgcaggatatgcataccacactttaatgaaaatatgaattctacaattatatcaccttggacaaataatccagactccttttcttcatctgcaaaatactataatcttgagattaaaagatataaggtcttatcctgagctaaactctatccttccaatggtccccctacaaaatacagctgtgtaaaacaaagcaaaataagaaactgcacaaaacaaagtagtttttttctaagcagaatactgagagaaaattaattttcggggaatataaaaaatgtgcaatgggaagaggtcaaataacattaacaggagttcggaagaaattgattccaacccgcatggatgactttgagggattcaaggcttcagaggaagaagtaactgcccatgtggtagacacagcagtacaactagaattatacctaga

SEQ ID NO: 180165 - DNA, 438 bp, Homo sapiens
tgcctcagcctcatgagtagctgggattacaggcacctgttaccatgcccagctaattttttgtatttttagtagagacggagtttcaccacattggccaggctgtcttgaactcttgacctcaggtgatccacccgcctcggcctcccaaagtgctgggattacaggtgtgagccactgcccggcctttttgtgtgtgtgtgtgtatgtaaagtaccgatgttattgatcttgttctaggaatggacagtgggtatagattgaacacattctagaatgtccatccagtggagctgtttttcagtgatgggacttttctccttgggcctcacaaataaccctgtctaaaaatttacccaagtctcctatttggtgattgtaatgaaaagacttgtaatttttactatgggaggttttacattttattaatgatgcctt

SEQ ID NO: 180166 - DNA, 419 bp, Homo sapiens
attctttgtaaaggtggggtctcactgtattgcccaggctggtgttgaactcctggcctcaagcaatcttcttaaattacaggtgtgagccaccacacccagccataactgagtttattagctctttagtctcatgaatgacacacacacagaaatgatggaaaccaggaaaatacatatattaagccaggtgctgttgcatgtgcctgcagtcccagctacttgggaagctgaggcaggaggattgcttgaacgcaggaggttaagttcagcctggggaatataagtgaggccctgtctctaaattaaatagaagaaagaaaaatacaaaaggaaaaaatatatattaatttataatttggttagggagggaacagcctacattgtttacttatacttttgcctttatgtaaacatta

SEQ ID NO: 180167 - DNA, 427 bp, Homo sapiens
ctaaaatatcttggtttattgaattaacaaagttcccttttgtggaatttttttaatggtaatgaattataagtaaaataggaaaattatccttgagataataaaaaagatgaaattgagctaagaaaaaagtaaacagagctaaaatgatctccacactagagtttgaacaacacagaagtgagcagaaatgcagaaggaaaatttattggaatacagagaaaatatttagctggcatagtatgtaacatttcctagataaaacaagaaaactctgggagtaaatggctattctatggaagattaagaaaaggggtatctgtaaaaatactcactgcattagagaagatattataatctactggaaaaaacctatacttcttgaaacttacctctaagacatttgtaattcttaatgaaaactaaa

SEQ ID NO: 180168 - DNA, 339 bp, Homo sapiens
aaaaatcatggaaaaaccaagttgaataaacactttggcaattacgtgacaggttaactttctcagacattttcattggactcgtgaaagtggatatccagtggtagtgccttgagaaggaaatggaggtggaaaccaccaagagtggcttattctttgaggtactggctcaagggaaagggcagagagagtagtattagaggattcagtgtagagttgaagggtttgggctttttcccccccaaaatgggaggatactgagcatgtttatatcctatgaataaagaatggatccttaaattgaaaaaaatgagatgaagggataaataccacattcta

SEQ ID NO: 180169 - DNA, 525 bp, Homo sapiens
ttctacaggatctatagggtcttagggaggaaggctccttcacttatctgaaagaacagcaaggaacccgacgtgtccccaggaggctgggagaccaggtacggggcctggtaggctgagcaaacacagaagcatgaataaggcctaagtccactaaaccccaagcacataattttatctggaagccacaactcatccagccacaccggcgcaccctccttcttgaggagagggcagcctccaatctgaagcacctctgtctcccctggactgtccgagacagagtggcagaagcctcgcttgtccaaacacacgacagtcaacgtctcccaggtcccccgctgcccaatttcagcctcaaagaaccaactatttgcctcggcctcccgagtttctcacctggagtctccgggctggctatgagtgttcgggaaactctctggctctggtcctgaaaggtgaaggagggtgcaggggcatgtccccccgtgacatctgtgcccgctccccaagcgccagcccaac

SEQ ID NO: 180170 - DNA, 245 bp, Homo sapiens
tgcctgtggcaccacagtgttaggtgaaataaatgaaaaaaagccacacacgaaaagcaagtgcctggattcatacacacaccaagtgtggtgatgtggttgtggtgatctcatactacaccatccccagctccttagctagagccagagcttaagaaagaaaagcagttggcccagaaatgctggtgctgtttctacagaaagcctgggttcttggttttgtctgtgaagaaaagagtgcttgg

SEQ ID NO: 180171 - DNA, 159 bp, Homo sapiens
attacaactgcctttctgttttaagaaatctctggggagaagcctaaattggtgcaataaaatatccacccagtactagaacttgctcccttttttttttctttttgagatggagtctcgcactgtcacccaggctgaagtgcaataggatagtctcag

SEQ ID NO: 180172 - DNA, 1115 bp, Homo sapiens
catatataaaaccaagcaaaacacaatgtgaaatatgtaatacagatctgtacaaaatgtcttagcaactcaaaagaggaagtgatgaattctgtcttgagacaaataaaaggcattgcagaaggaaaaaaaaaaaaaaaaaaaaaaaaaaaaaaaaaaaaaaaaaaaaaaaaaaaaaaaaaaaaaaaggggggggggggcctagcaaaaatcatcctcctctgctgagagccgcgcaacgtcagccgacaaacaccgcagttgttcggtggatagcaaagggggcccccccaaatgggagaggctctgcataaaaaaaagagagacgacgaccccaggtgtcaaaacaacgcgcgtgaggggaaaaaactcgctcatcagtggggaatactcttgggaagagacaccccatttccgcgggggggggcaacaatgatggggaaaaaatcacccgctgaaaatattaacggccgtgaagcggaaaatccaacaccctcgggagggtggtttgacgggcgggttccaacccaccgcgcagctaacgagcgccaggcggcggagacaaaacaatcggcggcaccgccaaagaaaagagcatcagggaaaaacaaattctataccccggcgggaccgcgtgcaagaaaaaaacaccacgcgcgcaaccgaccaacagcacgctacccagaaccagtcaccacaagcacactatcagcaggcgcggaaccaaccaccccccaaaccgacaactgccaacatgacggacgacaccggtaagacacgcagacacacagagacgataactacctcaccccataccatccatatacccaaccaacacacacaaaaagtctaacaaacacagttcccacctactcgcacacagactaaacacacaaaaatatcacaaaaaaacatcaacaatctataatctactactactacacaaaacaaaatacaacccacaacatataatcacccacaataacataaatcaaactcataaaacaaaaaacataacatcactcaacaaaacacaaaacaaactataattacatcacaactacaacaataacaacacctcatactcataaaaacatacacatatacactactag

SEQ ID NO: 180173 - DNA, 435 bp, Homo sapiens
tgaaaaactaaagaatacccaatcccctcctcaggtggctctatcactgcctcaccctgaggacagtatttccccatggggtttggatcactgttctctagttccctctccctggggcatgtgcagagtttcaacttcttgttggctgctctcttccactcaggatttaaaacattcacacttgattctttttccttctatctctgtaatcctaataccaagttttcttggcattcattatcagccgtggaatctgttgtacctgaattgttactcacagcaggtaataagagaacaagacctcctggaatttctgagccagactttgtactcagggttaccttgctgacccccatattttccagcattgctcttattaattaatggccctcagtcctgcacacaccatcagatcccaggggctgagcacagcct

SEQ ID NO: 180174 - DNA, 341 bp, Homo sapiens
gtcagtgggatatacaactttgttacatttactgaactcaataatgtatagacaacttcacgtgcttacatttttaatagtttttaattttatggagacaaatgagaatggggggaaaaggaaaaaataattctaagtatgggaaattatcttttgtgtctaacaattaggttaaacaaagtgggagcaaatgagcctagttccccttctattgtttcagggcaagaaaatacagacagatgtcggaatgtggaagcggtgacctctgacttgcacagcatggccactgccctggcacacaagtgtcctgagccaccatcgtagcaggatgcgtttttgaa

SEQ ID NO: 180175 - DNA, 355 bp, Homo sapiens
ataaagaaaaaatatctttcatgatggttggagtttgggggaaggcatgagttggggaaatgtgaagactggcagagtcttatcttctagacatggggaaatgtatcaggaagataacttggagcagagtaaaaagggtcccgtgtttgtgttagtactggacattatcaatgttaataggttcctataactaagcaggtatccctggtccttctgtgttttaaatcccttccactcccacaaacctcagatcccatcacttctctttctccttttcaacttctccctcttgaactaccatctgcttttaagttggtgcaaaccattctaccttaataaaactgctaacccatac

SEQ ID NO: 180176 - DNA, 290 bp, Homo sapiens
ctgtgctctgtacatccaatcatcaaatgctatcaattaactttagtaatacatcttacattcatgcctttgcttcctttcccactgccattgtcctaaactaaagcatctcacatagactattttcactgttcccttagtttgccttccagcatttggtctgatttctctgactaccatttaaaataccacggtcaaattaatcttttatttacataagttagtcatttctctgctcagaaactttcagtctttgcattataaattgaatcaagtatagactccctaag

SEQ ID NO: 180177 - DNA, 236 bp, Homo sapiens
cacacaggtgagggactagtttgtgttcctaagagccagagtagagagacttataatacacagggtattggttggggttctcaaaatggtcatacctaaatgggttaaattagtaccagaataaaggatgctatggacccaccataacaaagcttaaaaggaagcctttaaagaatcaaactaatccaaaagtaatttagttgcattttcacaaaatccaacacgctttatgctac

SEQ ID NO: 180178 - DNA, 267 bp, Homo sapiens
cccagatggggccttaccttgtgctgctgggattacaggtgtgagccaccgcacccggccagaaaattttctattttgcctgaatgataatgaaaatacagatatcaaacactgtgggatgcaatgcaacagtgcttagagggaaacttactgttttaaatgcccatactaccaaagaacagctgatagtcagtgatctttaggcttccatttcaagatgctaggaaaagaaaagcaaatagaatccaaagagagtacaaagaagga

SEQ ID NO: 180179 - DNA, 337 bp, Homo sapiens
gtcaatgaacacatgtggaatgaatacattattgtcagttaccattatggcctttcccaacaccgccatctggacctgccatcatactttttccacgtgtggattcctcttaaggatctcctcactcccaccccccaagtcaggttccacatcctctgcctctgaaagccaggccactttggcagtggtaagtatagaggagagaagtgggctttgtgtctagtcctacaacctcattaagcaaaactaaaagctggctcctaacccatctggtctatggctcatacccatcctcagctactacctactttcccccattgctaactctatctcctta

SEQ ID NO: 180180 - DNA, 651 bp, Homo sapiens
ggttcccatcactggaacttgccagctttaggctaggagagaaatcagacccattttacaaatgaatagcaaatgcacactcccaggtgtcattaactgtttaatcatttgtaagtggaaccccttctgggggtctccccgtggggatgactgttcaggagacaaggtggatcctgggtgtgtcgatagaagacagctgctttctttgccttgctgttgccattcatcaagatttctgtggcctggctagtccttggcagaacaaaaacaaaagccgatgaccctgaaaggtcgaaaaaggtgtacagactgaaacaggatttataaatcccacaaatatgcagaactagtctccgaggtccttgaaatgatgaataaggtccttaacttagagcacacacaggacaccagagtctccgcatccaaaacaattcattatagttctgatctttccagactccaaagccgcccccaggccaggtccccatcagctccagcctcctgatgaccttctgcctttctctatgctgcacctacactgcagcctccgggcacattttatagtgtttggatgctttagaatcaggttttcaaagcttttgtcagtgaatttccccgctcagctcttcaatcccacgctgccccaaagtc

SEQ ID NO: 180181 - DNA, 536 bp, Homo sapiens
gacttatcattttctctaattactctaaactgcacacattttcacaaattcagtgttgtgtttagttctcacaaatctaattcctagtatacacagtaggccacctcttgtctggtttagtataatcctcattggcataatcatcttctttgtggctacaatgaactaaagttgacagactatgaggaaagcgacacattattcaactcaagttcacaagttgcgaaagttctgggcattgcccatttccaaatgactcaaactgcaagccttaatttataagcaagtttaaagaagccaagaatgtcagagaacaaactaaatcaactcactagattttaggtgaacaggtcttatatgatgttacatgagaagaacacaaagcaattttccagtcatcttttgccctagagatgtaattactatcaattctaagtaatagcagaaggggtaaactacgttaaaaggggcctcaacagttataacacattcttggttagtcattaagttatgaaaatataactctgatgaagaaa

SEQ ID NO: 180182 - DNA, 838 bp, Homo sapiens
aaaagatacaaaagatcttaaaagatgctataaaacctccaaatctaaggaggttaatgcaataaaatttaattctgagtcatgtaaagtccaattctgattttctcctgggggacagttctcctgagcagccccatggggcttctgtcttatggcttgtggctatctcaaggcttcatcatcctgtagcttcaagatttccctgttgttgggaaaatgatctcacacccagtgcttaatcaccgaggttataaaccaaacatcagtttccttcacattccttcggcaagaactggtcacatggtcccaccatgctgaaaaggaagcctagaaatgtcctggctagacagccacttcccagtaaacatcttagttggttatgttatggtaaagagttgctgtctcaagtcccgcaattgctctaccacctgctggtccactgggagctcctgaacctccctacggtctggtgaccaaatgcccaaaactaagtaggatctaagacattgtttcaaagttctgcctggaatcccttctgattagttgatgcctattcagtactgattattaaatatttgacatagcacgtcagcatctagtatctttgcaagctccattttccaaactcactggcactaacttgcttgctgtggtcactgacctctaatttcagatctcttcctttggacctgatgattggtaccttcctgaagtgcttcatctttccttgccaggatacagacctacttctctcaaaccctcacttaaggcgacccatctccaccttactgtctgcccatttcccctcccaggtctcttaaccaccccagaggagccc

SEQ ID NO: 180183 - DNA, 993 bp, Homo sapiens
ctgacttggacccttctttggagaggagcaggaaggacctccaaggtgaaggggtgaggggatgccaggtttctgagcagtgggctggccctggcataatgctatggtgttgaacgaccacagctcacaggtccctcatggaggcctgagcccttcaatgccaggacttggacctgccattctggtcagcgccacggctgtggacacagccatctggtccccccaacgggatggagcaggcctgccatctagatcctgccaggggccgaggaggcgagagttgctagggaagtgattagtttacccttaagtaagtacctgagcctgtttcagtgatcaataaaatcagcaatgttagccgggaatggtggcttatgactgtaatcccagcatttcaggaggctgaagccggaggatcgcttgagcccaggagtttgagaccagcctgggcaacatggtgaaaccctgtctctactaaaatatacaaaaattagccaggtgaggtggcatgtgcctgtagtcccaggtactcaggaggctgaggtaggaggatcactgatgtatgtgtgtatacacacacacatgtatttgtagattgggggtccccaagaccacccttaggtttgacaccttgctagaagaactcagagaatgtattaaaaactattatgctcatggtcatggtttattacagcaaaaagatacagattaggatgggtgcggtggctcatgcctgtaatcccagcactttgggaggctgaggagggaggatcacttgaggtcaggagttcgagaccagcctgaccaacatgatcaaaccccaactctactaaaaacccaaaaattagccgggcatagtggtgggcgcctgtaatcccagctacttgggaggctgaggcagaagaatcgcttgaacccaggaggcacagattgcaatgagcctagattgtgcctctgtactccagcctggatgacagagtgagactcagtctc

SEQ ID NO: 180184 - DNA, 392 bp, Homo sapiens
cttctttgtaaaataaagatttattcattgagtcagatttgtaaaaccagcaaaaaacagcaaggttttaggaatactgagaattggcttttgcagaggatggtttttttgttttttgagacaaagtcttgctgtcaccaggctggagtgcagtggtgcaatctcggctcactgcagcctccacctcctgggttcaagtgattctcctgcctcagcctcccaattcgctgggattacaggcatacgccaccatactcatctaatttttttttttttttttttttttttttttttttttaaaaaagggatttgctgggatttcgcagggttaacccattgcccccgggccgttttattttcaacctggaaataaacgggtaaaatttagttgg

SEQ ID NO: 180185 - DNA, 756 bp, Homo sapiens
gcatagattaatttttccaaggttacatagctagtcagcagtaaagtctagattcagatccttagcagtttttctccagagttgatcctcttaactatttcactatgttgtaccttcaatccagatacactgagctattcttataaattacacagttctatgtcagtgtgctctgtggtactatatttacatacaagtacactacacataacacactgtatcttttgcacagctgattctttatgaatgctcctgaaaatggaaggttcctaaaacattctattcttttcaattcatttttattcaaatgggttcaattcaaaaaatactgattgagctccttctaggctgcaagcaatatatttgtcctacatcttacctggcttgagcacagcaatggaggtagagacataaaccaataatggcaatatctgtcaccagttcagtaatagagataaaatttaagagcagaagtggcacaaagtgaggattgtttggttttgtaagcaatttgctttacacatttcagagatgtgccatctttttaacactgtaattttagggatcaaggaaatcacacacacaaaataccctccaaatgcattattatatctaacttttacttgcataataactgggatgaggatacatgttgatgtaattgtagtagtgcttacttatgcctaatgttctagtgtaattaataatagcaccccttttaactttcataagtaaaatggtttggatgatgaattg

SEQ ID NO: 180186 - DNA, 407 bp, Homo sapiens
attacagagtttagagagttatcaggagggttcaatcaggtgacccaagtgccaggttgcaggagctggtgttcccggcagccaagagacggattaacacagataagtgcagggttcctgtcatgcattcattcattcaatctatcattcgatgactgtttattgagcacctactatatgcctagacctgggctagtcacaggcatgggggaaaatcagaaacgatatctctgtcctcttaagactcatagtccatcaaagatgaaagctcacagataagaacataatgacaaagagcagtacctgctgtgaaggaaagagcaggggtgtcaggacaggaagcaccagagtggcggtctgggcagatgacatcctagcagactggaagggtcaggaaaagctggctg

SEQ ID NO: 180187 - DNA, 869 bp, Homo sapiens
ctcgctgtgggacgtggcggagcagctggggatccgcccggcctgcacctgagcggaggttttgcaatcaggtcagtggaggcagcgaggcgcggctgcagctagtcgtgaggctctaaatttggaaccgtccctccttcggggtgtgtttaaaatcaccagaacggtgctttggggctttctgttacgtttccatcacctggatagtctaagggatgcctgatccctgaagctggaaggccttgggtgagaagggacagggcttcctcccgctggaatctgtggacgtttggggccccttggggaggaattcattttctgctgaaggaagctccggaggcatccggtgagcgctccctggaatcccatgcgctccctttgggctcagtgttgacttggctgcgcaggctctgtcggggggacttcacccactaggtccttcaggcatgatccagccctcaagcccggccgggcccaaggccgtggcgcaggaggggctggccgcctgcccctgtctccattcacgtgtttgaccgtgtgggtgagtcactggctccagagcactgagtcagtcctgtttctcctctggttagagaagtattcgccagatactcaaggaacaaggaagagtcttttaagtgggactcaataaaaagtggggaggcagggttgttttgatattaggtcccctagaactagaagctaaccttctgctatatcttactgaaaagaaatttcttttgacctggggcaggggtgcggtggctcacacctgtaatccctgcactttgggaggtcaaggtgagaggatcgtttgaggccaggagttccagactagcctgggcaacacaggagaacttgtggtctac

SEQ ID NO: 180188 - DNA, 337 bp, Homo sapiens
ttgtatccccacctggcagaaagagagtgagaaatctctctgtggtcccttttataaggtcactaatcccatttaccagagctctcctctcatgacctaattacctcctaaaagccccatctcccaataccatcaaactgggggttgggacttcaacatatgaaatttgagggggacacagacattcagttcgttgcaaaagaactctctggagaagtggtgttgaagcagggacattcagagatctgggagaaagaatgttctaggcagaaggaaaaggacgggaatgagtcctgaagcaggagcctgtggaagtgtctgtggataggtggggagg

SEQ ID NO: 180189 - DNA, 401 bp, Homo sapiens
atttctttcttctggccccctagggactcagtacaacaggtcttcaaatggcctatgccacagtgaaatttaggatatcacacttctattctaataatgaatcaggaggcagcttgacacagtccttcccaactccttaaagcttccctcctccactcaacaattaacttattttaagcctcctttcataaggctggttgggggttagcatctcactctcctggcctcacattcttagtctatgagcttttttagtatctatttactcctctgaaatcacctctcacgactactctttgttcccagatctggaggtcagccagtccacagattcagccccacttagtgacttgcatctgtgtttctttttctttttcttttttttttgagacagagtttca

SEQ ID NO: 180190 - DNA, 287 bp, Homo sapiens
gcattaaagaatcctacttcacccacaagataatattcaaattcaaattccttagactggaatgttagacctctcacaatctgtccctgtttttccttttctccctgactcaccttgaggcatgtatcctttatactgaagctacccctacattatctggggctcctaaataggccctgttagaatgtttccatctggactctgggaccatctttaagattcatttcaaagactggcttcctttaaaagtatgaccttgcctattacctcacttagtacactctctc

SEQ ID NO: 180191 - DNA, 273 bp, Homo sapiens
agttatctgtttccttattgatctgtcttgatgttctgttcattattgagagtggtatattgaagtctccaactattgtacagctgcccatttctcccttctattctgttagtctttgtttcatgtattgggggctgtgttgattggtgcatttgtgtatataattgttatagctccttgatgacttgatttttttaatcaacatacgatacccaaggctaggtgctgggattacaggcgtgagccaccatgcctggccaatttttggttttt

SEQ ID NO: 180192 - DNA, 538 bp, Homo sapiens
ggcagtggatgtaggatgtgggagtgagacatcaaacatgaagcagtcgcttaaagtctaaagaaacactagatatatgaactgcaggagatagtagggaaactggaccggctcctcataaaacttcccgccttctatctccgggaggatcgcagggcatttccgccaagacaggtgagactgcggttctgacctgcgggcctccatgcatatgcgctagggcacctgggggccggcagagccgttcccctacgcaaagtaagagtgttatgtctacaacccaacggggacactgagagccccaaaggccctgctttcttcccagagaacagcgcccatctgcataatttctacctggctctatgaggtgagaacacactccccgctagcacagaaatcctacaaactcctgtgggggctgcgcttggaagcagaggctgtgtaagaggtgacttggggggtagggaaaaacacgaagattttcacacagggtgagaacccaagagactggagaccacggaccaatccctgcaaaaag

SEQ ID NO: 180193 - DNA, 786 bp, Homo sapiens
atgacactgtgacaagggtgcagtttttttgagaggtcttggttaataattaaaccaacaatgccccttacaagctaagtaacatttgtcaacttacttattccctctaagcactgattttctccaagtcacagagtttatcactaactcagagggttgctgaggctccattaaaacttgataggtgctaatcactgaaaagattgggagccctactctcccacaagttactcaaagtaaacacaaggctactctgtaaaataatggtaaaagaagtcaacaaagttctgatttttcctatgatgaccacagtatgctattttatttctttaggaatatcacgttcccaaaagataatttggtaggatcctactttactaatgctcaaagcacctactccacttacagagaaagccgagctgtgcaggtattcatcccaaagcttcacactactagtgctaaatatatcaaaacacaggcttttctagaagtgatagttacagaaacaattactttcttcaaacatttattccagaaatattctatatgatatactcgtttatttttacaaatgagagagccgtgtttggaaatgcaaacctatgtgtatgcaaaagcttatattgtgtaatattcatgattaaagtcttagggaaggtccctatccctgcaggagtgcttaagtaaattgtggtacatcctcccaattgaatcctatgtaaccattttttgaaaaacacaaaacaaactaaagcctctatgtactgatatagaaaactccataac

SEQ ID NO: 180194 - DNA, 757 bp, Homo sapiens
ggataacctttgcttgagaaaactttattcttcttcacctgtataatttattctggcaacttccgaatgtgttttcctaaagcttcttccctgattggaaggaggtttaatattttgtgacacatgcaaacttaacagcccctatgtgaaatattttctacttttgaaggtgtgaaactggttaaaatgttttaaaacttttcccttaattgcaaaggaaatgtatgtacatgttagaagatttagaatatatagataagccaataaaattaaataacagttctatgttgacactttttgatgtatatctttccatacattttctgtgctgtgcactcacacacatacacacatgcatccaaatggaataaactagtgaaactttacacaaaaacacataagccaaagtaataatgattaatatttggtagtgtggtttactaatacatactgcttgatatgagctttcttggaattttaaatgtaggtggaacccaaacctttttcaaaattttactttaatgcttttaagtttgagttgtagtggtaatgcaaatgtcattaccttgaaatcattctttctcaaatgatagagttctcacaatacacgccaggaacgtactgatgggattttatttgtgtgcttgtttgttttcattgaactgtttgaattaaactcttagaatcattcttatggtttgaatcgccattacttaaaaagtaattattattatttctgaaaatatctccagtaatt

SEQ ID NO: 180195 - DNA, 504 bp, Homo sapiens
gattcgacggcttcaacggaactttaactagacattttattttgcgctttcactaactacataattacctgcactactgccaaatacaaagttctgtgaagatttggtagcataatttttttttctcattctgtcccccaggctggagcacagtggcgcgatctcggctcactgcaacctccgccacccgggttcaagcgattctccttgcctcagcctcccgagtagctgggattacaggtgtgagccaccacgcccggctaatttttgtatttttagtagagacgggtttcaccatgttggccaggctggtctcaaactcctgacctcaggtgatccacccgcctcggcctcccaaagtgctgggattacaggcgtgagccactgcatctggccccaacatgtactttcactagatattttattttgcgctttcactaactacttaattatctgcactactgccaaatacaaagttccgttgaagccgtttggtagcataaa

SEQ ID NO: 180196 - DNA, 709 bp, Homo sapiens
tcttggaggctttgttcgtttctttttactcttttttctctgaacttctcttcttgcttcatttcattcatttgatcttcagttactgataccctttcttccacttgatcgaatcggctactgaagcttgtgcatgcgtcacgtagttcttatgccatggttttcagctccatcaggtcgtttaaggtcttctctgtgctgtttattctagttagccatttgtctaatcttttttcaaggtttttagcttcttggcgatgggttcgaacatcctcctttagctcggagaagttggttattaccgatcttctgaagcctacttctgtcaactcgtcaaagtcattcagaggaaggagttttggaggaaggagagacctagggagggttttttgttttgtttttgtaagagaaggatgttggccaggcgcggtggctcacgcctataatcccagcactttgggaggccagtgcaggccgatcatgaggttaggagattgagaccatcctggccaacatggtgaaatgccgtctgtactaaaatacaaaaaattagccaggcgtgatggtacacacctgtagtcccagctacttgggaggctgaggcaggagaattacttgcacctgggaggcagaggttgcagtgagctgagattgcgccactgcactccagcctggcgacacagcgagactccgtctcaaaaaaaaaaaa

SEQ ID NO: 180197 - DNA, 762 bp, Homo sapiens
cagcttgaagccttctagcttacacagcaggagtttctagaaattttaccgctgagtcctctctggctctgagcctgtcctcactggctgcttcacgtccctctctatgctgccatctcaagtttttatggctcagagagttcctgtcacttccctgctgaattcctgtgttcttccttagaaactctattctatttttgattatctactggctgttttgtttcttcttcgtggagaaggtaatttgaaggtagcagtatttctctgaattctaggaatgctcaaggtgttaccaattgtgataatgctacgaggtgaggcctttaagaagtaattaggccatgagggctcttcttgcaggaacggagatccaggatgagttcagaccctgggctatccatggaccatggctgacccttggcctaaagccacatatccaggcctatgaaatggatttgacccatctgtgatctgattaccccaccactgcatgcctacagcacacaaggaatgcgaaaacatcatgttccagggacagtcttcatttgcgctagacaaaagacaaacaatccttccttgaatggacccactcttcttttttcactcatctcctctcactgatctccctgctggtggtggcggatagaaggcagagatgtggtcaacaccaaatgagattatgttctgggaattcagagattacagtctgaagaattcaagataaggtatgatgcttctaaacatatgagtgtctcttttctc

SEQ ID NO: 180198 - DNA, 1040 bp, Homo sapiens
  misc_feature (698)..(698): n is a, c, g, or t
  misc_feature (724)..(724): n is a, c, g, or t
  misc_feature (750)..(750): n is a, c, g, or t
  misc_feature (1040)..(1040): n is a, c, g, or t
cagcttgaagccttctagcttacacagcaggagtttctagaaattttaccgctgagtcctctctggctctgagcctgtcctcactggctgcttcacgtccctctctatgctgccatctcaagtttttatggctcagagagttcctgtcacttccctgctgaattcctgtgttcttccttagaaactctattctatttttgattatctactggctgttttgtttcttcttcgtggagaaggtaatttgaaggtagcagtatttctctgaattctaggaatgctcaagatccaggatgagttcagaccctgggctatccatggaccatggctgacccttggcctaaagccacatatccaggcctatgaaatggatttgacccatctgtgatctgattaccccaccactgcatgcctacagcacacaaggaatgcgaaaacatcatgttccagggacagtcttcatttgcgctagacaaaagacaaacaatccttccttgaatggacccactcttcttttttcactcatctcctctcactgatctccctgctggtggtggcggatagaaggcagagatgtggtcaacaccaaatgagattatgttctgggaattcagagattacagtctgaagaattcaagataaggtatgacctccataaagaaccttcatatcatcttgccctgcatgaaatatattanaagcctttgctctggtctttcatggnacttttaaaggatattatcatttacnaaatggaataccaatgatctttcacaagggggtttatcaacttaagcatgtaccttaagtaaatattttgagaggaatccattaacctctggatgaatatgctaaaaaaaaagatgaaacagattttagttgcccggtgtttattttgtaaataaaatgtatgtgccaaaatgtccttaccaaatacacaatagttgctcgagtggcatggccaagatcaaaaaccctaagaagataacttgggtttagtagagatttaaaaaatagaccttgatgcggccgttaccttn

SEQ ID NO: 180199 - DNA, 1000 bp, Homo sapiens
  misc_feature (698)..(698): n is a, c, g, or t
  misc_feature (724)..(724): n is a, c, g, or t
  misc_feature (750)..(750): n is a, c, g, or t
cagcttgaagccttctagcttacacagcaggagtttctagaaattttaccgctgagtcctctctggctctgagcctgtcctcactggctgcttcacgtccctctctatgctgccatctcaagtttttatggctcagagagttcctgtcacttccctgctgaattcctgtgttcttccttagaaactctattctatttttgattatctactggctgttttgtttcttcttcgtggagaaggtaatttgaaggtagcagtatttctctgaattctaggaatgctcaagatccaggatgagttcagaccctgggctatccatggaccatggctgacccttggcctaaagccacatatccaggcctatgaaatggatttgacccatctgtgatctgattaccccaccactgcatgcctacagcacacaaggaatgcgaaaacatcatgttccagggacagtcttcatttgcgctagacaaaagacaaacaatccttccttgaatggacccactcttcttttttcactcatctcctctcactgatctccctgctggtggtggcggatagaaggcagagatgtggtcaacaccaaatgagattatgttctgggaattcagagattacagtctgaagaattcaagataaggtatgacctccataaagaaccttcatatcatcttgccctgcatgaaatatattanaagcctttgctctggtctttcatggnacttttaaaggatattatcatttacnaaatgaatacccatgactgttggcatgtgagctatcaacctaagcatgtgcttgagtgaaatattttccgaggattgccttatcctctcggggaatagttgtaaaaatagaaggaggcaggcatatgagcctgctaaggtggcgaaacgaggggatgtgcgaacggcattcaaagtacaatttacgccgttgttgtatttcttgtggagagctctgtattagtgctaaggactagaacaaattggtgagc

SEQ ID NO: 180200 - DNA, 206 bp, Homo sapiens
gaaagaaatgcagtttcaagacaaaaagcacaactaattctctaaagaaaataattgagcattcaatctttgattagtctgtcaaaaaagataaaatatctttgctaattttaatacatgctacactgactcatttttagattgtaaagtataatctataaggctgctgaaaagcagtgactaataggcggcgtggggtaggaggt

SEQ ID NO: 180201 - DNA, 455 bp, Homo sapiens
ctgcagtgagtgaatgtaaaaggatttctgaagcggttgttactccaatctattttcattcttataatttccctggtgcttcatctcttctctctccccaattcttgctctccccaaaaacatactgaacagatacttttaaaaataatatctttgctactttcaaatatcgggccaggtttgatccaactaaatatttaagagacccaaatggaaatcctaatactgggggagggagggaataaggggcaagagggctgagggagttgtggatttgttgtttttgtaattatctgtgggtttttggggggatgctgtaagtgaaataaaaaaactagatttcttctttttctggcgtattgcatcttgcaatttcaagacatttcagaaatgtctgtagcagaatagctccttgtatgcctaatcctcagtcttgttgaataaatgctaaagtc

SEQ ID NO: 180202 - DNA, 488 bp, Homo sapiens
gcgctttatgtccccctcgcttagctgcagaactgaggcaacaccaggactttcacaatattacaacacaattttccaggagcttcgctcatttaagtctttgcaatgtcaccccctcagtaaggtcttccccagctaccctacttaaaatccaacttccactccagtactccctttctcccttctgccccaacccctgctttagttttcttcactgtacttctcacttaggatacagtagggagatccctactgtatcctactgactttatccgggtctaagatctcctatttgggttactacagcagctaccgtcttccttggttcattacattctctcctcactctaacttaacctgtagatcattaacaggtttaccttcctggtttaccacattaatccctggcctccaaactttcaaaggctctctataccttgcacaacaggataaaagtagaaatctcctcaattcagcactcaaactct

SEQ ID NO: 180203 - DNA, 573 bp, Homo sapiens
tttgatagcacatgtagagtgactacagttaacactagtttattgtatatttcaaaatagctacaggagaagatgtgaaatgttcccaacacaaagaaatgataaacattcgaggtgatggatatcccaactaccctgattggctcattacacactgtatgcatgtatcgaattatcacagggaacccataattatgcatagctattatgtatcaattcaaaaatcagtgaaacaactgaaacatgaatcttaaaccaacatcactattgttatcaatattttattcaaacaagtttttatatggtacaaagctatgtaaacagtgagtgtctaaatgcaatcagattgcattagaccagtacccacacctggctctttctacaaccctacagctacctcggtgaaaaatagcacttaggtgttttggtataaggtaattttatttctaaacttctcttgtataactgccatctgcttcaaaatgataaacatgctaaagcaacagcacgtatattgcctacataaatctaggattcatattttcacctgcatttcagatgggtacactgtta

SEQ ID NO: 180204 - DNA, 607 bp, Homo sapiens
tgcgctcctctttgtctgaaaaatccattctcctgttgactaacatttgttttttccaactttttgcgaatacaaacaacactaaaatgagtatttgtctgtttctttacatatctaaagtttataactagaaatggaatttctagcaagaaactgtaaaatgctttgtaaaatatctgatgaaatgtcacactgtatagtcattcacaaacatgtcatctttcacttttgattagggcagatgtcttctgttgtaatttttgttgttgttgtttttgagacggagtctcgctctgtcgcccaggctgaagtgcagtggcaccatctcggctcactgcaacctccacctcccgggttcaagcggttctcctgcagccccctgagtagctgagattacaggcatgcgccaccatgcctggctagtttttgtatttttagtagagatggggtttcacaatgttgtccaggctgatcttgaactcctgacttcaggcgatccacctgcctcggcctcccaaagtgctgggattacaggcatgagccacagcgcccagtcctgttgtaaatcttttatcaagagatcttggttagacaaggggaaacagta

SEQ ID NO: 180205 - DNA, 670 bp, Homo sapiens
tttttgtgatttatctcctctttgtaaataaatattcacttttgaacctagttttgtctttgaaattagtttgctttttcttgaagagtattcccacaaaagccggatttgcagctagtcagaaagaaagatttctttgcctgcccagagatgtaagggagaaggaaaccagacttgcatggaagaccttcaggagagcccctggcaggagcagaagttcttttgaaaatatgcatagacaggctaatagcatcttagggaggtccttagaagaaaaggttcagacttggctagaaaggcattttctgcccaaaaacaaaacaaaacaaaacaacaacaaaaaaaaccacccaataactgataactggctgatacagtttggctgtgtccccacacaaatctcatcttgaactgtagttcccataatctccatgtgttgtgggagggacccagtgggaggtaactgaatcatgggggtggttactctcatgctgttcttgtgatagtgagttctcatgagatgtgatggttatataaggagctttcccccccattgctcagcacttctcctttctgccgccaagtgaagaaggacatgtttgctttcccttacgccatggttgtaagttccctgaggcctcctcagccatgtggatgtgtgagtcaatta

SEQ ID NO: 180206 - DNA, 471 bp, Homo sapiens
tagttagtaaccaacatggaaggtatttatgattggctacaagaagcaggattcaaaggcctgcagtgtgtctggatcaggaaagaggtgactataaagaagccatgagtatataagaaataggtatacaataaattggcagtctaaagcacagactagcagagattggcaaactgtctctgtaagccacttatagtcttggttacatattcttttttcttttttaaaaaaacaacgctggccgaggtgggaggatcacctgaggccaggagttcgagaccagcctagccaatatggcgaaacctcgtatctactaaaaatacaaaaattagctaggagtggtggtgggaagaaacaaccattcaggagtgcctaccttctaacctcccacctggctcttcacaattgttcctcctctagaaaaagaaaagagccgggaacagtgctccaagcctgtaatcccaacacttt

SEQ ID NO: 180207 - DNA, 483 bp, Homo sapiens
ggatccataagagaaacgctaagagaaaaaagcccctgtctgaaaattaagcatcagaccacttggatgacttttcagtttcatttacagtagcaaaggacaaactcacacaaataggaccatttgggaatatatgaccaggcggaactcagaccaaaaacttgacaaattccaatttgtctcaaccaatactattttacctatggcctcccctgccgcaaaagaagggtttagggcgggtctttccatttgtgcactcgagtggctttccagcttcacatgcctgggatataaaggccaaggtgggggactcaatcctcataacttggaagagcaccacatggtggacagtacactggagtgggtgactaatcccagctctgtgaacaccttgtggctagacgtccacaaccatctctccaacagccatctgacactgtgggaacagtagcagtggcggctgcagcagcaatcgctcccttg

SEQ ID NO: 180208 - DNA, 492 bp, Homo sapiens
caaatcatttatataaaaaagacgtttgtttgtttgtttgttttttcccctaaattcgcctgttaagatgctcagtttctttccttgtgttgtttatgaaagtccagctttgtatgaaaactggaaagtccggggtttcgcgtgagttgtcctgatctccttgcttgccccaggcatgaattatcaggctccctggccacaggataaaagtcacctcacaactgatggatgggccttatgataatagaagatcttaatttgagacaacatgtgggtccatctcacgctgtcatttttaatagtttatgaactgtaaactcagtagtatattagatataatgggaaaacagcaaattttgagagattaatggctagagtaaatcagttcaagttgtcaaattacttatttattataaaaagtatgtttgggccaggtgtggtggctcacgtctgtaatcccagaactttgggaggccgaagcgggcggatcac

SEQ ID NO: 180209 - DNA, 137 bp, Homo sapiens
ctgtaaataactttttctctatcatttagttacactgagttacagcttattcaaaaaactaggataaatgcttgattcttttattattatttttttaattatgagttagttccctgccattttccaaaagtaactac

SEQ ID NO: 180210 - DNA, 463 bp, Homo sapiens
aataccatttagacaaaaggagatagacttaaccttgatctgattaggtccttttgttggccccaagttcatttaaaaaaaatgctgccccaaaataaaattttctgaagcaaatagtttcagagagcaagagtgaaatcaatgggaatttatgttacagcagatttcaactgtttttacgttttctataaagccttaataactatatttcattgaaggaatagtcatacttgtgaccactaaaattactggaattcagtaaactgcacaaaactggactcgatgacttccaagcttctgtcctaaccgagactttttattctaaatgaaaagtcaatatcacaattatactacaattacaatctgaaaatatttcatttcagtattgagatattctcagcgcctgatacagatccataatacaatgaatttctcccaagaaaggtgcttcaaggacagcatg

SEQ ID NO: 180211 - DNA, 110 bp, Homo sapiens
ttatattaggtaattctttacaagcaaagggaattgcattttaattgttaatccttgccttgtgatagccagaggctatggaaccccagcaaagatgtattttgctaaaa

SEQ ID NO: 180212 - DNA, 341 bp, Homo sapiens
tgttaatagttgttaatgtttctgcgtggaggatgtctcagctctactaaagtttaaggatctcagtggatctcagctctactaaagtttaaaggccactgttttacttggatcaccttgatggattgctttagagcagcagtcaccaacctttttggtaccagggactggttttgtgcaagacaatttttccacaggtcggggttgcaggggggcagatggttatgggatgaaactgttccacctcagatcatcaggcattagattctcataaggagcgtgccacctagatccctcacatgtgcatctcacagtagggtttgcattcatgtgagaatctt

SEQ ID NO: 180213 - DNA, 1386 bp, Homo sapiens
tgtgtgaggggagaccagagtagctgttgcacatacatcgactctcttaatattgaagcatatttaaacagttgtttgaagcagagctagaaattaatggtgatacttctaacagcattttgatgttataaatattactttaagtttatcaagagaaaaattccagtagtagcttgcgttataaaattaattgatttattatgtttctgtataattttattgaaattgcttttttgtggtgaatataatatagtggcaacgattttgaggaatctttaaagctgtttggaagagatggccagcctttggctagatttttactagaattttgaaataagaaagtgtataaatatgttttcagttaaattagccttgaggaagaatagttattatatgagttttaagggtcttgataaatgttgggacctactctaaaactcatgaggttcctcactgatcaatactcttgcattgtattttatttctcaaaataatgaaatttttatggaaaagctcaattagtggaatcttttattcaatattcccttactcttctttcttccttccttctttctttcctttcttccttccctccctccttccttcctagttctttcattttttcaggcaagaagcttccttaataatatagtttctacagagctttcttacttatttttctaataatggatataacagtgtgataaagtttaaatgctccgtgagcaaaactcttatcaaacaactgaagaaatacactgctgattaaccttttccttggtcttgaattgtctccagcatatttgctagtgactaaaccattaatggatcttattagtataaacacatgtctgtgtggttatcaacagtgttgtattattgtcacatttatttacatttttggtcaaaaatataaacatgcgtgtgtgaagcagtctgttttatagagtgagcatatatgtaatcgttttcatataattgaaaatgtgctgtgtgttgcattttattctcatgtcgacttttctactatgtatacaccgattgtctcggtgcctttttccttttgtataattgtattacatacagaaattgctgacctctgtgaaaacagtgtaaaaaaagttaaaattattattccgatgagattttaatggcagtttaattttccagagaataaattttgtgtgggttaaaagttatttttcttcacctttatgtaaaaaatctgtttacgttttagtactcacatggaatgggtaaacatctgacttcattgatgatgatacataaacatcagtcctaattcttgtcattgacaaataaatgttaatatgaaactgctacggcaataatatctcgggggggggcgggggggggcgggggggg

SEQ ID NO: 180214 - DNA, 1374 bp, Homo sapiens
tgtgtgaggggagaccagagtagctgttgcacatacatcgactctcttaatattgaagcatatttaaacagttgtttgaagcagagctagaaattaatggtgatacttctaacagcattttgatgttataaatattactttaagtttatcaagagaaaaattccagtagtagcttgcgttataaaattaattgatttattatgtttctgtataattttattgaaattgcttttttgtggtgaatataatatagtggcaacgattttgaggaatctttaaagctgtttggaagagatggccagcctttggctagatttttactagaattttgaaataagaaagtgtataaatatgttttcagttaaattagccttgaggaagaatagttattatatgagttttaagggtcttgataaatgttgggacctactctaaaactcatgaggttcctcactgatcaatactcttgcattgtattttatttctcaaaataatgaaatttttatggaaaagctcaattagtggaatcttttattcaatattcccttactcttctttcttccttccttctttctttcctttcttccttccctccctccttccttcctagttctttcattttttcaggcaagaagcttccttaataatatagtttctacagagctttcttacttatttttctaataatggatataacagtgtgataaagtttaaatgctccgtgagcaaaactcttatcaaacaactgaagaaatacactgctgattaaccttttccttggtcttgaattgtctccagcatatttgctagtgactaaaccattaatggatcttattagtataaacacatgtctgtgtggttatcaacagtgttgtattattgtcacatttatttacatttttggtcaaaaatataaacatgcgtgtgtgaagcagtctgttttatagagtgagcatatatgtaatcgttttcatataattgaaaatgtgctgtgtgttgcattttattctcatgtcgacttttctactatgtatacaccgattgtctcggtgcctttttccttttgtataattgtattacatacagaaattgctgacctctgtgaaaacagtgtaaaaaaagttaaaattattattccgatgagattttaatggcagtttaattttccagagaataaattttgtgtgggttaaaagttatttttcttcacctttatgtaaaaaatctgtttacgttttagtactcacatggaatgggtaaacatctgacttcattgatgatgatacataaacatcagtcctaattcttgtcattgacaaataaatgttaatatgactgttacacaaaataaaataatgtcaattacataaggaa

SEQ ID NO: 180215 - DNA, 1163 bp, Homo sapiens
tatactctaatcacataagtgacaacctgacattttcaccatagtctgttcatttgaagtgagccactaggtccagcccacactcaaggagagactacacaagggcatgagcaccaggaggcagggacgcactgagagccatgtcagatgccgcctcccgccatgtgtgatgaaatacactatagacacaactgttttaagagcctaccagttttatgaacccaagtatgtctttttagtagaacatctaaatctagacagctagaagaactacattttataaaaatctgaattttttttttttttttgagacagagtctcactctgttgctggtgccagagtgcagtggtgtgatcttggctcactgcaacctctgccccctgggttcaagcgattcttctgcctcagcctcccaggtagctgggactacgggcttgtgccagcatgcctggctaatttttgcatttttagtagaggtggggttttgccgtgttgcccaggctggtctcaaactcctgagctcaagcgatccacccgcctcagcctcccaaagttctgggattatagcgtgagccaccctgcacctggcctgatgaatgatttttaaattgtgactcccctatgctcaaatgagattggatcaaatgtcttctctagcaaataaataattccatagctagaaagatctttggtaggtagtttccttcctcttgtgtgttccctgagctctcctactgacgttttggaatattttcacagattcttgaatactcctccctgccagaggtaaagagcttaactcttatcctcttaagtgtggactagatttcgcgacttgcttctaatggatagaatatggtagcagtgacagtgtgtgacttctgagaatagctgtaaaaggcatcgtagcttcctcattgctgtttttcttggatcacttgctctggggaagcccagcagccatgccgtgaggacactcaagcagcctttgaaggagctgctggtgaggaactgagtcttcctgctgacattgacatgagcgaagcatcttggaagtggatcctttcatttttcaggtaccgtgccagggcctgtgagggaaccaagacgtgtaagacatggcctctcattagtgtttaagcagtagagaaagctggtgcca

SEQ ID NO: 180216 - DNA, 394 bp, Homo sapiens
ctttctcctctcagtcttctacttttgtctctcatccttacaacccaactgaaagccagagggcaaggtaacacatagctgctggtctcccggggcacaaagcaggatggcaagaacagggaagcctggaaatacccaagctcaaaataatttttcttcacaacatcatgtctctgccttctcatgcctactagtggcagtgaaatatttctgtaccagtctgaagtttctggttcacttctggaagtgaataagcttctcttgacacttggtgctttgaaatttcctgggaataagtttatgtctaggtcattttgtattcatgctaccaagaaatcagtggacattttaaatctaaaacctcagatactctcagaacctcagttctaagaaa

SEQ ID NO: 180217 - DNA, 238 bp, Homo sapiens
tcagttattctacactcaaagtgacttggaagtttgagaaaaagttattctccaacctccctctccaaatcatactaaaacaaacaaatcaaagagaggagaaaaaggcaaagtatttacaggaaaataagctacaaataactggaactaagcaaagaaagccgaatagattactatgttggtggtaaaaactctttaaggagagtcaaaagaacagaagcactttggacctttgtct

SEQ ID NO: 180218 - DNA, 432 bp, Homo sapiens
agagacaaattatcaaatattagaaacagtaacattttatttttataagttcccaaataatactgccactgacacaagcatttggacatgctagcaggagagaccctgcatacttgcttccagtaaagcagcgctttcccaaatgctccataaaagtgccccatctattgaaaacaccctccaaatggtaagttctatatccctggacttggcatataggagagtcagttggtgcaaaagtaattgtgatttttgccattgaaagtaaggctaaggccccaaatacttttgtaccaacctaatagctggcaaataacactcgaattttattttcacttattcctgaccctgaaagttactcgtttgtaaagaagaggattcttttctgattatttctaatagtgaacatgaatgatgtgtgaagtacaagaa

SEQ ID NO: 180219 - DNA, 547 bp, Homo sapiens
tgggattacaggcacatgccacaatgcccggctaatatttttgtatttttagtagagacggggtttcaccatgttggccaggctggtgttgaactcctgacctcaagtgatctgcccgtcttggcctcccaaagtgctgggattacaggcatgagccactgctcccagcagattatgaatcttttagttaacctatgaggtagggagggagtgggagtaggggggatgctaggtcttgtttgaagatagtctgttattgaggattatgtttcctacagaagtatgaccctgttggaggggagggggagagaaagagaaggagaaaagaaatcctacagcttcttcctctttgcctaaaaattccttgatatatcctctcttccagtcctctagtttctaagcagaaagattgctactcttctaagagctaaaccctttacctatgtctttgatctcaatcaaacttcttacctcttctgagtaaaaacttaattactctttttaatatttaaactgtatgcaagctgagtacagtggcccacacttg

SEQ ID NO: 180220 - DNA, 182 bp, Homo sapiens
gaagagcattgtttgtggcaccttccacttctgcagcactcttggatgctgactatttacaaggactttcaactgcctccttcacccatctggtattaatttttatttcttcgttattgagtctctgattcatctctacgcagacctttgagtttcctgaaggctttgcttccccagacagg

SEQ ID NO: 180221 - DNA, 639 bp, Homo sapiens
cttgtgatcctcctgcctcggcttcccaaagtgctggaattacaggcgtgagccaccacgcctggccacggtgcaccagtttacacagctttctctagcacatacctgctggctgtcctccaggatgcacggaagagaggatgcatccttaagctccatgtctaatattccttaaatgtcatcaccaataaacacactggttaaggaatgtgcctcgaccaattcttttttttttttttttgagatgagtgttgctctgtcgcccaggctggagtgcagaggagccatcttggtttgctgcaacctccacctcccgggttcaagcgttcttgtgtctcagcctcctgagtagctgcgattacaggtgtacaccaccacaaccaactaatttttgtatttttagtacagacggcgtttcgccatgttggccaggctggtcttgaactcctgacctcaagtgatttgcccaccttcgcctcccaaagtgccaggattagaggcgtgggccactgcgcctggcctttttttttcttttttgagatggagttttgctctgttgcctagcttggagggtgtatgaatttttaacaaaaaaagcttaaaaagtataaaataaaaatttttttaactagaaaaacc

SEQ ID NO: 180222 - DNA, 434 bp, Homo sapiens
gcggcgccctttttttgtctaatcacatctctacatgttcagctctctgggagctcctcaaaccctgtcctcttccgtctcttatggagactttattggatagtcatgattaaagtacagacaaccatgtagaaatgtgattagacaaaaaagggtatgatctaatattaatagactgagtgtgaaaatccagcaaggattgtctgttcagattcttcttggtctctctgtgtagctttccttcctccagggtatgggggaggaccccttctgaaatgaaggtcttgtggccttcaattagacaaggaaggtcagagaatttctttatggccagctccaagatagaaaggttgggggagatgagattatatttttagtttctacggcctgccttggggagaaaaaggagcaggcgaaaaaagggcagaaggtca

SEQ ID NO: 180223 - DNA, 604 bp, Homo sapiens
ctgggctgaggagtatggatattacagacttgggtgtttatctcatatttgcaatggaaaatcctctttaagagcaaccttgagacaattcaatagttcacaaaatcagtcaaggaaagctaaaatcaaccatccccaggagagccaaattcaacaaaaacttccctcaaaggctcactcactcttaccagcagaaggtgtgatgtgtggagctaatctaaaagcaaattcacggtgggtaaaataataaaagaatgcttatatgaagcaaaagatattgcttttcttgatcaaaaaaccaaaacaaagcaagatatcacttctcattatgccctgttcttgcagagtagtaatgactcaatgattatcttgagaagcccagtatcataaagatactcaagggtgcgcaaaatgcctctgagttctttgcttcttccagcataagggttatctacgtatctcttcattttcccattcacacctattccttccagagctattgctcatctctgccccttcaggaggaattttcagagggaattatctttactcattgtcttttttttttttttttttactttccattgactccatagtccattcc

SEQ ID NO: 180224 - DNA, 452 bp, Homo sapiens
cactggtcccacacttcttaacagaataaaaggatgagccctaatacctgggcaccatattcaaggttctttgcaatccttgctcggaaatctctccaacttcatctacaattattcaacccttctacctacttctctctctggtgacactagatgttgttatttccagaatatgctctgaacttgtgcaatttaacacatgctattcactctcactggaatgttactctcttattccataaaaaatcttttcctatctttcaagattcagctaaaacatctcgccctctagaaaactgactccaaccctctcctctcaccctgagcagttatttgctcaccacctttatttatttatttatttagcttatttatttattttggaaacaggtctcccggtctggtcacccaggttgagttgcaggaaacaggaccggttaccgagctcgatt

SEQ ID NO: 180225 - DNA, 369 bp, Homo sapiens
gtagtttatcctattgagaagcgtagataggatgcttattagcagtaactgctcttggtttcaacttgcatcttacttagctttttcaccgttttgtggtttcttggaggaagaatacccataatatacatttggagactgttgttctgtagtgtcaatgaaatgtgggggtgggaaaatgtcattcaagactcccatacaaaatgtctattgctgcctatattttgctatgggaaagtagccacagataatgttttttttttcctcattagtattttaagattttccatcctagtggaaagatatgatttgattcatcctatttactttgtatattaaagtacagtagaacctgccactttttttgga

SEQ ID NO: 180226 - DNA, 404 bp, Homo sapiens
ggaaagaaggtaaagcatcttctccaaggactcactgccctaaataacagagttattgtacctcaagcccttaacccaatcacagggcctctattaacagccctgcacctagactagaaagagagtcattactaaagttgaggcgaacatctcccttatggggtgatggtttagaggtaattatgccttggctgctattctattcccctctgttctctagcctgtactcccctttgtctttaaataaatgtctcagggccaggcacagtggctcacacctgtaatcccagcactttgggaggcggaggcagcagatcgcttgagcccaggagttggagaccagcctggacaggaggatcactcgagcccaagaactggaggctgcagcgagccatgattgcacc

SEQ ID NO: 180227 - DNA, 350 bp, Homo sapiens
caggccatagaggaaacattggtcttgactcttgtttcagaaaataaggtcccagcaaagtcaatgggttaggaagtgtgggagccctgttctctgatgactgttggaaacgagattcatggaaggaagcctgggctctcctgactctgtgcttcagtgtccaggcagaatctcctcagttaattctccagaagagagcccccacccttcctctttatacactctggcaagggagctcctaatcttgcagtcccaggctcccaaaatctctgtagcagacatttttgggggtcccccatctcctgtccaaaccttggaattcgtaatcattttagtgcttagggaaagag

SEQ ID NO: 180228 - DNA, 706 bp, Homo sapiens
ccaacccttctaagggtatgttaggcatgtgattacctgcagagaatataaaagcctgtagagcactccggagatcatcgagatgtatagtcttggtgaagaattactatacaatgaaggttggcaaagaagccaaatataattgtttagaaaccgggtttcacactataaagttgaaagggttggtagcccactgctagaagctgttaattatgagaccctcagttaatagactttgtcattaaaaggcatcaaagtattcctaattactaggttcacataaggaaacactgctagctcagaaggtcaactaaaactggattaatagagttacccttacctgagtttcctctctgaaagcaggacaggtatctaaatttaccaactgggtctagaagcaaagaagctcttaaatctgtcttggtcttggaaagggctagaggaatgtcagagaaggtttcacagaggacatcacttttgaaggaatagcagaagtttgctgtgctggtcctgagaggtgaaagatgaggctggcaaggcaggcatgtgtagatactggccctaaacactgtaggcgatggaaaccactgaaggacttaaacagtgatgtgatcaaatttacagattagacactttaaacttctagcctatgtgtgcggagaggaaggggtttcattcactaacttaaggtaacttaagaggaata

SEQ ID NO: 180229 - DNA, 354 bp, Homo sapiens
aacttccaacacccactaggaagtgtctcttagaatcatacatatgacaacgcttaaaaacatgggctatgtcctcacacacataagttcaaatcttggttctgcctggtacaaaggcacatgatcttaagggatctctggtgatgataatcctgcttatcttccagggtggtgaagattacatgagttttccatattagatgctaagcatatttcctggcttgcagaaagagcttggaaagtgctagccatggtgactatcagttctttctcacacgtgccccatctggggcagacccccatcactgcacacctgaagacaagggagcttcctggctgctctcctgcccctag

SEQ ID NO: 180230 - DNA, 177 bp, Homo sapiens
agtcaagaattccaaagcaggggagatactgagacattagacgaaacaaaatattgaagtgctttttaggggagacagaacgtagccagtcttcttgctcatgccataagcacagggcccggggagaagaaatggcagccctgactgcccactacaccagtgtctcccaaatagatc

SEQ ID NO: 180231 - DNA, 281 bp, Homo sapiens
ctttgatatattgatttcctttcttttgaatatatacccagttgtggaattgctggatcacatgaataactaccattgtatacctaagtatagttgataagagcacaagccctggagtcagactccttggattcaaattcagcttctataatttcgtgagcttgaacaaggtacttttttctgccccaggttgtttacctcctttgttgtgaggatcaaatccattaataattgttaaactcctagatcattgtttagcaaatagtcagggcataataaat

SEQ ID NO: 180232 - DNA, 364 bp, Homo sapiens
  misc_feature (1)..(2): n is a, c, g, or t
nngtcacccagacggtgatattttttgatattttgtgacagcagcccatacaaaccaaggctatcttcaagcaaacaatttagaagttcacaattttttttctgtcaaatatgtggtgttcgcaaattgaaagcatcttggatttcaggttagtatccctagtacatattttaaaacttatttagagattcaattgacttattttatttgagtctatgtccacctttctcctgaggcagagaatgcctctgccacaggtctcaaaatcctctggttaacacaaaaattacagaaaatgcaaaattccagcctaggaattaaacactctcatgtgtaaatttgtgtaatgtagaagtttaatagc

SEQ ID NO: 180233 - DNA, 514 bp, Homo sapiens
ttatcgttcgaggtgtgggtgttatcaagtgaattagtcacttgaaagatgggcgtcagacttgcatacgcagcagatcagcatccttcgctgccccttagcaacttaggtggttgatttgaaactgtgaagggtgtgattttttcaggagctggaagtcttagaaaagccttgtaaatgcctatattgtgggcttttaacgtatttaagggaccacttaagacgagattagatgggctcttctggatttggtatagggagaaataaacaatgtttattagtcctttgggctaataaagaatatctattagcacttccaaagctattagaagatgatgaggaaatcatgccttaagtgaagtaaggtagggtaagaaaccagcctgaaagtcttatatctaagtaaataaaataggaacaaatgacttttattggagattacacacagcccaggtaataaaaccacatgtgttatacctatgccacagctagatgctagattaaacaacttata

SEQ ID NO: 180234 - DNA, 247 bp, Homo sapiens
ggggttgaaccttgtaaagctacaatggtggagctgcccaaggcctgggaatatttacccaatgcctatagcccctttgtgtcttggaagtaagtaacttgtttttgcttttttattttacaggctcataggtagaagggactttccttgtctcaaatgagacttgggcttgggacttttgaattaatgctgcagtcagttaagattttgggagactattaggaaggcatgattgtattttgcaata

SEQ ID NO: 180235 - DNA, 671 bp, Homo sapiens
tatctcagcagcaaaatttccagataaatgcaatctacttcagtaaatgctaaaactccttaaaaaaaatcaccttgatagaaatcatcttaaaatattctctcaacttccttttctctgcaggtagaaaatattgcacagaatgtaactctctcggtatcttgctcatcatcgtgagggtaaatattgtacctttgtgtgatggtgtcattagggtttgttaatatgtgtggaactcattgtccctcaacatgagccatcccaagactactatgtactttgtgttcttttaaggtttgtcagggttctcttctgcactgctcccacgtgtcagtccccagcagcctcttgccacctcgcctcttctcatattttacatcaaataacttgctgtgactgaggaatgagatcgcatagattatcaaggtgaatgttaagcaagaataaataggccctgaatgcagactagatgaccccttccacaagttacctctttaacttgtgtgtggacaagcatgtgaactttcggatacgtatttcagcttctcagaagtgtgtctgactgagggtccatgctgtattctggttagttaaggtttcaagataaatgagctgtcattctgtgactcatcgagaactgttttaagcagctacacagccttggagaataa

SEQ ID NO: 180236 - DNA, 240 bp, Homo sapiens
tatctcagcagcaaaatttccagataaatgcaatctacttcagtaaatgctaaaactccttaaaaaaaatcaccttgatagaaatcatcttaaaatattctctcaacttccttttctctgcaggtagaaaatattgcacagaatgtaactctctcggtatcttgctcatcatcgtgagggcagagacagaaccaagccctgagggccacattaagcagtgagaaacatagcctagctcat

SEQ ID NO: 180237 - DNA, 401 bp, Homo sapiens
tatttcaactccattttgcagaaaagcaaactgaggctcacaagaggtagggtaatttgctcaagttcacacagacaacaaatggggccttgagctccttccagtacaccagggtctttcccagtggacatggaaggccaatcaaacaggaaacagggagaactggggataggagaggttgggagttgacacaggcccaggcccaacatcctgggctaaggaggaaccccgaggcatctgaatttgaatctgggtatctggcagtgatggagtgaaaggtcagcaaggagatgagaggaagaggaaagcagaattccaccagcctcacagcctgcctggaccatcccctggggagccagcctggagctctctgccagcccccgccccacccccagtggaag

SEQ ID NO: 180238 - DNA, 247 bp, Homo sapiens
tgagttcctgaacatctgttgcatcaacaatcacagtacctgtactaacatattactaaagactcaaacaaaacttggaggttcatgttatttgctttatttctgtatatgttaacagtttttcattaaaaaaattttttaaaactcttcaaacataaattccatgaatccacaaaagatcaacttaggctgaaattgggtggcaatgtaaataaagaacctctaataaaaagaaaaatcttgaatt

SEQ ID NO: 180239 - DNA, 196 bp, Homo sapiens
gggaaaacaaaggggtcaattaaagcatacagaagacacgaaaagggttgaaaacaaatatagagggggggtgattcaaggaaggctttgagtaagatgcaaggcttgaggtgaatattgaagaatagggacctagcttggcgtggagaggaggggagaggtcagatgggtttgtagaaaaggaagattagacaca

SEQ ID NO: 180240 - DNA, 660 bp, Homo sapiens
atcagtgctttcagaatgcccatgggcagtgctggatgctgctggtgcctcctgcctcctcgggatgcccccaggcaactgttgccctgtagattcccatttctcaggaggctgggtcatctcactcggtgctaccttgcttctctcactagccccttttttgcctctgccctgtacccatcctgggatcaagcatggtgttgacagagaggtgagactatcttgcaatgaggcttggctaagacataagctttgacagctcaccctggtcccaggaatgatgccgtggaggtggagccagcccagcccatctgctctaagggcagatcctgtccaagaccctgtgcctctgagcccagctggtgctgaacaatgactaaaggagaacgtgctgacagaaatctgaggctctcctcatcaaaggggtgagaccaccttactctctcttctcattcacagcgatttgtacacccatttgaatctaattttccctaaacaaaatgtcagagtgcaatgagaacaaagtatgacttatttggccctgaataatcctatggtccagggactcctatatagtagaaaccccacatatcctggcaagaaagagatttcttattagagagctgcccacacttccccctctactactgttgatgtctg

SEQ ID NO: 180241 - DNA, 1201 bp, Homo sapiens
  misc_feature (3)..(3): n is a, c, g, or t
  misc_feature (73)..(73): n is a, c, g, or t
  misc_feature (150)..(153): n is a, c, g, or t
  misc_feature (159)..(159): n is a, c, g, or t
  misc_feature (181)..(181): n is a, c, g, or t
  misc_feature (198)..(200): n is a, c, g, or t
  misc_feature (275)..(275): n is a, c, g, or t
  misc_feature (277)..(277): n is a, c, g, or t
  misc_feature (290)..(291): n is a, c, g, or t
  misc_feature (316)..(316): n is a, c, g, or t
  misc_feature (330)..(330): n is a, c, g, or t
  misc_feature (384)..(384): n is a, c, g, or t
  misc_feature (401)..(401): n is a, c, g, or t
  misc_feature (406)..(406): n is a, c, g, or t
  misc_feature (426)..(426): n is a, c, g, or t
  misc_feature (439)..(439): n is a, c, g, or t
  misc_feature (448)..(448): n is a, c, g, or t
ggngggctctcatgtgtgttcagggcagtgaggcagctctgcttcaggatgtccctggggcatctgtgtgagngcccccctctcccatgcagttctttatcctccagccatccagcccagggttcacctcagcacagggcatgaccccannnnagtgantggacatgtgcaaagccttttnaggtctaggctcagagnnnccaaccattgcttctgggaaattctatcacctaatgcaagttacaggacaggtcagactcaaggggtggggaaananacaccacctcttnntggaaggaactggaaattcatatanccaagcaagtgganacagggacatgtgattgttagagggcatgttcctaattaatctatcatttatangatatgtgtgaaataanatatnaatagttatatgtatgaatntgaatatatatanatatattanttctttagagacttaaatgtattcttgaaataacatctcccaaattttacctgtgttgtcatattctctgtggttatgttttcacaaacaaaagtttctatccttcatgtagactaatttttcatgcctctttcttgtggttggtgagtgttgtgtcttatcctatattgggaatatcacaatatattactgtgttatcttacaaaattgttaatattctttccttataaatttggttaattctaatgggattgactttttaaatactgtatgaaataaggatccaaatatgcatatctaatttttgaatttttagcaaaatttcccaccaacatttattgaaaagttcatatttgctcacataacttgatttttttacctgtaacatatatgaaatgtccatgagcaattatctggcctctcttccatcttcagttaacttatttacttttctgtactatgatgttaaaaagtaagtttcacttccagtatggtacaaatattgttctaacttcttcatttatttaataatatcttagctattcttgactaatgtgttatttaaaactttgaatcatcttattaacttccacaagcaaataaatgtttagtctcttgttgacattgtaataagcctccagatcaatgtggagagaactaaatgtttgacaatattgagatttccaatgcatgatcataatatgaatttcccacttattaatagccttttaataaatatataattaatttcgc

SEQ ID NO: 180242 - DNA, 523 bp, Homo sapiens
ggcccagcagggaccagccatgggaaggaccagccatgggaaggaccaccctttcactgagctctcaggctatccagagcctgatcaggatgggaaagcgtggaaactgcatattctgctccagcattgttcaaagtgctctgggtctcaggatagggacagcagcttttccaatggaagaaggcagggagcaagggacagagggaggaaggaaaggaaaggatgagggggagtgaaggggaggatgggaggagttctggacatggggagtttaagaacacaataggccaggggcctgtaatcccagcactttgggaggccaaggcaggaggaaggcttgagctcaggggttggagaccagcctggccaacatggtgaaaccccgtctcttctaaaaatacaaaaattagctgggcgtggtggtacatgcctgtagttccagctacttgggagcctgaggcatgagaatcgtttgagacccaggagctggaggttgcagtgagccagattgtccctgcacaac

SEQ ID NO: 180243 - DNA, 703 bp, Homo sapiens
gattttagcagactggaaaacacacaattctcatggtgtcaatgtttcaattttgacagcttttgccaacatggccatgcactgtccaaagggaccaggaaaatctgtcaacaacccagataaatgtgaactaggtaacagtccttatacactaggaacatagggactacacaatgtactagcagaaaataattctatttgcctttcagatatggactgaactgagtgtaaagaatatgtaacgcattatattctagccaagtaattagctttttaaaattataagttattaagttggtaaaaatatataccctgcaattcttatcttaaaaagtacagctgggcacagtggctcatgcctgtaatcccagcactttgggagactgaggcgggaggatcgcttgaggccaggagttggagaccagcgtactcaacatagtgagaccttgttataaagaaaaaaaaaatccaggattaaaagaaatctttgatttgtttgggatttattaatttaccgtattggaaattgaaacaatttagtaaaatgtagtcatttgaaaataataagcacattagcgttggtaacatgaataaaatattgttatgaaaaataactattttccgaaacaaaacactaaaaattagaaaagtggtattgtgtacacgttcagtaattaccgtggagggatcttagagtgaccgg

SEQ ID NO: 180244 - DNA, 338 bp, Homo sapiens
acgacggtttctctaaaagggtacagatctcctagaccatgcctgtaaccccagcactttgggaggcacagatggacaaacagcattgggaggccttagccctgctcctctctattccatcctgtagaggtcaggagtcaggagtcgctggcaggagacagcatgtcacccaggactctgccggtgcagaatatgaacaatgccatgttcttgcagaaaacgcttagcctgagtttcataggaggtaatcaccagacaactgcagaatgtagaacactgagcaggacaactgacctgtctccttcacatagtccatatcaccacaaatcacacaacaa

SEQ ID NO: 180245 - DNA, 426 bp, Homo sapiens
ggctgaggcaggagaatcgcttgaatctgggaggcagaggttgcagtgagctgagatcacaccactgcactccagcctgggcgacagaatgagactaagtccaaagacaagcaaacaaacaaaaaaacaaaacaacaacaataaaaaaattcaatagatgtggctaggcgtggtggctcacaactgtaatcccaaaactttgaggtgggagagaggattgcttgaagccaggagtctgagactagcctgggcaacacagtaagactccatctcttaaaataaaatttaaaattaaaaaaaaaaaaaaaaaaaaaatttagcccagcatggtattgcatgcctttagtcccagctactcaggaggctgagggagaagaatcgcttaagcccaggagttcaggttatagtgagccatgattgcaccac

SEQ ID NO: 180246 - DNA, 620 bp, Homo sapiens
agtcaggaaaatattgaccgagaaggcagtcattgacctgagtcttaaagaatgaataaggtttttacagatggagtagggtagggataactttccaggtataaggaagattttgtattccagggacctttgaatattttagaatggctagaaaacttggtattatgtagcacagaaaaagtggtatgactgaagagatagagaacttaccacaaagggtcttgaatgccatgatacatagtttggattttcttctgtagggagcaaggagttagtgaaggattttaaaagcaaaatgactcttgggaggtagattcaatgtgaggctaatctccgaggtataggaaatacaggaaggaggagcaacaggtcgggtagtggtggaagcaggtttggaaaatgtgattagttttgtaaacgtttttgagtttgaattgccactggggaaggcttttggaaatttatttccagagttgaagactgagctatcattgcagtttgctcagctatttactgagctatctactgtcaatttggatagtatctacagttttcattgtagatactggatacttggattggctggtgcaccctgtttgtgagactcactggagtttgaa

SEQ ID NO: 180247 - DNA, 374 bp, Homo sapiens
tgtgggagacatacatacctcagctacaaagaatggcactaaaggcagatttttaagcattctgtatactgttatgccagatacagagcttgtagtattgccactttaagtgtttaaaagcaaagcatgaggagaatgacaggactgagaataggaagagacaccgagagaaaaagagaggcagttaaatcccataaaaaataaagcccggaattgcagacatgacaagtcagccttgggcaacagcgagtgaccggtcaactggaggaggagggatttgtaactgtcctgatggaagattttataatgtgttgaagaaaaaatgatcagagatgacttatactttcataactgaccactcccttttgaatctt

SEQ ID NO: 180248 - DNA, 588 bp, Homo sapiens
accactgcagatttggctcttttgaaatgactgtgaattacctgtgaaaatgataactaaagggttaagatttcaaaaaaagagaaggttcaatgaaaaagagacttgcttcacatataagagaaacacaaacatggacaactgactatgttttctcatctttcaaaaaaagttggactaaaatatttttggcacaacagtaaccagcaacaaacaattggttctagtatgagaaaaaaactgtcgaaatcttcaaacaaaaactccattccaagaaaacacctaccacaccaggcagtagtcttcaaactgtttttgttgttgttgttgctttgagaaagggtctcgctctgctgtccaggctggagtgcagtggcatgatcatagcccactgcagccttgatctcctgggctcaaacgatcctcccacctcagccttctgagtagctgagatttcaggtgcccgccaccacgcctggctaatttttgtatttttagtagagacgaggttttactatgttggccagggtgatctcgaactcctgacctcaagtgatctgcccacctcagcttcccaaagtgctggga

SEQ ID NO: 180249 - DNA, 447 bp, Homo sapiens
ggacctccaaggcctctgggagccccagccttgtggctttgttggtctcagtccacctggctgctctcgcgagttggagttctgtgcctgtaacttccttaggctggtgttacatgctggtagctttacagttccggagtctttgtggcagctgtatcaccgcaatgagtctctgcctaccccccgccacctcccaccctgtcccgggctatttgtgacatcctttgaaatctagttggaagaagccatgttctcatggctcttgcattctgcacacttgcagaattagagcaccacgtggacaccaccaaggtttacagcctatatcttccggagcggtagcttgagctgcacctggactggccggagccacagctgtgctggctgaggaatgctaaggggagcagagacttgtggcagcacagggcaatgaatggtgacctcgag

SEQ ID NO: 180250 - DNA, 296 bp, Homo sapiens
gttcaatactcctcattttgtgattgagaaaagtggagcccagagaaattgcacgaactgcctacagcaagatgagttcattggtaaactgtgggctataacatatctgcattacccaacattgctcccaagtgacatccctcactaggtttcacaggacaagtgaatcagggagctgaggcatttctacggtgggatggggaggctgctaagcccagaagtttctaggtaatgagcaaaacaatgaacaaagacactgtgaccaagactctgggcaatttgctgtgaggaataca

SEQ ID NO: 180251 - DNA, 334 bp, Homo sapiens
aaatctcctattctactaaatctctattgcttctttaaaaacttgcacttttacctggtccacacctttacaatgataagatgtctctttcacttgaaatgctctctttttaaatttattttacaaatttgtttatctaggaagcttttctagtttttctctaatcattgtctcttttatgttacctctgttttttgaactgttgcatttgtcaacgtattgtcatgatatgtttacataccagtatccctattcacctggaaatctttgaaagtctggttctaagtaccattcttagcatggtacttagcataaaataagtgtaaataaattt

SEQ ID NO: 180252 - DNA, 328 bp, Homo sapiens
cctgagagtagcgggtgggaaaacggagaggttgaggaaaagtaactaatgggtactaagcttaatacccgggtgacaacataacctgtacaacaaatccccatgacacgagtttacctgtataacaaacctgcacgtgtactgctgaacttaaactaaaagttaacaaaaggccaggtgcagtgtttcacacacgtaatcccagcactttgggaggctgacatgggtggatcacctgaggtcaggagttcaagaccagcccgaccaactaaatacaaaaagttagctagatgtggtggcaggtaatcccagctcctctggaggccaa

SEQ ID NO: 180253 - DNA, 209 bp, Homo sapiens
cttttatatttttttgaattttttgctttgacttgagtaaatggcatcaccatggtaccattaggtgccatgttaattaggcagttggaaatacgagcttatagctcagggagaggtttggacgttgttctgggactctgaagatctggctttttatcctagctctgccatgcagctgttatctgtgacaagtcaatagtttatgctgt

SEQ ID NO: 180254 - DNA, 251 bp, Homo sapiens
cggattgctatcaaccaactattttgtttatttggaaagatggaatgtttcagggttttattgatgaggaagatgaagtgcgctgacagaggctgctcctcctaggcaccctagctcttaggactcagttctctgaagctcaccaagggcatctatcttaggaccatgtgagtaaacttcctttcaaccaactattttgtttatttggaaagatggaatgtttcagggtttactgatagaagatgaagtgc

SEQ ID NO: 180255 - DNA, 351 bp, Homo sapiens
ttttaaagttgtttttgttgagatggaagtcttgctgtgttgcccgggctggtgttgaactcctaaactcaagtgatcctcctgccttggcctcccaaagtgctgggattataggtatgagccactgtgcctggctttattgagcagattctgtcaagtattaagtatcagtttttgtgagagattaaaaaaaatctaaatcatgatttcttccctgaaagaatttagagtctccttggaaagggaggccacttgtgcattaaagtttaaggttgcggttcagaaggtcagagtcatggggtttgtgagactaatgacgagttaggctttgaggtgaagatgggatatcct

SEQ ID NO: 180256 - DNA, 295 bp, Homo sapiens
taattgttttcaaatgtagttagtctttaaaataaaaggataacctgaaaagtacttttgagatatttgttgggggctattttcaaacttaattggatatgagactaacagaaaaatcaagtatcacataggtacagagaacaaagtaggagagattgagtggaataaagaatgttaaaaatgaacaatcggagcaggctacatttagtttcacggtctcttccctgtaatgactgtgcactagcaagtccttcctgttctttgtcagcgttcttgatgtggcgatttgaaatgt

SEQ ID NO: 180257 - DNA, 570 bp, Homo sapiens
ctcagaagctcctcctccaaagttgtcacacttcagaatctgccaatcactgctgacaagtgtcagagccaggaccaggcatcagccagattgaaacacttttgatgaccctgagcagctcagggctgggctgtcttagagtgctctgtgagcacaaacctcccacaggaatatcctgtgagcacaaacctcccccatgggataggcactctcattgcctaaaggagtcatctgcagcaagaccagcagtggcacctgcatcttgggctatggttagatgtcatcctcactatcacttgcagaggttggtatgggtgtccccgttccatacatgaggaaactgaggctctgaccttacctggagttgctccactactaagtagcagagccagatacagagcccaggtccagctgacccacggccctagggtgctctcctctctgccttggacctgtgaagcagtactggattctaagggaggcagggcaatgccagtcctcactccagcagagaccgggatgtggcccaagaagagcgttaatatcacgcccagcctgcagtgtcttcct

SEQ ID NO: 180258 - DNA, 433 bp, Homo sapiens
aaatgtggcttatatacagtcaacccaaaaagtaattaggatgggtaaaatatggtatagctactcagcaataaaaaggatcaaacatcacaaaacgcagtagcatagatgaaccttaaaagcattacaccgagtgaaagaagctgttcaccaaagtacacagttcatatgaaaaatctagaaaactagagacaaaaagcagatcaagggttgtctggagctgagttaggcttgactaccaataggcccaagggaacttgggaggtggtggaagtattctaaaactggattgtgatgacagctcaacagctgtgtacgtttataaaaattatctaactgtacacttacagtgggtaaattgtgtggtatgtaaattaaatctcaatgaaccagtaagaaatatatagctattagggtctcttgaggaataccc

SEQ ID NO: 180259 - DNA, 169 bp, Homo sapiens
gtagagaacactcccatcttgttggagtggtttcttttttaaaaagcagacagctggcgggaaagggaaaccagaaaaacctgatctgttccttgtgttcagtgggctgtgtggaagattggagatgaggttttgtgtctggcagtaggccagaaggatagtgtaactt

SEQ ID NO: 180260 - DNA, 223 bp, Homo sapiens
ttcaagagatccttaaaaaaaactcacagagagatttaaaatagagttactgaacaaatactctaggcaaatatgaaaatcaataaaaagccagtatagtaaattattaccaaacaaaatagaattgaaggcaaaatgtcagaaataaagagctacactgcataagagcaaagggaaattatctagcaataaagtatgaaaatcatgaaattgcatgcacctc

SEQ ID NO: 180261 - DNA, 152 bp, Homo sapiens
ggtcagtcttgaggtttgatcatgctccatgagaggacttagttgtctctttccttggttctctctggcaaactagtgtgactacagttcagcttattggtctcatgaagctatgaggttactcttattaataactgcttaaccaaaacctc

SEQ ID NO: 180262 - DNA, 246 bp, Homo sapiens
tattgaaatgtaagggttttcatggcctgaaaaaacaaaatatgcattacaactttcctgctgtgtgtgtttatttcagttctgaagctagcctgaaataacctctactttataaggaaattgatgctgagttgtcattatgcccaacatttataatacatatacagctaatttgaatgttataagtatagaaaaaatatcaggtaagtctgtattcaaataggaatatcaaagtaaaataaccag

SEQ ID NO: 180263 - DNA, 403 bp, Homo sapiens
gcccttgataatgtggtcaagatgctgggttcaccctccctggaacctgccctgctcctgagcttccttttctgtgagataacaaattcctacaatgtttgagccaaattttggttacttcagccagaagcacctcactgacacaggccctgtgctctgggggagttactgagcctccattaataatgttgatattagccaggtgtggtggctcacgcctgtaatcccagcactttgggaggccgaggcaggcagatcactagagctcaggagttcgagaccagcctggccaacatggcatctcaaaaaaaaaaaggaaaatgaaattctccttcactatggttggcaagtgtatcttggagcagtgtagccattagcagatgggatatactctcaagatcag

SEQ ID NO: 180264 - DNA, 229 bp, Homo sapiens
gcctacaatttggaccatatactctgggtatttgggcattgaaaactccaatcataacgcagcaattccatttttgttagtactttttacactattctttattcatggttggactgaaactatgtatctattaaattcttctattaatttcatacttgaaactcgttgaacctgaaattcattatagcaaatattattaaactaagttaaagtgttcctggttaacttt

SEQ ID NO: 180265 - DNA, 248 bp, Homo sapiens
cttaatacactcaaaaaaaaaataaaggactggagcaatgctgatttaatctaaaaagctcctgtcatgatcatcttaaaagctatcagaatagcttacataccaaaatactgggtgtaaaagtgttatactctctatctgtccctctagttaaacacattctctctggctagttacagtgaaaagaaatgagatgcatgcactgctgttcatctcctgcggtccccacctgatacttttcaaacaat

SEQ ID NO: 180266 - DNA, 556 bp, Homo sapiens
acggtgatgcaaagatcttaaagcaagctttgatgaacaagatgttagttttgatatttaagctgttttagttggttcatgatcttactttctagggattgtagagctagattttcctaagacaacaaagctgctgtctaattttgatctctggcatcttcaacatctcacaccctctcttcttccctcccctcttctctctcatttttttttttttcgcaagatagtagtactatcactgtagagccttggatctaattaaattcagatccagttaagcgggtttgggatagggcctgagaaactgctattctaacaagctcccaggtgaggcccttgctgcctgtggatggcctgcactttgaagagcagaagtctatctacagcatcatatttgttgagcagcagtcctttgtgccatcttcatctcttctttgtcttctaattcagattgcagatcttgggctctgaattaagcatcctcatattccaaacttgaacttagtctttgaataaatatgtcattatctgcatccctgattcccactgggcataa

SEQ ID NO: 180267 - DNA, 335 bp, Homo sapiens
ttctactctcagggagctgagctcaatatattgttgagtaacacttccaaatcatagtgtccatctttacattatcctaagcatgcttgctagtccttgctaattctagtccactctttctcccattaacatcaaaagccatttaaaccctaactgtttcccataaaatcctacttctttttctcgacactttcttggcatactccctcacccacttactgctaaaaagtgattttggaaataggaaaaaattttacctcttccaggaaacagacattcaaaaataacttgccaactctctgctctttttttctaaccctgtgtactcccatata

SEQ ID NO: 180268 - DNA, 179 bp, Homo sapiens
gtgatctgttcctaactgttttacatctgtaacatttctcaaatttgcctattttccaccatttctcctatcccttaattcaggctgcttctcacctagatgactgctgcaggttcccttgttgtctactcattattagtttctcattccaagtcattgattagatggctgccaaaagt

SEQ ID NO: 180269 - DNA, 716 bp, Homo sapiens
gcctgggtttaatctcttaaagaagccaatcctttccttgcctgtttggcatttcctaaaacatccctcaatgagggaggaaggcagggacaccctggaacgattcgtgctttcctttgggggagtgggaaggtaggtgggaaatgacaagatgagtgaggagttggcacttggccaaacagaggagcctggaccccaaggcttattctcagaggaggcccaagagaggctgaggaagagggggaacaaccctccggcgggggaggagggtgagacctcacactggcaagttcaggtccagccacttcctgaggctgctgggtggggccgcacctcacggtccttccctgtagaccatcttcccgggcacattgctcctcagaaaaggctctgggagggtctcagtggaagctggcagctgtgccctctggccctgacttggcctcttagggtattcctgggaccctccctctgtccctggccttcgtcttcctgaagtttccctgggaggcccaacctcctgcccctctcagggacagaggccagcagaggagccagcttacaggatgggagctgctgaaaagaatttttttcccttaattttatgaacctctccctcttcttcctctaattgtgaccgtttcctgtgtcagcctgtattcatgttttcttggacatctaacaattgaaacagcttttccctttcagaaacactc

SEQ ID NO: 180270 - DNA, 786 bp, Homo sapiens
actttctgtaatttgcaaatgatataacaataaagacagtaagtagtgtagggaactcaaacacaggctatctgcctctaaatcccaagctcatgctccaatcccacgctgcctcaggtcagttgagcaagttgacaagggcttgaagaactgaaaggaatggtaagaataaagtaaagtaggaagagcttcaaaggtcagaaaaaacataaatttgttaaagtaaacacagagcaaggtagagtttaaggcctgccgcaagaataggaagagaataagcatacagtggcaaagtcttaggaaattaatattcttataaagtagttggttaatttttcaaagatactatatttcatacaattttagaatttcagcatcttagtgtgggaatggaccttcctatccaggtagccccacttccaggggtagggagcacaggacttagaagggcagccagtaattactgttactcaactctaatcagaaaattcttctcacttctctagtcatttctaccccacagcctcaggtctatcctcataaggaacatctacgacttcttttctgcaaaagacctttcagattttctgcaatgtccctaagtttcttcttcaaatcgagatccccaattttaaaaagtattgttcataagccctaggatccaagctattgactgtgcattgtaaacctgggtgtgttatcagaactcaattagatattttactcccacatcaaagcaggtacatagtcacctctgtacactctaactttaggagtcctcttagt

SEQ ID NO: 180271 - DNA, 631 bp, Homo sapiens
ttagatgcctttaacctctcactcactccaaatactaggttttataaattccactaccagtaacctaaagattcctgtattttaagggggcccaatgtttccagaaatccatggagtacaagcaatctatgatcagaaacaacactaaggctgacagaggcttcagcagttatatctgtggcttcagcccagtgaaatccattcaactctgcagaaaagaaaaatcctgcaaattgtgctcctgttgtctctattttagctgtttggttattcttaaaaaaaaaaaaagatattaatccaatctcgggggtttttaaatttagtttattctactattttaaatttccagataacattaaaggtattatagcactcccccacccccacaaaaaaagagttagtataaatacatgtacaaggggccaggcgcaggggctcatgcctgtaatctcagcacttggggaagtcgaagtgggaggaggatggcttgaagccaggagttgaagaccaaccttggcaacacagcaagaccccaactctacaaaaaaaattttaaaagttgtcatgtgtggcgtcatatgcctatagtcctggctacttggaaagctaaggtgggagaattgcctgatcc

SEQ ID NO: 180272 - DNA, 870 bp, Homo sapiens
tgtcactctgtcccgggacgctgtgatccacggcggtgggggagggggaagggggagggacaagcatggctcgggtgaagttttaaactctgttcttctctcttgcctttctttggggacattctcccctttgggatctgtcctggacttcgcaggctgcgagaacttgttgacaagtgaaagctcggtagagccccggcttggtttgtggtctgcttattttttgcaaagtgactgttcctgtttgcgctggtccttatcggtgcccctttgggggacttcggcactgatcagcgcgctgacagccgccgtccgggctgcgggaaaatggggcgcgccctccggggggcgagtggctgtgtccttgctaatttcctccgtaacctttaaactctcgctggaagctaccgccgcggctggtcacgtgaggcgagccctgggctgctggggaaaaatttcctcggctgggagccgggaccgggccggcggccggcgagggactgccccgcgcccgagactgggaacctgggagggcagggccggagcgctgggccccggggcgcggcccagctgggacacccgcgaagacggcggcggtgaagaggtcggctccgctgccggggagctggggattatgcaaatggggaaagaaaacctccgccctcgcccttctgccaagtcaagtctgggaatttgtaggtattgtggtaagctgagtgttcatctggcgggtctggttagtgtaaaccaaaatttaaaacgcgcctcccgatcactttttcctcagtgggtaaaggttatcattgcctgcggcttaaaagcctaaaaaggcttaaaggcgaggaaggaggcagtcccctggaaaaacag

SEQ ID NO: 180273 - DNA, 432 bp, Homo sapiens
ttaaaccagtatatgcaaaatattactattttgacacaattgttatgacatataaaaattattagtgagatatgttatactctttttttcatactgcctccaaaatccagtgtgtattttaacatagcacacctcaatttgaaccaaccacatttcaagtagtcagtagccacatgggtgagtggctgctatgtcagacgatgttgctctagagcttacagactataaataatgatttattataaaacgtgcttaaattctttgtagattctggatgttagccctttgtcagaaggatagattgcaaaaatttgtaacaaaacttcatgttctacacatgcaccccagaacttaaagtaaaataaataagtaaataaataaataaataaacatgctaactatgcctaataaatgtctaatttatgcagctca

SEQ ID NO: 180274 - DNA, 792 bp, Homo sapiens
aagcctgcagttttcccctttccgtcagagcatattgtgttatgcgtttcctctgattccatcattttttatccttttgtttatttgccctcatttttctcctcttttatcttctgcaaagccaccttgcttccttccatttattcctgaaggccacgtaacctctgatggtgcctgcatgcccagcaggaaaatatggatgataatgtgtcctgcttgctttgtgttcacaaaagactaaaagcctctagatatttcagtattttatccttgttattattgttattctaacttgtccccatcattatgtattgtgaaattgatacctttttctgtactagaaggtcatgtggaccttaaacagtaggaaagatctagcttgaacccagtataggggaggcttcagaccaaccacaagccataggtagaaatggaaagtgtaaatcagatttccaataagtatcccaggactgggagaattttagttcaattgctcacatttttttttcatctgtagtttgtaaaataatcactggcatttagcatattgaccaaagaactttaaaagaaaaaaaagcatcattctgagaatgcaaacaattaaaatttaatttattgctggtgggagtataaatcgaaacagttaagaagactgttttgcattatctactgaagtcaaacatatgcataccctatgaccaacagttctactcctaggtatacatcaacagaaatatgaaccataataaatacagaatattacttatggcagcactattcaaaatagccaaa

SEQ ID NO: 180275 - DNA, 183 bp, Homo sapiens
tgagttctctataatcgaccttccatcccgttgatgtgtgtgtgtgtgtgtgtgtgtgtgtgtgtttgagaatgcatgtgtgtgttgtatgtgattgtgtgcatgtgaccgtgtgtgtgtgtgtgagaatgcatgtgtgtgttgtatgggatcatgtgcatgtgactgtgtgtgggtttgtgt

SEQ ID NO: 180276 - DNA, 737 bp, Homo sapiens
gcacctcctcgccagcagccgtccggagccagccaacgagcggtgagctgcgcggggcgcggggtgacgcggctccggccgggcaggggagagggcgcccgggcgctgcttgtgggcgcggtccggagagggttcggctccccgggaccgggccggggcgcgcgcggagagccccacagcctgtgctctgccctccaggagcggggcggcgggcagcgatctgggcccggggcagtcgcctttgattatcgagggcgctggcgttcggggaaggttggcagcaccttacgagacccacacacgtccccggggcggcacgggccaccttctgcggagcctcgtgggcttcgccgccgtcgcacctccgccgcctgcgctctgcggccccagagtaagccccatccggtgacgagccgcagtctggtcaccccagtcccaccaggtcccgctgcgaggtggaggcggaggggctcgctcagcaaaccagacggccgctccagtttctctaattggggttggagccccgtcacccttccccagatcacggccgcgggggagcgaagggacttcccaggactgcatagggcgcctcccgggacccacagcttggctggcccggccccttttgagcatcagctgaggctggacttggaggagatctcgctgtgtagcgcgaatgagttcttccaccgggaccagctgcggccgggctgcagccgctgtctggttgctgatcc

SEQ ID NO: 180277 - DNA, 634 bp, Homo sapiens
gaaaaaaaatacatgttgcatacaatggaaaaaatgataaatatgacagcaggttcttgcaggaaacagtgcaaacaagagcacattagagcaacatttaaaagtacttttaaaaaaatgtcaacatcaaattctatacccagaaaaaaaaactttaaaagccaaaatcaaggtagagattttcagacatatagaagcagaaaaacataattaccaggagtccacactagtagaaatgttaaaggaagtctttcataaagaaggaaaattataccagatggaaatatacataaactaatggcatgcaccaaaacataacctaatgggtaaatatataatattttttattatataagtcattttaaatgtaaatgcctctttaaaggaagtaatgacattcactttaggggttttaacaaatatatataagtaaaatgtataagaaatattgcattaagggaaaaatgaaggtattttgttgtatggtttttatcctatatgtgaactgatgtaatatcagttgaagataggctgtgataagctaaagctgtataatagtaaccttaaagcaaccactaaaataacaagattgtaacaaatagatgaacaaaggggatgatactggtttttttaa

SEQ ID NO: 180278 - DNA, 707 bp, Homo sapiens
ccaggcctcctcttcctttcctgctcttttttcagacttaaaaacccctctgctctcccaggcaatgtggccattcccagatcttcctcccaggcctccttggaatttccctcagcttgcggattgcagttctcactcagcaggcaaaaccacagcagagctcagcaaacagctgcactgtgatggcctgtgggttcttacacctgcccggggaatccctctcgcttcatcccatcacacctaaagaaaaggagagctgcaggaggtctgacggtgggtgcatggggcccagctgggcagtctgcccaagctcctgcccatgctggcctttgttcctggggcatttccaaagctcagggcttgggcctttgtccattctcaggatccggtaaatgatgcctgaccacccaaaacccagcaatctttcctgcctccaaacaaagaggccttttgatttttcttactctcttggcccttacatgagtgccaaaatgtcttgggtaataaaaagaagattatcaggaaacactcacagagcacttactatgttccaggtactattttaaacattatagttattaactcattgaatcccaggagttgagaggcactgtgtgtgtgtgtgtgtgtgtatgtgagtgtatatgagtgtgtgtatgtgagtgcgtgagagtgtttgtgtgcatcagtgtgtgagtgtgagtgtg

SEQ ID NO: 180279 - DNA, 288 bp, Homo sapiens
caaatctatagagataggaaatagatgagtggttgcctagggctgggagtaggaatggaggttgattgtaaatgggcacaaagtttgattttagtttgatgggaatgctctaaaatgggactgtggcgatggcgggataactctgtaatagactaaaactcattgaattcttgctcaaaataggtgaattcatggtgtggaaattgtttctcaatgaacatattctttttattttgttttgctttttgaggcggagtcttgctctgtctagagacggggttttaccat

SEQ ID NO: 180280 - DNA, 498 bp, Homo sapiens
gcaggtcaggctatggcagttttcatgggtctcagtcactcagtttaacacaattaggttcatggtggcactatttactattttgggttgggaggaaatgtacttatcccaccttttctagtcaggagagtttgtcattccatggtaaaataaataaataaataataatcctaaattgtcaatggcttaacataacagtttagttttcaaagaactgcactttgaggtagccaccaaatctgaacagggccacatggacaagcacagtggatgtttcagtgattacctatctggacctatgactgaggaccagatattcttttcctctctgtgcctcatcaccacttaagtctcagaggtcagaaatgcaatggaaatctcaattagggaccaaaggactcacagagtgagaaatgatggcattgtggaaaatacagtcttgaacaagggcatttgtggaccaagatttatattttcacacaatgcaggggaagttaa

SEQ ID NO: 180281 - DNA, 662 bp, Homo sapiens
  misc_feature (631)..(631): n is a, c, g, or t
aagcctgatccgtgaacaggtcatgaggtcatgaaaccacagggagctagaggcaatgagaggatggtacagagtgctgtgggcacagcacctgctggagaggaagggaggatgtcactaagagatgacagcgggactggaggtggccaggtaaggaacacagcatatgcaaaggctgcaagggaaggagccagagaaaagggagaagagggacacaatgggtgacaagaaggggtcgaggatcagcagcctggtcagcagcgctaaaggagcgagagtcagagaccgctctgaaccgccaggcttctgtagcctgctgtgtcctgcagggtacagctgcttttgggtgtcctgtggtttaaaaagctgtggaggttgtcgccatttacgatgcgccatgtccctgcatgagtgtggttggcttccgctcatgcctctatctgccacttttctccactctctgtaactaatacgtgtgggacaaagaataggcatttaactcgaatttgttggctggttacaggggctgtggtgacaaaatttcacaaatgcccacaccaagctcttgcaaaagaggtcctcgtgtcttacatgtggcggctactgcagatgacagcagaccacatggcangatgggggcagcaggctggtttgggaaaaag

SEQ ID NO: 180282 - DNA, 393 bp, Homo sapiens
gccattcacagttatctaggggtagcctcatctctcaggcagcaacatatcatcactattatttcaaagagacatattctgaaaaaaaattacatagaggtgccatatgacactgaaagcagtttgtttgtaaggcatattcagcctggtgaagcctcttgtcattttgctacctaaggattagggccaaagcactaaaagaatcaccttttttctttctattccagaattgttcagagtcccacagcataatcctaattctataagcaatccagagacctccagaattgtaatatagtagaaaatgtacccactgctacatatgtttcactctcttcttgttcaatattcatacttaggaagagagagcttatttctatcagtagagaaaaa

SEQ ID NO: 180283 - DNA, 325 bp, Homo sapiens
gtccaacatcggttgccttggaaacaggtgcagaaaaggttttctctcttatctgattttttaaaaattttaccaaagcagtgatgagtttttcctgttatcacggaatttgggaataatagtacattttatgtagtgaagcatatttctagtttttcattatttgataaataaatgcattctacattatttcattttacaatatttatttaataaataaatacgtttctatccatttgatcaaatcactatcacttggtattcaaagatgaaatgcttagcgtctgggtctagaaatatgactggagaaaaaatgtgtatggcc

SEQ ID NO: 180284 - DNA, 518 bp, Homo sapiens
gagggcaacggcagtgggcccttcctcccagaactgctaaaacatcgccctgcggaaagggcccctcgcagcccaagacgccggggaagcgctggaggcgccgaagactcggtcgggggtctcgggcgcagccccaggacctgcggaacccggcccggtgcgcagacgcgcacactccagcaggtggcgctgcctcccctggaacgagtcggctcccgcaggcggcgcccggggcgggagggaggcaaagggagggaccggagagcagggcgcctccctctgccccgccggcccaggcgtccgatgcggcccctgcgagccccctccccgggagttctcattgcctccccctgcccccgctcccggccgctccgatgcctgtggcaaccgggatcccgcgcccgcctcacctgggtgcgggggtgcagggtgacctttcacgccgggccaacgccagtacccccttctcagcacacctgggtccccgagcgggccaggtggttccgtgggggcggccg

SEQ ID NO: 180285 - DNA, 397 bp, Homo sapiens
caacttcccacacactcctgctgtgtattgctaataaaaattctatataaccaaggctataaaaatagtgacatttttgctatcttttttttttcctttttgaaacaggttctccatctaccacccaggctggatttgaaaagtaattgttcttggggaatgagacattgggacaggacagcaggaaagcattgtttcttgttcaagtcctgtcggctatataccgtgtgcatgtacaactgataaaaataaaagcctaaattttctctttttttttttttttttgagacaccaggctggagtgcagtggtgcaatcatggttcacttcaacctcggcctccagagttcaagtgattcccatgcctcagcctccgaagtagctgggattaaaggcat

SEQ ID NO: 180286 - DNA, 547 bp, Homo sapiens
catgtatttaccacaaattaatttattgaataattaagaaattagaatcatttgatgatggagagatgtatatttcagatatgtattggatgcataacaatccatcccaaaatttagttgcttaaaaccacgatggtttatataggtttgcttgatcattcctctgttggttcccctgaactcatgtggatgcatttggctgaattattggcttggctgggcagtccaagatggcttcattaataaggcagttcgtgttgatgcttggctagagtcccttggatctttttcaggtggcctttcgtttacatgacagtagtggagtaacattccaagaaagtaaaagctgagctgcaaggcccgattggggctagccttggatgtcactaaacatcccttctgccatattctgttggtcaaagcacataagagccagcccaaatgtgtgaaatacatttatctctagatggaagcaggtgcatggtacttgtggccatattcaacaaatcataatgcagcaccgtatttctttaaaaaagaagaagaa

SEQ ID NO: 180287 - DNA, 326 bp, Homo sapiens
gggtgatgtataccctaaaatccctgacatcactactgcacaatttctgcatgtaacaaaattatacttgtatgccatacatttatacaagtaaaaaggaaagtcaggctgagtgtgggctccttcctgttccctatgtctcttccccccaccctcactggcttctcctggaagcaattgatcactacatcacttgcaactgaaatcttggctcaggagaaccttatctaataaaacagtagatttaaacaacaaagtaaggttagcaggacacagtaggtgtgttatcaaaagacccatgcttgcagctctgccgcgtaacagct

SEQ ID NO: 180288 - DNA, 603 bp, Homo sapiens
caaaaaaaaaaaaaaaaaaaaaaagcaagtacatctaggctacttaatatagtattttgcccatagtaggtgcttagttcaatgtagttactgttattatcattttagtattattattctcagtgtttgtcttcttaactactgtatcctcagtgctgtcacagtgcctagcatctacttggtgttcaataaatatttgttgaataaatgtattcatctggcctttaaaatcctggcattagtaagatcataatgttgcataagatatggtgcttactaataagaagaagattccctgataaatagaagcatcttgccttttagaataagtaataggagctcctactgctgtaggagcagtgtgatacagtataaaggatagtaaaccaatgtttgaagctgggtgaccttgagagagttgcttaaaacctctctcagcgttaggtttttttttttcctttccttttaatctgagcaaaggacaggccagctgatttttcacatattttccagttccaaaaatgtgtaatcgtctgaaaattgagctttgtaggtctataaactatttctatttccatgctttaaaaagaatccaggagtggt

SEQ ID NO: 180289 - DNA, 231 bp, Homo sapiens
tattcacggttttgctgcccaatggtccctgaagaatcagatccatttaaatgagaagagatcaggattcattaatgctgaatttccagctgcgtcctctgactgatgatgtttatctttatgtttttaatcatactttcctcccagagctaaaatagaagtcagagaactgggggcctgctggaaacatctaaatctttcccaaacttcacagccatctttacaatgtgc

SEQ ID NO: 180290 - DNA, 253 bp, Homo sapiens
ttcctatcataagtatctttatctgtgatagggaacgggaatgtctgcctgatgtagtctagaatcctgtgaattcaaacagatactttgttcgttcacactcccgcagcttatgtctagcgtgttatgctataacgaatagggttctaacattaaacttattttttgagaaatcttcaggaaaaaataccatcttatgaataggtatagtatatataaatttcatggcccggcgcagtggctcatgcctgta

SEQ ID NO: 180291 - DNA, 564 bp, Homo sapiens
gctaggaaagaagggggacgccactccttctgttggattcagagataccagtctcttctagtatcccacccacctttgtcagtttcttttcagtttcccctgttagctcttctttctgcttctgtccttcagccgtcttttatgactctgtgttatgatggtaggagaagtaaaccatttccgtggcttcatttacctgtagtttgacacctttaaatactttatctccagtctcagtctcttttctgaattttccttctccatttccaatttcctgttgcatatcttctcttggatcatccacagtcatttcaagcttaatgtatttatcatggaatttattaggcttgtgttaacttgttctgttttgggtaatggcactattagccatctaatggcccagactagacatttcttctctttttctcaaacccactatatccatttgcttatctaattctattgattatgtttcagattctcattatttctccctttagcaaccaaaatgatttaatactttctagtcaatgtcatctcttaatttatctccatattggcaca

SEQ ID NO: 180292 - DNA, 713 bp, Homo sapiens
actcagaggatcccctcgaatcgacggttctcttcaatttcaaaggtagttttgccaggtatagaattattggttgacagtttcttcagcactttgaatatgccatttcattgccttttgtcctccagtgttgtgtgtggttgctttgtttttagacagggtcttgctctgttacccaggctggagtgaaaacctgtcttgaaaaatgaacagtaagaaaacaaaatgtttgtggccagatgcagtggtgcatacctataatcccagtaccttgggaggcttgaggctcaagaattgcttgaagccaggagttggataccagcactggcaatagagtaaaaccctgtctctacaaaaaatttaaaactaactgggcatgcccgtctgggatgtgaggagcgcctctgcccggccgccaccccatctgggaggtgtacccaacagctcattgagaacgggccatgatgacaatggcggttttgttgaatagaaaagggggaaatgtgggaaaaagatacagaaatcagattgttgctgtgtctgtgtagaaagaagtagacatagaagactccattttgttctgtactaagaaaaattcttctgccttgggatgctgttgatctatgaccttacccccaacccagtgctctctgaaacatgtgctgtgtccactcagggttgaatggattaagggcggtgcaagatgtgctttg

SEQ ID NO: 180293 - DNA, 805 bp, Homo sapiens
cacaacaaaagaagaaggcccaaacttaagtgggagtatgtttccctccctccaattccaatagggataaatattataccaaacatctactgtaaagggtattgaagtaaaatatattcttttctagataagccaaatctatcacattttcaagtggtttctgaaacaactttggatttccctctaccattctttaattcattttttctgttataaaaagagaccttaatactagtaagaaactagattgtctactattaacatcaactctactatttgtagtacattttcaaatggtgtgactgacattgcaattgcttggttctgttcacacaaatttgcattatttcattactagaagaaaacaggctaaaattttctcagagtcacagttactttctgataagtttctagaaagtttcttcaaattctaaaataatggcttgtattgcctacccaacaacaactactgagtgtttgaatcagagataagatatttaaaaatgtttctaagtataaaatttcatctcctttctcaatgctgcaataagatagcaatgtcaggtcaaaagtatgatattcctgtctcctagttactatctattttagcatgcagttaccatgctcagactggagagaaaaaaaaaaataaagataaatagacataaaaaccagccaggcacgatggctcacctgtaatcccaacactttgggaggccgtggtgggtggatcacctgaggtcaggagttcgagaccagcctggccaacatggcgaaaccctgcctcaactaaaaatacaaaaat

SEQ ID NO: 180294 - DNA, 499 bp, Homo sapiens
agccccaccagtgtgctccatccccacctgtgtgctcatccccacctgtgtgctccatccccacctgtgtgctcatccccacctgtgtgctccatccccacctgtgtgctccatccccacctgtgtgctccatccccacctgtgtgctcatccccacctgtgtgctcctcaaagtctgagcaagaccaggcagaaaatgagggcgaggactcggctgtgttgatggagagactgtgcaagtacatctacgccaaggaccgcacagaccggatccgcacatgtgccatcctctgccacatctaccaccatgctctgcactcgcgctggtaccaggcccgcgacctcatgctcatgagccacttgcaggacaacattcagcatgcagacccgccagtgcagatcctttacaaccgcaccatggtgcagctgggcatctgtgccttccgccaaggcctgaccaagacgcacacaacgcctgctgacatccagtcgagtggcc

SEQ ID NO: 180295 - DNA, 690 bp, Homo sapiens
  misc_feature (1)..(1): n is a, c, g, or t
nggctggtacggcccggggtactgtggatgagagagtattctggcacacgagagtgagaacctgcgcaagcgctgacctgccactgcgtgtccgtggctgcatcctaactctggtggaacgaatggatgaagaatttaccaaaataatgcaaaatactgaccctcactcccaagagtacgtggagcacttgaaggatgaggcccaggtgtgtgccatcatcgagcgtgtgcagcgctacctggaggagaagggcactaccgaggaggtctgccgcatctacctgctgcgcatcctgcacacctactacaagtttgattacaaggcccatcagcgacagctgaccccgcctgagggctcctcaaagtctgagcaagaccaggcagaaaatgagggcgaggactcggctgtgttgatggagagactgtgcaagtacatctacgccaaggaccgcacagaccggatccgcacatgtgccatcctctgccacatctaccaccatgctctgcactcgcgctggtaccaggcccgcgacctcatgctcatgagccacttgcaggacaacattcagcatgcagacccgccagtgcagatcctttacaaccgcaccatggtgcagctgggcatctgtgccttccgccaaggcctgaccaagacgcacacaacgcctgctgacatccagtcgagtggcc

SEQ ID NO: 180296 - DNA, 432 bp, Homo sapiens
acacagtgagactccatctcaaaaaagaaaaaaaaaaaaagaataaagttgggaatatgcccaggccccaggcccccacctgtttcctgtctccccctcaggtggagacctgaggtggagccaagagtcccagtccatcctaccaccctggcctcctccctgtgtccccagagatggggaggtgacttgctccaccctttcccacccttggagtgctacacttggaggctctgggtccactggggactcagaaaattccaggttcacacaagccagacttctgtgctacagagggagaaggggcagggcactctgctctttcccactccctgaaggcgctacttctaggctgggaaagcagtgctttgggaagagctcaggggggcaagggctgcatcataaaaaggcagatgtgaaagatgtcagcgtggg

SEQ ID NO: 180297 - DNA, 330 bp, Homo sapiens
actctgtctcaaaagacaaaatacaaaaattagccaggcatggtgacaggcatctgtagtcccagctgcttgggaggctgaggcaggagaatggcttgaacctgagaagcagaggttgcaatcagctgagataacaccattgcgctccagcctgggcaacagagccagactccgtctcaaaaaatatatatatatatggggaaactgagtcacaggaggaccaggagtgaaacggagaggaaggagaagtgtatgcagggcagcacccccacaggcaaaagtgtgcagacttgggatctgcagcaagctcacccctctgtaaactgaatt

SEQ ID NO: 180298 - DNA, 242 bp, Homo sapiens
gataaaataacttgcaaatgatgacagatgtctttaccctatattcttttctatctggaatcaaagcttgtttggagacctgtatcatcatcccagtacaaacctcttgccctcccagcatggctgccataaataatgactcatgtgcaaagaaccaaccccccccccccccgtttaaatgggaaaagggggggattctttaaaggcggccctggggcaaccaagcttgggcctgggcgggg

SEQ ID NO: 180299 - DNA, 593 bp, Homo sapiens
cctgcatatgcctcattttatgtaattaaaagtttcctgataattatactcccagtttccaataaattcttccaccacacacacacacaacacacacacacatgcatgaagtagaagaaaagcttttagagatcatttactgagcttattgacacaaatgagagttttaagaagcacaagcaaacaattttagcatattttggccaactttatatatattaatatttcccatttccttgtcacgtgcatgaagcccacatcatgtctttttccacagggtataaggccctatgctcaatagcttgaattagtcacagaatgtctttctgttggcaacttttggattaacatccacaaattaaaatcagctcaacctcaaactaaagtatctggttatcattaataacttcgccactggacagaatgataaaaaataaaaagagaaaactcattaatttattatgatctcaaactaaatgtttttctcttatgtattttaaagatctgagaagcaaaattacaatttgagtttattagtaactatctgagtccactttctgttgcttataacagaatacctgaaactggttaat

SEQ ID NO: 180300 - DNA, 601 bp, Homo sapiens
tctataacagatgtatgcacacggcaaagaaaaaatacctaatacagccagtgaaggcattataaagacttcctataggaacttactctttggagtcttgaataatgaatgcaacagataacacagcaaagaaagaaagactagggtagtaacaataataagggcaagcagttatgacagactaaagctttaattccatttttcagtgtggctgaagagtagcacagatgtgaggaagtatgtgaagatgagaaaagaaggcaagaactggattatatgaagtgctttatttgccattttcattctatcaatgaagagaagcactacgaccagagtgggattttagaaagatcactctgtcaacagcacagaagcttaactaaaggaaataaggttgaatactgaaaaactgagtaggtaggctcttccagtaatccaaactgagacttaagcaatggtagtgttataaaaagttaagagaaagatttaagagaaatttgcttatgtacattgtaaagaatgcagactttagaaagtttaagacctaaattcaaatcccctagtcactgtctatgagctttgcaacttagaacaaatcatt

SEQ ID NO: 180301 - DNA, 447 bp, Homo sapiens
tatgtgaggagtcattatattcatctatttatatgctggttttgcagaataaaattctaaaaataaactactttacaagttcatttaacaaatctgagccattatcatagaccaggctctgtattaaatgttaacagaaataattgtaaagaagaaatgagtgatgttaaagtgagaatgttgctataatgagataagaaaacaaaacatagtaaagatgcagttttgtttaagctaattatcctatctgacaaaaagaatgatacagcaggtgttcagatgtacccacatgtgcacacacataggtacccatatatgcccacacataagaaccatagaagaaagacctaaatacatgagagagacacttagataacaagaaaataagtatatgtgggtcttccactgttgtaggcagcttccaagatggctcccagtgaatctgcc

SEQ ID NO: 180302 - DNA, 192 bp, Homo sapiens
gattgagtccaggaaattctagacaaactggggaaacatagtgagacctcctctctatgaaatataaacaaaaattagctaggtgtggtggcacacacttatagtcccaggtactcagggggctggtacaggagaattgcttgagccccagaggttgaggctgcagtgagctacgactgcaccagtgtactc

SEQ ID NO: 180303 - DNA, 718 bp, Homo sapiens
gcatctgtggatggaggaccatctgtgagcagggctccaggctgtgcatagacagggaggagttgtcacacttcactccactgaactgctcgtcacacatgcctgagtcgatggctcagaaaaccaacccagaaagaagagcaagaggaatcaattccaatttgttagagccttctgggtgtgataaagccaacccctgccatctccactgtcttcctgtttccccttctctaagaagtgaaagcaccattcaattaaggtaattaaattcacccgaagatcttgggctcaaaaaccacactaccggcaagtggtcaaacccagcaacaaagcaaaccccagtggcttcctgtggaaagatgggcagggatgaggaggaaaatggaacatatcttcagcagctcaggggtgcaccttgggcctgcaggggagcccccagctctgcagagcccagctgcctgagcctcccgcagcaccagagccctccccaaacaggaaggactcatgtttacaggctgaatcaaaagtttcacttctgtggatgtctgggagaactcagctgagaagatccttattacatgacgtgaaagtgaaatgaaaccctcgttttctcccccagagacaccaattctcccatgaactccagcccatgagccataagcggggctggcaacacctcccaggacacgcctaaggaagcctgaatccacaggccaga

SEQ ID NO: 180304 - DNA, 189 bp, Homo sapiens
aaggaaaattattgtgttcaattctgcatattatttttagacagaagttgctatattgtgacaaagacacaagaagtaaacaagttgacaagcagtccataaactactgctacctgaagaattgggatgtctggcctgaagaagcacgggggtgtgtgtgtgtgtgtgtgtgtgtgtgtgtgtgtgtgt

SEQ ID NO: 180305 - DNA, 457 bp, Homo sapiens
aacttatcctcccttaaagtcactactccttgttctgaatggatttcaaagacatcagagtgatttttgaggaaagtactaaaccttgatagatttaacatgtgggggacatcatttaggagatatgatagaacctgtcactacttctaaagattgctcttgtgaaataatgaaaaagctattatgatactaaacactcttccatcgagtgaacagatacatgtattggcctcctttaatggtgtattctcacagaaaagtgaaaaggctagacattttatattctttttctggaaccttttactcttcttttttctgttttaattcacaaatttgtatattaatatatattacatatatatttttgatgcatttgtaaattataaaattatttccaaatatccatacaaaagatactttttaaataaagcttttggcaagaaaccaacaccaaagt

SEQ ID NO: 180306 - DNA, 743 bp, Homo sapiens
gaatgcaagtacattctgaaatgctattcaactaccattcaaggctttgaacaggcagctattgccataactcattcagaaaaacacctcaagattaactaaaattgtctttattccatgctgttttcaatccagtctaaaaactaccaacatgtgtatagcaaaattaattttgcaaaatgtacgaatagtattttctatgtaaatttttttatgttaagaaaaaagtattttactttctaagttttgataaaccctttcttattgatttttaatctccttgattatatccaccctggagttttatggataaaagttgaagatgattgtaggagaaaaatgagagagaaatagaaattttctcttttgtgttaatggtaaagttagcctacttacctaaagataaaattaataaattacttgacagattttcattgttaatatagcccaaaatgctctatatttcccttttatagtatgatagaaacctttggtcacactttaataaaacaaaatgctatattaagaatcattgatattacattataaactttatgacctctaaaaaaaaaaataatttcaaagaagcataacttgtgagcatgtggtaaagcggcatcccactgaagatcagtgttactgcttttaatctcttttaagttaatacttcagtatactggtagctataactatagggcctttgttttggtcgatgatatttaacctaccatttatgttaataa

SEQ ID NO: 180307 - DNA, 829 bp, Homo sapiens
tttgtgtttcagatcttttctacagtcctcactaaaggcaatacattatagcgaatgaggttttgaaagtcgtctatattcaaagatgggtagactttaatttgttgtcgtgattataacacaagaaattccatcttttaaatattttccctttgtaggttagaaaatgattctggcctttcccgtatctgtttcttttgtgcttttttgcatgtgataatactaataatcccatcttacatttgagctttccagttttttcttgtccatcaccttatttcaagccaagataattttagaacattacttcttacaccagcagttgcctgactgtactgatctcacaaaataagcaggaaaggatgttgagaaatgaagtgaacgcctgtgaccaaatcatcaaagaactagaagagggaaactgtgagtagagtattcctatagaaccttctttccaatatcatggttgtgactggggagggtgcctgagagaaatatgatggaaggaccgggtaaacacacctgtagacttgtcacctgtcctaaggtgagagtaggggctggggctgtgaagaaggacttttgtttgtgtacctaccatgtgctaggtaggtgctggtagtttagcgcatgtattttttaaaagttaggcattgttactaccattctgcaggaaataggctcagagaggtatgagtaagtcatcaatatgcacttaaaaataaatctagtgttgctatactcaggtgatacttatagtaaaatttctactgtggccttttggtgtgtttccctagtcttttttagaaattatatggaaggctgaccg

SEQ ID NO: 180308 - DNA, 277 bp, Homo sapiens
ggaagatactgtccttcttgctattcggggagggagagagaggaatatgatatgataaagaaaaatagtaaaataaaagagcacattgcccactagcatttcccattacccccacatctggaactaccctcctttcaagtaggttgctctcctgattctataaatcagtttcagggaaggaagacgagtgtctggtaggcatctggctggagttcaaggtcatgtcaggtggtgtgcatgctcctcatgggcagcgtggtccctccccgggatacag

SEQ ID NO: 180309 - DNA, 420 bp, Homo sapiens
gtggaaggcaaccagtgcagattgcagcagatcagaatgctccaggaaagatttcctcaagaagataaaagtgataaactggccgggcatggtggctcatgcctgtaatcccagcactttgggaggtggaggcgggtggatcacctgaggtcaggagttccagaccagcctggccaacgtggtgaaaccctgtctctactaaaaatacaaaaattagctgggcatggtggcacacgcctgtagtcccagctactcaggaggctgaggcaggagaatcacttgaacccaggaggcggaggttgcagtgagccgagaccatgccactgcactccagcctgggcaacagagtgagactctgtctcaaaaaaaaaaaaaggaaaagaaaagaaaaacaagtgataaactacttaatgtttggat

SEQ ID NO: 180310 - DNA, 1119 bp, Homo sapiens
tatagtcgtgatgagaggagatggattgaaaagcagaacagagcaacaagagcacaaagaaaaaaagaagaaatgaacagaataagaacattagttgacaatgcatacagctgtgatccaaggataaaaaagttcaaggaagaagaaaaagccaagaaagaagcagaaaagaaagcaaaagcagaagctaaacggaaggagcaagaagctaaagaaaaacaaagacaagctgaattagaagctgctcggttagctaaggagaaagaagaggaggaagtcagacagcaagcattgctggcaaagaaggaaaaagatatccagaaaaaagccattaagaaggaaaggcaaaaacttcgaaactcatgcaagtcgtgatgagaggagatggattgaaaagcagaacagagcaacaagagcacaaagaaaaaaagaagaaatgaacagaataagaacattagttgacaatgcatacagctgtgatccaaggataaaaaagttcaaggaagaagaaaaagccaagaaagaagcagaaacagaaagcaaaagcagaagctaacggaaggacgcagaaagctaaaagaaaaacaaagacagctgcattagcagctgctcggattagctaggagacagaagaggaggacagtcgacagcaagccttgctggggaacagcaagggacaaacaggatatccgaaaaaagcattaacaaacgggaaaaggcaaacacttcgaagagtcatgcacagttattgatgaaaggaaatggattggaaaagctaaacagatccacaacgagcacagaggagaaaaggggaagagcgggagtagaacatttgttagaaagggatacaggatagcatccaaggaaaacaactcgagggaaagaaaagagaaagacagccaagaagagaaaaagaataaccaagggagagaggacggaagagaaaacgaagatggattaacggccaagataacagaacaacaaggaagtacaaagatggtgcgggacgcccccatagaacgggaaccaagacaatggatgggaaaaggacacaacgatacaagtgatacagagggaagagaagaacacaatacaggtgggataatactcaacaagaga

SEQ ID NO: 180311 - DNA, 965 bp, Homo sapiens
tatagtcgtgatgagaggagatggattgaaaagcagaacagagcaacaagagcacaaagaaaaaaagaagaaatgaacagaataagaacattagttgacaatgcatacagctgtgatccaaggataaaaaagttcaaggaagaagaaaaagccaagaaagaagcagaaaagaaagcaaaagcagaagctaaacggaaggagcaagaagctaaagaaaaacaaagacaagctgaattagaagctgctcggttagctaaggagaaagaagaggaggaagtcagacagcaagcattgctggcaaagaaggaaaaagatatccagaaaaaagccattaagaaggaaaggcaaaaacttcgaaactcatgcaagacctggaatcatttttagagcgggttaaaatgatggaagaagtggaaaaactttgtgatcggcttgaactggcaagcttacagtgcttgaatgaaacactcacatcatgcacaaaagaagtaggaaaggctgctttggaaaaacagatagaagaaataaatgagcaaatcagaaaagagaaagaggaagctgaggctcgtcatgcgacaagcatctaagaacacagagaaatcaactggtggaggtggaactggaagtaacaaattggtcagaagatgatctacaattactaattaaagctgtgaatctgttccctgctggaacaaattcaagatgggaagttattgctaattacatgaacatacaattctatcctctgagagtcaaaagaactggccaaagatgttacttggcacaagcaaagagtctccaaaaacttgaccctcatcaaacaagatgacatacataaaaaggcatttgactcagtccacacacagaacatgggagtggtaactcacagcagagaagcacagccttcagaacgattggagggcatatcagacttacccttgcaacgcacacaaactttgacacat

SEQ ID NO: 180312 - DNA, 189 bp, Homo sapiens
caaagggcatggacagataatatggtaagttgaaatggccatacacacaatgtatgtgaaagccaacacacaatgtagctcaactcaaaatacagacttcaaaacctttcccagagaattcacagtggaacacagtcaggtgtccaggtgtggaatgagctagttccctacagcgatccctttctgtta

SEQ ID NO: 180313 - DNA, 692 bp, Homo sapiens
ttatattgtcattgtaaattatgtggataaattaatttaaaaatttatactgccagttcaatattgtattccagcattataacatttttggttgttggatttttgtgtcataatctctattgcaatatctattaaggaacaaagaaggaattttgaaaggggattatatttcaaatgcacagtggggctcttttgatttcacatttgtgttcattttattacctatattcccacggggaaaacatgatgaatactaatttttattgtttttaaaaataacaccttctagaattctacaaatgcagatggcaattaattgttagattatttctcttgattcctcagtcttattattactttttatttattcaacaaatatttacctatatatgtttggcatgctctaagtactagggttgcaacaaacacatttctataaaaaagtaaagtatgttatgtacatatattcaggctcagaggtaaataatctgccaatgaaatctaaaaaattagtataatcgactaggagattgtgatttttttttttaaacattcatacgttttccaaactggttctacttagaaaaaagtaggagttccttgtggaaactttagtttctcattgctaataatatttattcattgtttggtaaatattaataaattacttaaatttatttgcaactctccca

SEQ ID NO: 180314 - DNA, 417 bp, Homo sapiens
tcgcttgaacccaggaagcagaggttgcagtgagccgagatcacgccactgcattccagcctgggcaacagagctagactccgtctcaaaacaaagaaaaaaacaagttctagacatcgggcctaggaatctatatttaaacctgctctataagcgatccagatgcacagcaaaggttgagaagtgtttcagatgtagcttcatcccagctcccaaagtgccgcaaattgcacaaagtgctggtgctcactggaaggccacatcctcgaccccaatcctctccaccatgccctgaccatctccttgatcttgtcccagcactgtctagcgagacctcaagtccctctcctagcaggagcctgggcccctgggataggcaatttttgctctaaccctactcctgataccatctttttt

SEQ ID NO: 180315 - DNA, 259 bp, Homo sapiens
aatggaaagaaccaacaacatgaaatcagcactccccaacagcagcgacctgccatgcatccagcagccgccaccccgctcacatgagcacacactcctctgctcaccatagtccctgccatctcacactccaccggctgatgttgcccatacctacactcaagtttaggatgcccaatatataaacttgaggaaattttgtactagtgtcatgctttatgggcctggtcatatttcccagtgttgtcatggtcactgg

SEQ ID NO: 180316 - DNA, 604 bp, Homo sapiens
gtgtggctctgtagctcagcagccgcactgggctctcaagggccccaaggcttgtgggtggttaaaacaaacacctttgtgacacatggccaggacgtcagggccactgtgatgaccataaaaaggcgaccaagtttatctgtggtataattcattttaagagtgtaaataattgcccctgaattttacacttatgctgcaattagacacgttacggtgtccggctgggccatggctctgctcatcagctctgtgggtcattacagagccagcatcccagaagctccgccagaatcacggtggatcctgtgagaatgtcttccccagagcagagtgcaaaactccaagaaatgagtcaaaacacttttgcatgtacctacatagctttatgctcaaattataccccacatttcagaaaatggttttaagtcaattaacatgttgggttttatacccacacatatccaagtgatgtataatcgcaagtagatacaaaatttagtatttataaaattatcctttagatttctaattttatctaaattttaaaaacaatatattccaacagaaaaagccttagaaattatgcctaatttcaaacatg

SEQ ID NO: 180317 - DNA, 707 bp, Homo sapiens
gtatctctgtcattctgaatcccattttcccatcctccaaaatttaaagaaatagaaaagtttcaccgggctgaggaaggtaatgttcttagtattagtttctagggctgctgtaacaaattaccacaagttgggtaacttacaacaacagaaatatgttatcttacagttctggaggccagcagtccaaaatccagcagggccacattcctccagggaacttctggaaagggctcattccttgccaatttcagcttccgggggttgcatcagcatttctggctgcatctctccaatctctgcctctgtctttacatggccttctttgtgtgcccatgtcttctcttctgtctcttataaggacacttatccttggatttagggtccacctgagtaattcaggatgatcacatctaaagatccttaagccaggcgcagtggctcatgcctataatcccagtgctttgggaggctgaggcgggtggatcacaaggtcaggagatcaagaccatcctggctaacacggtgaaaccccgtccctacttaaaatacaaaaaattagctgggcgtggtggcacgcacctgtagtcccagctactcgggaggctgagaaaggagaatcgcttgaacccaggagacaaaagttgcagtgagccaagatcgcaccgctgtactccggcctgggcgtcagagctagcctccgtctc

SEQ ID NO: 180318 - DNA, 693 bp, Homo sapiens
gaagaatgcaaagtgtcactttgaacttctcgttcaccacacacgtgggagtccactcatgtcagcagcctccgtgcacaggccccaggtgaaagaaagaatgaggtctagttggaccagctaacactgcctgccttgtgtttacgaaaggcagctgcctctgtggtgtgatttcaggggagccagacagggccggggccacgaacctgcatcctgcatcctaagcacctattgccatgcgtgaggctaactggaaactcacttgctgggtgcagatagcttccaaactattgtgatgctcatgcttgacttcccaaggaacgtgtttcaggaaaggccattgccctcattatggtctttgataagcaggaagaagtttgttgttccttttttttcttaatgccctacttcgtgcaacatacatccaatcagtcatatcctattgacgctacccctaaatatctctgggcctggcccgtgctcagggcactgccttcattcagttactgcacttgcctgctgcctgtgctcctggtctcctgcttggactcccccaggccagcagccacactactgccaaaatccagtcgaaaattaacttcaggtaaagcacaattccaaacctaacactgcccccctcaaaagcctctctgtagccttcagaataaagaccatattatttgacaagacaaa

SEQ ID NO: 180319 - DNA, 527 bp, Homo sapiens
gatcgagctcgtaccgggtcagtacggatgtggcacgaacctgcatcctgcatcctaagcacctattgccatgcgtgaggctaactggaaactcacttgctgggtgcagatagcttccaaactattgtgatgctcatgcttgacttcccaaggaacgtgtttcaggaaaggccattgccctcattatggtctttgataagcaggaagaagtttgttgttccttttttttcttaatgccctacttcgtgcaacatacatccaatcagtcatatcctattgacgctacccctaaatatctctgggcctggcccgtgctcagggcactgccttcattcagttactgcacttgcctgctgcctgtgctcctggtctcctgcttggactcccccaggccagcagccacactactgccaaaatccagtcgaaaattaacttcaggtaaagcacaattccaaacctaacactgcccccctcaaaagcctctctgtagccttcagaataaagaccatattatttgacaagacaaa

SEQ ID NO: 180320 - DNA, 215 bp, Homo sapiens
aggggcggggcttcgtggagggcaggccaggactggggaaactagggcgaaaggggcgtcatgaggacggggttcccaggagggagagcggagcagggagaggcagccctttcccaggcattggaacaggagcctgcctcttggagaatcccagccttctatgcggtccccctgcactggctggggacacagaaggaagtggggtcatggatccc

SEQ ID NO: 180321 - DNA, 300 bp, Homo sapiens
tgagtcactgtaacaccatatagctcagagaaaaggcagttccaggtgagacagcttgttcagagcccttgagctcagactagcttagaagaaaagatactgctttctcctcttgtgccccctaggggtctactgctcaccacttgactaccacattactgggagcctcaggaattttcccagtatcctcataatctccaacttgaacccaactcctccaacagattatgaaaatcaaaatcagtgccatcatacctcacaacatagttgtctatgttactatgctataatgatcagatc

SEQ ID NO: 180322 - DNA, 479 bp, Homo sapiens
ttgagatggagtctcgctctgtcgcccaggctggagtgcagtggcaccatctaggctcactgcaacctctgcctcccgggttcaagcgattctcctgcctcagcctcccgagtagctgggactacgggcacatgccaccatgcgctgctaattttttgtatttttagtagagacagggtttcatcatgttagccaggatgttctcgatctcctgacctcatgatccacctgcctcggcctccctaagtgctggtattacaggtgtgagccaccacacccagccaaacttggaaccataataaaagtaagaagtgtgggtgtgggggaaactgggaagggagggagatgatgtatttgtgttacagacaaaagacaagttctgttcctccgcagggacaaatgaagaaccagatgatggaataaactgaggtcagagagtttccccccagaaatcccggcggcccgaggttacccgagct

SEQ ID NO: 180323 - DNA, 1460 bp, Homo sapiens
ttgagatggagtctcgctctgtcgcccaggctggagtgcagtggcaccatctaggctcactgcaacctctgcctcccgggttcaagcgattctcctgcctcagcctcccgagtagctgggactacgggcacatgccaccatgcgctgctaattttttgtatttttagtagagacagggtttcatcatgttagccaggatgttctcgatctcctgacctcatgatccacctgcctcggcctccctaagtgctggtattacaggtgtgagccaccacacccagccaaacctttcctcttaaaatgttcaacttatatgtctaacgtctcttgtccaattttttcctcatacactggctacgtaaaaagtatgtgttggaggattagggaatagtgggacagtagaaagagaagttgagcaaagaaacacctgtctcctacttctctggttgaatttagaatacattgtctagcgccctagttaggagagagaaaaattccattctgcctctttgctcttccaaattcctatagccaagttgttcaacagcagttgaatggcacacataattgacatcattgattggaaccataataaaagtaagaagtgtgggtgtgggggaaactgggaagggagggagatgatgtatttgtgttacagacaaaagacaagttctgttcctccgcagggacaaatgaagaaattgtttcctctttttttaattattattatttttgagagcaagtctctctctgttgcccaggctggagtgcagtggcacgatctcagcccactgagacctccacctccacggttcaagcaattctcgtgattcagcctcccgagtagttgggactacaggtgtgagccaacacactcagctaatttttgtatttttagtaaagatggggtttcaccatgttggccaggctggtctcaaactcctgacctgaggtgatctgcctgcctcggcctctcaaagtgctgagattacaagtgtgagccactgtgctgacctgtttcccctttaaacagctccttttaccactccctcaaagtttgttccattgggagggtggagaaaagtagtgtcttttttttatcttaaaggggaggagacagaaaagaagaaaacagatataggattacacgttgtatctctccttgaaaaggcccaatatttattttcaaagtattatgaatgaaaagggaatgtaaaggagtggttaaatatttgtttagtcttaaaaatgctccaagaggccaggtgtggtagctcacgcctgtaatcccagcactttgggaggctgaggctggcggatcacaagatcaggagtttaagatcagcttggccaacatggtgaaactctgtctctactaaagatacaaaaaattagccgggcatggtggcgcacacttgtaatccaagctattcaggaggctgaggcaggagaatcacttg

SEQ ID NO: 180324 - DNA, 1447 bp, Homo sapiens
ttgagatggagtctcgctctgtcgcccaggctggagtgcagtggcaccatctaggctcactgcaacctctgcctcccgggttcaagcgattctcctgcctcagcctcccgagtagctgggactacgggcacatgccaccatgcgctgctaattttttgtatttttagtagagacagggtttcatcatgttagccaggatgttctcgatctcctgacctcatgatccacctgcctcggcctccctaagtgctggtattacaggtgtgagccaccacacccagccaaacctttcctcttaaaatgttcaacttatatgtctaacgtctcttgtccaattttttcctcatacactggctacgtaaaaagtatgtgttggaggattagggaatagtgggacagtagaaagagaagttgagcaaagaaacacctgtctcctacttctctggttgaatttagaatacattgtctagcgccctagttaggagagagaaaaattccattctgcctctttgctcttccaaattcctatagccaagttgttcaacagcagttgaatggcacacataattgacatcattgattggaaccataataaaagtaagaagtgtgggtgtgggggaaagttcctccgcagggacaaatgaagaaccagatgatggaataaactgaggtcagagagtttcccccattgtttcctctttttttaattattattatttttgagagcaagtctctctctgttgcccaggctggagtgcagtggcacgatctcagcccactgagacctccacctccacggttcaagcaattctcgtgattcagcctcccgagtagttgggactacaggtgtgagccaacacactcagctaatttttgtatttttagtaaagatggggtttcaccatgttggccaggctggtctcaaactcctgacctgaggtgatctgcctgcctcggcctctcaaagtgctgagattacaagtgtgagccactgtgctgacctgtttcccctttaaacagctccttttaccactccctcaaagtttgttccattgggagggtggagaaaagtagtgtcttttttttatcttaaaggggaggagacagaaaagaagaaaacagatataggattacacgttgtatctctccttgaaaaggcccaatatttattttcaaagtattatgaatgaaaagggaatgtaaaggagtggttaaatatttgtttagtcttaaaaatgctccaagaggccaggtgtggtagctcacgcctgtaatcccagcactttgggaggctgaggctggcggatcacaagatcaggagtttaagatcagcttggccaacatggtgaaactctgtctctactaaagatacaaaaaattagccgggcatggtggcgcacacttgtaatccaagctattcaggaggctgaggcaggagaatcacttg

SEQ ID NO: 180325 - DNA, 1499 bp, Homo sapiens
ttgagatggagtctcgctctgtcgcccaggctggagtgcagtggcaccatctaggctcactgcaacctctgcctcccgggttcaagcgattctcctgcctcagcctcccgagtagctgggactacgggcacatgccaccatgcgctgctaattttttgtatttttagtagagacagggtttcatcatgttagccaggatgttctcgatctcctgacctcatgatccacctgcctcggcctccctaagtgctggtattacaggtgtgagccaccacacccagccaaacctttcctcttaaaatgttcaacttatatgtctaacgtctcttgtccaattttttcctcatacactggctacgtaaaaagtatgtgttggaggattagggaatagtgggacagtagaaagagaagttgagcaaagaaacacctgtctcctacttctctggttgaatttagaatacattgtctagcgccctagttaggagagagaaaaattccattctgcctctttgctcttccaaattcctatagccaagttgttcaacagcagttgaatggcacacataattgacatcattgattggaaccataataaaagtaagaagtgtgggtgtgggggaaactgggaagggagggagatgatgtatttgtgttacagacaaaagacaagttctgttcctccgcagggacaaatgaagaaccagatgatggaataaactgaggtcagagagtttcccccattgtttcctctttttttaattattattatttttgagagcaagtctctctctgttgcccaggctggagtgcagtggcacgatctcagcccactgagacctccacctccacggttcaagcaattctcgtgattcagcctcccgagtagttgggactacaggtgtgagccaacacactcagctaatttttgtatttttagtaaagatggggtttcaccatgttggccaggctggtctcaaactcctgacctgaggtgatctgcctgcctcggcctctcaaagtgctgagattacaagtgtgagccactgtgctgacctgtttcccctttaaacagctccttttaccactccctcaaagtttgttccattgggagggtggagaaaagtagtgtcttttttttatcttaaaggggaggagacagaaaagaagaaaacagatataggattacacgttgtatctctccttgaaaaggcccaatatttattttcaaagtattatgaatgaaaagggaatgtaaaggagtggttaaatatttgtttagtcttaaaaatgctccaagaggccaggtgtggtagctcacgcctgtaatcccagcactttgggaggctgaggctggcggatcacaagatcaggagtttaagatcagcttggccaacatggtgaaactctgtctctactaaagatacaaaaaattagccgggcatggtggcgcacacttgtaatccaagctattcaggaggctgaggcaggagaatcacttg

SEQ ID NO: 180326 - DNA, 213 bp, Homo sapiens
gcacctgctgttatcgactctaaggatccccatcctttttttgtgtctgttgagatgatcatgtggattttgtcttttattctattggtgtggtgtagtgcattgattgacttttgtatgttaatccaatcttgcatccctgggataaatttcatttggtcatggtatgtaattgttttttatagccactggatttggtttgttagtattttg

SEQ ID NO: 180327 - DNA, 662 bp, Homo sapiens
gaaacaaatagtcatagctctgccgtaactgtttgaagtgtcaatttcagatttcaacttaaaattgaaatttcggatgacacacgcatgccttgtgcctaatgacaattttgtctttaggcacaaaacatgcgtgtgtcatctgaaatttcatgcttaattagctgtacattgcattttcattaaagagttgttagagtaaactattttcagtatagtggcaagactttggtccgtgtggtacaaatttcagtttatttaagataatctctgccccctccaaaatagtaggcaaaacattggcagtgcagttaataaagatatttgtaattttaggcgaggtatttggactcaaatcacttttctttagtctggaatttgttaattctgtttctaacaattgcttttctgacttcccaaatgattccgttatatatactcttaaaggttttgatatgtcttgaactaaaaatgttgaattttaatcaaataataatgtggggattgttactccagccagtctgttcttttgattatatggtatttcttcttgcacggaagcctggaatattttatctcaagatattagagagtttaattattgacttttatacaaaagaggcatatttagtgtgataaacagttttgaaaactgataattg

SEQ ID NO: 180328 - DNA, 695 bp, Homo sapiens
tgagacggagtctcactctgtcgcccaggctggagtgcagtggcgcgatctcagctcactgcaagctccgcctcccgggttcacgccattctcctgcctcagcctcctgagtagctgggactacaggcacccgccaccatgcctggctaattttttaaaaaatatttttagtagagacggggtttcactgtgttagccaggatggtctcgatctcttgaccttgtgatcacccatgcccagccatctttcttaatggcttcttttgaacatttttttgttcaggtttggtgtttgtagttaaaaaacagaatgatttttattttggtgaagtttaacttacctgtttttcatgttttacctgtaagaatccattgcctaatccaaggccacaaagatttacatgtggttttttgttttgttttgttttgtttttgagacggaacctcactctgtcaccaggctggaatgcaatggcgtgatctcggctcactgcaacctctgcctcccaggttcacgcgattctcctgcctcagtctcctgagtagctgggactacaggcatgtgccaccatgcccagctaatttttgttagtagagacggggtttcaccatgttggccaggatggtcttgatcttttgacctcatgatccactcacctcggcctcccaaagtgctgggattataggtgtgagcc

SEQ ID NO: 180329 - DNA, 555 bp, Homo sapiens
tggtgggagaccagagttttaatcattactcaaatcagtctctatgaacattcggggagcagagttttaaaggataacttggtgggtcacctgtaactacctttacctcctgtcgttctcaggagcggaggctggaggtgaaggtagttactggtgacgggcccagggcctgctggcaaatagcaagcctgaggctgaactgggtccctggatacaactcggcgtgggccacagttagcctcagtttccccttcaatctccagacctccttcacccttccgccttcgcctcccattcccaggtctcagatcctccttcagggcgctttgcttcgccttctccattctgtgctcctggtgcctccttgtggctaaaaatgtcaactgcagcaatgactgactaaattcgcaggaaaatcccagagattttaggctgccgagattgaaggacccttagaggtgattttagaaataactcgtatttgcatttttttcccagtggcgatactgatctgagcccaggttagaacccaggaaccctggtttctagacaagt

SEQ ID NO: 180330 - DNA, 417 bp, Homo sapiens
gtctgggctagaaaaccttcaggtctcagtataatgacttgtacatagaagtccttcttgttaatgctattggccaactaataatgaaatggggtaagagcccaaaagaagtttacagaatagatgaattttacatcatgttatagtggcacatactgtaaattacaaatagctagatggcaatgaagtaagggaagtttacactaaatatgaagacaaattaccagcaaatacaaccattttccaagggaaggacagaaaatccaacttaaatctaacaaggaaagacactctttgattcattcgatatggtcagaaaagcttgagacagtctataactctcaatgttatctacagttctgaaataaaaaactgtctacagtaaacattatgtgacaacatcaatacaaagtctca

SEQ ID NO: 180331 - DNA, 397 bp, Homo sapiens
aattacatattcaccgggcaggtggcagctgcaccactcgtcttctaggctgctcacgccgggcactgggtaaacgtggcaggatgtcctcgaaagaccgactgtgatcttcggagggatatttcatgcctcctggggttaatctcctcagattacacttttaaaagctcccttgtcttattacaactccaagagaaaagtacagtcaaatgttaagattcaaacaacaacaaacactccaaatcacaaagagagaagcatttacagagccaggaattctaattataggtattttccatcttacagaataggaccgcctgttggaagggctggtaaacacaattttcctaccaaagtacataaattctttaactgtaaaaaacacctgacaaaactc

SEQ ID NO: 180332 - DNA, 1050 bp, Homo sapiens
gttttcaaacaaatgtacttgctcccaggaggctgtgtggttgagtcaatttgctttgcctaatacttacgatttgctctcagtgattttaaatgcacaggcaccattcagtgtaattgatcttttgagtagaaggattatggcaagccatgttcttctttgtcacttatagaagttaaaagcaaatgcacatacaagctgatgaactggatattttccatattctttgcaaacatttcacttttagaagcatacatctgttttatacttgctaaaggatatacaacccaaagctttctatttctactaataattaagagcccttttttcttttacaacagcatgggtatattttattctactggagagtcacttaaatagttgaggacaaatgtgaatcccacttacacatcttctgtggaacagcatgatatgtgtataactctgaatcattcgagtatcatctccatgtgaatatgcatgtggttagaatagaggagtggacacagtctggaaatggtttgggtctggtttgttatttagttatcctgttaatatccttctacctatctgtgcttgctgtttgaacgggactggggttcaactttggatctccaacatggaacaataaagtctacatcgttcagtgaactttgggcataattactgtgtctaggacaccactacaatttcttttcactgttgtcttcctgcccatccttgaactcaccataatttgaaaaggcagtagatcatagaaaactaccaaaagaccaaccaagagctaaatagtttcttcatagcttctctcattttgcttttgctcaatttcaaattcttgggagtttccatagctaagcactgaaatgtgggcctattcccagtcaggaaccagataatcctttttgttggtatatatgttatgatgtagaaaatgaggagtcacttaaaaaaaattcaatggagaattccatttatttgtaggatttctttttctttgaggattcagagttggaaatgaagtgcctttggccttagagaataagatac

SEQ ID NO: 180333 - DNA, 618 bp, Homo sapiens
  misc_feature (432)..(432): n is a, c, g, or t
  misc_feature (466)..(466): n is a, c, g, or t
  misc_feature (477)..(477): n is a, c, g, or t
tgggagtagccagcagagccagtgaggccagggttcctgaccactcttcccacacatcacatgcagacttcctgggcggctgcaaggcccacagggcgtgaagaggctcagaaaccctccttgtcctttgaagctgcctaggggcatatgaatggaagtaaggtcacagcccctaggcgcatatgaatggaagtaaggtcacagcccctaggcgcatatgaatggaagtaaggtcacagcccctaggcgcatatgaatggaagtaaggtcacagcccctaggcgcatatgaatggaagtaaggtcacagcccctaggcgcatatgaatggaagtaaggtcacagcccctaggcgcatatgaatggaagtaaggtcacagcccctaggcgcatatgaatggaagtaaggtcacagcccctaggcgcatatgantggagtaaggtcacagcccctaggcgcatatgantggaagtaagntcacagccccataggcgcatatgactgcgaagtaagatcacagcaccatgcatcagcatataacctgaaggaaaggacaagaacccacgagaaggaagccaaaaggatgaaaaggaacagagccaaatacaggagaaaaga

SEQ ID NO: 180334 - DNA, 631 bp, Homo sapiens
caatgggtttgccgccagaacacaggtgtcatgaaaactacccccaaaagccaaaatgggaaaggaaaagactcataccaacattgtcgtcattggacacatagattcgggcaagtccaccactactggccatctgatctacaaaggcggtggcatcgacaaaagaaccattgaaaaatttgagaaggaggctgctgagatgggaaagggctccttcaagtatgcctgggtcttggataaactgaaagctgagtgtgaacatggtatcaccattgatacctccttgtggaaatttgagaccagcaagtactatgtgactatcgttgatgccccaggacacagagacttcatcaaaaacatgattacagagacatctcaggctgactgtgctgtcctgattgttgctgctggtgttggtgaatttgaagctggtatctccaagaatgggcaaacccaagagcatgcccttctggcttacacactgggtgtgaaacaactaattgttggtgttaacaaaatggattctactgagccaccctacagccagaagagatatgaggaaaattgttaaggaagtcagcacttacattaagaaaattggctacaaccctgacacagtagcatttgtgcc

SEQ ID NO: 180335 - DNA, 626 bp, Homo sapiens
taccgctgcactacagcctgagtgacagagcaagactctgtctctaaaaaataaataaaataaaacattctgtctcagtggctttccaaatcattggagacttccagaattcctaaaattttgccacaacacatcccagactgcctcttatatctaggcatggcacaaatctgatctttcatcagtatggatttttaatttcatgtatatagacattgtcatcgtcattggactcaagtaccttccactttctgcttcctctgtcattttctgcttaaatattacaatttcatttcctcagttgtaagtcattagaacagtgggatagtgtttggtataaagctattttgaggtaaaatgtctaaaagatatatttaatatccttagagctagcttcatttgcccttctttgtcagtgtttgggaaaatgattccaggagtccagaaattatgtctatctcacttgaatgagaggtggcagtttcacataaacagctcatatcccccttgctatgttgctgtggttactatgatccctgtgcatggaaacttgtttcagatgttgaagacagacacaattaagatggtttgtgtaataaacctaaatggaaaagagttaagaagtg

SEQ ID NO: 180336 - DNA, 509 bp, Homo sapiens
agttctgtgatccctgaactgagattgttcgaggacccgtttcttcctcggtggcccccgatggccctgctgagatgcagggatgcggtggcatcgctctgtcattcctcaggcagggtcccttcccagctggtctgagccactcacacctagagggcatgagcacttggacctccaagggcagagggggctcagaggccagcctccacctctctttcgtggacaggatttctgtccaggagcagcagggaatggtactcttatgccaactacacagcccgcggactttggacctagccttcagtatgtgctggcagcacagggttgtcccttgagggagccctggcaggaccctttgttgcactgttggaagctgcaccctccagtcttcactcctttgtcactaacctctaggttctcagagcctggattacagctccagcctctccagagaggagcagttagatatgtggcagtcagtcacactctagtgtaaatgaagccagccg

SEQ ID NO: 180337 - DNA, 430 bp, Homo sapiens
tggattcatctgaagtttattttggcatcaatagtagtgaaagtttgaaccttagtaatttttactaatgccatttattgacaaatcaattttcaacattgatttgaaatgctgcttttattgcataaaaaatccttatatatactgatcatcttctggactatcaattctattttgttgatctagttttctaatttcaaattatttaatatccccatagcagcatgctaaaatgcaaaggccctagaatgagggtgactgaggtcaaatcctaactctcccatttatgaaatatgtgactttagcctagcccctaaagtgtatttgttcttcagcttcctcatctctaaaaagataaaatgtcaaactagtattgcctaatgactccttccctaagccaaaatcttgagatggacagaagagaggaagg

SEQ ID NO: 180338 - DNA, 658 bp, Homo sapiens
  misc_feature (628)..(628): n is a, c, g, or t
  misc_feature (657)..(657): n is a, c, g, or t
acgttgacacttcagaagggacacgaaaccagtgggaagaccagattggtgggcaggaatgatgagcctgagaaagggtaaagagggagcaaagtgtgacgggagacctggacccaaacagtgcctctgattcatttgtttcccatctagtcagatgtatccagaacaaattaggacaactgaagaggcgagttcatgcctccttcatgcctgcatcctgcctctacagctcccacggcattcccaacataggatttcccgtagccttgttgatgggggaaacccccaaggaaattcaccagatgctgcagatcaagggctgcctgaggatgtagtgagctcctgagcagcactttcaaaactgaattagatgagctaggcatgttttttccgtgtcgtcccttaacttacagtgcctcacttaatcatcacaaggaagctggatcacttgaggccaggatcacttcaagtccagcctgggcgacagggcaagactctgtctcaaaaaaaataaaaaactgaccatctagtccttgtcatctgggcaccctcacacatctccttaaccacacttaatctccaaataagtacgataacatagtcatagtcccacccaacatgatgcagntatcttgcatacaactgaagtgtcaacgnt

SEQ ID NO: 180339 - DNA, 373 bp, Homo sapiens
  misc_feature (22)..(22): n is a, c, g, or t
aaaaaaaacaaacaaacaaacnaaaaaaaacaaatgtaatgaatgtgacaaggtcttcagtaacagttcaaaccttgtacaacatcaaagaattcatactggagagaagccttacaagtgtcatgaatgtggcaagctcttcaatcgaatttcactccttgcacgacatcagagaatacatactggagagaaaccttacaaatgtaatgaatgtggcaaagcatttagagactgttcaggccttactgcccatctactaattcacactggagagaaaccttacaaatgtaaagaatgtgccaaggtcttcaggcatagattatccctaagcaatcatcagagatttcatactggagagaaaccttacagatgt

SEQ ID NO: 180340 - DNA, 1204 bp, Homo sapiens
atgtaaacatgtcgaaaaacctatcaacaattccttagtttcaccacttcaaaaaatttattctagtgtcaaatcccacattttaaataaatacagaaatgattttgatgattctccatttctcccacaagaacaaaaagcacaaataagggaaaaaccgtgtgaatgtaatgagcatggcaaagcctttagagtgtcttcaagacttgctaacaatcaagtaatccacactgcagataacccttacaaatgtaatgaatgtgacaaggtcttcagtaacagttcaaaccttgtacaacatcaaagaattcatactggagagaagccttacaagtgtcatgaatgtggcaagctcttcaatcgaatttcactccttgcacgacatcagagaatacatactggagagaaaccttacaaatgtcatgagtgtggcaaagtcttcactcaaaattctcaccttgcaaatcatcacagaatccacactggagagaaaccttacaaatgtaatgagtgtggcaaggtcttcaacagaaatgcacaccttgcacgacatcagaaaattcatagtggagagaaaccttacaaatgtaaggaatgtggcaaagcattttcagggggttcaggccttactgctcatcttgtaattcacactggagagaaactttacaaatgtaataaatgcggcaaggtcttcaatcgaaatgcacaccttaccagacatcaaagaatccatactggagagaaaccttatgaatgtaaagaatgtggcaaggtcttcaggcacaagttttgtctaaccaatcatcatagaatgcacacgggagagcaaccttacaaatgtaatgaatgtgggaggccgaggcgggtggatcatgaggtcaggagatcgagaccatcctggctaacaaggtgaaaccccatctctactaaaaataccaaaaattagccgggcgcggtggcgggcgcctgtagtcccaagctactcgggaggctgaggccaggagaatgggcgtgaacccgggaagcggagcttgcagatgagccgagattgcgccatgcagtcccggagtcccggctgggcgaacagagcgaggatccgtctcaaaacaatacacaacaagcatcgcaaaaaaccactgtttgaattgtgccaagctctcagtacattcactggtgccttccgaaacacgggagaaactaacga

SEQ ID NO: 180341 - DNA, 1142 bp, Homo sapiens
tcatctgctgccaattaattggggaaaaaattgagctggatttctttgagagaaaagaaaagctcctgccacacaacgtcgcgccctcggcattttgtctgagaacctccagcactagcggctgtttctgtgtctcccttctttgctggctttattattgaccataatgcctgcccacttgagcaactctgtccttgagcgctgaggagtcaagggcccttctggcagccccccaaacaggatggcgcccacagaaagaaaggaggctttgtaggggaagagggccccaccgcctgccagtcccgtcctgaagtcagaagaatggcccaggctgacaccctctcctggagagaggctcacagcgtagctgttcccaggaaaggggtgcaaagactccgaggcttcaggaggcaggccctgtcctcacagggcggctgtgggccggggcccctctgtggcctgagagtgagcaggagggaaacctgaagcagctacccgcaaggcgtccggtcaacagggtggagctgcaggctccctctgcccattcccagaaccagcggccccctttgtaagatgctgaacacgaagttccggtagctccccagacgctgtctcagaagtggtgatatcattgaccaagggcctggcaaggaccggcagccagggtccccatttgctcttgcagccctagggactgtgcaggtagaagccctgccagcagagcaggctggcgtttggtgttggcccacagacacccgtgaagggtcatggccgaatcaggcagctgtccagccaactgtctctccacccttccagaattggtgatcagcgaagaccaaattcggcaagccatccagagggagtgcagggcgcacagtcttagatgtgggcgcacctcccagaaccccacggggacttgttcacaggcgcgcttgcaggagggcaagccccttggtcctggaacacaggtgccccttggcctttccacctccctccttggggctgtttgcatccctgccaggagccttaaaccagccacctactgctgaagtctcttgtaacattccaaatctatgtgacacactgtataatgatgaatatttaatgtgaagctcttaatatactacaagtgtcttgtttac

SEQ ID NO: 180342 - DNA, 1118 bp, Homo sapiens
tcatctgctgccaattaattggggaaaaaattgagctggatttctttgagagaaaagaaaagctcctgccacacaacgtcgcgccctcggcattttgtctgagaacctccagcactagcggctgtttctgtgtctcccttctttgctggctttattattgaccataatgcctgcccacttgagcaactctgtccttgagcgctgaggagtcaagggcccttctggcagccccccaaacaggatggcgcccacagaaagaaaggaggctttgtaggggaagagggccccaccgcctgccagtcccgtcctgaagtcagaagaatggcccaggctgacaccctctcctggagagaggctcacagcgtagctgttcccaggaaaggggtgcaaagactccgaggcttcaggaggcaggccctgtcctcacagggcggctgtgggccggggcccctctgtggcctgagagtgagcaggagggaaacctgaagcagctacccgcaaggcgtccggtcaacagggtggagctgcaggctccctctgcccattcccagaaccagcggccccctttgtaagatgctgaacacgaagttccggtagctccccagacgctgtctcagaagtggtgatatcattgaccaagggcctggcaaggaccggcagccagggtccccatttgctcttgcagccctagggactgtgcaggtagaagccctgccagcagagcaggctggcgtttggtgttggcccacagacacccgtgaagggtcatggccgaatcaggcagctgtccagccaactgtctctccacccttccagaattggtgatcagcgaagaccaaattcggcaagccatccagagggagtgcagggcgcacagtcttagatgtgggcgcacctcccagaaccccacggggacttgttcacaggcgcgcttgcaggagggcaagccccttggcctttccacctccctccttggggctgtttgcatccctgccaggagccttaaaccagccacctactgctgaagtctcttgtaacattccaaatctatgtgacacactgtataatgatgaatatttaatgtgaagctcttaatatactacaagtgtcttgtttac

SEQ ID NO: 180343 - DNA, 138 bp, Homo sapiens
aggctggaccgccatgcactcttttcttcactttcacaatgattttctgctcctcaataaggaaagcacacttgattctgtcatgaacacactgagcacacatggaaccagggaagcactgcaggccctatagacatg

SEQ ID NO: 180344 - DNA, 812 bp, Homo sapiens
  misc_feature (757)..(757): n is a, c, g, or t
  misc_feature (762)..(762): n is a, c, g, or t
  misc_feature (765)..(765): n is a, c, g, or t
ggcacagtggctcacgcttgtaatcctcccaaagtcctgggattacaggcgcaagtcaccgcgcccagtcccacctctcactttaaaccaatcctctgcacaacagtccccatatttcaggcaacgtttgcctggactatgcctctatgcctcggtggcaaggggtaagtgtgggtggcagcatctcggtgcaagggtggaagaggcaggagctgcttttcacagggcattacaaatcttgctgagacctcagaagcagactaattccatatacaatgcttggatgtgttctgtgaagtgatttgattttttttttagccaggggtccatatatattggggaatcatatatttcatcaaattcacaaatattcaaaatattgctaatgatttattctctattaatttattcataatttgctcataattaattcctattactttatgatacccctgacaagtctactcaaacatctcatgctggagaattcaccactttaaaatagttcatttcattgacacagtaaaaatatttctctctagtctgcacccttgtttcgtcctctggatttgatgtgaaagtctttccaaaaaacagcccctgtttctcctatgatcttcttttctccaagctaagcagttttctctaaccacaccccttcaatggcccatgatgaggtttcagcagcttgagagacagctggttaataaaatcgtgttgtggaaacaaacaacacaaaagaaaaaaaaaaaaaatntgggnccnccaaaattaaaaaggtggcgcgccgataagaaagaagggctcaaacg

SEQ ID NO: 180345 - DNA, 1054 bp, Homo sapiens
ggaccattctcccatgggcccaaaccagaaatacaaagtcaccctttgctcacttccctcccaccacctcccagatcgggctctttaccttcggctctcatactcttaccgagaaatggtgtcccccgctcagagtaagtgagtgagtgagagggcccaggtgcaggcaggtgcctgtgggggtctgcactccttatgcaaatatccctatgctccagggtacacaacattatatagcaaattaaaaaaaaagaaaacaaaaaaaaagaaaaaaaaaaaaaaaaaaaggggggggcgcgcgcccacaagagaatataccccgcgcggggggcgcccaggatgaaagcgcgcgcaaccccacgttttcgtcggggccaagaggggggcccactaaaggggagagagggaatattataaaacgcagagggaccgcgggcgccgcgcggccttataacaaagaggcgcggagaagctggggaacacaagcgggaaaccgcggggaaaacccttggggagaagaggaacacctataacaccgcggggggggggagccacaaatatgggggacaacaaacatccccaacaggagaaaatattataggagcgccccatcagaggggaaaactatacttacaaaacttcaaaagagggggtatataagtgggggtataacacaagcaacgcgcggactatatagtcaagtcgctacgattagcaaaaatttaggggcaaccaccgagaagatttactacatttaagaccaaacactttttttatcaccacgagagaactaaaatagagaaaaaaaagaagggagcatactgttgggggggggtagacaacgaagaaaaaaagaacacacgacgagcccaacaaagagcgcacaacccacaacacaccaacaacaacacaccggaaaggcaaaagagacagacacaaacaccccaaacccacgtagagggccgaccaacacacaaccaacaaagcacacaacaagcacaaccacacagaaaaacaaaacgaacacgaaacaccaccgacccaacaaaaagca

SEQ ID NO: 180346 - DNA, 598 bp, Homo sapiens
tgacaagttctcactctgtcacccaggctggagtgtagcagcatgatcagagctctctgcagcctcaatctcctggactcaagggaccctctcgcctcaacctcctgaatagctgggacaataggcatgtgccaccatgagataacgtttttttttttttgtagaaatggggcctatgttgcccaggctagtcttgcctaaagaaaggtctgggttttacccttggcttcttggaggtaatctctagctcttggaacatcatgcctgataggaacatctttgctttcctggggaccttgagccagcaagatattaacaatgtgatttaaagtggggttggagctttgagtcacaggctacatgtcctataggtctgaaaacttaagacagccacatgcacagtcaactatctagtaatggataagactctggacatcaaggctcaggtgagcatccctgcttggcagtactacctaagcaatgtcacacattgatgccaggaaatgctgtcctgattccacagggagagaacaataggaagcttcacatttggtactgtcttgggcttttctctatgcttcccttttcttgactgata

SEQ ID NO: 180347 - DNA, 530 bp, Homo sapiens
tctgagacagagttttgctcttgttgcccaggctggtgtctcggctcactaccacctccgcctcccaggttcaagcgattcttctgcctcaacctcccaactagctggattatagccacccgccatcatgcccggctaatttttgtttttttgtagagacagggtttcaccatgttggccaggctggtcttggactcctgacctcaggtgattcgcctgcctcggcctcccaaagtgctgggattacagttgtgagctgctacgcccggcctgaagtgtgcttttaacactttgtaggaatgctagtggcaaagctaaggcttttgcttaaacctttgcctcctgggttcaagtgattctcctgcctcagcctccccagtagctgggattacaggcatgcgccaccacacctggctaattttgtatttttagtagaggcagggtttctccatgttggtcaggctggtctcgaactcccgagctcaggtgatccgcccacctcagcctcctgaagtgctgggattataggc

SEQ ID NO: 180348 - DNA, 240 bp, Homo sapiens
attgggttcttttgtcatgcaccacataatgactagtttttcttcacgcttatatcccttaatactttggggcttcagaatggtaatattctaatattttatttttgtttttatttattagctgaaataattttgtgcttcactctcatctactctgattacagttcacataggaaaaggggggtaaatatgcttcttcgatagcagaaatggcagggcgttccagcttcatcttgaaca

SEQ ID NO: 180349 - DNA, 666 bp, Homo sapiens
gagagtattttaaatggctggagtttggaggaggcactgaaacagtaacgtctgactcctatttcactcaatttttgacaagacttgggatgagaatgaagaagagtgataacaattgaagagaattttattcgctttcattctttcacagacacctgccccaatagcacacaccccaaatggacaaagttcagctctgctgaagccggcacattaaatgagtgaaatatttttagtaagagcagtggccaagtacaatgacaattcgatttttttttcaaatgacaactcccgcctctggcagctcatctctctttgctgccatctggtgtcacctcacatgaacctgacctgggtacagatgaagggactagaatccttcaattctagggttctccagaaagggactgagagttaagcaaacccagttctggaaaatgaacaaatatggagaattgaagccccaaatttgacacattgagattttgagcaataataaatgcccggggtgtgggcagggtttgaccgtcagtaggctggccttgccatgccgcctgaaattagaactttctacatgataacatttggattaatcagaagacagaggactcactatcttgagcaccaaatggagcacttttcattttaaggcccttaagttttata

SEQ ID NO: 180350 - DNA, 672 bp, Homo sapiens
actgtgctaggcaaggtatacaggccatctccaagaaaagatgactaagtgacttctggaacgaaaagcacaactgccatcctaaccccctccccaacattttccagggatcagccctttacttgttaataagcaagaagacaatgcatctgttgcaactgtgccatcagaggacaccagggcagagttactgcagcacttaattagcttagtgcacttgaaggctcagcctggagttctcaggtgagtggcaggaaaaccctacaactcagggtgggtcccaggacaaatgcagctgatgtcagaaaactatgtttggcaatgcagttagagacaaggagtagacgcctcatttgagaatcatttctcgaaagaaaattctagaaatgtgacagtagctggaggaggatgtggggtcagtagagatgaaaaatatgcaaggcctgatttttaaaatacctctttttgcatttcaattaaatgattaaaaattagcactaaaaagaaccatggagatctatatcaaaacccttcttttctctacgaagaaactgagatgcagaaatgttgagtgactgcttgtctgagacacctagctaatgaagagcagggctcgacttagaatttaggattcctgtccccatcactgggcctctactccatctaccacaa

SEQ ID NO: 180351 - DNA, 229 bp, Homo sapiens
gccatttctgattcaaaccactttgtttctggaagccacttatcctacccaggaaaagtgaacaacgctgctaatgaccaggccagggtactaggccttatcaggggattttaattagtcccacactaaagaggccataaacctaaaataaagcaaaataaaacaggggcaggtgtcttctctcctattttgatcctttatagcgtttttgattccagtttactttctg

SEQ ID NO: 180352 - DNA, 255 bp, Homo sapiens
gtcccttagttcaaccataatctaagaaacagaattgcaaacatgctacatgactcagtctccagggcttagcttcccccttggcgttttacaaaccctatggaactgctctgcccattgtgtgactgtgtttatatttaaattgaaattgaatataaattaaaattcagtccttctgtctcattagccacatttcaagtgctccacgatacctgtggccagacagtgggggtatagtctaaaacacctccattg

SEQ ID NO: 180353 - DNA, 448 bp, Homo sapiens
aaataatttgctatattctgcacaacaaaccctgcttttcctgggaaggggtaattatccccatggaaaaagaaaaaaagaaaaaaatacgccatctcatattaagctaaagtctcatcaagaagagaaaaagtgcctcattacatgtaattaccagggaattagaaacatcatttaactaaatgagcgaataatgctcaggatattgaagaaacttgcctgcacttctgcaaagcactctaagtcccattacaaaaattgcccctctttaatggaataattttaggccttgtctgccttgctttaaaaataaagagcctccgagcggcagaaagaggctgaaactgccataaacaactgttgaaagggactgaagggaaggcgctgtctctcttggagaccaagacccagaatgactcataatctaccataatcaggaaaattaaac

SEQ ID NO: 180354 - DNA, 365 bp, Homo sapiens
gcttaagaaaatgttccaccactgttttcctatgagtccgatgatatgagtcagtccacagaattttaaaaactatctgtagtaattgctcaaactcaaaaaggaataatgtagaacctaaaggcagctgagacgtaatgaaaagaattggacttaaattcagaaggttgaggcaattccctagcccagtttttcctaacagcttagacctttccaaaacaagtatgccaatacttaacagagcccttgtgagaactggcatgatgtatggggcagaatagtctacacaccaatgtaaagctcttctatagaatgttgttttgaatccaaaacgtaaaacgcaaattacaacgcagcaatgaaaa

SEQ ID NO: 180355 - DNA, 267 bp, Homo sapiens
cccacagagcactcttcatgaagaaaagtgtgggcttgctgtcttttcatcaaaactcgtagaatttggctgactgcctggtttatcccaggacattagtcagcccacaaatcccgcatttgtttattcagtccagagcaagtgaatactgccattttctcatctcctttgttggcaacactttgttaacctgaattgggttctcaacataaaatgaagtgactaatcttttggggggttccccctcccaggttcttgtatgagcaa

SEQ ID NO: 180356 - DNA, 186 bp, Homo sapiens
taggaggatcgcttgaccttgggagttcaataccagcctgggcaacacagctagaaaaaataaacatcactacaaaaaataaaaaatataattagccgggcatggcagcacacacctgtagccccggctgtttgggagactaaggcaggaggattgcttgagcctaggaatttgaggctatagtgg

SEQ ID NO: 180357 - DNA, 572 bp, Homo sapiens
tcaaaaaaaatctccaaatttttcccaccatctccacatcccacaagttttcccagttcattccccttgtgcacactgggtatatatgcaagatgcattacaacgctcttttgtgcaaatgttacacatacttcagaataagacaaagtccactaacaaggacgatcagtcataatgtagagctctgcatttctaaagtatagtcttcagcccactaaatcagaatcttggggagggggctgggtggtagcccaggaatctgaatgttgagcacctgggcaactctaatgtttattaactttgagaaccaataggttccctcatctagtagttgctgagcacctactatattctaggtactattcttggcccatgtcctcagataacttatattcttttggagtatggggtgggggccagacaaataagaaaataaattcaatagtttcagatagtaagaagcactacaaaggatgtaaaactggtgaatgaaaaaatgactgctaggggatgcaatggaggggataagcattccaggaaagtttctctacagaagtgacatgtgggtagag

SEQ ID NO: 180358 - DNA, 640 bp, Homo sapiens
ggcacgctcctgtagtcccaactactcgggaggctgaggcaggagaatcgcttgaacccaggaggtggaggttacagtgagccaagatcgtgccactgcaccccagcctgggcgacagagcaaaactctatctcaaaaataaacaaataaataaataaaataaaaattagaaaatcccactgagtgtaggagaaagctactagaacaaataggtgagtttggcaaagttgtagcctacaagttcgatatacaaaatcagttgtatttctatatgtcagcaataaacaatctgaaattaagttttcaaaataataatttataatagcaccgaaaatatggaatacctaagggaaaatctgacaaaaagtaagtaagcaaggcctgtttattaaaaactataaaacattgtggagtgcaatttaagaagacctaagtaagtggaaagaaatatcatttttatggactggaaaactcaatattgtgaagacatcagttttctccaaattggtctatagattcaatgcaattgccattaatatgccactaagattttatgcagaaattgacaaacatttttaaatttatatgaaaatgcaaatgatatagtatagccaaaacaactttacatgtggaaagattt

SEQ ID NO: 180359 - DNA, 126 bp, Homo sapiens
ctggttatttgtttctgctgatttttctcatctcacaggtttctcattcccgaaggtaatttaggatgatgttacttaagaactggagttaacttagtgaccagatattaagccatgaatttcttg

SEQ ID NO: 180360 - DNA, 306 bp, Homo sapiens
ggaaatgttcagtggactatgggtgtgtgttgccaggcaaccagtgagaaggataactcagggatagaatacgagaagtgctctacaataaaggggaggatggtacatcacttggtaggcttgtgctggaggactggggaagacaaaccagctgaagcaggacttgaatgacatggcatttcacaagtagagaactgcggggagctgaaagaaggtcatcgtgggatgatgttagagggtgagcagaagcctctatgtggtcaagatcagggtttatttaaaggctattttttaaatgaccaatat

SEQ ID NO: 180361 - DNA, 297 bp, Homo sapiens
acaggtcatttcctatagggagggcagtagtataagcaaaacaacaaaatattcaaaattctcaaataagtactatttattattgaaaaactcagataaatgtagaagttattttttctctctattgagcagcagttacatatgctagaatcatagtttgaatgattcagactgtgtacctgtgatctgacatacctggattggagttccatctctgccacccactttatttgactccatagagaaattactcaagccccttaagacagacactgaaataggatacagtttccaaga

SEQ ID NO: 180362 - DNA, 195 bp, Homo sapiens
atattgggctaagttactcttgaggatagagcaacccctaagaacagtgtgttgctttgaattttttatagggatgtggtcttactctgttgcctcagccttctgagtagcttggactgcaggcatgtgccaccaagcttggcttgaaattattttaaggaatggttgggtagcacttctatgtcctgtaacttc

SEQ ID NO: 180363 - DNA, 451 bp, Homo sapiens
gagtcttgcctgaccgccccacgcacagtggcacctcctcataccctgtcacacatctggattcacggtcttccttgcgccttctgctgtctgaatatatttgactgtgtgtttattgcttatctcctcactagaatgtgagtttcatgagagtagtaggaatcttgtctggcttgttccctgccttatgcccagggactcagtgattatttgtcaagtgataaatgggttgtggaggtgagtgctccctagcacagggtccagctgtctgcaggcattgggaatctagcccattgtattatcgccagttgttctcctgtctgtctcttcttcgtccccgtattggcccacaagtcctccagggtggctcctactgctccctctccatatacctcacacccagcaacagcctggcactgagatgggactcaatgacgcttgctgcgtgaat

SEQ ID NO: 180364 - DNA, 450 bp, Homo sapiens
aagggcaaaatgcctgactgacatatttcctagatgaaccttcccctcacttacagaactgtttcacctgtactgaaaagaaaaacacacatgtgccataatggaaagaacacaggtttcagaactagacatacctgctcaaatccttgtccacagtactctccactgtaaaagagggatactgacatgttaaccacaaggctgttgtgatctataaagcatctttatgtacctggcatatagtatattctcaataaagatgagtttcactagaaccagctctccttcacaaccaaactctggagaataattttactcatttctcctcatttattcctcaatccatcatgatctcactactaccttctttgccatccccaccctaccaaaactgcatttcagaggaaacaagtgacctcctgattgctaaatatagggcaggccaggcat

SEQ ID NO: 180365 - DNA, 341 bp, Homo sapiens
cgacacccctaggcatgtccaactcagcacctacacctgctaggtccacacactgtgttatccaagacagaaggtgttagcaaacctctctttggtgcgcccctgaatgcagaacatgtgacattctgttaactaacagttgtgccagagtggtttccatagcccatactggggttcccatgatttgtttgatcatgagcccggccattcgaattgtttttgaattggtctgatatcagctagttaattgttaacccttttcaggtttgtttcccacataccagtagatgtctgcttagtgccagggttctgagctttttatttcacttaagaatataata

SEQ ID NO: 180366 - DNA, 489 bp, Homo sapiens
ggaatgccatctacggtcaccctaacagagcaatctgagaggcacttctgagccctctctttcaacccaatatctatcaggtttatcatccttattaactcctcaaaaagacctattattccctttctcttcagttactctcttctgcactatccctttttgtctactgtaaacatattaatatttcaagggtcatttcccaactggaacctagcacaacttattaagatagtactattataaaaatagggacatctgcttccaccatgatgccctggttaactgctgtggaaattgccctcccatagtaaaaaactaaggactcgaaaaattatatgaaacaccagttttcagacactgaacactgatcactgaacatgaacattaatcacagttcaaaaccatgatccatgagggaaaaagcagcaaatgaggcaagctgtctgaatgccccaacgtagtgtctggagagttttgaggatccgtgac

SEQ ID NO: 180367 - DNA, 268 bp, Homo sapiens
cttgctgatccttctgcctgtctcatgtgcagctctgctactggaatagtcacatgcagacatttacagatctgggtttctgggaattctaaccacattaggactgggaggtaatatatctcaaaagacacaataagctgggttgaagtccctgttcctactcactagctgggtagcctcgggcaatctgctcaatgtctttgtgctcctctttcttcgtctttcaaatggggataatgttagttcctctatcaaatagccataaggg

SEQ ID NO: 180368 - DNA, 1257 bp, Homo sapiens
taatcaaaatcagcttacttatatcacatttatggtgtataacaatcgtgacctgaaggaaggaaaaagggaacagagtaaacaaaatggcaagccaaaagtatggcagccatcattgacgatgccctgaatgtacaaagagtgtctaagggaaacccgaagggccataaagataatgccagcaaaggctcttgcttcaaatgcaagaaaagaagacattgggcaaaggattgtgctaagtccccgccaggcccctgccgtcaatgcaagggcaccagtcatgacccctggcactggagaattgactgcccatgttcccactgaggggctcagtcagtcaaaactctagcagtgcaaaaggaggaattagatgaagactgaaggggcctgaggtcttcctcactgcccctgttcaggaacattgtaattactactgaggagccccaggtaactctggacgtcatgggcacccaaattcagtttctttttgatgcaggagcaaattactctgttcttactgcttatgcagtaaggcgttcctcccagtccacaagtgttatgggaatagaatggaagccacaaacgagtttttattttattttattttattttattttactttaagttctgggatacatatgcagaatgtgcaggtttgttacataggtatacatgtgccatggtggtttgctgcacctatcgacccatcatctaggttttaagtcccacatggattaggtatttgtcctaatgctcttcctccccttgcccccaaccccccaacaggccttggtgtgtgatgttcccctccctgtgtccatgtgttctcattgttcacctcccacttattagtgagaacatgcggtgtttggttttctgttcctgtgttagtttgctgagaatgatggtttccagcttcatccatgttcctgcaaaggacatgaactcattcttttttatggttgcgtagtattccatggtgtatatgtgccatattttctttatcccgtctatcactgatgggcatttgggttggttccaagtctttgccatggtaaatagtgttgcagtaaacatacatgtgcatgtatctttataatagaatgatttataatcctttgggtatatatccagtaatgggattgctgggtcaaatggtatttctggttctagatccctgaggaatcaccacactgtcttccacaatggttgaactaatttacactcccaccaacagtgtaaaaatgttcctacttc

SEQ ID NO: 180369 - DNA, 315 bp, Homo sapiens
ttaatgtatatgcacatatgtaagtatatttcccttctccaaagggaaaagctctacacagtttcacatgctccagcaggcttgtgaccaaggactggggacactatggtaggcagagtcctctgcttaaaccctgggagcccttcagagagatgtttacctgttaaaagtcgtttcccctcaagcctcactcagtgggcctggagctcaaaagtcagctcaaggtcattatttctaacgagaatccagagcaaggtatcagtctctcagatcctcccttgtgcttgatcatccaaattattactatcatcctgg

SEQ ID NO: 180370 - DNA, 135 bp, Homo sapiens
tgtaaaatgagagaaagaaggtaatcagggaaatttggtaagacatctactcattctaagcagcacagtatgaacaactgaattctgatttccaaaatccctgactttgacttctggctctttcacctagtagct

SEQ ID NO: 180371 - DNA, 368 bp, Homo sapiens
acctgtcagtggacattccctgtccccattctggggaaatgcctttcaggaaaacagacctacaaacactgcagcagagtagtcctctgacagccccctacaatgggccttcattcttgggtataaatagccaaataaggattgctagacatttgaggaaaaccatcagcataaaagagaaggaccaagaaaaaaataattcaaccagcctcagaataaagagacataactcagacaacagaagaaacttaaggcacttccttttttgagacagggtctccctctatcgcccaggctggagtgcagtggcatgatcttgtctcactgcaacctccgcctcctgggttcaagcgattctcctgcctcag

SEQ ID NO: 180372 - DNA, 206 bp, Homo sapiens
ctcagaaggaatgctggcaaggctgatggctgataaggtcaagcttcaccaccacctaatccaagaactcagggtggatcagcactttctcaccagagataacgctgcctctttcctagccacccagaaagactttcaatgtagactttgagtaactcctaggaactaggataataaacaaagtcatattcctgctgctacaaggg

SEQ ID NO: 180373 - DNA, 242 bp, Homo sapiens
gcatatagtagcaggagctcagtcagtgtttgttgtctgagtaaatgtcactcctgccttgcatctaacctgcagttttcacaggggctcatttgtggttttgcctgctgtgccttacagccagtatttgtccatatattttctattacccagagattgttgacatctcatctgctgcaccttgtaacccccatctctaaaccagtgatctccatcatatttttgacctgaaaatttttgta

SEQ ID NO: 180374 - DNA, 835 bp, Homo sapiens
aactccctgaatcaaatggcaatacagagactaagggttcttctcgatttggaaaattcgggtcattttgcaaaccaatggtatgttctgtatgatgggaaagaaaatagtttctcagcagacgatatttttggaaataactaagtccccttcccctaccccctgacaccaagaacaaggctccaagaagctaggggtctggcccagcaaagacaagtgggaagatgcctttgactctatggtactttccagggaggcagcagatgaaagccatgtggtttaaagggccagatagtaaatatttcaggcttcataggccatttgtggtctccatcccatacattttatcttttaaaatatttcttccaacgctttaaatgcgtaaaatccatcaggcgtggtcgcgtgtgctgatagtctcagctacgtggcaggccaaggtaggaggatcactcgagcccaggagttgaaagccagcatgggcaacgtagcacgacctcatttcttaaataaataaataaaattaaaaggtaaagactatccttagcccaggagccacacagaaacagttactgagctggatttggtagtattttgccagcccctgcctgaggaaacaaaggaaattaaaaaacctctcctggccaattcactctgtcctgtggcagggaacaacacaaatgcagaaactgtcccagatgtgactggggccctgtacaaatggagtgaggcactgcaaaagaacacaagttgagagcagagtgtggtagatgggcccttccatccaagccgccacagacactcagaggcagaggaaatcgagctcactaggtac

SEQ ID NO: 180375 - DNA, 454 bp, Homo sapiens
tgtattcccagtgcaggcagctcctgcgggactctgtttcccaaataaggtttgcctagttccaccctttgcctatgctgcatcacctatgttttagttggaacctaacactgcaccccttcccagctgcaagtggtgacctcaggaatgtcacttccccctggggggctcagttgcatcatctgtaaaatgggtcatcgtcgtgaattacacaaggaaggtacaaggaagtgcctcgaatacacaattggatttgctctcaggagaaacaggatactctgtgcccaagaaagattagccatctttcatggcgtgccttcgttcaaccaacacttgaccttgactccgccccttcttagcatccagctaagtgcagagagaggcagaaacaaacacccctgggctccagatctgccacactgggaaaataccagctgaacggtttctccagccg

SEQ ID NO: 180376 - DNA, 237 bp, Homo sapiens
gcacatgcatcatctggggatgttgctaaaatgcagatgagggctcagagggcctggggtggggcctgagagtttgcattccttcacactctcaggtgatgctgatgctgctggtctgaagactacattttgagcagcaagattcatagaaacactttcctggaaacactctcttggttgtcctcctgcctcatgggctgttctttctcagtctcctttgctggctgcgtgtcctca

SEQ ID NO: 180377 - DNA, 506 bp, Homo sapiens
ccgacacatctggctaactttttaattttttgtagagacaaggtcttgctattttgcccaggctgatctcaaactcctggcttcaagcaaccctcccgccttagcctctcaaagcgttgggattacaagcatgagccaccacccagcctgttgctcaaactttaaacatgaaagacatgtaaacggaaatcttgaggcttcaaaaactataatgcactggataggatccaaaatccaactgattcttactgaattctaagctctaatgaataaggttatgaagagttccatgtttggggcatgaggcagcatctgattttaaactgaatgcaagtggcttcttttttttttttttttttttttttgagacaaggtctggctctatcacccaggttgaagtgcagtggcatgatctcagctcactgcaacctccgcctcctgggctcaaaccatcctcccatcttagcctcctgagtggctgagactacaggtgcacaccaccatac

SEQ ID NO: 180378 - DNA, 409 bp, Homo sapiens
gtttgcttggcatttcataaagggcagtgatttctgcaatattggggttatttacagggggagagcacctatcaggtctcaactctatcttacaatagactaaacagggtaaaggtgttctttagcaccttggggctggggaggaaagggccaggtttgagggaagggggaagaaagaaggattggagaggagcaagttccctgcaagaaaggtgcagtgtggcaagacactcctagagaacacagtggctaccttctctggcagccaattttaaaatcagattttcaattctcattgtacttcaaagcatctgcattttttaaagatccccagatgattgagtcctatcctgtggatattctgattcaattggtctagggtgagaaccctgcattagggttttttttt

SEQ ID NO: 180379 - DNA, 536 bp, Homo sapiens
ccccgcgtgcccagccctgcaccaaagctgccacgttagagttctgttgagtggcgctcactccacaggtgttcctagggccatacaggcctaactgtccccatcccagcaacctgtggagtggccccatgggcagggcacatgtgcagagtctctgggtgccactgactgactacagaccttgggacagttcctcacttcatctgggcctcagcttttcacctgcaggaggacctcctagtctttcgtctttaggttccttctaaccttgctaggctgtactagctagtatgacttattttgcgctgggcacctcaaagacgtactcctttctaaggcctcagggactgtagccaccagcttccacatatgagcgtggcaagcaggtgacggtcatccacagtttcgggggtggactccatcccaggcccagtaccaggcacaaggactcatcagttaccccttgtcaaacctgatggccacattgcctagaagtttcctgccaaatcaggaccaaataagccacttccaaagtc

SEQ ID NO: 180380 - DNA, 104 bp, Homo sapiens
aggaaaagagaggcaaaaaaagaaaaggcacacatttaacagcatcaggagagatacaggggatagaactacagaccccacagacatcactgatacttaataag

SEQ ID NO: 180381 - DNA, 189 bp, Homo sapiens
tcccctaaatgccattattccccaggactgtcttcggtccattatcctccaactctctctagtcaaactattcctatagcttacactatcatccacatctaattaattacacttcatatcaccagccccatctattctgagcttcacatccagattttcgactgtttactggaccaggtggttttcaga

SEQ ID NO: 180382 - DNA, 273 bp, Homo sapiens
gtggattacaaggtcgggagatcctggctaacatggtgaaactccgtctgtactaaaaatacaaaaacaattagccaggcgtggtggcggaggcctgtagtcccagctactcaggaggctgaggcaggagaatggcgtgaacccgcattctcagcttacaatcctatccatagagggggcccaggatccttctcaaatgaatgaaagtagagtttaagtctgcagtttttttcctctttggaaaaaaacattcctttcctgcccatgacccag

SEQ ID NO: 180383 - DNA, 324 bp, Homo sapiens
cagccggtccaacatgcgaacggactgatccaatatttgtgacgaacatagaggtgcgaagttgtccttgaaaaggtgttggatcagtccgttcgcatgttaacatgcgaacggactgatcaataaagggagtggattagaagagcaagggtcaaaggaaaaaaaaaggaggtgaactctgtatttttagttttttttaaatgtagtcaaaccatattataacactggaaccagaagaaaaaagtaatgttctaatcctaggaaagcattagctgtctgggcttttattgagaaagttttagcaggatcagtcaatgcacattt

SEQ ID NO: 180384 - DNA, 1799 bp, Homo sapiens
  misc_feature (161)..(161): n is a, c, g, or t
  misc_feature (702)..(702): n is a, c, g, or t
  misc_feature (1085)..(1085): n is a, c, g, or t
  misc_feature (1191)..(1191): n is a, c, g, or t
  misc_feature (1655)..(1655): n is a, c, g, or t
  misc_feature (1798)..(1798): n is a, c, g, or t
ggggaaaatcatgtaccttggagttgtggaggcatgtttataagcagatctgagttttgccacactggaatttatttattcattgaacaaatatttaatacctactacaattcttagccgtctgttagagattgctggaggtccactacagacactgtttncctggatatccccagcagaggctacagaacagcaaagattcctgcctgccccttcctcttgaaggtttgttccagagggacacctgccagatgccagccagagctctcctgtatgagatatgtgttgatccctgctgggaggtgtctccagtcaggaggcatgagggtcagggaactacttgaggaggcagtctgtcccttagcagagctcaagtcctatgctgggagatctgctgctctcttcagagccagcaggcagcaatgtttaagtctgctgaagctgcgcccacagccgccccttcacccaggtgctctgtctcagggagaagggagttttatctataagcccctgactgggtctgctgcctttctttcagatatgccctgcccagtgaggaggaatgtagagaggcagtctggccacagcggctttgccatgctgcagttagtcttgcccagtccgaaattcctggcagctttgtttatactgtgaggggaaaaccacctattcaagcctcagtaatggcaggtgcccttcccncaatgaagtcgtatcatccaaggtcgacttcagactgctgtgctgacagcgagaatttcaagcgagtggatcttagcttgctgggctccataggggtgccaccagttgagcaagaccacttggctccctggcttcagtcccctttccaggggagtgaacagttctgtcttgctggggttccaggtaccactggggtatggaaaaaaaatctcctgcagctagctcagtgtctgcccaaacagccacccagttttgtgcttgaaacccagggccctagctgtacaggcacccgagggaatctcctggtctgtgggatgtagaaactatgggaaaagtgtagtatctgggccacagagcacagtccctcatgacttcccttggtnggggaggaagttctccagccccttgtgcttcctgggtgaggcaatgcctcctgctccccctccatgggctgtacccactgtctaaccaatcccaatgagaggaacnaggtacctctgttggaaatgcagaaatcacctgccttctgcattggtctcactgggagctgcagaccggagctgttcttcttcagccatcttgcccgctcatctctaaaattactttcttgattacttttttttccgtaaatattagctgcttttccatttatttagatcttttatttctttcaaaaaaaattttaactttacagtggataaatcttaaaattcttttgttttgctgttgttgtttacttttattttagatacaggggtacatttgcatgtttgttatataggcaaatttgagaatatgtagtatttggtattcctggtcctgtgttagtttgcttacaataatggcctccaactccctccatgttgctacaaaggacataatattgttcttttacatggctgtgtagcataccatgctgtacatgcatcacattttctttatctagtctaccnttggtggacatctaggttgattccatatatctgcaattgtgaatagtgctgcaacaaacatatgcatgcatgtgtctttatggcagaatgatttctattcctttggatatgtatgaatccattattacattgctataaagaant

SEQ ID NO: 180385 - DNA, 594 bp, Homo sapiens
agaaaactgtagcatcaactatattatgtttctgggcatgttcagcataggtaatgtgtgcactttatgtgtacacataatcatatttaagttttttgacagcataaactttgtgaccagaagacacactgtgttaggtagaaaaatgctacagatgtcttcatccctgtatatgtgtccttcttcagtctttatttctctttgtgtttcagttaggataatttctattgatctgtcttcaaattcactgatgttttttctctcaccctggctttgtcaagtctactgctgaacccattgaaggcattcttcaactcagttatgttttatttttatttgtaatatttccatttgattcttacaattttcatatatctgctgaaattccccatcttttcatgcatgttcatgttttcccctttaccctttgtcttagtcagtttgagctgctataataaagcaccatagacttggtggcttataaacaacagaaatttattcctcacagttctggagcctggaagtctgagatcagaatctagcaaggttaggtcttggtgacggccctcttcaaggttgcaaactgctcacttc

SEQ ID NO: 180386 - DNA, 181 bp, Homo sapiens
tcttcacgtatcttacaggacacccgcctctcctgactgtcacactacctctctggctactccctcatagtctccattgttagaccctcctcctcatctcaacttcagcttctagctgctggagtgccccacgtcagtttctttcagagtccacactcactccccctaggtagtctcaccc

SEQ ID NO: 180387 - DNA, 594 bp, Homo sapiens
gagcttaggattttggtaccagcttgggcaatatggcaaaaccccatctctacaaaaaaaatacaaaaacttagctaggtgtactggcatgcctatagtcccaactacttgggagactgagttgggacgatcacttgagcccaggaagttgcggctgcagtgatccatgatcgtgccgctgcactccagcctatctggatgatggagcaagaccctgtttaaaaacaaacaaacaaacaaaaagtagcaattcaaaacctgtgctataataagagaatatttcataatcatcagattaggtttatctcagaaatgcaaacatgatacatcagaaaatacattaaagtagtttaatatattgagattaaatgtgaaatataaacatcttagtagatgtcagagtatttgctaaaagttaatttgtagttacatttttttaaaaagtcttttcaaaataaagataagaaaatatggaaaggaagcctctaatgagcataatacttaatagtgaaagaatagaaacattcccattaacgtcaaatataggagtaatgttagtatccttgttacttttagcatatatctggcaatgtg

SEQ ID NO: 180388 - DNA, 590 bp, Homo sapiens
tgcagtcttcaggtttctgccccagcccagccacactggaaccacaatgccttcctcattacctgtttcaaaccttatctgactgagttctcccaaattcatttaactgtaatccatagtcttccggaggatttctcttgctctttttctccctgataccagcccctcctgtttttccttttacatttgtgaactttttctaactattcttagctggtggttgtttttctacccactttgtacagattgttgtttctggggtttttctttttgggcaaatttgccagattactccattcctatggtttcacttaccacctacgtattgcagacattcacatctttatatgctgcctgtacccccttcctgggcatctgacctctgacagcttcatctaggtgttccataggcactttaacctcatcatgtccaaaatgaattctctttttcctcaagccaactctttttcctgtatttcctaggccagaaattcaaggacttttctctgagtaactgagcagtaattaagtataattttttcctcaataatccaaagcagattgtgagaaaacattgcttttgaataata

SEQ ID NO: 180389 - DNA, 344 bp, Homo sapiens
tacataggcttggcccactatcctgaaagtttatttctattcagtcataatttagatacttagggaaattccaagaggaaaaaaaaaaaaaacatgctctctcaacatatagcagaagatggcaatgagaacagcagcttaggatggatgggaaagcagaaacccaggcccagaactgcggcttctcagaattctgagaagctgagattaagcctggagactttgttccttcctctgtttctttcattctttaaaaatgtgttactaatttatattttcagaccagaaggcaaccttattttctttaccagtcttgaatccagactggcacagcactgttatat

SEQ ID NO: 180390 - DNA, 351 bp, Homo sapiens
aaacaccaaaaatccagcaaaactgtccttcaaaaggaaggagaaattaagactgtcccagataaatgagggagttcactactaggagatctactctacacaaaatgctaaagtgaatctttttaagttgaaataaaaggatggtagagagcaacacaaagccttatgaaaatatcaagttctccagtaaaagtaaatatgtagacaaatgaagtgacctgtactattgcagatgtggttcatagaatttaaatgtgaaaaatataaaaagtaactttaaatctgtgttcattgctatacaatacataaatacgtaatttggagcaacaattatgtaaagtgaggaataga

SEQ ID NO: 180391 - DNA, 267 bp, Homo sapiens
agaaggggagtgggggtgggcccgagtcttagagctacatatttggattggaaatgttttaaagcttgagagccctcttagaggtgacccaaaccaaatttctgatctataacagtctctgcatcctgaaagctgtgcgttcccctggggtatggtaatttaagtgaagtctttattgggctgaaattacagtatcaactcatgtactttcatcatcatcactttgtttcatcatgagatggtaatactgtctccctacaactgcag

SEQ ID NO: 180392 - DNA, 1158 bp, Homo sapiens
atgtcctgcgagcttaggggtgctacaagttgaccactgcagcagtaaagatgactctgaagaatggcatgggatggatcctttcgaatgcacttgagcagcagtctccaaccacagggccacagagctggagctggatctaccatgaaagacttctgaatccaggaagagagactgactgggcaacatgttattcagggtctccctctgttgtccaaggctggagtgtagtagtgctatcacagctgactgcagcctcaaccttccaggctgaagtgattctcccatctcaacctcccacgtggctgagactacaggtgcttgccaccatgcccaactaatatttggaattttcatataagtggattccagaggggtgacagcaaaacgtgggaccatccagttgcaggaaaacaagcttaacacgcccactgattttacattatgctcctaccacccggcagcctctccaggcccagaactttctccagtcagcctctacagaccaagctcatgactcacaatggcctatttaggcccataccctacctcacggcagtctccgcagatgagcctactgcctcacaacagcctccacaggcacagctccatcattacaatggcctctttagacccagctcctgcctcccagccttctctctaggccctgaactttctgaagtcgacctcaccaggcccagctcatgcttctttgcagcctctccaggcccagctcctgcatcttggtggcccctccaggcccagcctctgcctcccgtcggcctctacagtcccaacatctgcctcatagcagattcttgaggcccagcatctgcctcactgtggaccccccaagccaagctcccaacctttagcagcttctacacacccagctcctgccacccagtggcctctttaggccaagctcatgcttcacaagggcctttccaggcccaactttcgtctcatggcaaccttccctggccagattcctgcgtgtctcccagcagcctagacaggcccaggtcttgcctcacactggcctctctacatccagctcatgcctcacagtgacctctccaggcacagctcctgtcccagaacgtcatctccgggcccaaaacttactcaagtcagcctctctagtcccaactgctg

SEQ ID NO: 180393 - DNA, 1165 bp, Homo sapiens
aaaaaaaaaaaaaaaaaaaaaagcttttatgtctgtcttcctatctccctattgtttttcactctcttcgtgttaaatctcctcacagtcttccacatcattgtcatatcctggaagtaaaggaacatttaaatctgtagaaggagattatttttaagaatgatggtttggcagtgtatgttcagttactgatttgccacattctgtttctaaaaaagaagttggatatttaggtaaaaatatgcctatttattaactggcgatttaaaatttaagttaataatgtcaaagaatggacttctgagtcttatctgtgtttgtaaaatatatatcttctcctcacacaagtaaattatgtcagtgtcatcccacttaccagaccagcgaagtgtctccactatatttttactttctgcttctgcacttgtaagctttataccactaatttaatctgatttaaaatgttttatactatttagttttaaatgatatggtaaagattttttaaaagagccataggggtagctcttacatcctcccacccattttccttgtctcctttctccagccaaaaaccccacttgacaacaaaacaaagttattagatgtgtccaatataggtgtttttggtgccaggccttcccatctgcaagattctggagggagccgagtggttttattgagccgagtgtttttattgtccacaagctctgcttttatctcttctcagaaaacaaaagcacatcacctagaactttatggcccaggtagcagggtatttttttaatgatagcttttgttaataaaaatcccaacatttccatgcagtttcctttatagaacacacaatattttgaattgattattgttttagctagtggtgtttacttagcatttccaaccccagattttctgtccttgctacttgataatggacaccgctactgggatattcaaggaagtagatgatcagatggatttttttgatcttgtaggaaaaatggaaacaaacttgaaattaaaaagatacatttctaactcagtgccatagaattccttttttttaaatttttattatcagccaggtgcggtggctcaagcctataatcccagcactttgggaggctgaggcgggtggatcacttgaggtcaggagtttgagacc

SEQ ID NO: 180394 - DNA, 186 bp, Homo sapiens
  misc_feature (181)..(181): n is a, c, g, or t
cacaactttactgatgaagtaaaccggtaaatttgaggcttaacttttaagatcagtaataaatgctatatgttattagaaaaattatttagaggtagttatagaacatttgaagtacatataagttttgaattctaattttttttttttttttggtttttggtaattggtggaaacagcntatca

SEQ ID NO: 180395 - DNA, 291 bp, Homo sapiens
atttctctcttaccataaaatccttccatgactgccttctaaaaagttctggccaggcatggtggttcatacctataatcccaacactttgaaaagctaagctggaagaacacttgcaaccagatgttcgagaccagcacgggcaacatagccaagatcttacaaaaaactgaaaaattagccaggtgttgtgatgcacacctgtagtcctagccactgcagaggctgaggcaagaggatcacttgagtgtgggaatttggggttacagtgagctatgatgatggcactgt

SEQ ID NO: 180396 - DNA, 624 bp, Homo sapiens
agaaaaagagagaacaaataaaaaataaaatatcagacttaagccttaacatagcagtaattattttactttatttcatttatttttttatttactgagatggagtttcactcttgtcacccaggctggagtgcagtggtacaatctcagatcactgcaaccttcacttcccaggttcaagcgattctcctgcctcagcctcccaagtagctgggattacaggcgcccaccacaacgcccggctaatttatgtatttttagtagagatggggtttcaccctgttggccaggctgatctccaactcctgacttcaggtgataagcccacctcggcctcccaaagtgctgaatggattacaggcgtgagccactgtacctggccatcaggaattattttagaagcaaatggtctgagtactacaattaaaagacaaagattggaagagtatattatttttaaaaaatgactcaagtaggccaggtacagcggctcctgcttgtaatccctttaggaggctgaggcagaaggatcacttgagcctaggagttcgagaccagcctgagcaacacagggagaccccatctctacaaataatttaaaaattagccaggcatggtggcaca

SEQ ID NO: 180397 - DNA, 393 bp, Homo sapiens
tgactcctggacttaagtgatctgccgtcttggcttcccacagtactgggattacaagcgtgagccaccacagccctgccctttttattgtttttaacaccttccctccttcaacgtgttatagacatctcagcaaggatttatttttcttcctcgttttaggagagtagacagggtttcatgattatagggttaaggaaatgttttgtactcatgaaaaggaaatgttttgtactcacaggaaaagcaggtagatccctaaagataatgggagttgggacaaatggtaaacctgggaaggaagacctttgctagagtctgtttgcctccaaggcactactcttatgctctagaaggaatgggctcctggagaggtaagtgctttagggtcca

SEQ ID NO: 180398 - DNA, 807 bp, Homo sapiens
ccggctaggtacgaggcgggggtgaatcggcagaggtgacacagcagaggggttcaaaatatctggcaattcccaactgcaatattgaggacttttaaagccatatgtaaaagcttcctccacccctctctttataggcctagttaacccagcaactccccgattgggggaaataaaatttaaactctagagataaatggactaatttgctgtgatgcagatcattccgtgggctagtctgtctcctggggctggcaacaattgctaaaatccataagcatgactggtggtaagagtcagtgaggaaagccacaaagctccatgctgtcatggatgctgtttatgggatgcaacggtgaggatgggatggttaatatcgtctgttccctcggaaaacgaagtgttgtaagcgttgctgcgtgaagtctgcccttcccaggctaaaaactgagctttctgaaaggcaaatgaatggtccccctaaccatgcagagagagattccactgaagccaagagagagccatgacatggacccgagagccaaatgtaacagcaggacctaacactggagctcagaaggaagcagaagacacacagaggagcaaggagaaagcaccaaaaggggcagcagaatcaaaggagggagccctgcagggcacagcaagacgcctggggctgcggggtccgcaaggtgcacaggagagaggctcagagagctgggaagcagacaggaaggagagaagcagaaacaggaggacatgaaggaaaacctctgtcaagaaaggctgctggggacaaagatttgg

SEQ ID NO: 180399 - DNA, 1046 bp, Homo sapiens
gggtcacatggatacaggagatgtttttcaacagatgctttggtgaatgcgggcatggtttacacggtctcacaaagcaacctttcaggccgtccaactgcaatgtcattctgacccctgcttgcattctgaatgaattttgccatgaaaattgtgaaactattccttagttgagaaaggtcaggatacacttctcaataaacaacagcagtgttcactgggaatctgcctgaaactgaattaagtaactaaggcctaggcagtggctggattgctgacacagcagaggggttcaaaatatctggcaattcccaactgcaatattgaggacttttaaagccatatgtaaaagcttcctccacccctctctttataggcctagttaacccagcaactccccgattgggggaaataaaatttaaactctagagataaatggactaatttgctgtgatgcagatcattccgtgggctagtctgtctcctggggctggcaacaattgctaaaatccataagcatgactggtggtaagagtcagtgaggaaagccacaaagctccatgctgtcatggatgctgtttatgggatgcaacggtgaggatgggatggttaatatcgtctgttccctcggaaaacgaagtgttgtaagcgttgctgcgtgaagtctgcccttcccaggctaaaaactgagctttctgaaaggcaaatgaatggtccccctaaccatgcagagagagattccactgaagccaagagagagccatgacatggacccgagagccaaatgtaacagcaggacctaacactggagctcagaaggaagcagaagacacacagaggagcaaggagaaagcaccaaaaggggcagcagaatcaaaggagggagccctgcagggcacagcaagacgcctggggctgcggggtccgcaaggtgcacaggagagaggctcagagagctgggaagcagacaggaaggagagaagcagaaacaggaggacatgaaggaaaacctctgtcaagaaaggctgctggggacaaagatttgg

SEQ ID NO: 180400 - DNA, 427 bp, Homo sapiens
ccaaagtagccccacattgacatcctaccctcaactaacagctggcagaaggagcaggaaccacttggcctgacccacccacagctctctgctttcctatcccataccccagccacccctggcctcacctcaagggataaaactcagtggtgacagccaccaggaagagtcaagtgttaccagttcctaaggcctctgcaggtgacttctgaggcccttgttatctgtcacgtcatgggaagggctctcaaggatggatatgacagcacatgggtttgggaaactcttcccagtttcatgaaagcacccccccactctgacccctgttctcccaagcaggtccttggtgcccccattctctctgtgggcagacatggcagccttcccactcatctcctgcctgccatcctgaaacaccttcctcttt

SEQ ID NO: 180401 - DNA, 476 bp, Homo sapiens
cggctgccggacgttggaggaggtgaccgcgtccctgggctgggacctagatagtctggatcccggggaagaggaggcggcggaggatgaagttgtgatatgtccatacgattccaatcatcacatgcctaaatcatctttggcaaagcacatggcatcttgtagattgaggaaaatgggctataccaaagaagaagaggatgaaatgtataatcctgagtttttctatgaaaatgtgaagataccttcgattactttgaataaggactcacaattccagataattaaacaagctagaactgcagttgggaaagacagtgattgttataatcaaataattggggtgagtataaagaggaattaggaacctgaatgtactccttatttaaagatatgcagtatcctttttgcaaatgatatccttttaaaagtaaaatttctaaactttatcttaatacctgtcacatattatagtc

SEQ ID NO: 180402 - DNA, 504 bp, Homo sapiens
ggactgcatcctggtggcaaggacggagaggtaatgtgccattaaagcacaggcaggaaagctgcaaaggccacaaaaacttcatttaatctgctctgaacagtagcagcacaaggctcatcttaatgctaatcacgtcttggattgaaatatgtcattctcagacacaaataaacctacaggacagaacactatagcacaaacatcaaaacccaatgctgcatgctgtttaagtacacatgaccaccgaaggggattatctgatgagcgaatcaagaaagcatcttttcagctcaaccttactcctcttcaagagcaataccaagcgttcccagttatttgggctactccttagcaagtatgggaggcaaccggctcagtctccttatagagaaactttcaaggtacattcatctttcccatttgttaatatggtcaggagccagggcttctctaagatccatggcccacttctcttccccaatcgcaggtgtcagaagcacc

SEQ ID NO: 180403 - DNA, 535 bp, Homo sapiens
taattcccaggccttggcttctaaatacaattctcctctaaaaggaaccagggctcctaggagaaatagctgattctagcactaagacagggaacgtgctagatgaacttggaacattttttgtgccaggaagcaaagaagtgctcaaagaatgatggggatacattgaagggacacgggagcaagcctgaaagggcttccactggccaaatctggggcagtctgagcatccaaatcagtaaggatattaacagatttggatccatcaaataaaacaagaagccatgagttcatacgcatctaaataagggaataaattgaaaagtttaatgagaaatggtatatttacacagtttcaaagtacctcccccacaaaatactgaatacaagggagaagagagtaactttcaatgcagaagtttggcaaaaacctagtcaagtcaaagtgatcaccatcagtaatggaagaaactgctggaccgcaaagagcagggcacaccatcactgctgcgatattcctgtcggagatgctaca

SEQ ID NO: 180404 - DNA, 126 bp, Homo sapiens
actataaaatctctgccccatcctccttaggtgctgagccattttaggcctcagcctgtctgcccccacgcggtgcgccttaaaactgtgttgctctacaccgccttgtgttgtttgttggcgact

SEQ ID NO: 180405 - DNA, 443 bp, Homo sapiens
cccttcctcctcctcctcctcctccttctctctcgctctctctctcttcctctgagtctctattctcatcgccattactttctttggaaaggagaacccatgcctctgctctggtaaaatgctggctgcatagtaacggtatattatgtaaacttgtcttgtttacccaccctagtattagtctgtttcttctagaggagttcttatagtatggtaattcaaataaagccatctaacggccacccataaaatacaaagaatcctttttgaaaatgaaaattgcttcagaataaatattggttattccagtaattcaaaaggatagaattaagctattttagaaaacattttaaaataattacaaaaattgtgcttaccacaactgaggcagaaaataagaattctgatttttttaaaatctgtcttctggagatctttatgta

SEQ ID NO: 180406 - DNA, 389 bp, Homo sapiens
tgctctttgcacccattatgatgtctggatcaaagacgatttagcacagaagttgttacacatgattttagagagtttcatttctacttcaagaaatttaagtaagcaaaattgccaatctttttgaaattcatcctcacaaatgtgaacaattttcagataacactttttctaaaaagatacacagcctaaatgtaaataactaaaaaacatcaaatacggtcatcaaagattattttcgttaataatatgaatgatagaataccaaaaaattctacaagggaggctgcctatcacaaaaatgatctctggatttccatggaatctaatctttgctgttctgactcatgttattattgatatttttacaatcactttccagttccaag

SEQ ID NO: 180407 - DNA, 238 bp, Homo sapiens
gaggaaagatgcatgcattcagtgcattaatgtcgatggctgtgctgacactgttgtctttcttttccagttaaccgcagtggattcgctgacagagagagacacaacttgcagtatcatgtgggtacaggaattctatatgcactcaatagttaaaggaattcaagacaccttgatgctttcctggtttagtagtaatcagtgtggctagagattacttgcagattttggccattgg

SEQ ID NO: 180408 - DNA, 202 bp, Homo sapiens
actcctgagctcaagcaatcatcctgccctggcctcccaaactgctgggattacaagtgtaagctgctgtaagctgctgtgcccagcctatattttcaagtctctctccttttttttttttttaaactggaaaggatagctgtgatggaaatggaagacttccaacagaataccttagttagcataactgtgtagtacaaga

SEQ ID NO: 180409 - DNA, 279 bp, Homo sapiens
tcttcccctcaaaaaaagggctggctaagccctaggatttagtgggaaaagtgaaataaccaagtgagaataagatggagttttgtgggattggggccaaacccaaaggggagatgcttgaggatcctcctggtggaagtggggctccagtgaaggacttgtcagatttggaacaagcaggaaggacctggggatttgcatggtgtggtggaagccatggaaagttcttgagcagggaacaggaaacatcattcattacttttgggagaagaccggctg

SEQ ID NO: 180410 - DNA, 594 bp, Homo sapiens
acgtatagctaatatcatgcataatggtgaaggacagaattatttcctcctgattgagaacaagacaaagcatcatactacctgattgcaaaacctatcatgaagctatagtaatcaaaacagactcagagtccacggggacagaaaattaagttcagaaacaaatttaaacatttatggtcaattaatttttgatgaacatgccaggaacaaagaaaaaggaagggagagactttttcattaacagtgctgggaaaactggatattcacatgcagaatgaaattacactcttatctcacaatgtataaataatcaatctcaaattgatttagaacataaacctatgacctgaaactgtaaaactaatagaaggaaacataaaagaaaagtcatctgataaatgctttttttggacatgacttcaaaagtacaaggaacaaagcaaaaataaacaaatgcgattacattatactaaaaagctcctgaaagacgaagaaaacaatcaacggaatgaagaaaaaaacctacaaactgagagcatatatttgcaaaccatacatctgataaagggttactatcaaaaatacaaagaa

SEQ ID NO: 180411 - DNA, 439 bp, Homo sapiens
ctggaatttatttttagagtggtggcccaggtcacacagtctgcctggccagggtactgtttactgttttagtgtttactgaggcttctcaggacttgcagcctgtgggagacttaggcccctcgaggccccaccaaccccaggcccagatctgtggggagcccagcaccgtggcctactgccctgaacccttcaagggcaggggccaaggctcaccgtatcccctagaggagtgcctctctcaggctggcacccagctgtggctcaggacggtatgcccagttgatctcctggccagacaaaccaaagggacaagaaagaaaaaaacagagtgagaaagagaggaaggaaagacggaaggatggacggcagaggggctggcttagaagaataaacaaactgaagaaatgaataaaggaacaaatacttgcatggatga

SEQ ID NO: 180412 - DNA, 178 bp, Homo sapiens
gagtcagatggtggctcagagattcagataccattgactaattccatggaagcccttggcactgccagagtgcagtgagtctggacaggctgggggttggcacatgttagggtaaactatacccatgaaatcatgagattagagacttcaaacatctcctcattctgtgtcatcagag

SEQ ID NO: 180413 - DNA, 391 bp, Homo sapiens
tctacaccaatttataaggtatgataagtatgaaagcatagcacaaaatgatttgataaacatgaagggcccaagacaaactgctgaaaaactgttagtttgaaactgtgcaggaactgggtatgccttaggaacaggaaaaaaaaaattaacagaatttcatgagacatataagaaaaccacatttatatcaatttaaaagtaatatatcaaagaccagagtgaaatctaaaaacagaataatgctggctaagttaaggaaagagttctttcctgactgaattcatagagaatagcttcaataacatttatggaaagctatttaagaaatcattaacagtcattgaaagagtgacaagcatggacattgagagaaaagaatcttactgta

SEQ ID NO: 180414 - DNA, 296 bp, Homo sapiens
ggtctctcactactgctgtatatattttttaactccttaatataatccagattaaataagggatttattagaaggaaactgggatagttaacaatgaatggaataggtgtaggaaccagagcaagctacaacctcaggaaccaaaattgcacatctgtatggaaagtcagctctttgttattgctgctgttgaatatggtctctttagcttttgactttaccatgtaagtccatgacacgtgcctgtcaacagctatgggtcacattcttatagctcttgattatagaaggaagaa

SEQ ID NO: 180415 - DNA, 339 bp, Homo sapiens
actccctacaactcccaagggtctacagactaaaaagtgcttcctgttaccaaagtgaagtcaaatgcagcacagtcaaattagtttctccatgtgggtgtccagctctaattatataacagcttctaattataaaacgttaagaatggctattaacttttgaatctcattaaaattaacggttaatttgctaaaagtcgcttgtttggaaaaactgctaatgaccgttctgcagataggtacaggtacaaaatctgcaaggacacaggctcaaggaaaaattttgcatttaaaatctcacacacctttgagtttttagctagtgtacatagtagctag

SEQ ID NO: 180416 - DNA, 391 bp, Homo sapiens
tgaggtaggatgtaatgggaagttgagcgaattcatatttagtcattcattcaaaaatacttaattgagttactgctgtgtggcaagcatcattctacaaacagagggcacagtgataagcaagccagtttgtactctcgtgtaacttacattctactttgagaagacagattataaataggttaaaaagtcaataatatgatgtttcagcatcaacaataaaaaattagggtgatatatagagtgccagggaaagtgctttcatggacctcttcattctctcctctcctggtgtcataagctactccttcatccatgctgccatttctcttggtttacggttccagtatagtactcatcacattattactatagagccatccaccttatg

SEQ ID NO: 180417 - DNA, 525 bp, Homo sapiens
tccaggtggctgtagacacaagaatgcatctaggaaatgtgatgcccggtcagcatccgaattctgcacagtgtagatccatgtgtttattttaacatattgcaaatgatagcggtaatgatgatggtgataaagagaaactttggaaaatcttggtagaaatgttgagaaatgtttccaaggaagactaattaagttgctacattataaaactaagaaatgagaaacaggccagcggatgctttcaatagaatttgaatttttcacttgtcatttttttcctaagaggtttagatttagatttgtaggttagactttattcatgcctatgaaaagtgattagctcaaagccttcatttttttctcccaaccacatatatgacagaagtgtctgagctgtatttttccctctttcgttataatataatgtcaggcttgtgacatatgacagcaggtttcacactccacttaatgacaggctgccagttcctggagaactaaaaaggaagactaatatgtatttga

SEQ ID NO: 180418 - DNA, 520 bp, Homo sapiens
ttggttcttttccagacttcgttctaggccaccatggcttttcgcgggaagggggtttggctgggatctaaatgaggcaaccacggttgggctgggtgactcgagaatttggatttgtcagactggatgagtcagttgcttggccggggcccaggtaagcttgaggtatcgtgagggaagccctgcttctggagtccaaccaaaatgtgctgggagggtaccagacccaccttgcggccgtgtgactgtgggccccacgtccttctgtgtgacagggggtgagtctgtcccccattcaggcctcgcactcagatggaacaagatggcaaacagggagtgactccacagtaatcaaaagaaatgaactagatattcaggaatcaacggagagatctccaacacatgagcatcgtcggatagggtggaaaaaggcaagctgcaagggaactttaaaaacatacacaaagcaaagcgcggtagctcacacctggaatcccagcactttgggaggccaaggcag

SEQ ID NO: 180419 - DNA, 362 bp, Homo sapiens
gcaccgccacaatggtgcgcatgaatgtcctggcagatgctctcaagaccatcaacaatgccgaaaagagaggcaaacgccaggtgcttattaggccgtgctccaaagtcatcgtccggtttctcattgtgatgatgaagcatggttacactggcgaatttgaaatcattgatgaccacagagctgggaaattgttgtgaacctcacaggcaggctaaacaagtgtggagtgatcagctccagatttgacgtgcaactcaaagacctggaaaaatggcagaataatctgcttccatcctgccagttggtttcattgtactgacaacctcagctggcatcatggaccatgaagaagcaagacg

SEQ ID NO: 180420 - DNA, 260 bp, Homo sapiens
catgttatgaaagaaataagggttcaagagagcatatgggcaggaaagaccacctttagataaatgggaagtctcttctgagagggtggcatttcaacaagacctaaaggatgagaaagaagctgaccgtaggaagagaatcaggggaagagtattccaggcaacagaaacaggatgcgaaaaactacggagctggacaaaagctgggtaggtatgttttagaagctgaaggaagaattcactgtaatgaagtgtaactt

SEQ ID NO: 180421 - DNA, 188 bp, Homo sapiens
caatccccggagcagcattgcacatgctcagtctctcaaagtctggcttttaaataattttctgcatctttccttgtaattgggtggagaatgttccactgggcagctgagttgaatcgccacaatctctccacttggcctctgtgcgacttactgtaaacatctattgtctcccaggcagtatgcag

SEQ ID NO: 180422 - DNA, 325 bp, Homo sapiens
tagaaactctagagtactagagatgacacattacctctaccttaatttcttcatttgtaaaacaaggataatatttcatctaacttatagggttaagtagattaaattagataatacacgtcaagcacaaaatccccgtctcagagtacaggctctacgaatgccaactgtcattttgttggggagaaggaggagatagctggtgcatgcatgtgcacacacatgcacctgtgatttcttacagagagagaccatgacttaccctcccctcccccagagtgggaacagttttcaacaagtgactggaatgggtggtacctccctg

SEQ ID NO: 180423 - DNA, 674 bp, Homo sapiens
ggattgctcgaagaatcttaaaattcaatgttctaatactaaatccaatgcataatcccattttcaaacctgcttttccttatatgctacagatttcagatcatggtagcactgattttccactgaccttaaatcaaaatttttggagcccttttagctgttacctcttcctctgatttgtgtgtttgtttgttttttggtcaatcgattctaattcttcactactgaaactgttcacttctttttatctgcactccaacccttaaatcattacttatctattattatgcaatggcctgctcagcatgacctgcctcatccagcactctttctagccatcttgccaccagatgtattgctctgatacatgattttgatcatgtatctctcctaattaaaaaatccttaagtttagccagacaaactttacggtataagtaccacattgtatttgtgtataactccttgctctgtgttagcttttatcctgttcctaaaatgtgcttcatgcttgtgggcaaagtctcattgatcctttcagactaagcctcatttcatccttttcggtagtctttctgactcatctccattcccgagccctaccctaggaaatcagccattctatactccttgctctctaacaatttatccacaaatggatctctatatcatag

SEQ ID NO: 180424 - DNA, 441 bp, Homo sapiens
cgcttttgtataaaggagggaagacattccaggacattataggctggttctattgaccacttgtattttaccttgtaagggagaggcattgagtttcgaccttggagaatagatggatggtgatatcactaattacattaggaaataaggaggggaagttagttgttgagctgctaatggaacttcccagtggaagttagttgttggcagttactaataggcagatgggtaagtaggtcttgacttggagatagctctgaatttgagacagttacctggtggacagcatgagtgtgggtgtaacagagtagcaggtggagcttagagtacctgaggagatgtatcaaccaagaagcaaggagttaaggatggagccccaacgttcagaagacagacgggaaaaagtagagaaaacttaggaagatgattacaaagaagctg

SEQ ID NO: 180425 - DNA, 269 bp, Homo sapiens
ctgaatcagctgatcaccaccacagaatgttgtgaagctaccatttgatgaatgtttatcatgtttactacaagtgttattaacagctcaagtatacatttaagctaccttttggcacacttttacattcactttgggtttttttgtggattcatggctctttaacatatccaatgtgatttgattgccagtatcatgttttacatttcagccattcctccaaagtaggaaccctcttcatggctggaacttggctctttgcccttctt

SEQ ID NO: 180426 - DNA, 277 bp, Homo sapiens
aattatttgcaggaagagtgaaatagactatttctgtgatcctttccaagctttgtttcagtacttgtggcatagggcaaggacagaaaaggaagacaggagggaggaaaagacgtttgaaaatcccagacctcaaggagagacaggtggatcacgaggtcaggagttcaagaccagcctggccaacatggtgaaaccccatccctactaaaaatacaaaaattagccagttgtggtggcgcacgcctgtaatcccagctaatcgggaggctgaggc

SEQ ID NO: 180427 - DNA, 478 bp, Homo sapiens
tgagtgtgttgttaactttgcaaatattagttaatataccaacttttattgttacttatttctaattttattctccttgtggttggagaacatactttgtatgttatcaatcctttaaatttattgagacttgtgttatggcttaacatatggtctagcatcaagaatgttctaaaaaaagaatattgtatatgcacttaagaaaaatgtgtattctgttgttaatgggtggaatattctacaaatatctgttatgtctagttggtttatactgttgtttaattttcttgttgctctcctgtctagttgtctattcatcattgaaagtgggtattgaagactccaactattgtttctaaattctctattattttcttcaattctgcccgctgttacttcatatattttgggggctctcctgttagctgtatacctattcattattgttatgtctggtctatctttttttttttttttt

SEQ ID NO: 180428 - DNA, 742 bp, Homo sapiens
agaaggaggttcctgctgtgccagaaacccttaagaaaaagcgaaggaatttcgcagagctgaagatcaagcgcctgagaaagaagtttgcccaaaagatgcttcgaaaggcaaggaggaagcttatctatgaaaaagcaaagcactatcacaaggaatataggcagatgtacagaactgaaattcgaatggcgaggatggcaagaaaagctggcaacttctatgtacctgcagaacccaaattggcgtttgtcttcagaatcagaggtatcaatggcgtgagcccaaaggttcgaaagatgttgcagcttctttgccttcgtcgagtcttcaatggaaccttcgtgaagctcaacaaggcttcgattaacatgctgaggattgtagagccatatactgcatgggggtgccccaatctgaagtcagtaaatgaactaatctacaagcgtggttatggcaaaatcaataagaagcaaattgctttgacagataacgctttgattgctcgatctcttggtaaatacggcatcatctgcatggaggatctgattcatgagatctatactgttggaaaacacttcaaagaggcaaataacttcctgtggcccttcaaattgtcttctccacgagttggaatgaagaaaaagaccacccatcttgtagaaggtggagatgctggcaacagggaggacaagatcaacaggcttattagaaaaatgaaccaaggtgtctaccatgatta

SEQ ID NO: 180429 - DNA, 346 bp, Homo sapiens
cagttgctgagatttgtgagctggctgttgagatttacatgtaggcctctgagagtcccaccccttttgtttgttcttagctgccggagacattctaactatgttgattccctcagactctaggtgagataagacagaattgggtcttcagctctatggggcattgacccagagactctactctgccaattagcaagtagtgcttaaaccagcaaggtggctttgaagtttgcttagataacagagctattatgactttatttacaacatgaatcctgaagtctctaaatatgtaatgtcataactcatcacatatcatctgcttgctttggtgacagaataagaa

SEQ ID NO: 180430 - DNA, 497 bp, Homo sapiens
tgcagagagctcaagaggctgcatgtggcccagtctttctcttgtctgccatggcaagacctgtttgtcaaatgcagagagtgtatgaggtggaatgcacaaatcaacactgtaggaaatcacaaaaggatgcaaccacgacgtggaatactcaatatgagaatgaataaggaaaggaagttctgcattaagaggaaaaaaaacctacacaagtagagactagggggctttgcaaaaactgacaaatcgaatctaattaaactaaagaagttctgcacaacaaaagaaaccattatcagaattaacagacaacacactgaacgggatgaaacttctgcaatctatccatctaacaaaggtctaatatccagaatctataagaagaatcttaaatttgtaagagaaatataaacaaccccattaaaaagtgggcaacagacatgaacagaaacttctcaagagaagacatttatgcagccaacaaacatgaaaaaaag

SEQ ID NO: 180431 - DNA, 739 bp, Homo sapiens
agccagcgcccccaccggaatttgtggccacttcgcctttggctttgcctcctgccatgccccgcaggcccggagaatgtggccccagactgaaatgagaagaaggtggccccgccgagggttgtctcaactgttggagtgatcagacccaacaccaggccatgggggctactaagtctggcggagtcaaagctggttgcagtgtttgataagcaagatctacatcatggaggtgatgacatcagtgccagctccatgcatacccagagcccggagagatttactagtgctagtgagcttggcaccaacaatgtctcagcctttcagtctgatcaagcagcaagtgaaattgaggtcacatcttcagtacttcatgcaaatatacctttgggagcccaacccttctgaccatccaaaggcaagcacaatattcctgagaaaatctcaaacagatggtatctactgagcattttactcaacaatacagttcatgttcgacaatattccttgatgacagcatagccagccagcctcatcttacaatgacactaaaatcatgctgagagcaaatggaagcacataacttatgtaagagaacctcttgttttgtgatacacagcatctgtgagtaacttaggaatatagttacatgtatctgaagagcaaaaagaggttttggaggaatattttaagtatgatcctgaacacaaattgattttcagatttgttcgtactctgt

SEQ ID NO: 180432 - DNA, 1128 bp, Homo sapiens
agccagcgcccccaccggaatttgtggccacttcgcctttggctttgcctcctgccatgccccgcaggcccggagaatgtggccccagactgaaatgagaagaaggtggccccgccgagggttgtctcaactgttggagtgatcagacccaacaccaggccatgggggctactaagtctggcggagtcaaaggaacgagaaaagacaagttaaaagagaaagtgggaccatgcagccaatgctagtgtggaggctgcaaaggccctgagctctgggatcccacactatttattgatgatcaaacaaagaaacaggcagtgaagatgtgggggttgaaaggaagcggtgtatcaagtgaatgagctacagctgtgacggtttagcattttctttgaaacatacggctacttgagataaagggagtgctagaagcaaggagccagcaagtctagacacattccaaagaccacgaggggttttaatcctagaccctggacgtgttccaagccctgcctcagcttctctcccaacactcagcttttctcccaacactcaacattggccattgagagccccttcagctggttgcagtgtttgataagcaagatctacatcatggaggtgatgacatcagtgccagctccatgcatacccagagcccggagagatttactagtgctagtgagcttggcaccaacaatgtctcagcctttcagtctgatcaagcagcaagtgaaattgaggtcacatcttcagtacttcatgcaaatatacctttgggagcccaacccttctgaccatccaaaggcaagcacaatattcctgagaaaatctcaaacagatggtatctactgagcattttactcaacaatacagttcatgttcgacaatattccttgatgacagcatagccagccagcctcatcttacaatgacactaaaatcatgctgagagcaaatggaagcacataacttatgtaagagaacctcttgttttgtgatacacagcatctgtgagtaacttaggaatatagttacatgtatctgaagagcaaaaagaggttttggaggaatattttaagtatgatcctgaacacaaattgattttcagatttgttcgtactctgt

SEQ ID NO: 180433 - DNA, 273 bp, Homo sapiens
tgctagattttatttgaatgcttattctgtgtctattgagatgattgtatggtttttatttttaattccatttatgtgatgaatcgtacttattgacttgcaaatgttaaagcatccctgcagccctggatgaaacccagggtgaattatctttttgatatgctgttggattcagtttgctggtattttgctgagggtttttgcatccatgttcatcagggctattggtctgtagtttctttcttttttttttttttttgtccgttagatcct

SEQ ID NO: 180434 - DNA, 203 bp, Homo sapiens
gtgaagtttaggtgaaagaatttggatatctaattgctctagcaccatttttggaaagtgctatcctttctgcaccacccccccactccttttttttgtaacagactctcactctgttgctgaggctgaagggcagtggtacgatctcagctcaccacagcctcgacttcttgggctcaagtgatcctcccacctcagcttcc

SEQ ID NO: 180435 - DNA, 337 bp, Homo sapiens
cctgcagagcaacacaccgcatacacacacatgcatgcccatgacacacgcatgcatgcccagacatgtgcacacacgccatgcacacatgccccatacacatgcatcccacatgcacacatgcatgccatgtacacacaagcacacccacatacacacacaccatgtacacacatgcacacccacatacacacacagtgtacacaaacacaccacgtacacacatgcacacccacatacacacacacacatgcaccgatgtgggctagagccagaggcaagagggaaaaatagatcagaaaatgggaccaataggctgggtgcagtggctcatgcc

SEQ ID NO: 180436 - DNA, 311 bp, Homo sapiens
gctccagcctgggcgacaagagtgaaactccatctcaaaaaacaacaaaaaaaatctaatttgggtttttgactcaaagtagaaaattgtaatagaagtttcaaagagacttgaatcagggtcttcatgctcacgtttaagagagggcacttggcacccgggtcctaagtggttcagactactttcatagctgaaggtgggcatccttgtcacaggaggggacagaatctataagcggtagctgataggtatataacttggtgccaattaattggataatgaggtcaacctaaattctagcttgtgtttac

SEQ ID NO: 180437 - DNA, 320 bp, Homo sapiens
gagagacctgtctctgaaggaggtaggtgcaaatatggagtaggacagtggttccttcaaaggagaagatcctgtatcatatcctgtatttccatcagatatttcattttcctgacttgggcaatgtgtaaagatatgacaacaagattgacaatttgggaaaacgtttaggaaagaataacagggacaggatgtgacttggaaagttcgttgcttagagtagcaaggtttgattctttttgatcaacaatatagacttttccatcctcttactgtgagaatttctactccatgctttgttacatgagaattctgagatt

SEQ ID NO: 180438 - DNA, 658 bp, Homo sapiens
tcagttttttatagtatttgaagctatattaaacaatttatatttatcatgtcttcctgatatattgactcatacatacatttttctctgtctctaatagtatttcttgaaacctattttatctgacattatagtgtcattcttttgagtaacatttaaatggtagatctttttctatcttacttgcaacccctatatttaaagtgtctttcatttatggttattagttgggttctgcctctttatacagtgattggagtgtcattagaccctttaaatttaatatatttttgacatggtatgccatgtcataccagattcaggtatgccacattgctatttttttatttgccctatctgtattttattctactttcctgcattttatattatttgaactttttttttttataatattgaatgctttacgaatttccgtgtcatccttgtgcaggggccatgctaatcttctctgtattgttccaattttgtctttttaggtacatccccttgaattttctgaatatgtgtgtttttctagggaatgtgttacgtacctttaccttatcaaaatctacttcaagttaatattgaaatttcaagtaaaatgtagcagccttataacagtataattccatttacattctctccgtccttt

SEQ ID NO: 180439 - DNA, 437 bp, Homo sapiens
aagagttgagtgaagctatgaaataaatgtggaagctacataggtgatttgcatggtagcattgtcttattctatgatgggacaacatgatggaaccaggtcttcataacacagttattaaaaatacatattttaccacatcttaggcttacagaattcaaattcacaacaaataacagaaatgttaagttgattttaattagttcttatcctttaaaaagaaaggatattgtctttttctaatgtagcttaacaatttttgttgcaggctttggtttggagatatttgatgcatacataatacatgaaaggtagtgttaaaagattgtatttcagaagtttgtgataaaattggttgttcagatttgcacattgtcccgtagaagtcattttaagtaaatccatgccagaacttctgaacaagtctgaggcaagtt

SEQ ID NO: 180440 - DNA, 212 bp, Homo sapiens
ctgttgagctgggatttagggccagagtttcctcattcctggtctaccgttagcttccctgcacctgacggttgtcctcttaagtacttctcccccattttcttaccggattccctctctccagtggtgtgttctccttctacagagggtatttcagatatttattcaatagttcagccattttacaaagttgaggagggagaatcgggtgg

SEQ ID NO: 180441 - DNA, 128 bp, Homo sapiens
gtggacttcctcccagggcaccagggagccactgcagagttgtgagcaagggacagacagaggtaggcttgtacttccaagagactcccccagctgccacatgcagggtgaatggaatgatgcacaga

SEQ ID NO: 180442 - DNA, 632 bp, Homo sapiens
gttcgtgtggctgttggcaggaggcctcagtttttcaccttctggacgcctgcacagggctgcttaagcagcctcacaacatggcagctgactctcgccatcgtgagtgattcaagagagagcaagatggaagccgcaatatctatgatgacctggtcacagtctgtcatttccacaactggtaacacaggttggccaagttcaagccccagttccgggatggagagctccatgccttggccctgccagtgggacttctgcatgtgctgggagagaagaaaggtttcctttgagccctgccaggatcttgttacagtctccacagagcaagacttcagggtcagggtgttgcattatgaagacaggagccgtggagcctccagcaggagacaatggcttccattgagataatatgacttaacgaggccacaagtccacagccaccactcaggaaacaataaccatttcaagagggcacaggaggtgttacagagaggcgtggtgacacaccccacccaccgtggcctcagagatggtgctaagggagaaagtttgctgggatttgtctgaaaaggtcagttattaaaaacagcttctggctgggcgcgctggctcacacctataatcctacc

SEQ ID NO: 180443 - DNA, 674 bp, Homo sapiens
cccatgctcccactgcaggtgcaggtgcaggtgcaggtgcaggtgcaggtgcaggtacaggtacaggtacaggtgcaggtgcaggtgcaggtgcagctgtggcagggcctcgcccctgcagcctgccacctggtggccttacccgccttgtctcagctgctggtaggctccggctccttgttttccagaacttcagtgcccattgaaccctaagttgctacacagctgcttgcagggtatccatccacatccagaaatactgttctgaccattcagtgctcatttaggcaccaggaggaagaatgtgttatagctgagaagtggacactctatatttgtaacaatggcttaacacaaaggcttgcagaatcaggcagagcaggatgtgcaacatgccaaaaacatggacaccgggaggcatggacattttgtggaagagaggcttgtgccagagtgtaatctggaagggaacctcttaagttatgtgaggagggggatctgcattttcctatggaggggttcgtagctctccccagaggggagaggcctatgactttcctaaggccaagaaccagtggcttaaagaatactcaggtttggctgggcacggtggctcacgcctgtaatcccagcactttgggaggccgaggtgggctgatcacttgaggtcagga

SEQ ID NO: 180444 - DNA, 451 bp, Homo sapiens
caattctgtcagtttgctcactctgtgcagatatatctcatcctctcaaccagaagtcaggtacagcgcagggaaaagcctgtatcttgttagaaggacttttttcctgtaggacatggtgatttacttggaaaacaagatggggaaggtagtttaagaagggcctaaaatgccaggaaggagagtttgtggagcctactggaggtacaacctgatgagaacttggcttactgaagatttatctggcagtgatgcagaagctaaactaaaacaggaagagatgagaagactttttttcagtctggtcaagaagtctgctccagtgtagtggcagggagcatggaaagagacccagtggaagaatctgttcaactccacaaatgattggctggctataaagttatacagcatgagccaccgtgcctggcccccagctagttttttcaaaaaa

SEQ ID NO: 180445 - DNA, 240 bp, Homo sapiens
tcactgtcttctcctccccacacacccatttttaaggtcctacaatggtgcaagcagaagaaacgctcccccatgagtaaatccactcacctggggactcttgtattcctcaacgggctctgaaagcttcctggtcaatctgaagttggaagactcactataatttatgaggaaagacttacctagtttgagtgagagatctgtctgtgggtaaatgaattgtcacaacttcttaactgg

SEQ ID NO: 180446 - DNA, 264 bp, Homo sapiens
aaaagtgctaccttaaaaacaactaaaattgtgatgtatttcttctcgtggtcctgtcaagtcacttgctttatatattttgaagctatattaacatacacattcatgatcataatcttttttttattacagtactagtatatgttggccaggcgcggtggctcacgcctgtaatcccagtactttgggaggccgaggtgggtggatcacgaagtcaggagatcgagaccatcctggctaacacggtgaagccccgtctctact

SEQ ID NO: 180447 - DNA, 203 bp, Homo sapiens
gatctgttgcttaaccattcccttctcagtgtcaaagggagcaagatacagtgaccctgataggaaaaatgaaaagccaacattcttctggtttgggcaaaaatcattccaagtggtcttatgattctcaagatagttggaaatgatctttcctccaccaaccagatactatatatcttttatggggatggtgatgactgagt

SEQ ID NO: 180448 - DNA, 495 bp, Homo sapiens
actgtagtttaaaaaaatgtataactataaatactagcaattatgcagaatttaggattcaacttgatattgatgtttaaatatttaaccttattaatttcaaaacactgatataaaaaaaccatcctctaaattcacaaatcaatttcagaagataaaaacacacaaattcaactttattcaaataagaagttaccctgtgccacttttccaattgttttgctacataacctctttcattcagataggaaaatccttttggaatggagagaaatctgcaaattaaaacaagcaatagtttaacattgagtctggcaaaaacgtatcttaagaagctaaaataactaaaatttaaaaaagtataaggagctaaaagactttaggaatagttcgttcctaaaactaaaaggtcaactataatttattataacttcaattacaaataaattttcacaatctttgcaacaacacgcgaacccaatcacaataaagaaa

SEQ ID NO: 180449 - DNA, 457 bp, Homo sapiens
ggaggcggaggttgcagtgagctgagaccgcactgaatacctcaatacctttcagatactttagatatttcaaattgccttgtatgattcactgaatttggttgggtctaatatgataattcaaagaccagagctgtttatctgtgaatggagagttttgcacatgaattgtgacaattcctggaataagatgtgtaataggagtgttcatatatcttcagccctttctatttaggaaacctagagttaggcttccacagtataagagggttccaaattattaatatcacaagatggacaaaaagagaagcccaggaaaaatagcttggagaagtgcaccctctccacacctcctcccaaagtataacaaaagtatttcattcgattaggaggaataggaataaaaaggacagatgcagtatatggcactggcttcaacagggaagagactcttcat

SEQ ID NO: 180450 - DNA, 591 bp, Homo sapiens
gtgtagaaagaagtagacatgggagacttttcattttgttctgtactaagaaaaattcttctgccttgggatcctgttgatctgtgaccttatccccaaccctgtgctctctgaaacatgtgctgtgtccactcagggttaaatggattaagggcagtgcaaggtgtgctttgttaaacagatgcttgaaggcagcatgctggttaagagtcatcaccactccctaatctcaagtacccacggacacaaacactgcggaaggccccagggtcctctgcctaggaaaaccagagacctttgttcacttatctgcaaaatgaaacactagaagcacagactagaaatgaatgaattgggggtgaggggcacccagcagtagaaatgacatgtctaaaaatacttttcatacttttttttttgagaccgagtttcgctcttgttgctcaggctggagtgcaatggcacaatcttggctcactgcaatctccgcctcccgggttcaagcaattctcctgcctcaggttcccaagtaaccgggattacaggtgtctgccacgacaaccggctaattttttgtattttaagtagaga

SEQ ID NO: 180451 - DNA, 534 bp, Homo sapiens
ggtgagtttaaggaatctgacctaaccctgatgaatcctccagaatctgtttcaatcctagagtgaaaacagagtactattctaaaatgccccagggttttgagattttcagtaaatctagttgttctgacttctacaccccttacgtgacaaaattctgctttctcctttgctttgtttttcttaacatccctcttctttcctatcttcctagttatgtctgccaaaagaatagacatcttagctgcctattcagaccatgtgtacaaaatgctacaaaagataatttgatctctaccatgttgggattgcatgaaactttccctaatggttacatttgcttctgtatgttttttaaaaaagcagccatgtttaatattgtgaaatatgatctgtctcctcttctgcccaccctctaaagcagtgataaatttcagagcatgctcagcagaattggattatattatgcacagtacacatgttcatcaccaaaactgtactgcctagaatgtatgcaagaagaatgaattgctg

SEQ ID NO: 180452 - DNA, 496 bp, Homo sapiens
atggcatataatgagttggttgtttcctagcaactaaagaagcagtttcactttagctgatcctgcaatagaaatgagacattttcccttgatagttgttattagtgatttccctgacaatggaatttcacttttgaataaggaatattctcagcttttggtttcctaaagaattttgattctgagttgcgctaagctctgcttaatcctgtataaaatgaaaaaaagaaattgagtcccctaagtacctctcatgggaagagccaaaggagtttgatacatagtttcttaaatggcaagtgattatacaagaagctgtaataggtgtattttctcagtgtttaacagaataattaatgaccacattcttttttttttccctgcttaatatttgcagcagtagaggtttcttaggtaatggccaatgtatgtcgaaataaatattgtaagtttttattacaagtgccattttgatataaagtcagtataaggaaaa

SEQ ID NO: 180453 - DNA, 386 bp, Homo sapiens
catgatggaaatcttgctaaaggcagaccagggtaataagatatcaggggtgggagatgagatatctaatcagatatccagaatgatcagataccaagggtaggggacttccactaaactgactcagcaggattcttgctaaaactgaactaagcaagccaagcttagttgagaagaaggctcacaaggacctgactcaaatttggtcaagcagagagtctttgtcaaaggcaaggtactattactggtttaggagtctagtacaaatattagacagtgctccagccccaaagagcttataatctaatgatgcaagaagacaagttaataaataatttacataaatgaaatcataaattgacagatgtattcgtggggtaggaggt

SEQ ID NO: 180454 - DNA, 243 bp, Homo sapiens
aactggaaaagaagggaggagagcgacgaaggcgttcatattgagccctgggtgggtataacagggtgagatgtgttgtatcgtcagcatgactgcaagcctggtgagcttgtgattctccaaggagacaaaatatccaaatgggaggttggtgcctgacttttgtctttttatcattttcatcatttgcctgggccccttgggggcattttccatgactgataaaatgctcctctgagttca

SEQ ID NO: 180455 - DNA, 163 bp, Homo sapiens
atttcccatttattagaaggcaggttagataactattggagcttaaattacttgaaatttatatttttatgacttaaacattaatagagcacattatatattctccaataaaccaaaatctatatacaaagactaaattgaaaatgtaatgagaagaaaactg

SEQ ID NO: 180456 - DNA, 179 bp, Homo sapiens
caccccctaagacagatggtcacattcttcttaggcaaacataaatcaatggtactcagccgaacattccacattttaagcaaaccttaaaaacaaaatctgcatagctggatggggagaagacagtccccagattctgatacatggagagagtgatgcttcctttcctttgctgaagc

SEQ ID NO: 180457 - DNA, 662 bp, Homo sapiens
atttactgaagttgaaccctctcatatgacctggcatttccactcctggatatgtactgaatagaaatgcaggcacacagacaccaggagacatctacataacagcttcattcataacttgataagggtggctaccagtagtagaatagataaataaattggggattactcataaagtagaatattatacagcaatgaaatgaatgaactgtagttctacacaagattttgactgtagttcctaagcaagattgagcaaaagaagccaggcaccaaagaacgcatttatagggctctttgctagcttgaaaaactagcaggacagggtagcatgcatgcgtaggtggtaaaactctaaacaaagtgtctgagtccatttgtgctgctgtaacaaaatacctgagactggataatttatatacaacagaaatttatttctcacagttacggaggctggaagtcgaagatcaaggcaccagcatttgctgtctggtgagggctgcatcctccaaaggagagaaatgctgagtccccacatggtggaaggtggaagagcaaaaagggacaaaccccctccatcaagcccttttatcaggatgctaatctcattcacaaggggagaagctctcatgacctaatcacttcttaaaggccccacctct

SEQ ID NO: 180458 - DNA, 335 bp, Homo sapiens
cctttctcttcttggcaaactatttgtgtcttggattgagtacatctcgtttcttaggttttttcctactatgtgacatttgtaaggttctttctttttctaatgtgggaaaaaaaataaccttaatttaggtcagtgttaaagatcaagatcttggttttagctagcatggtggttcacgcctgtaatcccacctcttcaggaggctgaggcaggaggatcccttgagaccaggagtttgagaccagcctgggtgactctgtctctaccaaaaagaaaaaaaagtagccagatgtgtggcgtacacctgtagtcccagctactcgagaagctct

SEQ ID NO: 180459 - DNA, 1158 bp, Homo sapiens
atggggtgcggcgccagcaggaaggtggtcccggggccaccagcgctggcttgggccaagcacgaaggtcaaaaccaagccggcgtcggaggcgcggggcctgggcccgaggcggcggcccaggcggcgcagaggatacaggtggctcgcttccgagccaagttcgacccccgggtccttgccaggtatgacatcaaagctcttattgggacaggcagtttcagcagggttgtcagggtagagcagaagaccaccaagaaaccttttgcaataaaagtgatggaaaccagagagagggaaggtagagaagcgtgcgtgtctgagctgagcgtcctgcggcgggttagccatcgttacattgtccagctcatggagatctttgagactgaggatcaagtttacatggtaatggagctggctaccggaggggagctctttgatcgactcattgctcagggatcctttacagagcgggatgccgtcaggatcctccagatggttgctgatgggattaggtatttgcatgcgctgcagataactcataggaatctaaagcctgaaaacctcttatactatcatccaggtgaagagtcgaaaattttaattacagattttggtttggcatactccgggaaaaaaagtggtgactggacaatgaagacactctgtgggaccccagagtacatagctcctgaggttttgctaaggaagccttataccagtgcagtggacatgtgggctcttggtgtgatcacatatgctttacttagcggattcctgccttttgatgatgaaagccagacaaggctttacaggaagattctgaaaggcaaatataattatacaggagagccttggccaagcatttcccacttggcgaaggactttatagacaaactactgattttggaggctggtcatcgcatgtcagctggccaggccctggaccatccctgggtgatcaccatggctgcagggtcttccatgaagaatctccagagggccatatcccgaaacctcatgcagagggcctctccccactctcagagtcctggatctgcacagtcttctaagtcacattattctcacaaatccaggcatatgtggagcaagagaaacttaaggatagtagaatcgccactgtctgcgcttttgtaa

SEQ ID NO: 180460 - DNA, 822 bp, Homo sapiens
aaggtaagtgttgactgtacaatcagtcctaaaatatagctatacagtaacattcatttttaatatggtgcttttaaggatttgatccattttctgtatttgaatgatataacctcagcactatttactttcacagaaatatgatcctcccaataagttgtgtatttcctgaaggtttttctgtgattacctgttatgtccttctctgcctggtgagcccttgtttttcttcttcagggtctaactcaatgacccctctttaatgaagccttccctggcccttcgctctgcccaactccagatttcaaccttcccacctgtgcttgtcatcactttgcacataactctgctttgaacacttgtcacattgtgaatagtttctgtgtctgtttcctggctatttgagctctcagcaggttagaactgtgtcatagccatcactgtaattctctcatgtagcagtattcctaacatatagtaagcaacgatgctttctttgagtgaatgaataattaaatactttgtttacaaccttagttatccccttctcttctaaccttcagtggctctccattgtttaccctgctggatcatattcacattccccagcgacctaccatataaggcccgttacagtcaaaccttaattactctccttcctgaaccctccacatcagcagagacctgggctccggcctggccctcaggcccgaggttttcctcaaccaacacagcagcatctcagcactggctcctttgctctccctgaattccttctcactcctggcttcccacccctttgtgggaaaatatcttctcaaa

SEQ ID NO: 180461 - DNA, 614 bp, Homo sapiens
tgcccaaaatgatgtttacatactatgttttttttgtttgtttgtttactttcaccataggccataaactagtcaagatcataagatgatcttaagaagattactcatttgattagtttaacaacaatatcatttggttctgttactctgttcttgatttactctcccaattaaagagcatttttattcagaggccacctaacaggttgcaaagaggttagttctcctgatagtcttttggaaaagacattctgctgctccatagagacaattagcagaagggctggaactgagtatttgataaaacactccaagttggaaacaatttcctcttgtgaaacttctgtttcattattgaaagtttataaaatgacaaatgggaaaaattgctttaatatgatgacttttgtaatcaattatttgacaaaataggtttttattttgaaaacaaccactataagattaccctgaactagtccttttcaatttttgaggttatttttgtatggaagaaatgaagcattatatttgtcgtctttctttccttctgtattttcatataagtgcaaattattttttttacagaaaatattgtagtaaccaaaatagaattg

SEQ ID NO: 180462 - DNA, 431 bp, Homo sapiens
gagaatcgtttgaaccttggaggtggaggctgcagtgagccaagattgtgccactgcactccagcctgggtgacagagtgtgactctgtctcaaataaataaatataaaaataaatttaaaaaaaatgagattttgggctgttttactgaattctgtcctaatagagggagaagcaactgtgactcctcctattttagatgagctgtcaaaagatgaaatgatggctccctgcatcagagtagtgggaggatgactggaaggttcctggcaatgttaacactttgtggaaaaggctgagctccaggaaaaggaaactgctgaatcaaagctgtaaactgaaggtcctcagagaaggcagtaattcactgcttcagctagcccatgccccacctccctggcaagttctaaaggagtctaagaattctcctcc

SEQ ID NO: 180463 - DNA, 427 bp, Homo sapiens
ttcagaggagaaaaagattagagagcagcaggtgtcaaaggaggtttcgaggaagaggtcatatgtgggttgggcattaaaggcagggcagaaggacaatgtagactgaggagagagcataacacaagccatagtgctgggaattacaaggtagaatcaggaaacgctgcatatgacctggagcctgggatactgagggttgaggctatccctgaggagatagaaaggagctggtgccaagcagagccttgaatgacaaaccaagtgcactgcactgtctagcaactggccaaatgtgattatttaaatttaaatttaatggaacaaaatgtaaaactcatagccacatgtggttagtggttaccatactggacggtgcagatgtagaacatttcatcactacagacatttctagtggacagcaatg

SEQ ID NO: 180464 - DNA, 188 bp, Homo sapiens
catgagccactgcgcccagccgatttatgcacatttacatattgttttttatattctataaaagaactttaaaggttttatgaataatcatttcgattttgttttttgttttgttttgttttgttttttgagattgagtctcactctatggcccaggatggagtgtggtgggcaccattgcactgggc

SEQ ID NO: 180465 - DNA, 573 bp, Homo sapiens
tgccaagtgaaaagaaattcaaagggaaacaccggtggaatatcacccttcacctttggccgtcatcatagacacatcttgttatttctagtgttggtgaaagtggagggaaagggtgtctgtatgatgtaatgggagtataaacagacaatttaggcaatttgacaacaaatatgtcctaacttaaaaatgcagacttgaccaagcaacttcacttctagaaatgaaacattaaaaaacaatcctgcaaatgtgtccactttgaggattggtgccacttccaagactgggttggccagaaccagaaaggagtctcccaaactcaagagagtagtggtgactctaataacagaaatgaaaacagcagacactggggagtagtcatgtaaatccacatggcaaagccaaggtgaactgcaccctgagaacacttcttccaacaaccactgtcacatcaacagatccgtgctctgtcttcatgtccctcttttctgtacgtctccctccttctactattgactttacatatctatctgaccctgtactgctccaagaggccctcctacattgagc

SEQ ID NO: 180466 - DNA, 712 bp, Homo sapiens
tctcaaaggcactggtctacaaaagacggagcctgggaatgaagtacaacacggatcctggagtgctgaagtctctagcagtggggctattccccccaggttacagactaacgagttgtttccctgccttcaatgtcctggataatgtgtgcttgcttactggggataaaaggcaggtctccaggagggtttctctttgcccaggtgaagcacgctttcttcctgcaggtaagcggtgagcaatcggaaaacatagcatctggaaacgggggcttttgtggctccacgacaagcctgggagggaggtttgtaaatatccgcagtgctgaagccaagctgatggattttgcttttttgaaaaaaaaaaaacccttacttggtacttcattttgattaggaacaacctttgcacaggttgtgcgtccacaggcttaagaaatctctactatttacttacctcattggtaaaaattaaaatggcctcaaaggtcacatgtatttcaaaaaaccatcaaggcaggctgctctacaatgaggttcccaaaaaacttatttcgaatagtttccttacttttaagcaacagctgaaactttctcgtgtgtattttatcatgccttagatgaaaaagctttgaagggccctaacccactctaggaggggacccatgataagcctggaggagatactctagacttccagtgtccccaggac

SEQ ID NO: 180467 - DNA, 232 bp, Homo sapiens
ggaatttaaaaaaatctacacgatacatattggatcatacaagcatgagagataaactgaagcagaaaggaagtatgaaaataaaaacaattggcaataaagcaatatgaatttcaagatgtaaattctcaggcaccgctatgctagaagacataaaacacgaatgctgtactcacatgtaaatttgctgtcaacgcagcagggacaaatgtcagcagcatcaggagcactg

SEQ ID NO: 180468 - DNA, 185 bp, Homo sapiens
cacagaacttgtacctaaacagaattatttgctgagacaaagaaaggcataggttacaaactggttaaaattaccaggaaaagtattttaaacagaggtaccgtaccgtttgttatgtaaactttaaaccaatgtcttccccatcctgaaattttctagtggtttaggtccaccgagggagatgc

SEQ ID NO: 180469 - DNA, 241 bp, Homo sapiens
ctgcccacgttgtcctctcgagtagctgggattacagatgtcaggcaccgcacccagctggatgcaaggttttatcaaatctttgtagaaactgtatttttgttcttcgggattgattattccaggataaccctaatcgttaatgacacttggatgtgattagactttaccaaattcatcaaaggctactgaataaaacagaaaactatcttgaacactggtgactgtgaactgtttttgg

SEQ ID NO: 180470 - DNA, 621 bp, Homo sapiens
gcatatgttcacacaaaaacttgcccacaaatgttcatagcagcatgattcccaatagccaagaagcagaaacaatccaaatgtcaatcaattaaaagaatgtggtctatccatgcaatcaaatattacttagcaagaaaaaggaatgaagtattgatacaagttacgacaggattgaaccttgaaaacgttatgccaagtgaaagaaaccaacacaaaaggccacatacatatgatttcattttcatgaaacatgtagaacaggcaaattcatagggacagaagcagattagtagttgtaaagcctagggttgggggaacagaaagtgactgctaaatgagtattgggtttcttttgggggtgatgaaaatgttctagagttagatagtggtgatggttgtacaacactgggaatgtactaagagccacttaattatacacgtaaattttatgttgcaagaattttacctcaacttttttttaaagacagctctatattatactgatatgggaggatctctaagatagttcctatttatttctgcattgttatttttagacagggtcttgccctgtacccaggctgcagtacgtgatgcaatgacagctcactgcagcct

SEQ ID NO: 180471 - DNA, 387 bp, Homo sapiens
ccacaacaaaatactagctaattgaatccaacagcatatcaaaaagataatacatcggctgggcacagtggctcacgcctataatcctggcactttgggaggcccaggcgggcagatcacgaggtcaggagattgagaccagcctggctaacacagtgaaaccccgtctctattacaaatacaaaaaaaaaaaaaaaatacacacacaaaaaaatttagctaggcgtggaggcatgcgcctgtaatcctagctactttggaggctgaggcaagagaatcgcttgaacccaggagccagaggttgcagtgagccaagatcgcactactgcactccagcctgggcgacagagtgagactcagtctcaaaaaaaaaaaaaaaaaaaaaaa

SEQ ID NO: 180472 - DNA, 588 bp, Homo sapiens
aatctgaattttctctctccatctccccactaaggtcaagatgatgttgcaatccatgtactgtttcacctgattttccttggcattacagaaataatttgtgaaaccactgagtaaaatagtagaagacaaggtaactgattatgaaaccagtaatggaaatcaaatctaaaatctcaacctttttagcatcagatgaacttgcctggaaatcaaactaagtctacaggaatttgccttggtgtcctaatgtactgcacacaaaagcgtagtggatctttcaatgtttgtttcccaacagcagtgtatgagagtctgatttttccacatcctagtgagcacgtactatttagctttttaattctagccatcctagtcagtgtgaagtggcatctcactgaagtttggatttgcattttcctaatggctaatgctgctgagcatctttttctgtgtttattggccatttgtgtatctcccttaaagaaatgtctattcagaccctttgctcatttcttaaattggattatttgcttttttattattgaattgtagagttctttccgacttcattttactatgtttctt

SEQ ID NO: 180473 - DNA, 701 bp, Homo sapiens
gtcttctctagtgaaaaatgctgtgggtttcttttttacctttaattttacttttcaagttaaaaaatagcttttaaggtcaaaattttcagagcaatttgtaagtatagatacagtttcatggtgacagtttcttatgttgaaaaggtgacacaaaacacattatcttttactttagattcaaggggtacatgtgcagatttgttacttgggtatattgcgtgatgctgaggtttggggtactgtcatccaggtactgagcataatacccaatagttagtttttcttttctttctatttttttttttttaatttttgagacagagtcttactctgttgcccgggctggagtgcagtggtgtgaacttggctcactgcaacctccacctcccaggtccaaacaattatcctgcctcagccttccaagtagctgggattacaggtgcccgccaccacacccagctatttttttcgtacttttgtaaagttggggttttgccatgttggccaggctagtctccaattcctgacctcaggtggtctgcctgccttggcctccccaaagtgctgggattacaggcacctgccactgcactccagcgtggatgaccaacacggtggtaacatagccaaggttacttttacttgggtaggatgactgcagaaggaatggctacacagagcttccagacctttccatg

SEQ ID NO: 180474 - DNA, 496 bp, Homo sapiens
caccatttctccccctaaccccccagctctgtgtcgtggaagttttacctggggtgttatgctctaggcaggtgtggtcaaaaagacaggggctctcctcccagctcctagtctggctcttcatttcgccctgggaggggaaggctgctggcctttctctacacagcaccccacccctccctgcccatccctgtgttgcagaatctctactgcaagcaggtacagcagagaggactttcccacaaggcccacctggagcgtggaagctcttctccaggtgtggcaggttgagaatgcttgggccctgccggcccaactccagctagctcataggatggaggctttttcacaccaggcggggcgagaccagctgagaataccagtggctgccaccccctggtacccacttatagagcagggtgtgacttaggaaaagtaggtccctcccccagtttgggtgccgtggcacgtgggtttttgctttggggaaagaggc

SEQ ID NO: 180475 - DNA, 302 bp, Homo sapiens
ctagcttcttcaggtagaattctagattacttatggtagatcttttgcttttctaaggcacaccatgaaagccttcaactttccacagagcaccactctagctggacatgctgatatgtttttattttcatgaccattcagtctgcagtatcatttttccttcttcagattggatggtttctgttgctctgtcttgtttgctgctgctttcttttgttatttccatccagtgaattttttatttcaaatttatgttagttatttatttatgttagtaattctaaaatgtttgtgtactttgt

SEQ ID NO: 180476 - DNA, 573 bp, Homo sapiens
cgttgacacttcagtagtatagcagtaaaatgcttataaacattaagatttataggaactgtaaataaattagcaactttaaaaaaattaggcaggaatattgcttgatcccaggagttcaaggctgtaggacactattgtacctgtgaatagcctctgcattccagcctgggcaacacagtgagacctcatctcctggaggaaaaaaaaacaaaacaaacaaacaaaaaaacctaacagaaaaacacacaactcacaaattgtgtggagtctactatgaaaaataggcaagttttacttgtagaacattactaaacttggttattttgatattctacccattcacatgaaccataagaaaaaatgtatttgttcttcatccttcactgaactttttaactttcaattttgaaatgacttcagactgagagttcctttacatccttcatccggtttccctaacagcaacatttcacataacatggcacatttatcaaaactgcaaaatgaacagtactacgacactgttaaccagagacttcattcatatttttccagctttgccacttatgt

SEQ ID NO: 180477 - DNA, 688 bp, Homo sapiens
agaaattctcagatcatttgaaacatctactataagttctcaaaataaatgagaaaatattactgtattatttaaacaaagtccatttctttgttataaaccactgactacaccccaggaatacttcaaggaagaaaggacacaagaagatttcgggcctttgccctcaaggttggagaaattaagatgtttttgattcaggtttcaacaaatcatcactcttctatgaatacgcaactaagaaacttcaacaaaaattatagtgaaaaataaacattggtgtcccaactaagaggagaatgctgggtgaggctcaaagagcttcaatgacttgcctcagaaatgacaggatggaccttgtgtaacccagtgatgtattcataatcgacagttgccaagttgatgctccattattaccttgagttttgatgatcctttgatatgccatgacccaacagagataaggtgtcctgggagtggagaaagggcagtttcatacatgttgtcagcatgtcacatgttttttcaatatttaaggaaggaatctggagaaacaggaatctggagttgaattcctctatggtcagatggtatcatgacctcatcattggcgtagtttcctctccaggaatggaacattgaagagaggaaagaatcatagactttgtttgtatcctgccaaccctca

SEQ ID NO: 180478 - DNA, 351 bp, Homo sapiens
ccttgctgactggttttcagtgtctgagctcttgtcttcctgaagttcgagtggcagcgcattagattcctggagcagtagttaagcttgagctaaacatcctaggcccaagttcagctccacctcgtacagtgacatgacattggcaaggtaattcatctttacttatctgcagaaaagggatgataaggctgggcacggtggctcatgcctgtaatcctagcactttgggaggccgaggcgggtggattgcctgagctcagaccagcctaggcaacacggtgaaaccccatctctactaaaatacaaaaaattatctgggcatggtggcgtgtgcctgcaatcccagct

SEQ ID NO: 180479 - DNA, 532 bp, Homo sapiens
actgggaaaaggacatcaagctggaaaactgaagaagtaccagacttaggctattagcaactccactgtgtcaggacttacttcttactagggtgtggattggggcacattttaatgcaaaacagccacagggtttatccaagaagtcattagaaaggaaatccagaaatacaaggcagaaaaatgactctccagggaagagctatgctctctctttcagccactatttcggacccctacttttaactcacttacttttaataataatagtaataataaatttaaaggtgattttgattctttaccacttttcctcaaaatcccaaatgcaattattggtaagatcgaatatttaaaagataaaacaattctagtccaacactctaatagacacaggaatcctcaccctaccaacctctgacaatatggtactcaccccatatgttttatgaccatggatagggacctcatgactctccaaggtaagggaggatataagcaaactgaaacaaaaaagggattctaacaaaag

SEQ ID NO: 180480 - DNA, 301 bp, Homo sapiens
ttgaactcctgggctcaagtgatcctcccacctcagactccctagtagctggggctacaggtgtgcaccaccacacccagctaatttttaaatttttgtagagatagggtctcacactatgttgcctagactggtctcgaagtcctggcctcaaatgatcctcccgcctcagcctacatgtgttctttcaaacccagagaaattcacaggaagagccaactcaatcacttgaaacaccaggtagaaataagaaaaagttatattgcagggatcccgcttggagatgttgggggcctaaggt

SEQ ID NO: 180481 - DNA, 403 bp, Homo sapiens
tgaaacgactaataaaatagacaaactgtcagctagcctaaggtaggaagaaaaaaacaaaaaagaaggaaagaaggggaaaggagggaaaaatattagtaatgagcaagtcgataaaaacacagcactttgggaggcctaggtggcgcggatcacgaggtcaggagtattgagcaccatctccgtggccaacatgtgggtgaaaccctgtgtcttctacttaaaaattacaaaaaattagcgtgggcattgggtggcccgagccttgttagctcccagctacctcaggaggctgagggaggagaattcaccttgaacccgggagacggaggtttgcagttgagctgagatttgagccactgtgcacttccagccgtgggcgacagagcaagacttcattctc

SEQ ID NO: 180482 - DNA, 169 bp, Homo sapiens
gattcgccactacaactcaacttcttcactgctttatactgcactggatactcagtaggcagcctaaattttgccacaagactacgtgagactatttaaagtagggaaagtttgtttcctaatcaagaagagctatgatctaagggaaattcaaagaataacctaaaag

SEQ ID NO: 180483 - DNA, 290 bp, Homo sapiens
ggaaaaaggaaagttttgtttgaaatggaaatttcttatctgaaaaaattacttttgaaattctgaattacgggttgttatgccttttatctaggaggaaagtggcctgtcttgtaggatttgtggatcttctgctctttattcatgtcatgacattctgatgtcaaaaatgggctggtagtaggcacctatattccaaggaagcaattctgatttctggtttctctctattttaacaattgatgcacttaacagggaaccgtatttatcttctcaaatttattttcacc

SEQ ID NO: 180484 - DNA, 448 bp, Homo sapiens
gggggagagaggagtgagaagcttttgtataatgagtacaaagatgaaaaaaatctggaaataaatacagatgcttctcaacttacaatagggttgcatcctgataaacccatagtaagtggaaaatatcatatgtcagaaatgcattcaacatgcctaacttaccaaacatcatagcttagtctagcctaccctaaatgtgcttagaacacttacattagcctacaattgggcaaaatcatctaatacaaagcatgttttataataaaattttgaacatctcatataatttattgaatactgaaagtgaaaaacaatggttgtatgggtactcgaagtatggtttctactgaatgcttactgcttttgtactgttgtaaagttaaaaaattgttaagttgaaccattgtaaattggggaccaactggtgatggttatacaacattga

SEQ ID NO: 180485 - DNA, 323 bp, Homo sapiens
tatgtttggaaatggtaaatgtcagggaaaaaaattaactatacataataatcttggaatggttcagggaaagttctcatgctgtgtggtaatttcttaatcaatgaacaaacgaaaagatacaagagaatccacgtagaaggcagcatcgagtgtttacatcatgcaagcaagacaacatttaccaagtctgaataaaaggagggaaataccttattttttaaaacaaatatgttatttctccaaaagcaaaatattgttgacagcatcccaatgagcatgaacaaactgaaagtgacccttaactacttccctccctcaaa

SEQ ID NO: 180486 - DNA, 365 bp, Homo sapiens
ttgtggaggaagtgacatggaaactgggacttacaggtagggagacactcatcaaaagaatagtagggtgcgcttcaacctgagagggcaacatatctataagtcaaaagataagaaactgtcttgtattttcaagaaaatgaaaggcattcctatagctagagtctacgatcaacatacgtcattggctataaactggtatgtttttctttgttataatgcttttacgtatttaaagtctacagttcatctggagactgaatatttttcaaagtaggattcttgcaactctcaaaagtttagaatacccttattttaccaaaatggacaagtttgtgttttctgctttagcacacataccctca

SEQ ID NO: 180487 - DNA, 548 bp, Homo sapiens
ttatcttgacttgtactttgcaggaaaaaagggaatccctggacaggaactcacttaacttattccttgtgtcctggaagctcactcagtggctcacacctgtcatcccagtgctttgggaggccaaggtgggagcctggcttgaggacaggagtttgagaccaccctgggcaacatagtgagactccgtcttgacaaaaaataaaataattagcctggaatggtggcgcatgccttagtctcagctacttgggaggctgaggcgggaggaatacttgagcccaggaatttcaggttacagagtgagctattatcaggccactgtacacctgagcaacagagtgagacttctgtctcttagaaaaacaaaaccaacgccacacaaccatctttctaatttgtgtccttcttcagtcattgcattcttttattaaaagcttctttaaaaacttttctgatctggtctgtactacatctgccactaagactcaacattgcagtctgatcttgttaatccactaacactgcccaggttgtcagtcacctct

SEQ ID NO: 180488 - DNA, 526 bp, Homo sapiens
tgtaaccacacttgatcatgaaagaccaagcagcctccgacatcagggtttacaaaaggaatcatacctttctagacctgaagtcacggggaattcctgattacaactggaagatcaacagttggctgggtaacacgttcatttatgtcataaattggcatcttagcctaagactttgtgtagggagagcaagggtgaagtgtatgaaaatatttgaagtaaatcactttacagcgttttaaaggcggaaagaagtaaaagcacgtgcctcccagccttgccaggatccaccttgggctgggtcctccaggtctcgatcagggccgacccattctgcatcctccgcctggacccctccaaggcttttgctgtaacttgcgctctcctgagctgcctcgcaagcagcaacgacctctccctggtctctcatcaaactcatcctcccagaaaccgggttcctgccctgtactgtgttcccatggcaacctgagcttactacccgctgctggcatcaccccctctccgc

SEQ ID NO: 180489 - DNA, 235 bp, Homo sapiens
tggagaaccaagaaaaagatttcctggaagcatagaaagagtgcgtttccggaagaaagattcatcaagaatttcaaacatcagggccaagtcaagcaggacaaggactaaaaggtgctccttaaatttgcctatgaagaggccactgctggggaggagtgtgtcaggcggcagtggagggaggacagcaagtgtaaaggagactctgcaacctccacctcccagcttcaagcac

SEQ ID NO: 180490 - DNA, 191 bp, Homo sapiens
gatactatgttgtgctgagacataagggtggaaatgatagacaagtgactctcttacagagacttctgtttggtctccaagtccagtgctctttccactgcacacatgcctccatcccaccaccttctcccgtgctgagcctttcccagccagacagtgttttgaggggcctttactacccctctccctgc

SEQ ID NO: 180491 - DNA, 132 bp, Homo sapiens
gaccacatcaccccactactgtggctcctctctcactcggagtccagctgggagctctgcccagaccccgggctctgtgccatctgtccctaccggtctctcggactccccctactgcccacgtacagccag

SEQ ID NO: 180492 - DNA, 116 bp, Homo sapiens
tcaagtattatttctcattttgagtaattttgttctcattttgttccagttctcactctcagaaaaagattactctttgtatattaatatttcttaatcatggttcttatttcaat

SEQ ID NO: 180493 - DNA, 390 bp, Homo sapiens
aattctaagtagaattctggagtcaaagtcatgcatctataagattttgatagatactgtaaaattctcctccagaaaggctctgccaatgtacatttccaccaacactgtaagaagtgcctgttttccatgcccttgcctacgatgggtacattttcctgttgctttttctgtaccacacataaactgcctcccttaagctgccttcttgtttttataatttgttcagtttcaccagcatgattacaactataaaaggaacaaaacaaaataatctacgtctaggaaacacaccaaaatgatggcagtgattggatttatgtgggcatgacataagtgatttttttttttttttgagatggagtttcgctcctgttgcccaggctggag

SEQ ID NO: 180494 - DNA, 183 bp, Homo sapiens
agcagcagcctggaactccgtgcaccatcgtccatgggcaccaagaggaggttagggttggaggtaatcacaggaagcctgtttgagtggaccagataggtgtggtactgagattgaaggtgaaacattaaaaacgtcaggccactggatacgcttggcaacttggaagtgtgcctttatctg

SEQ ID NO: 180495 - DNA, 368 bp, Homo sapiens
cattaatgtttactgcatagtcattaggcgccaggcactactccaaacatcgtatgtgtttatctcattttagagacaagggttactattatccgcattttataaatgagaaaactgaggctcaaagaggtcaaattccttgccaaggtcacacaactgtggaagtggcagagctgggatttgaacccaagtccctctgctctcaaaattctttttttttttcttttttttttttttggaaaaagagagttgtggctgtggttggccaagggtgtgggagggaggggggtgggtctccgcggccacagggcaacccttgggcccccggggttaaggggatccctcgggcctctatatgctcaggtact

SEQ ID NO: 180496 - DNA, 739 bp, Homo sapiens
gagaagagtgaaaaaagtaaagctaaagttccaagctgggttggtgaactaacagtagtaccatgaacagacacccacagtgaggcaaggaagatgagagaccttctggatgtaaacaaacacttgacaacaggtcagtataaatatgaaagttctgtagatagacacatgcagatctgacggctgttgagagccctggaggaagaacccagggagactagcctacatttgatacctaaacattctaatttccttcctgtgtattgtgtgcattattatccattatgtcagcaagtgcaccttcagaaaaatccccattaggtgcagagtcagttttggaaacggcttggatgaggcgtgtcgggattcacatctggggtctgtgccacccactggtcatgtggcttcaagttatttaacttcttagtttcctcatctttcagactttacacagcaccaccatcccttctcccaaataccctattatttcgttttcaatttctccctttctggggatatatttaatggatacatctatctgtgtttctcgtgacatccattattcggcatctggcatacctacatgctttctgtcctataatactactctatttcttacaacaatgtaagatgtaattgggaagaaagaattcttgattctttgagagtgagtctcctctgtcgcccaggctggagtgcagtggcacaatctcagctcattttgatctctgcctcctgg

SEQ ID NO: 180497 - DNA, 480 bp, Homo sapiens
ccacatagactctgattgttagacaaacacaagacaatcaagctgacaatgctactaattttagaggctaaagctactgggaactcagtgtacttactgaggaatcagatgtcagctcactatcaccacaaagcagatgtcctctggatcctttgaactaaagcttgggttcaacagtccccaatccttctcttgtaaagttcttcctattagttcttaaaggctccagaatatgactgctgctttatatttatctcccaaattaatccatgcagccccttaactgttttcttactcttcaccggatgttcttaaaagctctttgggtattatggtgcactgcatgctcacccggaacccagtctcatttactccctttttgtccattaacaatgagagaatggttagagcattttctcagctttttatgacctattctccatcagccaagattgtcttcagttttaccttctgcagttt

SEQ ID NO: 180498 - DNA, 390 bp, Homo sapiens
tttcacaggacttctttttggagggggattagaagtaaaatagctcagcagcacttcaaagtggggaagtaaagcctccacgtgcgctcgctgcaaagcagcagtcagagtgcctcgccaaggacacagcgtccacacaaaacgcctgtggttctcattgaaaaaggtcttggctttaaaatccacaccaaaagcatggctggaaatgtgtttttctgtccaaagaaaaaggttttatgacaagaactttattaaaataattagaagcgagtctccttgggatgatgtggacagttgaaagcagagggcggccccctcagtcctgcggcccccctcagtcctgtggccccctcagtcctgcttccccactcagtcctgctgcccccctca

SEQ ID NO: 180499 - DNA, 378 bp, Homo sapiens
actaagtttgcaccatctaagaagcaaaagacctaccatggagcaaataagattttacaggacatataaatgcagttcattaattaaataattctaaggagtttaccacatacggtatatacaaagattgatttagtatataattctaaaggaaagcagaaagatatggaagaaaaggaatagaatttggaagcacaaaacccggactcaagtattaagtgtactattgatagttttattttagttatactttggattttagtatatatttaatgtagctcacatttataaaaacctgtatataaaataattcaggcaaagaagtagccatgcaggaaatggaagaatgcccaataagccagaaaagagcaacatggg

SEQ ID NO: 180500 - DNA, 907 bp, Homo sapiens
actaagtttgcaccatctaagaagcaaaagacctaccatggagcaaataagattttacaggacatataaatgcagttcattaattaaataattctaaggagtttaccacatacggtatatacaaagattgatttagtatataattctaaaggaaagcagaaagatatggaagaaaaggaatagaatttggaagcacaaaacccggactcaagtattaagtgtactattgatagttttattttagttatactttggattttagtatatatttaatgtagctcacatttataaaaacctgtatataaaataattcaggcaaagaagtataaagaatagattaaaacaaaaacaaaatccaacatccctcccccatcgagcatcatgagtaaaactttaaaaatctgaatgacaatcacaagtatacccatcccagattgctttcctttttgcttctggcatcagaggtaaccagaatttggatttggtgttcgccagttgcaagtatggttttaaacattttccacatatgtatgcatccatcaattaaataattctaaatacttttatactttctacaaatggcttcctatgtattcttttgtaattttcctatttatttatttatttgacaggtctcactctgtcacccaggctggagtgcagtggtgcgatcctggctcttgacaatctcagcctcctaggctcaagtgatcctcccacctcagcctcccgagtagctggaaccacaggtgtgtgccaccatgccctgctaatttttgtattttttatagagatggggttttgtcatgttgaccaggctggtctggaactcctgggctcaagcaatccgcctgcctcagcctcccaaagtgctgggattacaggtgtgagccactgtgcccagcct

SEQ ID NO: 180501 - DNA, 494 bp, Homo sapiens
tcagaattaaaaaaaacagaaaactcttgaaaccagatgtgctcaaagcacttgccaccactcttattcccactctcttggccaatatcattaattgatcacattagtctttcccactggggccggattcaggcacagaatcttgctcaacgtacagtgttagctatcaactaccaattaacaattgagctaagttgtaactcagtatgaaaatctagttgtcattcttgacatagacgatccctgggtaagaactagagagagagaaaagctacacagtcatgaccttggaaatcctctctgtagattcaagtggtcctatctacaataaaagctgctatttacattcttgctgaggctatttccttctgatatgattttgccttgggaggctcgtgaagcttttctggcaagcattatctgtaatgaccatatgcagggtatacaaaataacagagaaaaaagtttaactttcattatacctagagtaccct

SEQ ID NO: 180502 - DNA, 141 bp, Homo sapiens
tacacatataatatgtgtgtgtatgtatgtgcgtatggtgttttgatgtaaaatttattattgtgggtcatggttaaaaaaaaagcttgagaatgaggagttagatcaagaaatagaaggaaagttgacataagaagttgt

SEQ ID NO: 180503 - DNA, 364 bp, Homo sapiens
ttggctggaacccaggaggcagaggttgcagtgaaccaaggtcaggccaccacactccagcctgggtgacagagcgagactgtctgaaaaaacaaaacaaaacaaaacaaagatgtgaaggggcatgagtaggggttgaccaaagagaggtggcagagccaagcttctaagcagaggagggacacaatcagttttggttggtcaaaaggtcacactgtctactgagtgggcgacaagcttgagacagagacctctaagcagcctggatttgagagaaagttgggagatggtataatcactccagtgtccacactccgggtagtccttccgccccagctgaacctgcagttcattggtccgtcca

SEQ ID NO: 180504 - DNA, 409 bp, Homo sapiens
cccagactgtcaagcccatcctttttggagcacagaacaaagccatgtttgcctaccaaacagaagaaggctctgtatgctaaggtaccttttctttttttaatttttgagacagggtcttactgttttgcccaggctggaatgcagtggcatgatcacggttcactgtagccttgatctcccaggctcaggcaatcctcccacctcagcctcccgagtagctgggaccacagatgcgcaccaacacaccagggtagtttttaacttttttttttttttttttttttttgagacaggatctcactatgctgcccaggctggagtgcagtggcgccatcccggctcaccgcaagctccgcctcccgggttcacgccattctcctgcctcaggttgggcacacattatgga

SEQ ID NO: 180505 - DNA, 434 bp, Homo sapiens
aaagacttctaccatgcagagggtgacctgacttcctgtattgcggttgtaacttaggggagggcctcaggttgtcagaggagacaggaaaagcaggagttgggttataagtgcaatcagatcagatggagaggtggcattaaagtgaatggattttcttttcctgtgtctgtgagtaggagaaatgttttagttatttgctgcatcatggatgtggtagccagggctgtttaattacctgagaagtggggctaattgtatcttgaacagtgagtcactttcctggcataattttctctgtgcccaatcattaccatataaaagttgtcagtgctggccctcaggagtgggatttgaagagggggagttaataggaagctggcaggagctggggctgagtgggagcagagctgatcatagggaggtggggataa

SEQ ID NO: 180506 - DNA, 541 bp, Homo sapiens
tatgaggttggaacggctgtagccatctccatctattgagggaacacgggtttgagaacacagtcaagtcaggacgagaacaagagacgctggatcttgaggacagtgcttgagccctcgaatcaatcaatgtctaaactaatggagggtcgatgaagacatttggccagaggaccctgaaacacctgaatcccacctttggctggctagccccatttctcagcagtgccttcacaggagcgggtaggaatatatccatagaacacatgcagatggataagccaggttctggtctccattccaggagaatgccatttggttgaattttggctacagtgtacggacataaagaatttgggtcattcttatacccaacagaccacatccaggaaatgtattcaagatgctttgatctcatctgaggggtggctaagtacaacccattcttaataaagctatttatagtgagaagcaatttgggtcaggcctgcctttccagtctgcctcattggcaaagtggtaggcccctgacttctgtctc

SEQ ID NO: 180507 - DNA, 428 bp, Homo sapiens
gaatagtagcatgaactgtacccgaacagactcaaataataggttagtatatacagtagagatggggtttcactgtgttggccaggatggtctcgatctcctgacctcatgatccgcccgcctcggcctcccaaagtgctgggattacaggcgtgagtcaccacgccgtgcccagataattcttatggcgtctcaatcagaggctccataaccgagtatgatcagagcaggttttctcccttctttagctttcatctctcttccgtggtcctacaacccagaggaagcagagagtgcagcagcagcaaaacaagttcggtaggtgatgcaagaactgccagaaccctttctccacatctttttgaggaagtgctggtcataatccatcttctgtgactgccttcaatctaggttcacctgcactgcac

SEQ ID NO: 180508 - DNA, 355 bp, Homo sapiens
aggctggtctcaaactcctggtctcaagcaatccacctgccttggcctcccaaagtgctgggattataggcgtgaaccaccacacctggcctccaagtggatcttgagaaataaaatagccaagttaagtagacagggatcaaagtatacttgtattacctctaaagctaggtcagaggacacagcttagttgagaactaaataagcctgtgcctgctacctgctaactgccacagtcaccctctagtccaaatcttggaacagcccctttgaagcaaagttctaacaaatacaaatatccagatggctgcttcccagtggaagagaagagctcactcccttgtccagcacattt

SEQ ID NO: 180509 - DNA, 338 bp, Homo sapiens
atctgaccagctttctgtactattttcatattctttattttatttatctctaatcattttcttccttctactagctttaggtttgtttctcttgtagttccttccctaagttgtaaagtttagttgttgaattgagattttttttttaaattcacatttacatttgtaaacataagttttcatgcataaataaaattttcctctgaacattgttctttctgcattctattttttgttgtattttatctgtaaatattttctaatttcccttgtgatttcatttttgatcctttgactgtttgaatgtgttaatttctacatatttgtgcgttgtccag

SEQ ID NO: 180510 - DNA, 534 bp, Homo sapiens
ggtgtgattatgtacacatacgtagatgtcgccggattcttgtttaagtactacaaaatttgttttcttattagcataacaaaacttttatcatagaatatatctcatcccatctccaaaacaaatatttaatgggaatcgggaagcttggaagaaagacccttagagatcatctgaccagttcctgatgtgacagatataggagggagaaccgagatacccaaagagagtagccaaattgggaccaaagctgatgttctgcttaaaaatacactgttgtctaggcgcgctgtctcatgcctgtaatcccagcactttgggaggctgaggcaggggatcgcttgaggccaggagttcaaaactgccctgggcaacatagcaagcacctgtctctaccaaataaaaattttaaaaattagcctagtgtagtggtgcacaagtgtagtcctagctactctggaggctgacatggaagaattgcttgagcccgggagttcaaaaccagcctgagcagcatagcaagacctcgtctct

SEQ ID NO: 180511 - DNA, 338 bp, Homo sapiens
gttcaatttctacacgtaaagagtgaaacctaggaaaagttacctactgttttacagaagaaataaagacctgcaaaagctgattttggttgtatatattttacacactgtgtggagttgcggcatctgctaattgaagttcaatttctacacactttaacacacaatgttagagagggatctagaaaccagtttaaaaagcacatagagaaagtcatgaagaaacaagtaagctcctattgacctaattattcagaatagggttaacactaaaggatttctctcttgctcaagtgccactgaacttccttgaccacttccttgcaggaaagctccca

SEQ ID NO: 180512 - DNA, 217 bp, Homo sapiens
agcctctaccatggctattagctttgtggggccaggaaggaaagaatttttgcaagatggttcaaccccagccacattctttggtgtccatgtgatctatggtgaactcacattggctcagcacaccaaatagtgggaatacacgtctcctcactgtcccttctcactgctttgtcatcttgctcctgccaatttctccacacccctgcagcactag

SEQ ID NO: 180513 - DNA, 150 bp, Homo sapiens
ggataagtgaccccaaaaaacttttaagaaccactaatctagcctatcaagaaacatcccattttccagaagaatacagctaagttggcttagttcatgcattcttacctcatattcatagagttcatagacgggatccttactacatga

SEQ ID NO: 180514 - DNA, 204 bp, Homo sapiens
cctcagcctccagagtagctaggactacaggtgtgcaccaccatacccagctaatttagaacttacggttttaaagccacaggctagatttcctacatggcctaaacatactccatgtggtactgtctgtctcctgctctttctctttagaaaatttaagattcttatggccgggagaggtggctcacgcctgtaatcccagca

SEQ ID NO: 180515 - DNA, 102 bp, Homo sapiens
ttctttttttttaggtaacatatattggacaagcagaattacagggcatgctaggacctcccaatagcactggacaaagaaaaaagagaggtagggcaaggt

SEQ ID NO: 180516 - DNA, 580 bp, Homo sapiens
ccagaaccctccgcgaacaccttcctcatcaagagaaaactactatgtgccatttggaaaggggccaggcctggcatctccatcttttcctcccagactgtattgcttagaacatttcttcccaagcccagtcactcatggccccctccttgcctctggccatgtctaaggacctttcctattgcagagaggagcttctgtgttgtgcttctgttaggagctctggctcggagctcagactgcataggtttctagcccaaatctactcctgagcccctgtgtgtttttgggcaagttgtttcacctctccaggcctcagtgtcactttccttatctacaaagcagggattggaatagtaccttccttagggggttgctaggaggactgagtgagtcaatacacgaaccgtgttgagagcagtgtgtgacacgtaataagcattcagcaagcattggctatcaaaattagtgattgttgacttagcattttctttaaaactagcccttaaaaatcaagatgagcttaatttagaaaggaaactagtggatagtaagagggaaaaaaagacaagtttaagag

SEQ ID NO: 180517 - DNA, 236 bp, Homo sapiens
gcaaatattacttactaatgaacattgtcataagattatgttccttttttattgtcactaaagttggtagttttttccaattgcagttattcttttcatacattttattggcctctcagcatcatttttcctaatattagggatttttagttacttttattacttagagaaatttttctttgaagtttcatttgagcttcccagataccttgagtttctccttttctttcatactt

SEQ ID NO: 180518 - DNA, 602 bp, Homo sapiens
aatctattgaaaattttactgacacatcatggcataaaattcactgccacattattgatctgctttaaaattcctgttctcctttgggcttttctgacaagcaatcaaattcataaagtaaattattgctaaatcagtctaaaatgtttattcaatatttgctatattcacagcagcaataattaggcaataacatgagatacaaatgagcagatactgttcctttcctcaagcttacagtttaattttgaagacagttacttatgtaaataactacaaagccaagaataaaggccacaagagtgatagcgaattgctctagtagcagtgggtattctagctgagaatatcagagactggcttcattgaaggagtattctgacctgggctgtaaatgacaagcttttaataggtagaagagacatgaaaggtcattcaagctggagggaatggagttaaagatacaagacacagatctgttaaaaaaaaaatgaatgaaatctttgagatcaagatgttttggtgtggttgaagtgtaagcttcatgctgcctggggtcttctaaggctaggtgctatggaaacttctaaaactagggggta

SEQ ID NO: 180519 - DNA, 403 bp, Homo sapiens
tacatattacccaacaacaatgtcaacaacaacaatatatagtagaacatacaccaagctctctgagtatcttcctgaaagctcccctcggctgatgcttccagtaccttctcttttcccctccaccgccattctctatctggctccaacccttcctgtttgctcctgggatggtttgtcacggcgtccagtcctctggctctggttctgtctagcaccaccgggagaagaaagtgtggaggaaataggagctgaggcactggtggttctgaccctgtccccgccaggctctgggttggcagtggcactgttcctgtctgaaagacccagctcctcctggaggcctgtcctcagctgtgtcgccacaggtctgggttccgaaacctccatttctgtttccctc

SEQ ID NO: 180520 - DNA, 253 bp, Homo sapiens
aaagctgatggtgagaatgataatgatggcaagaaatatagtaaagcctgccccacagtaacgagaatctggccaggtggtgattggcaatagactcctatcctctgctaaggccctgttctttcttcattaatcttgcaataacttgaccctgagttttaaagtaataaatattttggacttcacatattgtatgttagggttttatcatatatcaacaatgattatgatgacgtccccctttcctgagtat

SEQ ID NO: 180521 - DNA, 624 bp, Homo sapiens
aatgagtcaagatccaaagtttgaagaaaatgcttatttatttatttaatttgagctagagtctcactttgttgctcaggcgggagtgacggtcggcttcactgcagcctcaacctcccagggtcaatcaattctcctgcctcagccctctgagtagctgggactacaagtgtgcaacaccacgcccagctcattaaaaaaatttttttttgtttagataccaggtcttgttatattgttcaggctacttatttacccactcatttatttatttattattagtgggaataggttgtatggagccatttagtcttttttttttttttttttttgagaccaagtctcacttgcactccagcctgggcaacagagtgagattccgtctcaaacgcctccacaccaaaacaaaacaaaacaaaacaaaacaaacaaaaaaattgatttcctcacagttatggaggttagaagtccaagatcaaagtgtcagcaggtttgaattcttctgaagcccctctctttgttgtgcagatagtctccttttcactgtcattcctctctgtgcacacatcacatacctcgtgtctctttgtgtgaccaattttcctcttcttgtaaggataccag

SEQ ID NO: 180522 - DNA, 1019 bp, Homo sapiens
  misc_feature (3)..(4): n is a, c, g, or t
  misc_feature (792)..(792): n is a, c, g, or t
ggnncggagccccatagcctgcctgtctgcatggtccgcctagaggtttgagcagctgggcatggaagaagcgagccacacccccatcgcatgccctatgaacgggataagggaactttttcgcttcaccactatgcctgactaattttttaattaaaaaaaatttttttgtagaaacagagtttcaccatgttgcttaggctggtctcaaactcctggcctcaagtgatcctccctcctcggcctcccaaagtgctgggattacaggcaccgagaagagctcggaaaagagcagaaggcaccgccagctccaacgtcttctccatgtttgatcagtcccagatccaggagtttaaagagagtctggctctgtcgcccaggctggagcgcaatggcatgatctcggctcactgcaacctctgcctcacgggttcaagcaattctcctgcctcagcctcccaagctttcaccatcatggaccagaaccgtgatggcttcatcgacaaagaggacttgagggacacctttgccgcgctgggccgcatcaatgtcaagaacgaggaactggaggccatggtgaaggaggcccccggacccatcaacttcacggtgttcctgaccatgtttggggagaagctgaagggcacggacccagaggagaccattctccacgccttcaaagtgttcgacactgaagggaaaggtttcgtcaaggccgatgtcatcaaagaaaaacttatgacccaggcagaccgcttcagtgaggaggaggtcaagcagatgtttgcagcntttcccccagatgtgtgcggcaacctggactacagaaacctgtgctacgtcatcactcacggtgaagagaaggattaggggatcacaagtctccccgacattcaggggcagcaaacactgttgtggggtgtgacagggagctcttgcagccagaggctgcaggaaaaaggcttcccttgtcctacggttggggacaaagcaagaataaataatgctaatgaggtctg

SEQ ID NO: 180523 - DNA, 582 bp, Homo sapiens
ggagtcatcaaaggctgagcatttgctggaccccaacagtactgcagtacaggtgagacaaaagccagtcctttaggtagcaccgtagaggttgtaatgttcgacatgtggttcaactcttttctctccagggaaaagctgagaagtgggttttcgtttttgttttatctgcttactctatgctggaccaggcagaggagttgtaatgagtgcctgcttgctgattcaaactgccacctttgttctctgtagccccaggtgtctggcataaggcaggtcccatcagcactctgagacaagtggaatagaagcttttcctttgggcagcacccagaaaagttgaaatattggatgtgtggttcaaatctgcccctcctcctgaagaaactgggagctaggagacatctctcaatcagatagtgctgtgctgggggtaggggttatagaagaggtttgcctccaattttcccaccagttttaatttggctggttttacacttccaaagggtgcaggagcctctaaactagttcctggaattttacaaagggaattaattcatttattgctgttgaatcaatgta

SEQ ID NO: 180524 - DNA, 519 bp, Homo sapiens
tgggaggtaggaggtaggaggtccaagaggcccttgtgcaaagtcagggcagaactgatgtcatgtctggctgggaatctgacatccaggctgcaggaaggctcagctcatgattgtcctaaagcagttagagctggcatgtgagatccgaggctggtggtaggaaaggccatgatgcccaacctcttctgatgtttggcttctctctatggtgtctgtactaagcttacatacctctggtgatgaggagctcactacagatgttccttaagttacttcctgataaactcatcgtcaatggaaaatattgtaagttgaatgtgctttttctgtttattttttgagacagagttttgccctgttgcccaggctggggtgcagtggtgcaatctcagttcactgcaacctccacctcccaggttcaagcaattttcatgtctcagcctcccgagtagctgggatcacaggcgtgcgccagtacgcccggctaatttttgtaattttttttttttttttagt

SEQ ID NO: 180525 - DNA, 482 bp, Homo sapiens
agcacccatggctgctaggagaggaggaaggacgtgcagggacccacaatgcagtgaaagagggatgctgtttcaggaaaaaagcaagatgttggtgagagcacgtggtggatcctgaagtctctcttggccaagttagaaacgagtggacttgccactgcttgtgttggaagagctggtggagacgatgagcagccatccttgggcttcattttcttctgcctcgaggcaccactcgaggtgaggggtcctggttttgcctggccgttcctccccatcgtctgtgtccactcccggcccacttcccactctgcgtttcctctctgcgtttcaaacgcagagaggaagatagaaaagagagcttagtgtggggaaaaaaggaaatgattaacatcacgagaaggcaccagagttgaaaataaggccacgattgaaagagggaaacttcctctgaaagagtcgctgtttgcttaggagagatg

SEQ ID NO: 180526 - DNA, 393 bp, Homo sapiens
ctgaggacccggtctgtttcctgcacttctgtatcaggttgctcggagtaataaattagaaaactgtgtgaaagtgcctattttagaatttggcattttctagtttgtgaccttggacaagttatgtaagctatcatttccacatttctctatcttatttcacaaggtgttgtaataaagattatttaagcaaatatatttttactaattatgaaaaggaatggccgggcacggtggctcacgcctgtaatcccagcactttgggaggccaaggcgggcagatcacgaggtcaggagatccagaccatcctggctaacacggtgaaaccccgtctctactaaaaatacaaaaaattagctgggtgtgatggcaggcacctgcagtcccagctg

SEQ ID NO: 180527 - DNA, 341 bp, Homo sapiens
ctctattctgtgtgtagtaaaatctccctctgctactctcttcagaacacttgtgattacactgggccctggataatgcaggataacctccccatctcaaagtccttaacttatcatatctgcaaagaccctttaacatatacggtaacgtaggttcagaaatgagcatctgatatatctatgggagacattttttagcctaccactctgggggtaaaacaatcttttttttttttttttttaagacacaaagtcttactatgttgcccaggctagattcaaattcttgggctcaagcaatcctcttacttcagcctccctaggagctgcgactaccacag

SEQ ID NO: 180528 - DNA, 1493 bp, Homo sapiens
tccccactgctcagcactaggccggcagaatctgagcgatgtcttccacactccctgccctgctctgcgtcgggctgtgtctgagtcagaggatcagcgcccagcagcagactctcccaaaaccgttcatctgggccgagccccatttcatggttccaaaggaaaagcaagtgaccatctgttgccagggaaattatggggctgttgaataccagctgcactttgaaggaagcctttttgccgtggacagaccaaaaccccctgagcggattaacaaagtcaaattctacatcccggacatgaactcccgcatggcagggcaatacagctgcatctatcgggttggggagctctggtcagagcccagcaacttgctggatctggtggtaacagaaatgtatgacacacccaccctctcggttcatcctggacccgaagtgatctcgggagagaaggtgaccttctactgccgtctagacactgcaacaagcatgttcttactgctcaaggagggaagatccagccacgtacagcgcggatacgggaaggtccaggcggagttccccctgggccctgtgaccacagcccaccgagggacataccgatgttttggctcctataacaaccatgcctggtctttccccagtgagccagtgaagctcctggtcacaggcgacattgagaacaccagccttgcacctgaagaccccacctttcctgcagacacttggggcacctaccttttaaccacagagacgggactccagaaagaccatgccctctgggatcacactgcccagaatctccttcggatgggcctggcctttctagtcctggtggctctagtgtggttcctggttgaagactggctcagcaggaagaggactagagagcgagccagcagagcttccacttgggaaggcaggagaaggctgaacacacagactctttgaagaatgaccatgagacacagtggccatgggtggatctgaaagctggtgttgagcctgggcggcgtgagctctgtgttggacccacggaggagggagtcactgcagggaaagagggacactggcattccatttgtcagagcatcccggacgatgcagagggtgggagaactacatgctaaatttctttttttttttttttgagcctgggcgacagagcgagactccatctcaaaaaaaaaaaaaaaaaaaaaaaccacataggctcagtcttttcagtatctgctttactggttcagtaaaagccaggaaacacaactttgtggtaatctgaatgttattgaactgtattttgttcactttattgtaaatactggtgaacagtgaataaatggttgtatattcctaataagaaaaaaaaaaaaaaagacccaaagtacagcgagctgatgccgatctcatttcgcagaggtccgcctgctctcccctctccaagagtgtaatcctctgcttaataaacttatgccgctttgctatatgtgt

SEQ ID NO: 180529 - DNA, 1442 bp, Homo sapiens
tccccactgctcagcactaggccggcagaatctgagcgatgtcttccacactccctgccctgctctgcgtcgggctgtgtctgagtcagaggatcagcgcccagcagcagactctcccaaaaccgttcatctgggccgagccccatttcatggttccaaaggaaaagcaagtgaccatctgttgccagggaaattatggggctgttgaataccagctgcactttgaaggaagcctttttgccgtggacagaccaaaaccccctgagcggattaacaaagtcaaattctacatcccggacatgaactcccgcatggcagggcaatacagctgcatctatcgggttggggagctctggtcagagcccagcaacttgctggatctggtggtaacagaaatgtatgacacacccaccctctcggttcatcctggacccgaagtgatctcgggagagaaggtgaccttctactgccgtctagacactgcaacaagcatgttcttactgctcaaggagggaagatccagccacgtacagcgcggatacgggaaggtccaggcggagttccccctgggccctgtgaccacagcccaccgagggacataccgatgttttggctcctataacaaccatgcctggtctttccccagtgagccagtgaagctcctggtcacaggcgacattgagaacaccagccttgcacctgaagaccccacctttcctgaccatgccctctgggatcacactgcccagaatctccttcggatgggcctggcctttctagtcctggtggctctagtgtggttcctggttgaagactggctcagcaggaagaggactagagagcgagccagcagagcttccacttgggaaggcaggagaaggctgaacacacagactctttgaagaatgaccatgagacacagtggccatgggtggatctgaaagctggtgttgagcctgggcggcgtgagctctgtgttggacccacggaggagggagtcactgcagggaaagagggacactggcattccatttgtcagagcatcccggacgatgcagagggtgggagaactacatgctaaatttctttttttttttttttgagcctgggcgacagagcgagactccatctcaaaaaaaaaaaaaaaaaaaaaaaccacataggctcagtcttttcagtatctgctttactggttcagtaaaagccaggaaacacaactttgtggtaatctgaatgttattgaactgtattttgttcactttattgtaaatactggtgaacagtgaataaatggttgtatattcctaataagaaaaaaaaaaaaaaagacccaaagtacagcgagctgatgccgatctcatttcgcagaggtccgcctgctctcccctctccaagagtgtaatcctctgcttaataaacttatgccgctttgctatatgtgt

SEQ ID NO: 180530 - DNA, 1157 bp, Homo sapiens
tccccactgctcagcactaggccggcagaatctgagcgatgtcttccacactccctgccctgctctgcgtcgggctgtgtctgagtcagaggatcagcgcccagcagcaaatgtatgacacacccaccctctcggttcatcctggacccgaagtgatctcgggagagaaggtgaccttctactgccgtctagacactgcaacaagcatgttcttactgctcaaggagggaagatccagccacgtacagcgcggatacgggaaggtccaggcggagttccccctgggccctgtgaccacagcccaccgagggacataccgatgttttggctcctataacaaccatgcctggtctttccccagtgagccagtgaagctcctggtcacaggcgacattgagaacaccagccttgcacctgaagaccccacctttcctgaccatgccctctgggatcacactgcccagaatctccttcggatgggcctggcctttctagtcctggtggctctagtgtggttcctggttgaagactggctcagcaggaagaggactagagagcgagccagcagagcttccacttgggaaggcaggagaaggctgaacacacagactctttgaagaatgaccatgagacacagtggccatgggtggatctgaaagctggtgttgagcctgggcggcgtgagctctgtgttggacccacggaggagggagtcactgcagggaaagagggacactggcattccatttgtcagagcatcccggacgatgcagagggtgggagaactacatgctaaatttctttttttttttttttgagcctgggcgacagagcgagactccatctcaaaaaaaaaaaaaaaaaaaaaaaccacataggctcagtcttttcagtatctgctttactggttcagtaaaagccaggaaacacaactttgtggtaatctgaatgttattgaactgtattttgttcactttattgtaaatactggtgaacagtgaataaatggttgtatattcctaataagaaaaaaaaaaaaaaagacccaaagtacagcgagctgatgccgatctcatttcgcagaggtccgcctgctctcccctctccaagagtgtaatcctctgcttaataaacttatgccgctttgctatatgtgt

SEQ ID NO: 180531 - DNA, 325 bp, Homo sapiens
agaacaccagccttgcacctgaagaccccacctttcctggtgagtaactggtccttctaagctcagacgagcgatcagagcctcccagtgacactaaaaacgtggcattcattcaaaatattcatcgaggccaggcgtggtggctcacgcctgtaatcccagcactttgggaggccgagatggtgcatcatttgaggtcaggagtttgagaccagcctggccaacatggcgaaaccctgtctctactaaaaatacaaaacttaggctgggcatcatggctcacacctgtaatcccaacacttcgggaggccaaggtggttggatc

SEQ ID NO: 180532 - DNA, 1208 bp, Homo sapiens
tccccactgctcagcactaggccggcagaatctgagcgatgtcttccacactccctgccctgctctgcgtcgggctgtgtctgagtcagaggatcagcgcccagcagcaaatgtatgacacacccaccctctcggttcatcctggacccgaagtgatctcgggagagaaggtgaccttctactgccgtctagacactgcaacaagcatgttcttactgctcaaggagggaagatccagccacgtacagcgcggatacgggaaggtccaggcggagttccccctgggccctgtgaccacagcccaccgagggacataccgatgttttggctcctataacaaccatgcctggtctttccccagtgagccagtgaagctcctggtcacaggcgacattgagaacaccagccttgcacctgaagaccccacctttcctgcagacacttggggcacctaccttttaaccacagagacgggactccagaaagaccatgccctctgggatcacactgcccagaatctccttcggatgggcctggcctttctagtcctggtggctctagtgtggttcctggttgaagactggctcagcaggaagaggactagagagcgagccagcagagcttccacttgggaaggcaggagaaggctgaacacacagactctttgaagaatgaccatgagacacagtggccatgggtggatctgaaagctggtgttgagcctgggcggcgtgagctctgtgttggacccacggaggagggagtcactgcagggaaagagggacactggcattccatttgtcagagcatcccggacgatgcagagggtgggagaactacatgctaaatttctttttttttttttttgagcctgggcgacagagcgagactccatctcaaaaaaaaaaaaaaaaaaaaaaaccacataggctcagtcttttcagtatctgctttactggttcagtaaaagccaggaaacacaactttgtggtaatctgaatgttattgaactgtattttgttcactttattgtaaatactggtgaacagtgaataaatggttgtatattcctaataagaaaaaaaaaaaaaaagacccaaagtacagcgagctgatgccgatctcatttcgcagaggtccgcctgctctcccctctccaagagtgtaatcctctgcttaataaacttatgccgctttgctatatgtgt

SEQ ID NO: 180533 - DNA, 1345 bp, Homo sapiens
tccccactgctcagcactaggccggcagaatctgagcgatgtcttccacactccctgccctgctctgcgtcgggctgtgtctgagtcagaggatcagcgcccagcagcagactctcccaaaaccgttcatctgggccgagccccatttcatggttccaaaggaaaagcaagtgaccatctgttgccagggaaattatggggctgttgaataccagctgcactttgaaggaagcctttttgccgtggacagaccaaaaccccctgagcggattaacaaagtcaaattctacatcccggacatgaactcccgcatggcagggcaatacagctgcatctatcgggttggggagctctggtcagagcccagcaacttgctggatctggtggtaacagaaatgtatgacacacccaccctctcggttcatcctggacccgaagtgatctcgggagagaaggtgaccttctactgccgtctagacactgcaacaagcatgttcttactgctcaaggagggaagatccagccacgtacagcgcggatacgggaaggtccaggcggagttccccctgggccctgtgaccacagcccaccgagggacataccgatgttttggctcctataacaaccatgcctggtctttccccagtgagccagtgaagctcctggtcacaggcgacattgagaacaccagccttgcacctgaagaccccacctttcctgcagacacttggggcacctaccttttaaccacagagacgggactccagaaagaccatgccctctgggatcacactgcccagaatctccttcggatgggcctggcctttctagtcctggtggctctagtgtggttcctggttgaagactggctcagcaggaagaggactagagagcgagccagcagagcttccacttgggaaggcaggagaaggctgaacacacagactctttgaagaatgaccatgagacacagtggccatgggtggatctgaaagctggtgttgagccctgggcgacagagcgagactccatctcaaaaaaaaaaaaaaaaaaaaaaaccacataggctcagtcttttcagtatctgctttactggttcagtaaaagccaggaaacacaactttgtggtaatctgaatgttattgaactgtattttgttcactttattgtaaatactggtgaacagtgaataaatggttgtatattcctaataagaaaaaaaaaaaaaaagacccaaagtacagcgagctgatgccgatctcatttcgcagaggtccgcctgctctcccctctccaagagtgtaatcctctgcttaataaacttatgccgctttgctatatgtgt

SEQ ID NO: 180534 - DNA, 547 bp, Homo sapiens
tcacttcactgtttgctttttggcctgaggcagagagtgcctcccatggcagctcgtacaggatgaaccaagaggcagcacccaggatatctgaattgcctaaagccactgcagtgatgtacacacatagcgaagctttatttctttacagccatagacttgttgaaaagctgaatcacatactttgcttgatatttgactttgtggttaccaattccaggtgagccaccttcgagaggggtaacatcctgttgtcggaaaggtgcagccgggcagcagggaacctgggttccactttagccctgacatagaaggttttggttcatgtccctttggtctggtaggcccctttttggtgcttgtttacggaactgatttatcttgtttataatgttggtagacgggtgtatataccaagacctctggtttactgaaggtagggccaagagctttccagcagtctgttgagtggagctacgggtcagtcagcacacctggcccagagcaccgtgagctggtgaacctacttgtcccaggtgttgtagtg

SEQ ID NO: 180535 - DNA, 255 bp, Homo sapiens
ggttaactaataggacatctgagaataggccagaagtgatgagacagaattctagggcacagccaggataagcgtacttatgcacagactgaaacaaggccatcttttccactgagcaggggcaggaaagaggtatggttgggtaagtcgctcttaggttgcaaagcagaagttgtgagctgatctcctccacccataccacacagttcgcaagaacccagtaccttgtatcgtcgatcgcgtattaacaggttc

SEQ ID NO: 180536 - DNA, 268 bp, Homo sapiens
ggtcttgaggaactcgcctggcccggggagaggtgtcggcgctcattgcagagacttatcttgttccctcccttcttctctgccgttgtagttttacaggggcaagtcctgtccaacgtgtacggtgaggccccggccactgctttaatgagcagtaggtgtagggacggaacaatttcgtgacctcgaatctcttgcacttctatacctctctgtctccgtgtccataacacttgctggtcacccttcaaaagtctccagtccctga

SEQ ID NO: 180537 - DNA, 624 bp, Homo sapiens
attgtcactattctaaaaatttcttcctattttttttgttaataatctgttctaaaataacgcttaggataaaattgaaacttttcatgtctatggtttccatactccatatttttactgatttgaaaattgtctatccacagcctttgacacttctttggtttcccttaatttttcagtgattatgaagaataatttcacgtccatcctttatattctttaaggccctgggatgtagtttccttggatctggaaatttgagctcaggtaaaattgccagctgggatctcgttactcttgagcccttcttcctaatctgtggcttttccccatatataatattaaagcaagaaagatatttaggtggactttaaggaagaaatttcaactttcctacaagtaaaatgttgagaacagcttgggagtaggctgggaaggctgtctccaaacttttgagttttcattgggactctctcagtacttgaggctggcgtgtgcatcagattgtcttccaagagtatttccagatctaagactctctaattttattggcaaagcatatcttttagttggaggcccaaatggtaatttttaagaacttcttggataaacatgttcttatca

SEQ ID NO: 180538 - DNA, 680 bp, Homo sapiens
gactaagacaaactaagtaatggctatgtgaacaacaaaagcaaatataaaacgtggaataagctggggtttaatttggagcactatgaccttgggtgtgatattgactccttctgagcttcaattttattctttgtaaaatggaatcaaatgatcgtgaaggtctgcctaagtgtatgtaaagtgcttagcatataaaatacatggcacttaaaaagtattagccaaatgatgatcatttccttaaacctctgtaaaattaactactaaatgctggtactttaagaaaaatcatgttggtgctttcagaaaaagcaaaataatggtaatttttatttgttagaaaaattaatgagcagatgtacttgagtcatttcctcccttcattctagggcttcagagaattccagatgatgaaagctacagcttacttcttactttttgcctgttgattttctatggccagaacaaaccagagcagtcatgagccacccctttgttagtgctttttatctgtctccttcttctagtctaaaatatactttctcataataatgcagaatgtaaccgcgattcacaatcctgtttagctgcttggccaagacattcaccttgcacataggagccagctctaagtcaccactgcttcttcacctcatgatctggctgagggcaaagca

SEQ ID NO: 180539 - DNA, 410 bp, Homo sapiens
tgtttactagatgccagacacttttctatgggcttatcttttcaatcctgttcaaaaccccatggtaggtatccttcctctactaaggatgactctggccataaaagttaaataacttacagaggtcacacagctagtacaagtccaacctgtgattcaaacttatcagtttggttccaaaatcattgctcttaactaccaaactataaagtaatggaaaatgttctctgtgcttgatactggatacagcaaagtgggagagatttatgttttgttgctaaacaagcatcaatttttactatttatagctgtaaagattacaacaacatcacacaaagctttcccctccatgtatcattggcttgggtcacccattagaaacatgagttctgccagtaactctggtgcat

SEQ ID NO: 180540 - DNA, 1039 bp, Homo sapiens
ggacagcagttttgttggaacacagccatgctcatttgtttagttattgtttagggttgttttcacactatggtggcagagctaagtagttgtaacagactctctgcaaagtctcaaatatttactttctggccctttgcagaaaaaaatttgctgacttctgctccagatacctgtgcagggcttccttttttttttttgagatggagtcttgctctctcgccaggctgaagtgcagttggcgaaatcttggctcactgcaaccttcgcctcccagattcactccttcctcagcctcccgagtagctgggactacaggtgtgcaccaccacgcccagctaatttttgtatttttagtagaggtggggtttcattcaccatgttggccgggatggtctcaatctcttcacctcatgatctgtccacctcagcctcccaaagtgctgggattacaggcgtgagccactgcgcccagcagcttcatttaattgaattgtacaaaaacagttatgttcagttgcaggtttttattttatttggtcaaaatactgaaatatgcttactttatccggacttaacaccgtcaaaaaatgttaatcacttttacgtgcagcacccacagcacatgaaaactggcagttaattgattagaaggagctgggtggcaggatgtggatctggactgtctggcttcaaaccttgctctgcatagatttggtgaccgaaacgttttgtgacctctgtgccttgctttccgtacctgtaaaatgggagtaataataaaatctcccacataaggctgttgtagggtgaaaccaaataaagaatgcagcaagtaaacagtaagtatgagtcattattaccatgcaggtgtgtaagtgcttcccatatttccgagttattttccaaaaattccactgtaaacttgtttattggaaattaagtcttcatttccgctgaatgtagtagttgtacaaattatattttgaaatgttcttggaatgtgggctggacttactgcattataaagatggaaata

SEQ ID NO: 180541 - DNA, 1093 bp, Homo sapiens
ggacagcagttttgttggaacacagccatgctcatttgtttagttattgtttagggttgttttcacactatggtggcagagctaagtagttgtaacagactctctgcaaagtctcaaatatttactttctggccctttgcagaaaaaaatttgctgacttctgctccagatacctgtgcagggcttccttttttttttttgagatggagtcttgctctctcgccaggctgaagtgcagttggcgaaatcttggctcactgcaaccttcgcctcccagattcactccttcctcagcctcccgagtagctgggactacaggtgtgcaccaccacgcccagctaatttttgtatttttagtagaggtggggtttcattcaccatgttggccgggatggtctcaatctcttcacctcatgatctgtccacctcagcctcccaaagtgctgggattacaggcgtgagccactgcgcccagcagcttcatttaattgaattgtacaaaaacagttatgttcagttgcaggtttttattttatttggtcaaaatactgaaatatgcttactttatccggacttaacaccgtcaaaaaatgttaatcacttttacgtgcagcacccacagcacatgaaaactggcagttaattgattagaaggagctgggtggcaggatgtggatctggactgtctggcttcaaaccttgctctgcatagatttggtgaccgaaacgttttgtgacctctgtgccttgctttccgtacctgtaaaatgggagtaataataaaatctcccacataaggctgttgtagggtgaaaccaaataaagaatgcagcaagtaaacagtaagtatgagtcattattaccatgcaggtgtgtaagtgcttcccatatttccgagttattttccaaaaattccactgtaaacttgtttattggaaattaaaatgcattttgccacagaaaccgttataaatggagtattgacaagcccatagaagtcttcatttccgctgaatgtagtagttgtacaaattatattttgaaatgttcttggaatgtgggctggacttactgcattataaagatggaaata

SEQ ID NO: 180542 - DNA, 527 bp, Homo sapiens
ctctagagtatccccacgttgacacttcagtctccttccagaatgttatctccttgaaaaggccttttgtcttgttcagtgcctatccacaccacctagaacgaggtgcacactatttgcagtgcacactattttgaaaggatgaatgaaattgaccctctctaaccccataactagatatgaatttagagccaaatgtattatggggtttcttcccaccggttttgttctcatccctatcacataagaagactgaagtgttagaacatcttgtaaaaattaaccacagctgtgagccatttaaaacactctacgcagtgagttaggaaatgcccattgattgttggtttgttaggtaaatgggagagcaccacactcagtgcacaccgggtctcctgtgtgccaagcatgcacggcaggccctggcgatcagaggaggggcagggagtggggcctccttctaggatcttcacactgccttgctgttgaccccctggttgtggtggcatcccgcagcaaacccagga

SEQ ID NO: 180543 - DNA, 459 bp, Homo sapiens
gcaatggcatggccatagttcattgcagcctcacactcctgggctcaagtgattctcccacctcagccttgggagtagctgggactacaggtgcatgccaccatgcctggctaatatatttttagtttttgtagagacggggtttcactttgttgcccaggttggtcttgaagtcctgggcttgagcaatcctctcaccttgccttccaaagtgctgggattacaggcatgagccatcgcgcccaatctatactcatatctataaagttttccaacttcacttttatcatgaacatctcttctgtcataaatttatgcttacaccataatttttacgtactacatggtattacattatgaatttaatgaaaccttgacctttagggttttttgaagtgtttactgttttatgagatgtttaatgaaacattaacctcacatgcagatacagattgagag

SEQ ID NO: 180544 - DNA, 403 bp, Homo sapiens
ctacagtgagcagtgtaggtcaaggcgacactgaactccatcctgggcaacagactgaaactcttgtttcaaaaaaaattaaattaaataaaaaagaaaaagaagaataaagtaggaagactcatacttctcaatctcatcaagaaagaaagtgaaaagacaacccacaggagaaaaattttgcaaacaatatctgataacagattgcatcaaacatatattaatatgaagaactattacaactcgagtattagtaaactaaataaaaagacaacctaattattaaaaactgggcaaatgggctgaatagacatttctctcttttactttatttctttctttcttttgagacagtcttactctagcctgggggacagagtgagaccttgtctctaaaagatta

SEQ ID NO: 180545 - DNA, 370 bp, Homo sapiens
tcttttccctcaagaggtttgtattttacgtattcctttgtagatgtagcttcacctttggattacttaggcttctgttttgtaaatttgacttccatattcatgtatttctctctgaattgtttttgcttgcctttcttcctgaagaaggcttacagtttagctgaaaggaatcaccatcactcttctgaaggtttccttaactctgcttcatcttaacccctttcccagtaccttatcctctctccagaaaaagtcatttcactttctctaatgagctcttggaacacagatttggtaaatatattaatcattctatgctctaatgtatttgcttatgtgtctaccctctaagctttactcaggttac

SEQ ID NO: 180546 - DNA, 238 bp, Homo sapiens
ggagagttcggaggatagaagtcatcagagcacaatgaagccagaccctgcagccgccttccccttcgggggcttccttagaatgcagcattgcggggactgagctgtcccaggtgaaggggggccgtcacggtgtgtggacgcccctcggctcagccctctaagagactcggcagccaggatgggctcaaggcatgagccctcaaaggaggttaggaaggagcgagggagaaaagat

SEQ ID NO: 180547 - DNA, 229 bp, Homo sapiens
cagcatcctggggtcaccaccaaccataggaaagcaataacaagtaaaatgtgggcctctttgatgagaacttcatggtccacagaggatacatgggcataaggggatggaggcagaatgttctcagtaccacgagaaacacatgagcacagtgttccaagggtttgaatggagacagacactggtgtcctgcagggaagacttcgggaggtgatgttggataggacct

SEQ ID NO: 180548 - DNA, 727 bp, Homo sapiens
ccccgaacatgtcgcggctgtttctattgcaaaagaaagccaacattcacctcctttactttttcctaagagcaaattctattgaccaaaattcactaaaaactggaaattaaaactgcaatttttaaaaatttattacatacgaacatctcaagcccagtcaatgtaccccccgctaactggctgggcacagtggctcatgcctgtaatccagcactttggcaggctgaggcagatggatcatttgaggtcaggagtttgagaccagcctggtcaacgtggtgaaaccctgtctctattaaaaatacaaaaattagctgggtgtggttgcacacactagtcccagcctacctgggaggcaggaggattgcttgagcccaggaggcggaggttgtagtgagctgagattatgccactgcacttagcccgggcaacagagtatagatttcataataaagattcctcagactgtgcaaaacaaaatgtagatttttaactcttctcagttagtactctttctccttgaggaaaccaagtgggagaagacatagagacaaataatattcagaattaataaaggtgtagcactaagtcgattgtttcctgtacttaaatggttatataataggaaaaagacatatgttcatataaactctcagggatttatttttaaagagcaatctcttctgtgtgacctgtgatcagtagacgttaaactcaatctctt

SEQ ID NO: 180549 - DNA, 133 bp, Homo sapiens
tcgtgtctatagtccataaatatatgaggtagagaactgccgggttaaaaataaaataataccatgactcttgttattgctgcaactcttccaaaacttcctgccacacacacacacattcacactggattca

SEQ ID NO: 180550 - DNA, 647 bp, Homo sapiens
ttttgctagtatccattttggtgatacctgtgagtgtcttggtgacctaagctgcaggagcatgtgcaatttgtttttctgctcaggattgggggctgggggagaaggtggcggtgtcaggaagctgcatgactatctagtgaatgtgttactgagtcacaggggttggttcaccagtttgagatgggactcctctggaaacactcgcctggctgtggattactggggctgctctgcaggtttgagatggggatcacctagaaacaccaggcccagttggtgagcacactgatggcacaataaatcagtaatcagtccacagttagagtgttgcagtcactaggatgtggaaggcaaacctctttgagagtttgtttctaggatatagacagcagcagctgctttcctggagaaggctgttgtaatgacagggtagcctctgggatggaaggaggcagtgaccactagttcatggagcagaatatactcagctatggcttggctttctagatggtgctatatgtggactccttctctggggcagtatagccttgtgggcatcaagcagcttcctaaactaggctgctagagatggggtttcaccgtgttggtcaggctggtctcaaactcctgacctctggtgatct

SEQ ID NO: 180551 - DNA, 324 bp, Homo sapiens
tggtgctaggctgtagaccacacttagcaaggcagtagaggatgtttgttcttcaataaatggggtctgtctaaagagcctactagagaccagaaggatttggccagagttttgcagtaaggcagaatgtggtttggtgaaagaaagggccttaagggacaaaatgagcagcctgcctacagatgcagagatcatagggtttatgatattttggggggacaggagacctgtttgtggggatacgttagtgagtccctgagtcttttgaacctaaaaaaaatgtagcagtcaacttctcataatttttcatctttgcaaaatgtt

SEQ ID NO: 180552 - DNA, 336 bp, Homo sapiens
ggattgacaacagtatatgcaaatacttcaaatatatacgtatcacaagtttgtgcttgtgactgagaatctaaaatggcctccagtgatccctgcctgtctccaggcattcatgcccttgtgtaattgcctcccctagaaggtaggcaagacctgtgacttgcttctagtcaatagaagatggtaaaggtgatgaccatctctcctatgtttacattatataggacagcaacttccatctcactatcagactcgattgcctctctctccctttatggctttgatgaagtgagtgatcatacagagaggcccacgtggcaagcaactgagggtggt

SEQ ID NO: 180553 - DNA, 281 bp, Homo sapiens
gactggaaatcctatgatctgcttgaaattccatccagagatacggtggaaggtggggaacaatccacaaagcaaatttacttggagaggggtgagaaagaaataataaagttactttctgctcctcttcatagaaagtctagcttgtggccgggcacagtgctcatgcctataatcccagcactttgagaggccgaggcaggcagatcacctgagaggtcagaagttcgagactagcatggccaacatggtgaaacctcgtctctactaaaaatacaaaa

SEQ ID NO: 180554 - DNA, 352 bp, Homo sapiens
tagaaatgcctactaaaaataaataatgtaagtactaaagttgccttatatgtttaaactgtatatttagaaatcacagcattttcaaacttatgggtcttggcagttattggttcattttactctctttaggatttctttttcctaattgatgttaattagttgatataaatgaaaattttgagtcaggaaatcaattcaaataggtgtgaataaattaaaaaaaaaaaaagaaagaaaagaaaacttgactcggccgggctgatcttgaactcctgacctcaagtgatccacccacctcggcctcccgaagtgctgggattacaggtgtgagccaccgcacccggccaca

SEQ ID NO: 180555 - DNA, 203 bp, Homo sapiens
cgctagcagtgggccctgggcagctcagccctctcacctcaccctgggaacttctcagcatcaaatggggtcacatcactgaaagcatcagacatacagtaagtgcccagtgaactttcacttccctcctttcccttgaggaaggtcctccgtggcagtgacggtgtgggaccagagggtacagaactgggcagggctgagaa

SEQ ID NO: 180556 - DNA, 508 bp, Homo sapiens
caggaagatagcttgaggccaggagtttgagaccagcctggtcaacatagtgagaccccatctctacaaaacctaaaacaaaaaatttagctgagcacggtggtgccacctgtactcccagctacttgagaggataaggtaggaggatcgctcgagcctaggagttagaggctgcagtgagctatgatcacaccactgcgcccagtctgatagttttctaaatcatgaataggtggtaaactttgtcaaattttttgcttttgttgagataaatcatatggttgtatccttaattctgtgatgtggtgaattacattgattgatttttaaatgttaaaccaactttatactcctaggataaacgttactttgtcataatgtattgtcccttttatgtaccattagattcaatttgttaatattctctttagaatttttacatctattcatgaaagatattggcctgtaatagtcctttattataatatttttgtcagattttgttatc

SEQ ID NO: 180557 - DNA, 420 bp, Homo sapiens
tatagagagagggccttgctctgttgcccagactggccttgaactcctggctcaaatgatattcccacctcggcctcccaaagtgctgggattacaggtgtgagccactgcgcccagtctgatagttttctaaatcatgaataggtggtaaactttgtcaaattttttgcttttgttgagataaatcatatggttgtatccttaattctgtgatgtggtgaattacattgattgatttttaaatgttaaaccaactttatactcctaggataaacgttactttgtcataatgtattgtcccttttatgtaccattagattcaatttgttaatattctctttagaatttttacatctattcatgaaagatattggcctgtaatagtcctttattataatatttttgtcagattttgttatc

SEQ ID NO: 180558 - DNA, 272 bp, Homo sapiens
gattagtgaaagtatagtgtatggataaggcaggttctaccctgtcagacctcaactgcaattcagttctgaaactcttgttttaaaggaatatctacaaacaggagcccgtgctcaggagaccagtaatgctgatatgaaggctataacattcatgacattttaggaatggttgagtatctgaaccattttaacctaaaaaagaagacttaaaggagaatataataatgactttcagatacttaggtgactgacatatgaaagagggactc

SEQ ID NO: 180559 - DNA, 504 bp, Homo sapiens
tctagggtgtctagattgtgaccaaaaccggtgaagcctttgtgttttctgatgctgttttaaagcttattataattttcccttctatggggaaagattctgtgctgttttctcttaaagtgaaatgtatgttgttgtgtgtttttaaatagatgtagtttattttacagtccaaacctgttgtttcatctattcccataagatccacaggcagcatccttctccatttggatggggacagtgaggtttatataccttgattggtaagcctgtgtctgatgttttaagtgccttatcccttaaattgtaaactctacaggacttagaccatgtgtgtcttgttcactgtattgttaacagctggcagatagtaaagatttttttttttttttttttttttttaaataagagtgattaaatcagtttgttttgtgatgcttgtgtgaagagaagtgattagtgtaaactggctttgctttagggttttcattctctaaattcttg

SEQ ID NO: 180560 - DNA, 507 bp, Homo sapiens
tcagattcttgaactccatcccaggaaatgctgattcagcaggtttgaaataggacccaaggatgcagtttataaataggacccaagaatacagatctgtggatctcacccattagaattcacattcagctctccgggtgattctaatgggtaagatccacagacaatactaggagagacatcatcttcaattaaaacaactaaataatgactaagcaaataaatcaatcataaaataaattttaaaaataaaaaataaaaattatttatatgtatatgagtctgttaaaatttccacttgctctccagattctgagcactgcaatgtgaggttttgacaatcaaatttagtaccatacttgataatttatattaaataatgctcggtggctctttcatcatccagcgagtagttcaaggctaaatgttgtgtttactatcagtaacttaccttagctgaggttttcagatatggttacctccttattatcttttacccccttagct

SEQ ID NO: 180561 - DNA, 717 bp, Homo sapiens
gcttatggagaatacaaaacagggaggtaagagaagggcagggaaaatagcatgggggatcctgcagggtgcaggagagaggtgagggcagctcggctgagggtggtatggcgatcagcttcaggacatgcttgaccatagaacctataggacttgccgatggagtggctgtggagcataagcgaaagggaagaagcgagcttcatctgggtagatcagtgactggtagtgcccttcatcacagtgggaaacgatggggcaaaacaggctgcagcacagaaccacagtcctggttggtatctgtttcctctggaatggatgcccagtagccctcccagaagagagactgagtgggccactgggactcggtggaaaggctgcagctaaagacatcagtgagtcacccacaaaggggtggaaacaagccacggctctgcttcgatgtggtcttctctgagggcagtgggctggatgaaaccacctatttcttctcaaagaatctggttctcaaagtgaaccaaattttggtagattagaggcccaatgtttggagtcaagctaacctaggtctgaattttctctctaccacctacttgctagttatgagaccacaggcaattcacaataaccctcttgagcctcccttgcctctgagttaaaatggggagagaacccttatttcccaaggtgacagtcaatactgttaattccctccca

SEQ ID NO: 180562 - DNA, 706 bp, Homo sapiens
cagaagcctataaattataacaatatataatgaaatgaaaaagtaaaaagaagattgaatgatgaatctgggaaaatcttgttaggaagaaaattggaaatacagaatatctgtagatttcattaggaaaatttaagcatgtgtatttttaagtatgtactatttcgaaccaacaagggtggagaagattggaatacagaactatttatcattccagcaaaacaaagaaagaaggaaggtatgataaacaataaaattgtaaaactaaatatataaacatatgtatgcagcctatgtatattttcacctgttaaaagaggaaaattgttagatggggggaaaaataaacattttatactttaaagagatattattaaacaccaaacaagcttaaaagtttatttagtaaaactacaccatgcgactactaaaccgtacaaaatgttgtagtaccattaacatagaacaaagtgaatttaagatggaaggtatcaattggaataaaaaaaaagggacactacctaataattaaaaagaataatccatagaagaaactataacaagtatgaacttacatacatctaaaatagtctcaaaatgtaaaggcaaaagaaaaaaaaaacctctgccaaaattataaggaaaaatggacaaacccatacagtgcttcaatgtaccattgtagtggagtacccacctgttataa

SEQ ID NO: 180563 - DNA, 276 bp, Homo sapiens
atttcctggaaggtcgtggcaaatccctcttaccgctgtttgctgggggtcagggcaggaaggttcctgtcgggctgctcaattctgaccagtgaattttccagatatcaagtgtcagtcctctgagcccaagctaagccatcatatcccctgtgacctgcatgtacacatccagatggccggttcctgccttaactgatgacattccaccacaaaagaagtgaaaatggcctgttcctgccttaactgatgacattgtcttgtgaaattccttct

SEQ ID NO: 180564 - DNA, 539 bp, Homo sapiens
gcggcccccagcgcagtgccctgctgcaggcctgggggggccagcccgaggcgctgtctgagctcacccagtccccaccaggcgatgacctcgccccccaggacctgaccggaaagagccgggactcggcctccgctgctggagccccctcctctcaggatctcagccccccagacgtaaaggaagaggctggctgggtccctgagaggcccgggcccgcagaggaggaggaggagctggaggagggcgagggcgagagggcgggggtcccgggccggtcgccgcggggccgcgcccaccgccgccacccccaggagcgctggcggctggagtacctcatggagttggacggcggccggcgcggcctggtgtgcggggtgtgcgggggcgcgctggcctcgctcaagatgagcaccatcgagcgccacatccgccggcgccacccgggctccacgcgcctcggcgggcctgtccaggccctcatcgcccgggagtggagcgagaaggccgcccacctgctggccctggggccgccccgc

SEQ ID NO: 180565 - DNA, 383 bp, Homo sapiens
tgtcctatattgtctgattaatattgaaactcctttgcctttttatattattgaatctttaagctcttttctatatttgtgttatatatcttgaaaggggcaagtagtggtattggctttaatagaatctcaaacaatttgcttttgtaataaagtagcttctaccacttaaatatattgtcaaaccagctatacttgccatattttccactcctttgatttttcatttatcaactatcttgcttttttattgataaaataaaaattttatcaattaccaacttcatgatttttaaatatatatttgagcttcccttaactttatgtgaatacaaagaatatacatcatactttttgctttgtagaaacgtatttcaaaaagg

SEQ ID NO: 180566 - DNA, 467 bp, Homo sapiens
acaaaaggccaaacagggtgtgatcccatttctatgaaatgtccaggacaggcccatccagagacaggaggggatacgtggttgggaggaggaggaaatggggcagtgactgctgatgggaaaagggtttctttttaggggcatgagatgagatagggatagttgcacaatgctgagaaccagcgatgtgtatgctttaaatgcgtgacttgtatggtatgcaaatgagatctcaataaaactgttaaaaaaaaaaaaaaggctgggtgcggtggctcacccctgtaatccccagcactttgggaggccgaggagggtggatcatgaggtcaggacgatcgggaccatcctggctaacatggtgaaaccccatctctactaaaaaaacacaaaaaaattagctgggcatggtggcgggagcctgtagtcctagttacttaggaggctgaggcaggagaatggcgtga

SEQ ID NO: 180567 - DNA, 915 bp, Homo sapiens
aagaggccattaaggctctgaggcctcactggacttgctgggggttttggggctggtaaggggcagagtcagaactggaatcagtttggagtttagtgcatcttgcccaattacatataaactctcataacaggattagtcaatagaggaacctgcaagtattaaagagaaaaaagtgttttgaattgtgtatttatttgatatttagcatgcatttacatacaaagttgtcatcactccttacctacaattcctttctttgttttgttttgttttgtttttgagacagagtctcactccagcctgggcgacagagtgagattccatctccaaaaaaaaaaaaagaaaaaaaaaggaaaggttctggttgtggatgtacagtttctcctaagaaagaagcgagggggtggaatttgggaagcacttctggaatcggattaacccaggctcttatggaatttttccatctggctcggtaagttggatataaagcaaaattaagaggtctagttttccctatagaacttttaatatgtcaaaagctatatgggtctaaattccagtacttaagcaaatactgagtagtgtttaaattcagaaatagagttctattatgaaccccttgagaatgattttctctgaatcattatcagggaactattccacattgccatggccatataagtggggaaaagtaataccggattggtcctttcctggtctagttactcaggaggaaacacgtgtcatggggaaggcaactccctaatgaacttaacgcagtggctcactatacaggcagagaagctctgcctggacggatccaaaatctgcggcggactcgaaagggaccgcatcaccgaatgggacactacggcacactgggggccgcgcaaagcgggaaaaggagggcag

SEQ ID NO: 180568 - DNA, 284 bp, Homo sapiens
cctaatcaataatcccagtgtgaggctgccatgctgaccactcagaacaaaacaagcgagctaaattcatccactgaagaatgggtcaacaaaatgtggtatatccatgcaatggaatattattcagccattaaaaggaatgaagtactggtacatgctacaatagggataaatctcaaaaaataatactattataagtgaaagaacccagtcacagaaggccacgtatagtgtgagtccatttatatgaaatactcagaataggccaatccataaagacagaa

SEQ ID NO: 180569 - DNA, 191 bp, Homo sapiens
tgatttgaatcagggccacctaaagcaaaaattttctacataccttcctcctcttaatctattccatgaactcactgctccacagatggtaaaggtctgctgtttataagtggtcttgtgaaaaaattattaagtgatttcatgggtcactcccattccatctgatttaggaaataatattttggtttcca

SEQ ID NO: 180570 - DNA, 390 bp, Homo sapiens
gaggacttgggttcgagtccctgatccacagcttgccgactggggaccgtggattcactactgtacagctccaagctctttccctcatctgtcaaatgaggatggggattctcagtagcagtgccaaggatggcctgggaggttttgctcccccataatcttctttggcatctgctgccattctctgatgtggccaagtgacattttctcagtttaatgaaaagtattagacaaaagcagctttcaccaggcctttggccctggtgtcaaccagatggctgtccctaaaccaagcccacagagaaattatggagctgctgctggaagtggcacccacctcacagagctgtcacgatggctcagcgagatgctgcaggtagagtcttcact

SEQ ID NO: 180571 - DNA, 539 bp, Homo sapiens
ttctgccgggagcagatgactgtggtgcactctctcatacctcttggcatttccctttccagtattaagtactaagaaacagagaaaaactttttaaaattgcatttctcctcttctgctcccctgatgttaactacctgctttctacaggctttcctgagggtttttgatgaattcttcccctgaccttggcaagcgtctctctactgccatcctctagtcctgcaacaaaggctgtgtgatctcagagccattcacaggcaggctctgctcctgtttgcactggtcttttaactgctcttaataaagacttgagggaaatatatgaaaatatcataaaattattgaatagaatattaagaagaaatcatttcaaaacagtgaacggaaatataatggtaactcattatttccatgtttgctaatcagaatgtttataaatagatacaagtataaaagagcttcttattttcccacttttcttcttgtttattcacttatcagaaaacttggttagctaatagaaaaatatacaggtt

SEQ ID NO: 180572 - DNA, 312 bp, Homo sapiens
tggaaatcaagaggcatgaaacactgataatgttgtgatacagatgaagctcaaaaaggttaaaagtgaaataaaccattcacaaaagaccacatattgcatgattccattagataaaatgttcagattgggcaactctatagacaaagtgggtcagtggttggtagaggctgggggcaggaggagactagggagtaactgctaatggtaaggggtttctttttgggtgatgaaaatgttctgaaattagattgtgacaatggtgatgtattagtctgttttcatgctgctgataaagacatacccgagact

SEQ ID NO: 180573 - DNA, 325 bp, Homo sapiens
ccaacccaacctggtatctaacaaatgcttctccttctagttcaaagcaaggctatgacgtcacagaatgaaccccaacctcaatgtctgcactaagggaagggtagagcagctttctctatggggccacattttcagtaacttagtcccgtacttagaatcttatactccgccttctaataggtcttcacagcagctctagaaatctcaggcttcttttttaccactatattagggtacctttggttgaacgttcccaaaaccccttgagaaaatttaaggaaaatatgaacacacccccttttcatttgttgtaagtacaccg

SEQ ID NO: 180574 - DNA, 292 bp, Homo sapiens
gtactacttactgagtagcccctgaactttcagaaacaggatcagaaaggctgaaaaccaataaaaaaatgagcatcttaaaacgtgcttagtaatactcactagaagcttcaagtatgtttcattatccatttttggctggttagtctgcacaagtcactaacaatgtcgttctgcttctccaaagatcctggactccaggaactgctatcacgtcttttttttttttttttttttttgagatggaatcttgctttgacgcccaggctggagtgcagtggtgtgatcttgg

SEQ ID NO: 180575 - DNA, 501 bp, Homo sapiens
taccccactcctcctcctcactccagtgtcctcaacacccgccaagctcccacctcaggccccattccttccatgtggaatgctcttctctcaggaaaatgcccacattcctttcctccttcaagacttaacccactggccaacatggtgaaacctcatctctactaaaaatacaaaaattagctgggcatggtggcgcatgcttgtaatcccagctacacgggaggctgaggcaggagaatcacttgaacccaggaggtggaggttgcagtgaggagcaggttgcagtgaggaggttgcagtgaggaggaggttgcagtgaggagggggttgcagtgaggaggaggttgcagtgaggaggaggttgcagtgagccgagattgtgtccccggactccagcctgcacaatagagcaagactattgttcacaaaaaaaacatgttgtagaaaacaaaacacttaatttcctcttgattggatttcctggatctggcttctctg

SEQ ID NO: 180576 - DNA, 551 bp, Homo sapiens
ccaagagctattatcagtattttctaaaatgcaacctcttcttgcatgtctctgaagatatgaattacacttactgtaattacatttgtttcttttcttaattctgattctctgaaattacttattctgtttgctaagttttgtatcttctttcttgtttttcttaaaagttgggtgacaatattttacatgggtagtttttctgttaatcatagcttatctccaatgattaggaaaataacaactatgaagtaggacaaagtaacctggtttcttgtgttttagcattgctgctccctgttccttcctggttttgttaattacctgagactctgccctgttgatgttagtcagattctaagactcaccttgccaagcaagcactgctttgttattccaaagtgaagttcattcttactttgtctggaaagcagtctctgcatcttttaccttattatttccctcctttcatattatgtttcttcctttaccaattttaatggagcttccccttttttgtctctaagatctccttctctatctcaaaaaca

SEQ ID NO: 180577 - DNA, 405 bp, Homo sapiens
gagctgcagctggcccatctgaaaggctcttgtctactttggagatacgcgtgtctgttactgccatcccacagagccctgtgtgcgcccgcagacgcgactgcacatgcaggctctaaggacagggagcctttgttcactgcatccctcctgcccatgaaagcaagtgtgtttggagcttgacagtgtacgaagcacattcacacttatcaggacatcccatccaccctggcgacagaggcagttggcgggacttatgtgacctgcctgaggtcacatggtcttgatttatggtcttgagccatgtgctatcatgacatgtcctttccaaggcagagtgatgggtccagccctccctgctggggatggcttctctggctgtcacctttcacgtggatgctgcta

SEQ ID NO: 180578 - DNA, 373 bp, Homo sapiens
ggagacggtcttgctctgtcgcccaggctggagtgcagtggcgcgatcttggctcactgcaacctccgcttcccgggttcaagcagttctctgcctcagcctcctgagtagctgggattacaagcacataccaccatgcccggctaactttcgtatttttagtagagacggggtttcaccgtcttggccaggctggccttgaactcttgaccttgtgatccacccgccttggcctcccaaagtgctgggattacaggcgtcaaccaccgcgcccaactgaacactgtctttataaaaacacagtcctttcagatgtcgggacttattaataattaaatatattcaaatttatttgcaacaaaaaattaccttt

SEQ ID NO: 180579 - DNA, 227 bp, Homo sapiens
aacagttagacttccagatccttatctctataccccacctccccctctgcagaagagatagattcccttagggaggaagaaaactagagaaaataaagacactagggggagagtgtgatgtcagcaagatagtggaataaaagatacctggcatcactcttcccacaaaaatgcaactagaaattattcaggctgggcgcggtggctcactcctgtaatcccagcat

SEQ ID NO: 180580 - DNA, 296 bp, Homo sapiens
gcactgtggacaatgtagccccttccttcaagagcatgagtacacacaaacaagacaactctaagctgtaagaaccccattcaccgtgatgaagagataaaacaaacaaaaaactggaaaaagataaaaagagaggggggaaaaaagagtggttgagactatgaatgaacatgtgaaatctgacacattctagctggatgtagaggcaatatgctgatgggagttttctataggacaaacagaatctgctctcaaagttcttacaatttctagagctatctttggccaagagttgg

SEQ ID NO: 180581 - DNA, 213 bp, Homo sapiens
tcctttaactgttatggcctcctaattgattttcctgtctccattctttcctagcttgagtccgatactcacactgccatcttcctaatgaataaattaaatataattatatcattcccatgtctttttagcagttcctggctgtctgtaagagaaagtaccaactcctcagcaaggtataaatgcctcttcataaatgtgacctcaacttaa

SEQ ID NO: 180582 - DNA, 708 bp, Homo sapiens
gtaagttgtctaatttctctgccttcctttccttgtgtatagaaccatgatcactgtagggctttgtggaatgatgtgaagtgcacagcaggtcctcaaccaattgaaacagccatgacagtaacaataactatgaaaataaagatgcgaatgtacccagcattatgtttgataggtgattagcttgtacacacacacacgcacatacatatacatgcatgcacacatacaaccaatgttagtctccctctccactccccaaaatggattttggatttgaagaggcagcatttgggccaatattatctctctccaattaatgctgactgtcatggcattttaagaccaatctctggccgggcacggtggctcacacctgtaatcccagcactttggcctatatttttaataatatatattataaaagtgtaatgaaaaggatacaattgaatcagtatagcacccaaagtttctttctagaggtctgagattcaaggtaggacaaaaagctctggagagtccctcctatgttccattatctttaatccaaagagctcagatacctctattgctatttcctctggcactgcagggaagttccaatccacctggtccgcactagttgggcccagggagtatcggtctgggcttgattgttggtcagtggattgcacttttatgaagcaatacaaaataagggacagatca

SEQ ID NO: 180583 - DNA, 593 bp, Homo sapiens
cagggcacctcaaacagtttaggaatgaataccccgactggatctcacagctctaaacattacctacgtgtttctccaagtggctaacccaaacctctctccaggactacaagtttgtatacagtagtttatccttatccatggttttggttacccaaggtcaaccatggtccaaaaatagtaaatggaaaattccagaaacaattaagttatcaattgcaccccatttgtagaagtgtgatgaaatctctgctccatcccatgcaggatgagaatcattcctttgtccagggcatccacgctgtctaggcttcccaatgtgttagtcactcagtagctcagtagctatctctagggatcagctctattgttacggtgcttgtgttaaggtaacccttattttacttaataatggccctaaagcgcaagagtagtgatgctggccaattcacatatgccaaagagaagccttatagtgtttccttcaagtgaaaagatcaaagttctcgactttataaacaaaaaacatcggccaggtatggtggctcatgccttaatcccagcactttggaatgctggggcaggtggatcac

SEQ ID NO: 180584 - DNA, 171 bp, Homo sapiens
acccctgcactccagccgaggggacagagtgagaccctgtttcaaaaacaaaacacaacaaaacaaaacaaagaatacagacattttcagatgtgcaaagtcaggaaacccttggtgaaggtgtcaccaaaataagggtatcaaactaagaaagctgctgccgtggaatcc

SEQ ID NO: 180585 - DNA, 301 bp, Homo sapiens
cctccatgaacagtgccaatgtaagtgatggtaaagtcagcatgtctagcagcatatatttccactcttagaaaaaagaaaaaaatatctcttcctctcctgaaactggggctgcacactcaagaagatcttgaagtccccaacctcactgattaacagcagtgtattaattagtgtcttaaaaccatggacgaggtgaaaagcttagacacagtctgaacttggtttaaagttggcacatccagtattttactttttgcttgttgttggtttttaatcacaggtgagtgccactgatggg

SEQ ID NO: 180586 - DNA, 255 bp, Homo sapiens
gtagtacccaaacacacatgtcctctaccaactccctggggtgggcttcttctcaagaatagtgcagagaaagagggagggaccctgtgaaacagttaagttaggagagggtagtacccaaacacacatgtcctttaccaactccctggggtgggcttcttctcaagaatagtgcagagaaagagggagggaccctgtgaaacagttaagttaggagaggcgtcctcctgccgtgtgacttgggtcagcttgtta
